United States Patent Application Publication US 2007/0067865 A1 - sequence listing, part 51

SEQ ID NO: 311975 - DNA, 259 bp, Zea mays
atgagcaatccatagcatcaaatatagtacgcattgtggttgttgggaattcagtgcatatttcaccaaggtttgtcaatggtcagacggtaccatcaaaagatcaatcaaggatagcagaacctattaaggaactggatataatgcttacccagctcgtggcttcgttgcctgtagatatgatgccggggtgtcatgatccggcaaatttttctttgcctcagcagcctctgcacagatgccttttctctggggcatc

SEQ ID NO: 311976 - DNA, 266 bp, Zea mays
cccacgcgtccgcccacgcgtccgcccacgcgtccgagcagttcggcactgcggctgcgggtctgcggcggacggcggcagcggcactacggagcccccagccagcaccaggttgcggtagcggcaacaaccagcaagtggccagcgattcacgggttcaggcgtttagcgccatgccgtcgtcgccccaagctaggtgtagttattagtttagtacactgctcagtgctcagttagacagttacatggaatgctcaataggtaat

SEQ ID NO: 311977 - DNA, 227 bp, Zea mays
agcaaggtggtttaatcacattgatgcgctcgtgaggctgagcggaattactgcagagggccaaggtgtgaaggttgaatcgtcagcagttccttcagccccaactccagatgttgctgaagcacaggccccagttgctgaggaggacgacgacgatgatgttgacctttttggtgaggagaccgaagatgagaagaaggctgctgaagagcgtgctgcagctgcca

SEQ ID NO: 311978 - DNA, 245 bp, Zea mays
cccacgcgtccgcccacgcgtccgcccacgcgtccgcccacgcgtccggaagggtatggagattgtttcatgcttcctcgaaactcgcccatccgtatggctgagtggaataatgtaatatttttgctggacaattcctttacttcctgtgaaatagaagtgttaataggtgagcagccggagatgttaggggggtggcaaaacttggtaccaaatgtggagcttgagcagagttggaacatgtc

SEQ ID NO: 311979 - DNA, 240 bp, Zea mays
cggacgcgtgggctggacgcgtgggttcttgacttccaatttgaagctaagaagaatgttagaggcctttatgagacgatggatgagcttaggatggcagtcttcatgaagactgtcatccaaagatcatccatcgtgacataaagggatctaacattcttcttgacttccaatttgaagctaaggttgctgattttggacttgcaaagttcactactgagaacaacacccatgtttcga

SEQ ID NO: 311980 - DNA, 240 bp, Zea mays
tgttaagttatatgcatatcagatgtgccgtgcccttgcttacatccatcgtgttgtcggtgtgtgtcaccgtgatattaaacctcaaaatctactggtcaatcctcatacacatcaacttaagatttgcgattttgggagcgctaaaaaattggtacacttctctcttttagtttgttcctgctgaatatcttcatggatttaataaagtaaaatatccatttcaggtccctggtgagc

SEQ ID NO: 311981 - DNA, 212 bp, Zea mays
cggacgcgtgggcggacgcgtgggcggacgcgtggggtgcttacccatactgatagcagcggacaggccaatatggttgaactctctcccaaataagacagtaagagagtcgctatagctagctgcagggttttgctaggccaaaaggtgttcaatttggtggcatctaacgagattgcgaaaggtgatgtccttactgtcgcaaagattgc

SEQ ID NO: 311982 - DNA, 164 bp, Zea mays
caagaaaccaagaacccagccccccaccatgacgagctcctcctctccttccagaaaggcgctgagcaagatcgcttgcaatcggctgcagaaagagctcgccgagtggcagcaaaacccccccgccgggttcaagcacaaggtctccgataacctccaaaggg

SEQ ID NO: 311983 - DNA, 144 bp, Zea mays
cccacgcgtccgtgctgcttaaaaaattttggggagaggaaggagaaaaggttgatgtccaaaaactgtttggttatcttgggctttttacccttgttgctctatggtggattgtctggccattaaccgcactaggcgttgagc

SEQ ID NO: 311984 - DNA, 200 bp, Zea mays
cccacgcgtccgcccacgcgtccgcccacgcgtccggaaataaatcatttgagaggacttaatgaaaactaccgaatctttctagccaactgtcacacccttggcaacagatgtcataatgacttgctgaaaaccttctccactgtcggggctctatctaaagagaaaagttttttagatggtgacttggagggcctaat

SEQ ID NO: 311985 - DNA, 167 bp, Zea mays
cccacgcgtccgtgaagctgctccaggagctgagaatgaaaaagctggtattgtaaatcaacaaaaattagaaaagaaatttggtcagtcttctgtctttgcaacatccacacttctcgaaaatggtggaaccttgaagagtgcaagtcctgcttctcttctgaaag

SEQ ID NO: 311986 - DNA, 231 bp, Zea mays
gagcgaacggcgagggcgaatgtgggactgctggcgcgcgggtgggcgccgcagatgcggatcctgacgcacccgtccaccggcgcgttcctgagccactgcgggtggaactccgtcctcgagagcctgtcccgcggcgtgccgctgatcgggtggccgttgggcgccgagcagttcttcaacgcaaactctcggtcgaatggggcgtctgcgtggaactggcgcgcggga

SEQ ID NO: 311987 - DNA, 254 bp, Zea mays
cctttggtacatttgcatatctcttatcttcattgtgtgccaaggctaagactaatatgttttcatgagtatctcatgtattaagtcttagattgaaagggaaatggagtattcggtaaagacatcgcttccactcaactccgttggtattatccactctttgccggtatcccgctgtctctccgtctttggtatattcttcactcatgttttatttgccaaaggggagaaagtagttatttaagggcttgtat

SEQ ID NO: 311988 - DNA, 246 bp, Zea mays
ccacgcgtccgcggacgctaggtgctcgaggcgttcgtgcacggcgacggcgacctgttcagccgtcacccggagctggacgtggccacggtgtgggtctaattccactccaacctggcccgcttcaagcgcgtcgagtgctggggtccgctccgcgacgccgccgcccccgcgcccggcgaggacgactccaccgggccggccgccggctgcatcggcattgagggccagatgcccgtgggcgag

SEQ ID NO: 311989 - DNA, 249 bp, Zea mays
gggatgaatccacagtggactgatattctggaacatcacactggcctagctgagccacagttactggactgcgctaggcggctgatcagcttccatgccctggctccggaaagcaagcaaaaggcggtgtacaggaagtactccaagcccaagctcggctccgtcgcgcttcaatcccctgacaagaagctgttgtcaggttgaggctcgctgctgctcattgtattgtatatcatcgcttcgatggta

SEQ ID NO: 311990 - DNA, 234 bp, Zea mays
  unsure (1)..(234): unsure at all n locations
atagatgtagacggagtactccagattaaaggatgtgctgcctgtctaatagatacatgggatgaactgcgtactactgtaactaggttcaatggaacattcaacgatcttgactatcatcaagtagctncccttgctatctngcttgaatcnngtgtaattagcaagngagcagatacgcctaagacatgtaccttctaggccgangattcagcgacaggaggctgcaataaa

SEQ ID NO: 311991 - DNA, 228 bp, Zea mays
aatccggaaagaaatggttccagggaacagcagatgctgtcaggcagttcctctggctttttgaggatgcaagactcaaatgtatagaaaacatactgattctgtctggtgatcatctgtatcggatggattacatggattttgtgcagaagcatgttgactctggtgctgatatttcagttgcgtgtgttccaatggattgaagtcgagcatctgattttggattga

SEQ ID NO: 311992 - DNA, 259 bp, Zea mays
cggacgcgtggggtgccagaaaacacacggccgccaccccgcgccaccacccagttcgatcccattccaagcgcgcgcagagcagcgccacatgggtcgggcgccgtgctgcgacaagacgagtgtgaagcgggggccgtggtcgcccgaggaggacgaggtgctgcggagcgacgtccagaaccacggcacgggcggcaactggatcgcgctcccgcacaaagcagggctcaaccggtgcggcaagagctgccggctg

SEQ ID NO: 311993 - DNA, 262 bp, Zea mays
actagttctagatcgcgagcggccgctcgcgatctagaactagcctggagagcctactcggcaggaacaagcacgacgaccaggagaagaagaaccagcaggcggaggaggagctggcgaccggcatggagaacgtcacggtggccgagcccgaccacaaggaggagggacacgaggccgccgagaagaaggacagccttctcgccaagctgcaccgcaccagctccagttccagctcgtcgagcgacgacgaggaagagga

SEQ ID NO: 311994 - DNA, 217 bp, Zea mays
cccacgcgtccgcccacgcgtccgcccacgcgtccgaaattttattttcctgttagtttgcattagaaatggaagatatgatagagttgtggagggaagggaccgagagtcagagaccattttgaagtctcagcgataccatgtcctgtggtgaaaaaaaaaacgggaataaacgaagaaataaaaaatctgatacaccatgttataaatgattttc

SEQ ID NO: 311995 - DNA, 211 bp, Zea mays
cgacggagcacgacgcacgcagagccgcagagatccgtcacactgcaagttttgaaaactgaactgtaagatggcatcagcagagctttcccgtgaggaaaatgtgtacatggcgaactcgccgagcaggcagagaggtacgaggaaatggttgagttcatggagaaggtagcgaaaactgttgactcggaggagctcactgtggaggagc

SEQ ID NO: 311996 - DNA, 135 bp, Zea mays
cggacgcgtgggatccaactgagggatttgatattggagcaatcctttcaatcgcaaaaagagaattaaacagtgagcatgaggccacacgaactgaagcattgcattggttcttcactttgctggatcaatatc

SEQ ID NO: 311997 - DNA, 231 bp, Zea mays
cccacacgtccgcccacgcgtccgcttgtgtatgaatacatgcccaatagaagcatcgacaccatccttttcgatcctgagagaaacaaggagctagattggggaaccagattcaagataataaatggaattgccagaggactacagtatctccatgaggattctcagctgaagatcattcaccgggaccttaaagcgagcaatgtccttttagactctgattatacacct

SEQ ID NO: 311998 - DNA, 199 bp, Zea mays
gctgctgtcaattttactccatccagcaaactggggaaaatgctaatggctaaatgtagaacattgcaagaggaaaatgaagagattggggcgatggcatcagaaggaaaaatccatgagcttggaatgaaaattgcagttcttaagtctcagaacaatgagctcaggaatcaatttgatgttttgtacaaacacatgg

SEQ ID NO: 311999 - DNA, 177 bp, Zea mays
gcgcaccataatgaactgactacacaaaacactaaagaaagcttgcattctcttcatggttcagtagatgagaaacatggagatcttacttctaatggcagcaatatcaaagataggaaaggacattttggtccagtgattagtcagaagctacatgaacattttaagacacaacca

SEQ ID NO: 312000 - DNA, 237 bp, Zea mays
cccacgcgtccgcccacgcgtccgcccacgcgtccggtcctcttggagcttattactggtagaaagcctgtcgacgcatcaaagccattgggtgacgagagccttgttgagtgggctaggccattgctcacgcaggcgcttgagaccggcaacgccggggagctggtggacgcccggcttaacaagaactacaacgaagtcgagatgttccgtatgatcgaagctgctgcagcttgc

SEQ ID NO: 312001 - DNA, 226 bp, Zea mays
cccacgcgtccgcctgcagtacgtcgacgagacctgggcaggcaccgggacccctctcctccccgccgacgcctacgaccgcgccatggctcgcttctgggcagcctacgtcgacgacaaggtaataacggtgactgcagaggccggccggccggccaaaatgctaatccttgcctttttcttcttcttgcgccgagaatctgtctgctgggcctctgggactggg

SEQ ID NO: 312002 - DNA, 235 bp, Zea mays
cccacgcgtccgcccacgcgtccgcccacgcgtccgcccacgcgtccgcgaagatcttcggcatgatcttgcgtgcatgttcggtattcaagggcagcttgaagatccctacaggacggactggaagctggtctatgttgaccacgaaaatgacatcctccttgttggcgacgacccatgggaggagtttgtaagctgtgtcaagagcattaaaatattgtcatctgttgaagta

SEQ ID NO: 312003 - DNA, 142 bp, Zea mays
cccacgcgtccgccgagttcgagcgaccatgtcggggcgtggcaagggcgggaagggtctgggcaaaggcggcgccaagcgtcaccgcaaggttctccgcgacaacatccagggcatcacgaagccggcgatccggaggctg

SEQ ID NO: 312004 - DNA, 221 bp, Zea mays
  unsure (1)..(221): unsure at all n locations
cggatcgtgggctnggacgcgtgggcggacgcgtgggtggacaacattgagaagatatagtatcgcggggagaatcttgagcttttggtatgtaagacagagaccctacagtcacaggcggacagcttccacaggcatggcagagagttgaggcgaaagatgtggcttcagaacctgaggtttaagctgatggtgggtggcggcattgcggctctgatcct

SEQ ID NO: 312005 - DNA, 231 bp, Zea mays
gactgttggaagcatcaaacagtctcaagttcagtctcgaattccttcaagctctgagggtagtgagcatacagctttttaatcgcaattggcttgcagttcttcatgtcgcatctgtagactgtacttgaggctccataaccctcagagcttgaaggaattcgagactgaacttgagactgttggaagcatcaaacaccggaatcttgtaagccttcaggggtactccct

SEQ ID NO: 312006 - DNA, 217 bp, Zea mays
ggaattctatagaatatagaagtgccagtacgaggccaaatacctttcctgattgtaagtcatccaaaagttgttgtagtttcatgtggaaaacacgaacaataatatcaggtctatcatttggatgctcacctagtaataaacatgttgttatctcaggccatttagggttacaagtgcatgtaataaaaagatctggtggcccatagcacaacaa

SEQ ID NO: 312007 - DNA, 233 bp, Zea mays
cccacgcgtccgcccacgcgtccgcccacgcgtccgcccacgcgtccggcccgatttgatctcgtcccttcacgggctccggctaggctgctccgtctctcctcctccgccatgttctcgcacggcgctgattccgcccacgacgccgggaccgttggcgtcacagcggcgtcggggccaccgtccccgcccgcttcgtctggcgctacggtgggaagagggtcttcgtctca

SEQ ID NO: 312008 - DNA, 231 bp, Zea mays
acggacggtgggcggacgcgtgggcggacgcgtgggcggacgcgtggctcgtagctgtctgtctgtataatgtacagtagtatactgggatagacgtactgctacagctcagtggagagttgagtcgtgcagtggatcagtggaaatcatgtatgttagtgtcaacgacgaggatgaggccacagatcatacatgcatagttgcatcatcttgggtacgtggcatcctgtg

SEQ ID NO: 312009 - DNA, 99 bp, Zea mays
cccgactggagcatgctccttgctgccatcacgaccatcttcttggccgccgagaagcagtggacgatgcttgattggacacccaggcggcatgacatg

SEQ ID NO: 312010 - DNA, 227 bp, Zea mays
cgcctcttctcctccctcctgccgggtccttaataaagagcagcagcgcaagaggttggtagagcgagcgagaagaaggcaatggcggcggagagcttcctgttcacctcggagtccgtgaacgaggggcacccagacaagctgtgcgaccaggtgtcggacgcggttcctgaaggcttcctggcgcaggaccccgacagcaaggtggcctgcgagacctgcaccaa

SEQ ID NO: 312011 - DNA, 224 bp, Zea mays
cccacgcgtccgcccacgcgtccgatccaagctagcaaccggcgcgtctggtcgccgcccgccccgacccacgttagggcgttcgcgccccaagggcccgtgccgttgggtcagcccgcccggccgacgcgccgcggcgggccgcgtcggagctccgttcccgacgggcggcgtggtgggtcgtttgcagacgacttgaaacgcgacggggcgttgtaagtggc

SEQ ID NO: 312012 - DNA, 219 bp, Zea mays
agcacacgcgtccgcacacgcgtccgcggataggtgggatcgacccacgcgtcgcacacgcgtccggttctggagggggattttgaaagtggagaatatgatgacaggacaattcaagagtttaacaataacattgttaaagaaagagaaggcaaaagacccttgatttctggggatgcattcattgccctcgtcgatggcattggaacagtaggggaa

SEQ ID NO: 312013 - DNA, 237 bp, Zea mays
cccacgcgtccgtgcaaatgcagaacaatcatttaaaaccctggaggtggcctgccatgagcttcggaacagccgtctattcaagaagctgctagaggctgtactcaagactggcaaccggatgaacgatggcacctttcgaggtggggcccaggcgttcaagctggacaccctcctgaagctctcagacgtgaagggggtcgacggcaagacgacgctgcttcactttgttgtcca

SEQ ID NO: 312014 - DNA, 228 bp, Zea mays
cccacgcgtccgctgctccgcctaccccacctccggcggcctctacttctggagcgccaggctctgcacccaccgccgctggggacccttcgccgcctggctcaccggctggttcaatgttgtcggacagtgggcggtgaccaccagcgtggactactccctggcgcactgatccaggtgatcatcctgctcgccaccggcggcaagaacggcggcggctacctggcg

SEQ ID NO: 312015 - DNA, 221 bp, Zea mays
atgaatattactaccaatgtgaccattatgttgtgggcagtgggactcatgtttggtctgttaaccattttgtggcctgagttgtttggactcgattaatttcagggcagcatgtggctttgcatgatcctaaactagagcctggtgtcatatgcctcatcaatataagattgtccccaatacaggtggctcaagctgcttgtgaagatgcatgttctgtc

SEQ ID NO: 312016 - DNA, 218 bp, Zea mays
gacccacgcgtccgcccacgcgtccgcccacgcgtccgcccaacgcggcagtagtaactgttgcactcaggatccacgtacacaaaaatgagttgaggcataacgtcccaactcggctggtggtatatgttaacagccaatcatgtttaagctattactctgatcgttaaggtggatccgctaaggccttcggttatttctgatccatgtggattgga

SEQ ID NO: 312017 - DNA, 235 bp, Zea mays
gtgaacccgccgccgacgcagcagcaggagacgcgccaaggagagcccgcaaggaggcgactatgagggccaagtggaagaagaagcgcatgaggaggctgaagaggaagcgccgaaagatgaggcagagagtcaagaaggcagaaggggacttcgtgatgctgagccggcatagttgtgtacgtttcttcgatcgtgagttcatggagagatgtcacatcctagttcgtcgtca

SEQ ID NO: 312018 - DNA, 234 bp, Zea mays
gtgttctgcttgccttttttttttgatctggccattcttgccggctttcttggtttatcggcgtcgcaggatgatgagcgactacaaggtggagatggtgaacgatgggatgcaggaattcttcgtcgaattcaaggggccggccgaaagtaatagccctcgcgctgaatcccggttgctcttctctctccccgcctcccgtgctgatggtgcacgctcctgattctgatctag

SEQ ID NO: 312019 - DNA, 224 bp, Zea mays
cccacgcgtccgcccacgcgtccgctcacgcgtccggagctgaggtatccttcataccctgaggccaacggaacctggcgtttcccgggcatcggcgagttccaatgctatgataagtacatgcgggcatcgctggaagcagcggcgttggcggcgggtcaccaggattcggggactgtcggaccccatgactccggggagtataagcagatgcccgacgacac

SEQ ID NO: 312020 - DNA, 231 bp, Zea mays
cacacgcgtccgcccacgcgtccgcccacacgtccgcccacgcgtccgcggacggtgggcgacgtgggtaacgcggcgtaccagcccgggaccgctcaacaccacggacgcgatgatcgcggacctggacaactacgacatcgtgttccacatcggggacatgccctacgccaacggctacatctcgcagtgggaccagttcacggcgcaggtggcgctcatcaccgcccg

SEQ ID NO: 312021 - DNA, 247 bp, Zea mays
tcggattccgggtcaccacgcgaccgtcaggtcgcgacctggcgagcggaggataatggaactctacagactacatcttggcaagatactaaaacaaagtcttgtataaggactggctattggctttggctttggtctctcgcagttccttctttttgcgtgcaatgctctgcttctttggtacactgctatttcagttgacaaacaacatctgacaatagccacaggactaaaagagtacattctg

SEQ ID NO: 312022 - DNA, 237 bp, Zea mays
cccacgcgtccggcagcctccatgatggtagagaccaggtttgctctcatggttgtggatagtgctaaagccctttacagaactgatttctctggtagaggggagctatcagcaaggcagatgcatctggcgaagtttcttaggagccttcaaaagttagcagatgagtttggagtggcagtggtaatcacgaaccaagtagtggctcaagtggatggtgctgcaatgtttgctggg

SEQ ID NO: 312023 - DNA, 191 bp, Zea mays
gaagaaacatcaaatgaaatacaagggaggtactttggaaattatgggataatccgtgacatagttcacagccacattcttcaaacaatagctctatttgctatggaaccacctgtaagtcttgatggagaggatatccgagatgaaaaggtgaaggttctcagatcaattcggaaagtgaaccttgatga

SEQ ID NO: 312024 - DNA, 237 bp, Zea mays
ggagctttgtgaaggtggagaattattggataggatcttgtccagaggtggaagatacaatgaaggggatgcaaaaattattgttgaacagatattaaaagtagttgccttttgccatcttcagggtgttgttcaccgtgatctgaagccagagaatttcctattcagcactagggaagagcattctcctatgaagataattgattttggtctctcagattttataagaccagatga

SEQ ID NO: 312025 - DNA, 206 bp, Zea mays
gggtaacaaaagcccttgcccacggcatgacgctcagcaagaagcaaggcgcaggcactgatcagcaggccttgctggatgctcagctgcagctctggcaccacaccatcgcttttgtcaagtccatggcgctcaaggccgccgtagacctccgcatagcggacgccatccacctgcacggcggctcagccaccctctcgcagata

SEQ ID NO: 312026 - DNA, 255 bp, Zea mays
ggaaatttcgtgacgaggagtctgtgccagcagctagacgagatagtataatgatattacatagtgaattaaagcgccagaggaagctcgtgaaaaatctgaagaagaaatccttgtggtctaggaccttggaagagattgtggagaaacttgtggacatcgtaatatttttgcacaaacaaatccgagattcatttaacggaactggaactgacttctgcgcttccgagcaaactcagaacaataggctaggtt

SEQ ID NO: 312027 - DNA, 221 bp, Zea mays
ggagctgcggacgctggcggaccgtggcagctcccatatactctcccctaactctccagcaagttcccgtctccgtcgtctcgtctccgctcctcacctcgccagccatgggcaagatcaagatcggaatcaacggtttcggaaggatcggcaggctcgtggccagggtcgccctgcagagcgaggatgtcgagctcgtcgccgtaaacgaccctttaata

SEQ ID NO: 312028 - DNA, 230 bp, Zea mays
gaagcacattgttgagcaatatgatttagagaagaagacagccattcaatacatgaccggaattaaatcccgggttgctatcactagtgatatgtggacctctaataaccaaaagagaggttacatggctatcactgcacactttgttgatgaatcttggacactaagaaacattatcatgaggtttatatatgtgccaagccctcacactcatgatgttattggtgatg

SEQ ID NO: 312029 - DNA, 230 bp, Zea mays
ctcgccgagctcgcgcttgttgaccccaagcgtgccaagaggattttggcaaaccgccagtcagctgctaggtcgaaagaaagacagatgcgctacattgcggacttgaaaggaacgtacagactctccaattagaagcaactacactatcagctcagctggccatgttgcagcgagatacgactggtatgacaagtgagaatagtgatctgaagatacgtgtgcagaca

SEQ ID NO: 312030 - DNA, 236 bp, Zea mays
ctgcagtaggccggaattcccggcacccgcacaaagagcggagtcggatcgatcacaaactatatcttgactggatttaagatgcactgccatggctggcggtctatttactgcatcccgaagcggcctgcattcaaaggttctgcgcctctgaacctttccgaccgtcttcaccaggtccttcgctgggcccttgggtccgtcgaaattttcttcagcaagcactgcccactttg

SEQ ID NO: 312031 - DNA, 203 bp, Zea mays
cccacgcgtccgcccacgcgtccgcccacgcgtccgcacacgcgtccggcagaatcttgagaatttgctcagaattatctatgggtacaactctttccgcgaggggcagcttgaggcaattcagaaggttgttgcaggagagtcaactatgcttgtgctccctactggtgcgggcaagtcactatgctatcaagtacctgcta

SEQ ID NO: 312032 - DNA, 220 bp, Zea mays
catcatcgcgctcgccgccagagacgtcgtctacctggcggatggcccctactggcgcgtcgagctcggccgtctggacgggctcgattccagggccagcgacgtcaaggggaagctgccggacccggacatgcacgtcaaggacctcacgccggtgttccagcggaacagcttcacggaggtggacatggtcgcgctctccggcgcgcacaccgtcggc

SEQ ID NO: 312033 - DNA, 182 bp, Zea mays
gcgacctggagatcaagtgggtggcggtccccgagaggcagccgatgcggctctactcgagcctgtggaacgcggacgactgggcgacgcagggcgggggcgtcgagacggactggtcccacgggcgcttctgcgcctcgtaccggtgtttcaatgcctgggcgtgcgacgcggtcgcgggc

SEQ ID NO: 312034 - DNA, 218 bp, Zea mays
cccacgctaccggaagaaatatgcttctgttatccgtgtcattgctcatacccagattaggaagatgaagggtttggagcagaagaaggctcacctgatggatattcaggtcaatggtggtaccattgctgacaaggtggactatggctacaaattctttgagaaagatgtccctgttgatgctgtcttccagaaggatgagatgagtgacatcaatg

SEQ ID NO: 312035 - DNA, 251 bp, Zea mays
ggacccgaaaacccaagagcacgcagtgacagctctcctgaacctctccatatacgatcagaacaaggagctggtagtggttgccggtgccatcgtcccaatcacacaggtgctgaggacgggtagcatggaagcaagagagaacgcagccgcggctatcttcagcctgtcactgatggacgacaacaagatcatgatagggagcaccccaggggcaatcgaggcgctggtggagctgctgcagagcggta

SEQ ID NO: 312036 - DNA, 199 bp, Zea mays
gcacaccagcacctgccctcctcgccgtcgccgcctccctccgcgcgaccgatctaccctccgccgccaccatgtcgctgatcgccggggaggacttccagcatatcctgcgtttgctgaacaccaacgtggatgggaagcagaagatcatgttcgccatgacctcaatcaagggtgtcggccgcgtttctcaacatcg

SEQ ID NO: 312037 - DNA, 221 bp, Zea mays
ggcgacctggccaaggtgcagcgtgccgtgtgcatgatctccaactccaccagtgtcgtggaggtgttctcccgcatcgaccacaagttcgacctcatgtacgccaagcgtgccttcgtgcactggtacgtcggtgagggtatggaggaaggtgagttctctgaggcccgtgaggacctggcggcgctcgagaaggactacgaggaggtcggcgctgagtt

SEQ ID NO: 312038 - DNA, 302 bp, Zea mays
cgttgaagaaaataagcggaagaaaaatgccgtggccccaatggaaattgaccgcatctgtgatgttgacagtgaatatgaggatccacagctgtgcgctactacggcttctgacatttacatgcacttgcgagaggctgagacgaagaaaagaccgtcaactgatttcatggaaacgattcaaaaagatgtcaacccaagcatgagagcaattttgatagactggctcgtggaagttgctgaagaatatcgtcttgttcctgatactttgtacctgacagtcaactacattgaccgttatc

SEQ ID NO: 312039 - DNA, 279 bp, Zea mays
acgtggtacgcggaacctacaaaaactaggatttaatactactggaacgagatcgttcccacgttcccggaacggaacgaacgttcccggaacgaggaacgtggccaagttcccggttcccggttactaaggtctagatcttcgcagcaaccacaacaactcttccgaatcttcgaccaatgctgcaaatcagagtggtcgtggaggtcctagccggtttggacgaggtactcatggaggaaggaactcaaacgctccaacctagcggggcggccgccg

SEQ ID NO: 312040 - DNA, 248 bp, Zea mays
agggacaatctcatctgtagcggatgaagagggaattctacaccgcatcgcagatctaccggaaaagaagtctcctccaacgaactccgaaaatgctggaaagacgctacctccagctcttcggaagaaaatcgtctccggaaaggctggagctggaagctcgctaacccggaagactccgctgtctacttccccgacgaaagaatggacacggatcgcgaggaagaaggagaccaaggaaaggcaag

SEQ ID NO: 312041 - DNA, 301 bp, Zea mays
gttgataaagtacaagggatatcaggtacctcctgccgaactggagcatatcctgaattctcatcctgatatcatggacgcagcagttattccttatccagacgaagacgccgggcaactcccaatggcttttatagtgaggaaaccagggtcaaaccttaccgagcaacaagtcatggatttcgtggctaaacaggtcgcaccctacaagaaagttcgtcgagtggcctttgtttctgcaatccccaaatcgcctgctgggaagatcttgcggcgggagcttgtagagcaggccgtgtcc

SEQ ID NO: 312042 - DNA, 290 bp, Zea mays
  unsure (1)..(290): unsure at all n locations
agccacaccacaacaactagaggaagagttcaagagatttggcatttaaaagcagacttcgcacatatatggcatgtgcgaagtctgcattaaatgcacaccacaacaactagaggaagagttcaagagatttggcgccattaaacatgatggcatccaagttagaagcaataaaacccaagggntttgttatggctatgtagaatttgaggatgccagtacnattcaaactgcaatagaggcttctcctgttactattggtgaacgacaatgttatgttgaagagaaag

SEQ ID NO: 312043 - DNA, 291 bp, Zea mays
actttctgcacataagtactagctttttttttgtcttgagcatattttttacactgatgccatgcgatgttttttcattggctagtaaacaaggtaaagcatatgaagctatctcacttcatcacgcttttctatcattccatgtcatcagagcccatgctaaccatagggagcatcaaccctgtcatgtggtccgatgactggaccgcagtgacagaagactgcagcttgtcagcacaggttgagcacacgatacttattaccgaagattgccctggaatactgacacag

SEQ ID NO: 312044 - DNA, 261 bp, Zea mays
atgcgtctgcaggcttttgtttgggagtggatgcagctgccagagttgagatggagcagttgaatttgttgctacgaaggaatttctggttcgtgatccaatgcctgctgtatacttcttccttattgatgtctctatgaatgctatacaaactggtgcaactgctgcagcttgcagtgctatttctcaggctatttcagatctgccgacggtggcgtcccgggtgtctccggagcgtcgcagggcttttgtttgggagtg

SEQ ID NO: 312045 - DNA, 258 bp, Zea mays
ccacactccgcaacctagctcgtaggcaggagtgtggtttgctcgttagagttattttcggacatccaaaaaacatgcttcctatgtgggatgatgggtatccttaaaattggaaggtaaatatagtctctttggtgttaaattccgtgaaagttggtcctgccgatggagtatcgagcagctccctttttgtgctctatcaactatgctgtaattctggctatgtatcggcaaaaacaattctatatgctgagttgg

SEQ ID NO: 312046 - DNA, 247 bp, Zea mays
cggacgctggtcgtcagcctgtgctctcttctcaaagacatggattgaagtttctggttcatcatcgaaggacgttgctaagcagctgaaggagcaacaaatggtgatgccaggccatcgtgagtcaaacctgcaacggttgggatgtatctgttcagttcccttttttttttttttttttttacaattttggcatatattaaccttgaagtaagcaagtacactactagcacagttactttccttc

SEQ ID NO: 312047 - DNA, 268 bp, Zea mays
cagcagcttctcccgctacggcctcctcaacgacgccctcggcctggtgctgcactcgtgcctcctcgcgccctacttctcgtggaagtacagccaccagcgccaccacgccaacaccgcgtccctggagcgcgacgaggtgttcgtgcccaagcagaggcccgagatgccgtggtactccccgctcgtgtacaagcgcgacaaccccgtcgcccggctggtcctcctcgccgtgcagctcaccgtcggctggcccatgtacctggcg

SEQ ID NO: 312048 - DNA, 260 bp, Zea mays
cgtgacgcgtggcgagacgcgtgggcggacgcgtgggggcgcaggtccacccgcatcggctgcgcgatgcgtcgtctgcaccgacaaccgcagcgtcttcatcgtctgcagctacgaccccccgggcaacgtcaacggccagcgcccgttcctcaccctcgacgcggctgccaagtagaggcagagagccacgccatgcacacgcagatgcctcgttcagccaccttagggtttggttttgtgaagtttttcccctactc

SEQ ID NO: 312049 - DNA, 256 bp, Zea mays
gtctggcgctaagctgatcctggagaaggggtacaccggagccaaggtcatgaacgtgatctttgcggtcctcactggctctctggctctaggtcaagcgtctccaagcatgaaagcgtttgccggcgggcaggccgctgcatacaagatgttcgagacgatcaacagagcgccggaaatcgacgcgtacagcaccacaggaaggaagctggaggacatccggggggaaatcgagttcagggacgtccatttctcc

SEQ ID NO: 312050 - DNA, 253 bp, Zea mays
agttctagaatcgcgagcggccgccctttttttattttttttgccagcagaagaccccgtttctttggtcacatggaatggctgacaaagtagtattgtttgaagctggccaggctggtccaccgtttttgcaaagcgctggagttaactgtgagttcaaggcatatccagatctgggtcattcgctttcccaagaagagctactttatcttgagtcgtggatcaagagtcgtctaaatgccgctcaagagga

SEQ ID NO: 312051 - DNA, 263 bp, Zea mays
ccgcctccgcctccgcctgatccatccaagacagggatcgccatgtcggactcggaggagcaccacttcgaatcgaaggccgacgctggggcgtccaagacctacccgcagcaggctggcaccgtccgtaagaacggcttcatcgtcatcaagaaccgtccctgcaaggttgtggaggtttctacctccaagactggtaagcatggccacgccaaatgccactttgtcgccatagacatattcaatgggaaaaagcttgaaga

SEQ ID NO: 312052 - DNA, 257 bp, Zea mays
gataaaccaatgcttgtgtatgagtatctctccaaagggagcctggatgatattcttcacggaagcagtggcgttctattaactttggagcaacgtttaaatattgctgcagaatcagcggaaggtctagcttatatgcattcgaaaacaggaaaaataatattgcatggtgatgttaaaccggccaatatacttttgaacgattgcttcacaccaaagatctctgactttggcatatcaaggctaattgttataga

SEQ ID NO: 312053 - DNA, 232 bp, Zea mays
gaaacagcaatagcagagatgcaaaagttgatgaacctcgttcaacgtacaactgatttgtatcatgagctgcatgcattagacagattcgagcaagagtaccgctctaggctaaacggaaagggtaatacagatagatttgagaaaggagacaatattcaaattgtgagactagagttgaagacccaaagtagttatgtgaagagcttgaaaaaaagatcttctctggtcc

SEQ ID NO: 312054 - DNA, 254 bp, Zea mays
ggaacgattcatcatgaagaggatcgggccaaagaactaccacatgttccgctatgtcgcaaggtatggatacaaggacatccacaagaaagacgacaacttcgagaagatgctcctggacaggctcttgatcttcgtcaggctggagagcatgatggacggctactccgactccgaggacctcaccgtgatggagcacaaggccgagaggtccaccagatcacttcagctgatcgagaaggctgggggtaata

SEQ ID NO: 312055 - DNA, 232 bp, Zea mays
cccacgcgtccgcccacgcgtccgcccacgcgtccgcccacgcgtccgcggacgcgtgggttcaggacgagcgacaacagagagaacaaagtgctggtggtcgctgctgcatctctcctgtgcattgcgctgctcgcaatcgggaaggcacatgttaagaggcataggacatacctcacaaccctcctctactacctgtccattggattcagcagctccggactgtcgtacg

SEQ ID NO: 312056 - DNA, 178 bp, Zea mays
agagacgattggcttgttgtcatgctacaacgtctaaagatactttggatcaagtcaagaccgatctccgcttccagtcctccgccgtcgccgcgctgcaggaggccgccgaggcctaccttgtggggctctttgaggacactaacctctgtgccatccacgccaagcgcgtcacaat

SEQ ID NO: 312057 - DNA, 217 bp, Zea mays
ggcggcgccggcgtgcttgtgatctcaacccaagtcgtgcctccgctccggtcacccgtcgctccacgcaaccatgtcgaggaggaagaccagggagcccaaggaggagaacgtcacccttggacccactgtccgtgaaggagagtatgtctttggtgttgctcacatctttgcatccttcaatgacaccttcattcatatcactgatttgtctggg

SEQ ID NO: 312058 - DNA, 262 bp, Zea mays
cggacggcagcctcaaaactttcttctgccaagacgagctcaggtcatccaaggcaaacgatctggttaagcgagtatacggaagcttggtccctgtgctagatggggagaatctctcggtcagaatactggttgaccactccatcgtggagagctttgcccagggcggacggacgtgcatcacgtcgcgcgtgtacccgacgcgggccatcaacgactccgcccgcgtgttcctcttcaacaatgccacgggtgtccacgt

SEQ ID NO: 312059 - DNA, 286 bp, Zea mays
atcgccatcctccgcaccgccgagcacccggccgtggtgcgctgccacggcatgtacgagcaggccggggagctccagatcctgctggagtacatggaccaggggtcgctcgagagccaccgcatcgccgacgagcgcttcctggcgcacgtggcgcgccaggtgctgtcgggcatcgcctacctccaccgccgccacatcgtgcaccgcgacatcaagccctccaacctgctcatcgactccgggcgccgcgtcaagatcgccgacttcggcgtgggccgcatcc

SEQ ID NO: 312060 - DNA, 281 bp, Zea mays
cggacggtgggacggacgcgtgggcggacgcgtgggcggacgcgtgggtgcacattcaccgagtcaatcctgagatcgtgtggcgtccatactgggacgttcacctcaccacatttgatggatgttagagggcgatttcagctagatggggttaatatttctgaagagaaatttttgaagtacttctggtggtgctggaacaagttgaaggagaagactgatgatgatattcccatgccagcctatttcaggttcctcgcgttgctcgcattcaagatatt

SEQ ID NO: 312061 - DNA, 279 bp, Zea mays
acgggttccggagcacgcgccgcaccaagcttgtctgcaccgtgggccccgccacctgccccgccgccgagctcgaggcgctcgccgtcggcggcatgaacgtcgcgcgggtcaacatgtgccacggcgaccgcgagtggcaccgcgaagtcatccgcgctgtccggaggctcaaccacgagaaagggttcgcggtcgccgtgatgatggacaccgatggcagcgagatccacatgggcgaccctggcggcgcgccctccgcgaaggccgaggatggag

SEQ ID NO: 312062 - DNA, 280 bp, Zea mays
gccttgtgcagagcttgcagacagcattgttcagtgtggccgtagaacactcgaaacagcaatatcatttgtcaaccagcatcctttgtggaaagctagggttgtttatggtgatactgacagtatgtttgttctcctaaaagggcgttctagggaagaagcattcaggatagggaaggagatcgcctcatcaataactgcaatgaatcctgatccagtcacattaaagtttgagaaagtgtaccagccatgcttccttcttacaaagaagagatatgtt

SEQ ID NO: 312063 - DNA, 282 bp, Zea mays
gtcagtcagtcctcgatctgatatcctctcctccctgcagcgactccagctccgatcgattccattccatccatcgagctgcagcagggccatgacgatggcagctacgacgacgatgatgtcagcagcagcgcaggcggcgacgtcgcagctgccgccggggttccggttccacccgacggacgaggagctcatcctgcactacctccgcaaccgcgccgcgtcggcgccgtgccccgtgcccatcatcgccgacgtcgacatctacaagttcgacccatg

SEQ ID NO: 312064 - DNA, 250 bp, Zea mays
ctcacgcgtccgcggacgcgtgggcaaacttcagcgatcagtatgatatgcagtatgtgtcattcatgggtactaaccaccatgcacagccagtgttactaggttgtggcctgcttgctggtagatctcttggggcttatgtgtggctttttggtacatggttaagatgtatgaatgccaaaccaccacattcaataattacaaactactgtcatgatgtagcgatactatcaaaaaggttttccctaac

SEQ ID NO: 312065 - DNA, 184 bp, Zea mays
ctagttctagatcgcgagcggccgcccttttttttttttttttttttttttaatccaagcttcacaaaaagatcagcactagtaggatatgcaaagaccaaccaaaaggcaatgaacacacacgaaagcaacagtgtttattacacaggctgttaacacatggcgcacagcaaatgcaagacag

SEQ ID NO: 312066 - DNA, 279 bp, Zea mays
cactgcaccacttctgctaatcccttgttcttgtgcctccgatggggagctctcaccattgtcatcgtcaatcgatcaatataaagcgagccaattaccccaaggagctaccgcttgcgacggtatggcgatcccggtgattgacttctccaagctggacggccctgagagggccgagaccatggcggccctcgctgccgggttcgagcacgtggggttcttccagctggtgaacaccggcatctccgacgacctgctggagcgggtgaagaaggtgtg

SEQ ID NO: 312067 - DNA, 281 bp, Zea mays
ggccacggcaacagaaggcagactcaacctcggcttcggaggaggccccacgtcgccctgcctagggcacagaccgccacgtcaacaggaggtgccatcatcatcccaccccgaatcgactcgggtcacggagaacaagaccggcgtctcatccggccagctccgccagaggggcaatgatggcgctccacaagctctatgacggcggcggcccctagctctcttacgaaagcaggacaacgtcagcagggactcgaccgctccaacagctgtccctccat

SEQ ID NO: 312068 - DNA, 276 bp, Zea mays
ctagatctctcctctacagcttcccagcaagccagttgcatacatttcactgctgttatctttctcagcttgatcagtgctttagttttctctagttccaatggcttgcgattccccgtgcatggcgacgccccgcgccgacccgcttaactgggggaaggcggcggaggagctgatgggcagccacctggacgaggtcaagcggatggtggccgagtaccgccaacccttggtgaagatcgagggcgccagctcagcatcgcgcaggtggccgct

SEQ ID NO: 312069 - DNA, 277 bp, Zea mays
caaagcccaacacctctcctagcctccttccgtcccgccgccactcccgtcatgggcgattccgcggcgggcgcgccggagccgagcaggttcggcaggatctgcgtcttctgcggcagcaaccccggcaatcgcgccgtctacggggacgcagcgctcgacctcggcaaagagctggtggcgaaggggatcgatttggtctacggcggcgggagcgtcgggctcatgggcctgatcgcagacggtccttggtggcggctgcagtgtcctcggagtg

SEQ ID NO: 312070 - DNA, 288 bp, Zea mays
cggacgctggtcgtgacgcgtgggtcggacgcgtgggcgagacgcgtgtgggtccgccaagctagcgcgctataacagagaagcccaccgccacctcccgcgagatccagacctcggtgcgcctcgtcctccccggtgagcttgccaagcacgccgtctccgagggcaccaaggccgtcaccaagttcacttcttcttaggctcatagtactaggctgggtggtgttggtagacgtggctcaatttatctggtatgggtagtgatggatgatatgatctgcgtctatt

SEQ ID NO: 312071 - DNA, 282 bp, Zea mays
ggaaaccctagcccgtcccgtcccgtctcgcctcgccgccggcgatggacgctgcatgatcggtttccccccttggaactgcctgcctaccggcatcgccaagatcgccgccgcggctgccgtcgtcgtagcggcgctcgcgtcctccgggatcgccctcccgcgtccacgcgccgcgccgcccccatcgggattcggccccctcatgtcgaaggcgaaggtctacaccgacgtcaacgtcctgcgtcccaaggagtactgggactacgaggcgctcaccgt

SEQ ID NO: 312072 - DNA, 108 bp, Zea mays
ttttttttttggcaagaccagcaagatttcctgttccatcaaaatcagtttaggcaaacgacattacgacgagtgcagaccaccactcgtcagaatctagagagattg

SEQ ID NO: 312073 - DNA, 199 bp, Zea mays
gacaactgaacggaccaaggccgccttggagaaggttgtcaacgtccgcctctctgcagctcagcccaagaatgtgccgactcatgattctgagtccaagttcatcaagtataagccgtcacagcaatccgcggccttcaattcaggtgcaaaggagaggatcattaggatgtcagagatggcggtggatcctcttgag

SEQ ID NO: 312074 - DNA, 172 bp, Zea mays
aacaagatatgtgacggagtagaagcaagggcggaacaagggaaataccatggagtgctagtaattccagagggactaatagaaagcataccagaaatgtatgcgctcattcaggaaatcaataatctccacagtagcaatgtcactgaggccgacattccgtctcaacttt

SEQ ID NO: 312075 - DNA, 256 bp, Zea mays
ctcgaccacggtccgcggacctgcgacgtgttttttttttttgagtaggtagataccccgtttatttacttttacagtatagtcctctcacagtcacatcacatcgatcatgcagcagcttacgggtagacctcgatgacaccacgagctccgattttcttgacaaccttgtagtcggagaagccagccttggtaaagatgtggcgccagtcgtcttcgccgcgctgcctgcccttggtgttgaccatcatgagca

SEQ ID NO: 312076 - DNA, 250 bp, Zea mays
gaagaactcggatctcaaaagctttcttggtgatgactggatccggattcataacaggaaatttcagcagcaagctatgagatatgagagggcatcatggaataatgttctctcttacctcagtgatgatggcttgtgtgcttctggtgatgctgcttctcgcaaaaccatcagggagaagataaaaaatttcaatctgtcctttgaagaggtttaccgagttcagacagcatggtctgtcccagatgac

SEQ ID NO: 312077 - DNA, 280 bp, Zea mays
caatgacttgctgctggacgagcgcaataccgtctacgtcatgtcgggccggcggccggaggagcttgatcgtgtattccgacgcgtgccgaacctaggcttgattgctgaaaacggctgcttcctcaaggactgtggtagcgacaagtgggttgagatggctgatgcttctcaaattataaactggaagcaatcagtcaagcccatcatgcagtactatctcgagagaacgcccggctcacagatcgaagagcggcgctgcagtctcctcttccactac

SEQ ID NO: 312078 - DNA, 210 bp, Zea mays
gcgccacgctgggagttgcctctgttgaaactgttgataggagatatggaaagggaaagggagaggccagaggattggatcagccgtcgaagtgcgaggtgtgcgcgggaagccaagggcggagtcaagcaggggtgctccgcggcgtttcccgtacggcggtggttgtatggggcgtcactgtgtcggagagccgatgcaccgccattg

SEQ ID NO: 312079 - DNA, 276 bp, Zea mays
cggacgcgtgggttgggcgcagagaatccccaagcaaacaaacagggtagatggagaggagatgagaacagaggagaggttgggtctgggacaccatggctccgatgaagctgtacggggcggtgatgtcgtggaacgtgacgaggtgcgcaacggcgctggaggaggctggctccgactacgagatcgtgcccatcaacttcgccaccgccgagcacaagagccccgagcacctcgtccgcataccgtttggtcaggttccagctctgcaggatg

SEQ ID NO: 312080 - DNA, 264 bp, Zea mays
gccgctaccgacgacagcatatcgtcggtagtttattctattctaacttcaaggtaaaaacttttcttcgacttttcattgtttttaacgacgaaggtgtttgactgacgaagcttgcttctactcagagtatgctattaagcaaagctttgaggatgcaacaggaccttgaagacaaaaaacatgagatcataattgaaggtttagaaagcaaaataaaagatcaagcagctgttcttgaaaagaaagatttcgaacttcaga

SEQ ID NO: 312081 - DNA, 270 bp, Zea mays
ggttgacaatgaagctgcgagattttaacaagtatgccaaggtgaagacctttgaagtgtggattgataaattgtctattataaactgtctgacgtaggtttctagttgtttttttcactcttatagattgtcccactatttagttgcaggaagccaaatagctaaatggcttcatgattttttttacataagaagggcctcatgatctgcttatggattatcataatttaagtatctagattatataattcacctaataatttgtgttg

SEQ ID NO: 312082 - DNA, 260 bp, Zea mays
gaagagcatgtcagactatgatcctcgtttggttgcacctacttgtttgaggaattcaacattgagaagttgcagcttgttgaagctgagaaaaagaagatcaggcaagagtatgaacgcaaagagaagcaggttgaagtacgcaagaaaattgagtactctatgcagttgaatgcttctcgcatcaaagttcttcaagctcaggatgatctagttaacaaaatgaaagacgatgccatgaaggaacttctccttgtcag

SEQ ID NO: 312083 - DNA, 254 bp, Zea mays
  unsure (1)..(254): unsure at all n locations
taataacagagtccgcgaccgtggcgacctggnncggacgcgtgggcggacgcgtggggcaaactattatgaacatctcatgcaacgctgataaagtttaccaaggagggacacatcacacttgtagcttccattgtgaaggctgactctttgagagagttcagaaccccagaatttcatccaactgcaagtgatgaccatttctatttgaaagttcaggtaaaagatacaggctgtggaattggtccacagga

SEQ ID NO: 312084 - DNA, 266 bp, Zea mays
agcaagcaaacaaacacctaaagatctgctagctatttcagtgggtctcgtttctcttcagcttcatcagccatggtggttcccgtgatcgacttctccaagctggacggcgctgagaggaccgagactctggcgcagatcgccaatggctgcgaggaatggggattcttccagcttgtgaaccatggcatcccgctggagcttcttgagcgcgtcaagaaggtgtgctccgactgctaccgcctccgggaggccgggttcaaggc

SEQ ID NO: 312085 - DNA, 287 bp, Zea mays
cgcaggtcgactcggtgtacgccgccatccagaagctgggccacaccgacgtcgacgtcaaggtctccgagaccgggtggccgtccaggggcgaccccgacgaggccggcgccacgccggagtacgccaggacgtacatcggcaacctgctgcagaggatcgagatggggcagggcacgccgatgaggccgtcggcgcccgtcgacgtctacgtcttcgcgctcttcaacgagaacctcaagcccggcccggcctccgaacggaactacggcttgctctaccccgac

SEQ ID NO: 312086 - DNA, 278 bp, Zea mays
gcaagaacgacagagtggtcaggctgcacaaacttgcactggaaagatgctccagtgtccatgacgccgaccatcaaatggcttctgggacttggcctaccggtgtggctatacagtggagactttgatgccgtctgcccactcaccgccacaaggtactccatcgctgacctcgagctctcggtcatggagccatggcgcccgtggacagcaaccagagaggttggaggctatgttcagcagtacacgggaggtcttgtgcttatttcagtgagggg

SEQ ID NO: 312087 - DNA, 266 bp, Zea mays
caagtgctgatttgtctcaaccaaaaactggcgaaggtcatgactcttggcaacacctttctactctcacaggatatcatggacggactattttttcagcccattggtcaagcgaggatattatagctagtggtgcgggcgatgatgcaatctgcttttttactgaggagaagggtagcatggttgaaaagccctcatacagattaatattaaagaaagagaaggcacatgtcatggacataaactgtgtgcgatggtgtcctcag

SEQ ID NO: 312088 - DNA, 262 bp, Zea mays
  unsure (1)..(262): unsure at all n locations
aaacanacacacgtccgcggacgcgtggcgacgtggncgagacgcgtgggacttcagaaagcgttgctatcaaggtgattgactaagataagatgaagaagtgtggatcttatggatcaaataattcaagagatttcagtgatgaagttggtaaaacatccaaacattgtccaattgtatgaggttatggctaccaaaaccaagatatattttgtgatagagtatgtcaagggaggagagttgttcaaaaaggttcaacgtg

SEQ ID NO: 312089 - DNA, 259 bp, Zea mays
  unsure (1)..(259): unsure at all n locations
ggcgggcacacgtccgcggacgctgggcgacgtggncaggacgcgtgggcggacgcgtgggtgcccccaagcattggatgctggacaagcttggaggacttttgctcccaagccaacttctggacctcacaagtctagggagtgcctgccactgatcctcatcatcaggaacaggctcaagtatgctcttacataccgtgaggtcatttccatcctgatgcaacgccatgtacttgttgatggcaaggtcaggacagac

SEQ ID NO: 312090 - DNA, 266 bp, Zea mays
accatagcgcccgatgcccaacgtcgacatgaggagagaaagggccgagaaagagtcctgccgaaggtagtgctaagaaattgtgaaggttcttcggtcggcaccgcgtgttttcaaggaggagctgaggaaaggagtgaggtcacgagaatctgaagatcatcctggtacctggaatctcaagtctcaggcaagttgtgcccttgtccacttctttttacccaataatgttctttataatcatttaccatgcataggtttaattt

SEQ ID NO: 312091 - DNA, 267 bp, Zea mays
atcagttttggagaagctgctcccagcatatcgatccttccttggaaggttccggcatcacatagagaacagcaggcaccctgagttgtacatcaagtactcagttgatgatcttgagatagcaatgtcagatttctttgagggatctccaccatcactgcataacaggaggagatctcatggatgaaagatgtcttgaaaaatctcagtcttcttgtaatgtattctttaattctttggggacaggccaacatatgcagttgagtc

SEQ ID NO: 312092 - DNA, 271 bp, Zea mays
agcagcagtactgaaaactggttatgcagagatcccatctatgggacgcggtgggcgtgctggacgacgaccccgtggggaagctgaaggtgttcgtgtacgagatgccgcgcaagtacaacaggatgctgctggacaaggacagccggtgcctgcaccacatgttcgcggcggagatcttcatgcaccagctcctgctgtcgagcgcggtgcggacgctggacccggatgaggccgactggttctacacgcccgcgtacaccacctgcga

SEQ ID NO: 312093 - DNA, 263 bp, Zea mays
cccacgcgtccgcccacgcgtccgcccacgcgtccgcggacgcgtggagttttgggatggaccccagaagtgatggcagcaaaagagacaaacaagcaactcttttgactttggattttcacgaattagatgcattaacaccatggaatgctttggctgacatgttttccattatccagtctgcacatgttgcatttgtttctgaattttcttgggagattttttttccttgctttgtaggagagagttgcggcacgaaaaag

SEQ ID NO: 312094 - DNA, 256 bp, Zea mays
ggatctttaaacttaagccttaagcaggttcagaaggttactcataatttctcacctttatttgagttaggtgaagggggaacctgggcagtttacagggctgtattatcagataaccaggttgttatcatccggagagctaaaaagggccacgttcaagaggcaaaacatcttatggaagtgaagctccttacaaaaattaatcactggagttttgtgagattcttaggttttattgatgaaaaagatgagtgta

SEQ ID NO: 312095 - DNA, 287 bp, Zea mays
cccacgcgtccgcccacgcgtccgcccacgcgtccgcggacgcgtggcgccgcctgatcgaagtgaacaagcaaggaagagccatggcgagcgagcacgcggcggggggcgatgctaagcatcaccagaagcagagcctgatggacaaggcgaaggggttcgtcgcggagaagatcgcgcacatccccaagcccgaggccacgctggacggcgtgacgttcaagggcctgagccgggagtgcatcacgctgcacagcagcgtgaacgtgtccaacccctacgaccac

SEQ ID NO: 312096 - DNA, 190 bp, Zea mays
gatatccgaggaggagaccgacgacgacggcggcggcggcgaggtccccaccgcggaccgctacttcgccgccctggaggggcccgagctggagacgctgagaccgacagaggtgtcggcgctgcccgaggacgagacgtggccgttcctgctacggttcccgatcaacgcgttcgggatgtgcctgggc

SEQ ID NO: 312097 - DNA, 268 bp, Zea mays
cccacgcgtccgccttttcgtccttgttcctcaacgtcgccggtgcgcccgcctcctgcctctctccccctgcgagcgatcgtgaggggatcgggatggcctcccaccattccgagcccctcgaccccgccgacgctgacgacccctcgtaagcccgcacttgagtctgatcatatcaccaaagttattcatgattgtaaaagggacagtgaggctttgtattttcagtttggcataaaactgcataatgtgatggatacacagattg

SEQ ID NO: 312098 - DNA, 263 bp, Zea mays
ctcctttgtgttcctttgggttggtgatggtgtaggccttgaacagggtcgtcagtgtttagagaagtggggattccgtagtgtgaagatgtttgctgggtgaaaacgaacaagaaaaatgcagctccaagtctgcggcatgactcacatacattgttgcagcactcaaaggagcattgcttgatgggcataaaaggaactgtgcggcgtagacggatggccatgtcatccatgcgaatatagacacagatataataatagct

SEQ ID NO: 312099 - DNA, 262 bp, Zea mays
cgcctccgccgaggccatcaaggacgccttccgcatcgagtttggcgacgagtaccgggtcttcgtcaaggatctgtgcaaggaccacgccggctggccgctcaacaacatggagagctcctacaagttcatggtcaagcacgtgcagctctggaaggtggccttccacagcacctcgcctagatgggtccataacttctacctcgccgctctcgcctcattctacgccaagaaggtggaggctggactgaagaagtacaag

SEQ ID NO: 312100 - DNA, 276 bp, Zea mays
ctgagatgttacggatgcctttgactgagctgtgcctgcaaataaaatcacttcatcttgatgacatcaaatccttcctgctaaaggcagtagagccccctaatgaagaagctatttcctctgcagttgacttgttatacaaggttggagcttttgaaggacatgaagagttgtcacctcttgggtatcatctggcgaaactgcctgttgatgttttgattggaaagatgatgctttatggtgctatctttggttgtttatcaccaattctgtccg

SEQ ID NO: 312101 - DNA, 275 bp, Zea mays
gcgcctctacatttcttctctctctgctcctccgcctccgcctgatccatccaagacagggatcgccatgtcggactcggaggagcaccacttcgaatcgaaggccgacgctggggcgtccaagacctacccgcagcaggctggcaccgtccgtaagaacggcttcatcgtcatcaagaaccgtccctgcatagttgtggaggtttctacctccaagactggtaagcatggccacgccaaatgccactttgtcgccatagacatattcaatggga

SEQ ID NO: 312102 - DNA, 279 bp, Zea mays
caagaactgaaactacattgtttggagatagttcatcggaaatccttgatgagcctcagatggtgatgtctgctgaacctttccatgcacctgcttatttgaaccgttgggcttgaatttccagcctccaagttcactagcactgaagctggaaacattgattcatatagcatcttcacacctacatgtcatgcatcttttgcctcttcaaagaacaaagtgatgaaaaggctacattctgctggaaaaatgggagaacagtatgatccatgcactgag

SEQ ID NO: 312103 - DNA, 273 bp, Zea mays
cccacgcgtccgcccacgcgtccgcacacgcgtccgcggacggtgggttttttcaatctacacaggattaatatacaatgaatttttctctgttccatttgggcttttcggtaaatctgcctatgcatgccgtgattcttcttgcagtgatgctactaccgaaggacttcttaaagtaagagatgcatacccttttggtgtggaccctgtctggcatggtatccgcagtgagctaccgtttctcaactcactgaagatgaagatgtcgattct

SEQ ID NO: 312104 - DNA, 257 bp, Zea mays
cccacgcgtccgcccacgcgtccgcggacgcgtgggccagacattgaggtcgtcgtcgttgacatctccaagccccgcattgaggcctggaacagtgacaccctgccaatctacgagcctggtctcgatgatgttgtgaagcagtgcaggggcaggaacctcttcttcagcactgatgttgagaagcacgtcgctgaggctgacattatctttgtctcggtgaacacccccaccaagacccgtgggcttggagctgg

SEQ ID NO: 312105 - DNA, 269 bp, Zea mays
  unsure (1)..(269): unsure at all n locations
cccacgcgtccgctggcttctcctccccctcttatcaagtcctcctcgggttagggttccttagggttttgtggaggggcgatggcggctgctgatgtggagtaccgttgcttcgtcggcggacttgcctgggccaccagcaacgagtcgctggataatgccttcgcctcctacggcgagatcctcgactccaaggtcatcaccgaccggtagacggggatgtcccgcggcttcggcttcgatancttctcctccgataactccatgct

SEQ ID NO: 312106 - DNA, 195 bp, Zea mays
ccgggtcaccaccgccgggacctggcgatcgcccgctcaccaacgatgagattatcctcctatgctccgagttcctcgacgccggtacggacaccacgtccacagggctgcagtggatcatggccgagcttgtgaaaaacccagccatccaggagaagctctacagcgagatcaaggccgccacagacgacaaca

SEQ ID NO: 312107 - DNA, 172 bp, Zea mays
cggacgcgtggcggccgccctttttttttttttttaacaagtatatcaggaagttcctttatttagaacgcgctgctaatgcaggctacgtgttacaaatttattattattcaaaaccacggccatgtggataccacgtcgatgcagttttttggccccatcaaacaagtag

SEQ ID NO: 312108 - DNA, 179 bp, Zea mays
gccgcaccctcccgcccaccgccgtcgccgcccaaccgcagtaaggaggaaggagcaggaagatgccggcggggcacgggctgcggtcgcggacccgcgacctgttcgcgcggcccttccgcaagaaggggtacatcccactcaccacgtacctgcgcacctacaagatcggcgactac

SEQ ID NO: 312109 - DNA, 270 bp, Zea mays
acacaatgagcttctaagagatccagaaggagcttacagccaactgataaagctacaggaagcaaaccagcagaacaaccggaagggtgatggcaatgctcgtctaggcaaacagatgtcgatgaacaagtcagctagcaggaggttgtcccgtgataacagtagccaccattcgttctcggtgccgttcggtatgcctcttgggattgaaattcaggatggttcatccaacaaactgtgcgacgagatgccacaggaagtgcctctcag

SEQ ID NO: 312110 - DNA, 269 bp, Zea mays
cggacggtggtcgtgacgcgtgggccggcaactgggtgtactgggtcggccccctcgtagcgcggtggcctgtcggggctcgtctacggcgacttcttcagcgcctcctaccagccgttcggccagcaggagtacccatgaaagtccgtagctagccgctatcgttctgtctgtgttgagttgaccatcgccgtcgtcgtgtcagctggcgcttctttctgtaatcatgtttggacctgtttgcatttcccaacgtctggttttcattt

SEQ ID NO: 312111 - DNA, 266 bp, Zea mays
catcgacgaggtgtgggcggggacggggccggacgtgctgccggacgacccctactatcgctctgtggctcggttctggggcgcgttcatcgacgataaggtggagtctgcgtggctggggatgctgttcaggtgcacgaacgatgaggagatgtcggcggcggttgcgcgcgcccgctatgcgctcgacgcgctggaggtcgcgttccgggactgctccagggggaggccgttcttcggctgcgacgacatcgggttcgtggacg

SEQ ID NO: 312112 - DNA, 273 bp, Zea mays
attttataatagtgcagacatctttccagtatattcctgggtattatgtgagtggactgcacagatatctgagtgttgtggctgtttctgttggtgctatactcttcgtgcttactagcttttctgatcctgggactgttactgctgaaaatgtttctcaatacgtatcttcctacccatatgacaacattatttttgtggagaaagaatgttcaacttgcaagattactaggccagccagggcaaagcactgtagaatatgtgacaagtgtg

SEQ ID NO: 312113 - DNA, 278 bp, Zea mays
cccacgcgtccgcgctggaggaagttgatcctgatcttgtcaatgctggcaagcagaccgtcacctttgtccccggtgcctcaacctttgactcttccgagtcctttggcatgatccgcggcggtcacgtcgatgtttccatcctcggcgccctccaagtcagtgctgccggcgacctcgccaacttcatgatcccaggcaagctcttcaagggcatgggcggcgcaatggacctcgtcgccaaccccgaagccacaaaggtcattgtcgcgacggag

SEQ ID NO: 312114 - DNA, 278 bp, Zea mays
cccacgcgtccggccgaccttcaaggtgaggaaagagaagctcggggacagaatcactgcgctccagcagctagtctcgccttttggaaagacggatactgcatcggttcttcacgaggccatcgaatacatcaggttcctgcatgaccaagtagcttccctgagctctccctacctcgggtgtgggcggcccgtagtgcagcagatacagcaacgacgacaggcgaaggacgacggcggcgccgcggcgaaggaggacctgcgaaccgagggctgtg

SEQ ID NO: 312115 - DNA, 271 bp, Zea mays
ggcttggccaaggctgccgacaagctgcttccccatcaccatcacaaccaccaccaccatcatcattacagtgacaataataacactaccattacagagcatgttgaggttgatgttgtccgccacgatgctaattcttcttcgcgccgcccagctcctgccaccgagtcgcagcctaacactgtgtccatcccctgccaccacatccgtctgggtgacttcttgatgctccagggccgaccatgccaggtcatccgcatctcgacctcgt

SEQ ID NO: 312116 - DNA, 281 bp, Zea mays
cgggaggaggcccgcaccgatgcacgatctgccggagggggttcgccacgggccaggcgctcggcgggcacaagcgctgccactactgggacggcgcgtcggcgtccgtctccctgtccgcgtccggtacggggtcgtcgggcgtcacactgaggaattttgacctcaacctgatgcccgtggcggagaacgcagggatgaagaggtgggtcgaggaggaggaggtgcagagtccactgccgatcaagaagcgcaggatcttggattagctctcgcgctac

SEQ ID NO: 312117 - DNA, 238 bp, Zea mays
cctcagccgcgtcgcgtcgcatcctacgatccaaagctctctctgctcgcagccatggcgaagaactacccgaccgtgagcgccgagtacagcgaggctgtggagaaggccaggcgcaagctccgagccctcatcgccgagaagagctgcgccccgctcatgctccgcctcgcgtggcactccgcggggacgttcgacgtgtcgtcgaggaccggcggtccattcggcacgatgaagc

SEQ ID NO: 312118 - DNA, 267 bp, Zea mays
cgccgccccgtaccatactcctcttcgcgccgtagaaatggcgctgccgaatcagcagggcgtggattaccccagcttcaagctcgtcatcgttggcgacggtggaactggtaaaaccacatttgtgaaaaggcatcttactggcgagtttgagaagaaatatgagcccaccattggtgttgaagttcaccctctggattttagcactaactgtggcaaaattcgcttttattgctgggacactgctgggcaagaaaagttcggtgg

SEQ ID NO: 312119 - DNA, 280 bp, Zea mays
gacaaatctgctaaaatgtcaggtgatgttcctagagcagccattgccaatattttcttcaccgaaatatttacgccgctcttgctcgctgtcgtaacggtcatcccgtacttgttcatcaacgcgcaaactggtgtcctagcagacaaacaaactgttgccaaaggtgcaaacccgccaaagattcagcctacggcctcccttgtccgtattctgattgtcgcctttggcccggtggccatcaatgctggtgtgttgttggttatgtttgccatggcat

SEQ ID NO: 312120 - DNA, 274 bp, Zea mays
caaggatttgagacgaatcagggaattcaatgtgggtgattatgttgtctttgggctatggcttggtcgagttgatgaagtgctcgatagtgttaatgtgctttttgacgatggctctgtctgtaaagtcaatagagcagatcctatgtgcttaaagccagtatttggcccaatgcatccagatacagattgtcctttttatccaggacagcgtgtgaaggcagtgtcatcatctgttttcgaaacatcaaggtggcttaatggattgtggaga

SEQ ID NO: 312121 - DNA, 284 bp, Zea mays
gatgaaatgaaccttgttggttgatccacacttatctggaccaaacataatagtgtatggagtctcattatcaaactccttggcatcccatccagcatcctgagggcagatgtacttaatgtaggcacctccgcattcaaggccattctgaagtctcacttcaaactactccaaaagggatctggctgttgcaaccgcgtacctgactgcctctgctgcatgtgctgcatcaggtctttcggctgaggttgcttggcgactaacgtcattctacacgcaatcac

SEQ ID NO: 312122 - DNA, 162 bp, Zea mays
gcctgctcaccggcaagttcatcattcccacgctgaacaacctcgccagcatctggttcatcgcgctcttcctgtccatcatcgcgacgagcgtcctggagctgcggtggagcggggtgagcatcgaggactggtggcgcaacgagcagttctggggcatcg

SEQ ID NO: 312123 - DNA, 302 bp, Zea mays
cagtacggtcggaattccgggtcaccacgcgtccgggacctggcggacgcgtgggcggcgcgctgccgaaggagcagatgcacgagctggcgctcgggcacggagcgcagtagcagcggttcctgtgggtggtgcgcaccccggcgacgacgaaggcacgctcaacggcaactactacgacgcggagagcaagaaggacccgttcgcctacctcccggagggcttcgtcgagaggaccaaggaggtgggtctgctggtgccatcgtgggcgccgcagacgcaggtgctggcccacggcgcca

SEQ ID NO: 312124 - DNA, 266 bp, Zea mays
ccacgcgtccgcggacgcgtggtagtaccttgccccagagaggtggtgaagtgaatgttactctaggagggattgatttgaacaattctgggagtgtggtagtcagagaagacaagaagttattgactgtacttttcccagatggccgtgatggtcgtgcattcactcttaaggcagaaacttctgaagacttgtttgagtggaaaacagcattggaagaagctcttgcacaagctccaaatgcagctcttgtgatgggacataat

SEQ ID NO: 312125 - DNA, 276 bp, Zea mays
cttcctcgggcgacgcacgcccatcgtctaccagaacgacaacgggccctgcccgctcctcgccatctgtaacgtcctgctgctgaagaatgtgatcagtctgaaccctgacgctggcgaggtgtcgcagcagaagctgctctcgctcgtggccgagcgcctcatcgaccccaacattgccggacaggataaggacgaggagtatgtttgcaaccgggagcagaacatcgcggatgccattgatcttctcccgcgccttgcaacaggcattgacgt

SEQ ID NO: 312126 - DNA, 270 bp, Zea mays
cggacgcgtgggtgcgcgcaagacattattcaaaggagtgaaaaggcatccacgatgctagaaaagtagcggaagctgccgagaaaagtacagagcccgaaggcgacataggtattaattagtggtttttatcatgctgtaatttttaattccaaactctgttctcggtttgtaatagtaatatagccgtatcttttcttccctcagaacctgctgaggcatctccgggcccccacccgataggggacgatgaaattagaaaaatggccg

SEQ ID NO: 312127 - DNA, 258 bp, Zea mays
gtttccagctattacctgactaatgcagatgagctgcagataaaaatggctcagggtgccaagcctggtgaaggtggtgaacttccaggccacaaggttattggtgacattgctgtcacaagacactccacagctggtgtaggactgatcagtccacctccgcatcatgatatttattcgattgaggatcttgcgcactgtatacatgaccttaagaattcaaatcctggagcccgcatcagtgtcaaactagtttct

SEQ ID NO: 312128 - DNA, 252 bp, Zea mays
gggatttcaaggcatccaacgtccttctggacgctgaattcaagccgaagctgtcggatttcggcctcgcaagagagggtccaacagaagggaagacacatgtctccaccgcggtggtggggacgcacgggtacgcggcgccggactacatcgagacggggcacctgacggtgaagagcgacgtgtggagcttcggcgtggtgctgtacgagatcctgacggggcgacgctcgctggagcgcaccgccccgc

SEQ ID NO: 312129 - DNA, 274 bp, Zea mays
gcggattgaacaggtttacaggcgcgctcccgcacgcatgccccaacccttttttgacaagctcagcgtccaccactaaacgtaagatggcggcggagaccaaaccggctgcggccatcggggttgccggcgagatggaggtggaggcataccgccgcctattcccggtggccttcctggagcgccacctgggtgagtccgtccgcatcgatgcccgccgcctgagagaggcccgcaccaccaccgtcgccctcggcgccgtgtcctcgcgcat

SEQ ID NO: 312130 - DNA, 274 bp, Zea mays
cccacgcgtccgcccacgcgtccgcccacgcgtccgcccacgcgtccgggtgaagatatttatgagcctttcttaaggttgttatggaaaggcaactggtttgtacaagaaaaaagttgtaagatattgactgctataatcagtgcacgaccaaagcttcggaatggcacacttccaaatggagatgcttcgaattcgaagagcaagcttacttcaacacatgatgtattgagaggtttggtcaattggctctgttcacagctgaggaatccta

SEQ ID NO: 312131 - DNA, 261 bp, Zea mays
ctagttctagatcgcgagcggccgcccgcgatctagaactagtccgaggagaacatcaaggcgtcggtgaagaacaccgtgacccaggtggccaagaaggtgctgaccatgaacccctcgggcgagctctccagcgcccgcttcagcgagaaggagctgatcagcgccatcgaccgcgaggccgtgttcacgtacgcggaggacgcggccagcggcagcctgccgctgatgcagaagctgcgcgccgtgctggtggaccac

SEQ ID NO: 312132 - DNA, 257 bp, Zea mays
acaccatccattaagagacaagatagttttgaaatgaagttacctgaccttcctaaagttgatgtccatcgtatacagcggcagtcatctaagaattcagatcctgactcacccatatctcctcttttgacttctgatcctaaaaacgagcgttcacattcacagacttttagcagaccccagagtgaacgggatgatacgagttctgaacacagtgaactcgatgaggttcagcaccagaaaccgccatctttttg

SEQ ID NO: 312133 - DNA, 254 bp, Zea mays
ggcgttgctggagtggatcttgatgctcctgctgttcatcgatgcggtttacagcttcctggtcactagattcgcccgtctctgcagattaccggcgccatgccctttctgctcaaggctcgatcacttcctgggcaacgagaaaccgtgcttctatagggacctgatctgcaaaacccacaagtcggagatttcgtccttggccttctgcagcctccaccagaagctcgcgggagcccgaaatatgtgtgaag

SEQ ID NO: 312134 - DNA, 256 bp, Zea mays
gcaactgcaagtcgtcttcttccccaagcctaaaaccaacaacagtttggcagatcgcccggatcgatcgatcgcagccatggtgctctccaaggccgtctccgagagtgacatgtccgtgcactccacgttcgcgtcgcgctacgtccgctcgtctctcccaaggtaccgcatgccggagaactccatccccaaggatgcggcgtaccagatcatcaacgacgagctcatgctctacgggaacccgcgcctcaac

SEQ ID NO: 312135 - DNA, 268 bp, Zea mays
ggacgtgggcgacggcggagctctagggccacccccggccggatcgccggcaaagccgcctgcgccgtcgcgtcactgtacacgctgcagggcaagaagggcgtcaaccaggatgctatgatcttctgggagaacttctgttcaagagatgataccatcttttgtggtgtgtttgacggccatggaccttatggccatttggttgccaagagagtaagagatctgctgcctctaaagttaggagaaggtttgacgacggaagatggta

SEQ ID NO: 312136 - DNA, 259 bp, Zea mays
accacgcgtccgcgaccgtggaagacgacttgtttcattgattcttgaagagatcgagcttcttttgcaccacaaggtcgaggatgtcttgcaactgcggatcaagctgcggctgcggctcaagctgcaagtgcggcaagaagtaccctgacctggaggagacgagcaccgccgcgcaggccaccgtcgtcctcggcgtggccccggataagaaggccgcgcgcgagttcgtcgaggccgcggcggagtccgacgaggc

SEQ ID NO: 312137 - DNA, 276 bp, Zea mays
ctcccagtcaaggactccaccgcgcagtcgtagttggatagacaaggagcagttaaacgcttggagacgtctcgtccatcatgcagatcttcgttaaaaccctaacgggtaaaaccatcacccttgaggtcgagtcctctgatactattgataatgtcaaggccaagatccaagacaaggagggcatccccccagaccagcagcgtttgatcttcgccggaaagcagctcgaagacggccgcaccctcagcgactataacattcagaaggagtccc

SEQ ID NO: 312138 - DNA, 256 bp, Zea mays
tgaagagatacccaaatgcggagattgtgtggtgccaggaggagcccatgaacatgggtgcatacagctatatctctcctcgtctgtttactgcgatgaaggctcttgggcggggttcgtttgaagacatcaagtatgttggcagagcaccttcagctgctacagcaacaggcttcctgtcggttcatgcgcaggagcagtcagagctagtgaagaaggcactgcaggcagagccgatcaaattcctctgatgtat

SEQ ID NO: 312139 - DNA, 275 bp, Zea mays
cgtgcacgtcgactggaccaatggttttatctttggtggcaaccagtccaactgcggcacgtggatggacaaaatgggcgagagcgaaaaggctgggtccaagggtgttcccggtacgccccgtgatggtgccgccattgagattacgggcctgctgtacagcacgctgaagtggctggcccaccgcaacagcaagggcggttttgcgcacgagggtgtcaagaaggccgacggctcgtccattacgttcaaggactgggcggcactgatcgagg

SEQ ID NO: 312140 - DNA, 259 bp, Zea mays
tgccactctgagcttcccattaacctcgagcctggtcatctcaattaattaaaacaaaccgttcccgcagctcgtgccgacaatggcggcctctgttgagcggcacctggccccccacccgtggccggccaatgcgcctcccaagagcttcgacatgttccgctccggctgcccaggaggcaagcgccgcaccggccccgactccgactccgaggacgaggatagcattcccccggactggcggtcgctgtacagcccg

SEQ ID NO: 312141 - DNA, 234 bp, Zea mays
  unsure (1)..(234): unsure at all n locations
ccacgcgtccgcccacgcgtccgccacagcgacgacacgcgtccgcggacgctggcgagctgcagtngtgcaggatctggattaagtgatgcgatttcattgttggagcctcttacatcagatgttgttgacttcgtgcgtcagggagctctcattgccatggcaatggtaatgatccaaactaatgaatcctttgattctcgtgttggagcatttaggcgtcagttggagaag

SEQ ID NO: 312142 - DNA, 274 bp, Zea mays
atccccttcagcaccctactgaggatcgcccatgaggcagcagagggcctcagttttctgcactcgtacgcgtctcctccgatcatccatggcgacgtgaagagcgccaacatccttcttgatggcaactacatggccaaagtgtcagattttggggcctccatactagcgccgtccgacaaagagcagtatgtcacgatggttcaaggtacctgtggatacctcgaccctgaatacatgcagacatgccaactgactgagaagagtgacgtct

SEQ ID NO: 312143 - DNA, 266 bp, Zea mays
cgtgacgcgcaagatcacgcgcgccgtcggccgcatcaagctcggcctgcagaccaaggtcttccagggcaacctctcggcggccagggactgggggttcgcgggggactacgtggaggcaatgtggctcatgctgcagcaggatcagccggccgactacgtcgtcgccaccgaggagtcccacacagtcgaggagttcttgcaggctgccttcggctacgccggcctcaactggaaggatcatgtggtcattgacaagaagtact

SEQ ID NO: 312144 - DNA, 247 bp, Zea mays
gaacacgaaacaacacaggccgcgacgctggcgaccgtggcgacctggtttcttcatcttgacgatcaacagatctatgcagattccatcaacatccgtatattgctcggatttatgctcattgcgttgatctggcaatacgatttctctcccttcatggttcttatcattgccattctcaatgacggtactatcatgaccatctctaaggacagagttaagccatctccgttgcccgacagttgga

SEQ ID NO: 312145 - DNA, 267 bp, Zea mays
aggaggagagggagggggagaccatgacaagaggaagcatggatccacaagaaaagagggcaagttggtagatgccaagacggaacggcggctggcgcagaacagagaggctgcgaggaagagcaggctgaggaagaaggcttacgtgcagcagctcgagactagcaggatcaggcttcagcaggtcgagcatgagctccagagagcacggtcacagggcctgttcgttggagggtgcagcgccgccggggacatgagctctggcgc

SEQ ID NO: 312146 - DNA, 266 bp, Zea mays
ggagcttgcctcttcgctgatcgactcagagtcgctcctcgtgttcggaaggggttacaactacgccaccgcgctggagggcgccctgaaggtcaaggaggtggcgctgatgcacagcgagggcatgctcgctggcgagatgaagcacgggccgctggccctcgtggacgagaacctccccatcattgtcattgcgacccgcgacgcgtgcttcaggtaatgataaagaagcatgggctcagctttggttaccctttttggtagca

SEQ ID NO: 312147 - DNA, 279 bp, Zea mays
cccacgcgtccgcgcgctagctagctagctgttggcttgagatcgatccgtcgactaagctatagctagcagccatgcggagggcgccgtgctgcgacaaggcgagcgtgaagaaggggccgtggtcgccggacgaggacgccaagctcaaggcctacatcgaggagcacggcaccggcggcaactggatcgcgctaccgcacaaaattgggttaaaaaatgcgggaaaactgcagctgagatggccaattactgaggccaatattaacatggtgcttc

SEQ ID NO: 312148 - DNA, 281 bp, Zea mays
agccggccttcaaggagctggcctcccgcttctccgacgccatcttcgtcaaggtcgacgtcgacgagctcgcggaggtcgcaaggacatggaaggtagaggcgatgccaacgttcgtacttgtcaaggatgggaaggaggtaagccgtgtggttggggccaagaaggacgagcttgagaggaagatccggatgttcacgtcatcttcctcatcgtaaactcctgtggttcgcctgggacggagttgctgaagtgaaatggttcccttctcttcaatgctg

SEQ ID NO: 312149 - DNA, 278 bp, Zea mays
gaataaatcaagtctgtcatggcattcagtaatggatacacagaaacaaagtgttgtcacgaaatttaaggctcaactgttcaagctgatgcagcagttggagagtacaaccccacattttattcgatgcattcaaccaaatagcaaacaacttcccaggttattcgagcatgatcttatcttgcaccagcttaaatgctgtggggtgcttgaagttgtccggatatcaagaacatgctatccaactaggatcactcaccaacagtttgctgaaagat

SEQ ID NO: 312150 - DNA, 277 bp, Zea mays
ggacgctgggttcggcatgatgttggtagcatgcactccctccgcattgctcgcgaacattctcatcacgtttgctctacctctgtggaacctctttgctggattcctcatcgttagaccggcaataccaatttggtggaggtggtactactgggcgaaccctgtgtcgtggaccatctatggcgttgttgcgtctcagtttggtgagaacgaaggtgagctttcagttcccggtgggacgcccgtggtggtgaagcagttcttgaaggataatctc

SEQ ID NO: 312151 - DNA, 262 bp, Zea mays
gaaaatgaacatgtccctggttctgtgcgtacctgtctcggcgtgcctggcttccctcgccgccgcgggctggtctcccggcaccgccacattctacggcggagccgacggctcaggcaccatgggcggcgcgtgcgggtacgacaacctgtacaacgccgggtacggcgtgaacaacgcggcgctgagcgcgacgctgttcaacgacggcgcgtcgtgcgggcagtgctacctcatcacctgcgacacgtcgcgtctgggc

SEQ ID NO: 312152 - DNA, 131 bp, Zea mays
gttgaagaagggcgtgcacattgtggtggcacgcctggtcggctcaaggatttgcttgccaagaagaagatgaaccttgacaactgcaggtacttaaccttagatgaagcggataggctggttgacctagg

SEQ ID NO: 312153 - DNA, 140 bp, Zea mays
  unsure (1)..(140): unsure at all n locations
cccacgcgtccgcggacgcgtgggcggacgcgtggataccttgtaccacggttttccagcctatggattcagaggatgaagctcgcatacgagnacagcagcacgtgatctccgggatactgaggcacgcccagatgcag

SEQ ID NO: 312154 - DNA, 269 bp, Zea mays
cccacgcgtccgcccacgcgtccgcccacgcgtccgcccacgcgtccgggcttcagagtcaagctataatgacaggggctaaggctcagaagaatatactccagatggtcaggacagtttgggcttctgatggtctaagaggtttttacagaggaatcagcccaggtgttactggatctcttgcgactggcgctacatattttggtattattgaatcaaccaaggcatggttggagattgctaatcctaatctaagtggacactggtca

SEQ ID NO: 312155 - DNA, 130 bp, Zea mays
tcttccttccgcggactagttttttctgaagattcggcgatggcggcgacgatccaatccgtgaaggcgcgccagatctttgacagccgcggcaaccctacagtcgaggtcgacgtgttttgctcagatg

SEQ ID NO: 312156 - DNA, 143 bp, Zea mays
tggatccattgttcttgtatatcccagttatcaatgatgaaaaaccttgctggtatttggatagaaagttggaaaaggcagcaagtgtcctgcgttttttcacagatattttctacatactccatatcatatttcagttccgg

SEQ ID NO: 312157 - DNA, 224 bp, Zea mays
cccacgcgtccgcgctgggcaaacagcgtacctcatcaacaacgtcaacgacttcagtgacggattctacaagtttgttcctcgccctgtttactggcccatgttcatcatcgcgacgctggcggcgatcgtcgcaagctaatccttgatatccgcgacgttctcagtcatcaagcaatccgttgtcctggactacttcccgcgcgttaaggtggtgcacacgt

SEQ ID NO: 312158 - DNA, 178 bp, Zea mays
cggacgcgtgggtttaagactatgttccatgagtattttatatagtgatgtctttttttgatcaaaaaactgccttctaggcttgtgcctttcgactatggtttggagattgttcccatcttaatgaagtccaatcatctgaaaaaaaaaaaaaaaaaaaaaaaaaaaaaaaataaaa

SEQ ID NO: 312159 - DNA, 146 bp, Zea mays
aagtcttctctcgctcgcatcaccgagaacaccaaggccgggtacggggtggtcgtcatgtccatggctgacgtcccgctcgaattcggcattgcggcgaggtcggcgcaggattgcaggaaagccgacaccaacgccgtggtcgt

SEQ ID NO: 312160 - DNA, 249 bp, Zea mays
acgcaccgcacaggtccgggacctggcgagtggctgagtatcagctgattgatatttctgaggctggacactgacagccttactacttcagatggcaacactaaggatgatcttagactcccaactgatgagactcttgtggcccagattaaggaagggttcgaaagcgggaaggatcttgttgtgactgtccagtctgcgatgggggaggagcagatctgcgcgttgaaggatgttggccccaagtaa

SEQ ID NO: 312161 - DNA, 287 bp, Zea mays
  unsure (1)..(287): unsure at all n locations
ggggtacgagctcctgggcatggagaacctgtgcgactacttcccggggctcgccgccctcgacccgcanggcgtgggcgcacgatgcgccgagctcatgccgcgggtgaaccggttcgtgcacggcgtcatccaggagcaccgtgccaaggcggtcgccggtggagacgcgcgtgacttcgtcgacatcttgctctcactgcaggagagtgaggggctcgccgacgccgacatagcctctgtgctctgggagatgatcttcagaggaacggacgctatggcggtgc

SEQ ID NO: 312162 - DNA, 281 bp, Zea mays
cggacgcgtggcggacgcgtgggcggacgcgtggggtcggtggacacgtacctgttcgcgctgtacgacgaggacctcaagccggggccgacgtcggagcgctcgttcgggctgtaccacacggacctgaccatggcgtacgacgccgggctgacctccaactccaacgccgggggaggtacaggtactgcggcgccggcgcagccaaggcgggcgggtggtgcgtggcgcgggacggcgcttcggacgcggactgcaggcggacctggactacgcgtgct

SEQ ID NO: 312163 - DNA, 272 bp, Zea mays
cccacgcgtggggttctagatcgcgagctgccgcccttttttttttttatatttttttattttgtatttttgcaaatagcctcatcaggcatctcattaaaattgaataggtcgaacatgtgtccaaaatgacaagtgagaagcattaggtagcaacaatagacattacagtcttgatgaataggagaaagcggctgccgacagaccggcagaaaactttgttcatgctaatgaagaaacagcgacaaaaggagaaagaaccgggccggaag

SEQ ID NO: 312164 - DNA, 273 bp, Zea mays
ctagttctagatcgcgagcggccgtcgcgccgccgtttgccgtcgaaccgccgcgggccgtcgagttgaagaggtgaggcaaagggaaggagagcggcaaggagaggaaaggacgccatggcgaccgcttcagtgactttcaagtcacgggaggatcaccggaagcagctcgagcttgaggaggcgcgcaaggcggggcttgcgcctgcggaggtcgatgaggatgggaacgagatcaatccccatatcccccagtacatgtcctcggcccca

SEQ ID NO: 312165 - DNA, 263 bp, Zea mays
ggctccgaatatctcgacattcaactccctcgtcttcggatactgcaggcacggacaccttgctggggctagtcgagtgctcaaggccatgctggggcggggcatttcaccaactgcaaggacatacaactattttttcacggtctttgccaggaatcttagcatcgatctgggaatgaacctctacgtgaagatggtcagcaatggctacgcgccagaccggctcacttaccaccttctgatcaagatgttgtgtgaagcga

SEQ ID NO: 312166 - DNA, 135 bp, Zea mays
cggacgcgtgggttttttttttttttcttttttaacgatcaatgcgtattttgtttcataaataaactgtcattcacacgtatgagtagagtacttcggaaccccaactgacaatctacctacacagtcggggag

SEQ ID NO: 312167 - DNA, 278 bp, Zea mays
aataaaaatgcccaagacgaaggtgcaccccaacgccgccgccgccgagccagtgctcacggtgagcaccgcctgcgcgcgtgcagaccccggcgaggaggagccgcccacggtgctgacggtgtggcgcaagtcgctgctcttcaactgcgacggcttcaccgtgtacgacgccaggggcgacctcgccttccgcgtcgactcctacgactccacgggccggcggcgcgccgaggtggtgctgatggacggcgcgggcaccccgctcctgaccgtgc

SEQ ID NO: 312168 - DNA, 279 bp, Zea mays
caagcttaagcttacaatcaacctctcaatcacagtcacaaaacagccattatgtctatcaaggtcggaatcaacggcttcggccgcattggtcgtatcctgctccgcaacgctctcgagaagcccgagctctccgtcgttgccgtcaacgatcctttcattgagcccacctacgctgcctacatgctcaagtatgattcttcccacggtctcttcaagggcgaggtcgaggttgatggccagaacctcgttgtcaacggcaagcccatccgcttctac

SEQ ID NO: 312169 - DNA, 281 bp, Zea mays
cccacgcgtccggccgctctcgcacgacatcacgccgcgcgtgaatcgcctctactacaacgtcatcggggaacatgtctccgtcacttggctcggtcccacgccaagggtgatcgtgaacgaccccaagctggtgcgggagatcctggccaacaagcttggtcacttccagaaacgcaagcacgacggcatcgtcaggcggctggccagcgggctggtcaaccacgagggcgagaaatgggctgcgcaccgcaagctcatcagcccggcctttcacctcg

SEQ ID NO: 312170 - DNA, 275 bp, Zea mays
acaccgtctgctgcgaccgcaccgcgctccgcaccgacgtctgcgtcatgcgcgggcacgtccgcacccaggccgcctccaactcgctcttcctgctcctgcctcccaactcgtctcgaccggccaccgacgagcacatccgcccatacacgcgcaagtgggagtccagcatcatgagcaccatcgacgagctccgcctccgctccgcgcggatgccagccaaccagacgatccaggatttccgtctgatgctcgatgacgctcaccgtggtcgc

SEQ ID NO: 312171 - DNA, 278 bp, Zea mays
cccacgcgtccgcccacgcgtccgcccacgcgtccgcccacgcgtccgctgacaagcctagtctttgtgaagcagctaccaaggttcccggcatcagtatccgcgctacatgtgaacagcctcactggtgagattctgactggtgctggtgttctttttgctgtttggagcatcaatggggactgccttgctgtggtgaacacctcccagcttccttctgacctcatcttgtctgtgacaagcgcgacacactcagactggcaggacacaaactggta

SEQ ID NO: 312172 - DNA, 269 bp, Zea mays
ggacgctggtccggcatcacctcctcgccaagcctaacctcttcaccgaggcctcagcctcagccaccgttgcctccttccagcgccccgtgctctgcctcttcgacaggaatttggacctctctgtgggaatacagcacgattggagctaccgccccttggtccatgacgtcctcggcctcaagctcaacaagctcaagatgcccgcggacaagtctggcccggccaaggcctacgatctcgatgattccgatgccttctgggtagca

SEQ ID NO: 312173 - DNA, 273 bp, Zea mays
gacctaatgacatcatgttctccatctaactatttgccttcgtttatgcatacagtgaaggtaaatggatttgtttgcaaagaccccatggctatgaacgcagatgacttcttcaaggcagcaaaacttgaccaaccaagggacaccaagaacaaggtgggatccaacgttactttgatcaatgccatgcagttaccaggactcaacacattgggcatctcgttggctcgcattgactacgcacccttaggtcaaaatcctccacacacccac

SEQ ID NO: 312174 - DNA, 270 bp, Zea mays
gtgctcgcccttttcattgcacgtgcagttgttgatgacattctgccacctgctttcctcagcaatgcaaaagtgagtctgtcaggatcttcaaagggtatgcaggttgtacaaattgcagagaaaagctatctttcagcaccccaccatgcagagttaattgagcgacgatggggtggttcaacccacatcacagtagaagaggtgaagaggaggattgctgatcttctgaaggaatacatcagaaatggtgatacagctgaggcttgt

SEQ ID NO: 312175 - DNA, 264 bp, Zea mays
cggacctggcggacgcgtgggcggacgcgtgggcggacgcgtgggatttcccatctctctctgcgcacgtcccgtgctcattccgctagttctcccaattccgaccccacctcctcggtcgtcgcttcccccagagagcaggagccgcctcgtccctgccggtcccgaccccgacccccatcccgtccgcgtccaacgccatgaatcccgagtacgactacctcttcaagctgctcctcatcggggactccggtgttgggaagt

SEQ ID NO: 312176 - DNA, 264 bp, Zea mays
cggacgcgtggcgagacgcgtgggcggacgcgtgggctcggcgccttcgacttcgccttcgtcgacgccaccaagcccaacaacgtcaattaccacgagcagctgctccgcctggtgcgcgtcggcggcaccatcgtgtacgacaacacgctctggtgcgggaccgtggccatgccgccggagacgcccatgtcgggcatcgacatgacgatcgctgcggacatgaaatagcgcatgggacgccgcctgtagcagcgcattaag

SEQ ID NO: 312177 - DNA, 252 bp, Zea mays
cggacgctgggaagtgatgaagcccgagcccggcacggtcaaggtgaccgtggacgaggtgacgctccacaagttcgagctgtccgacgtggacgccatgatggcgtgggcgtcggacccgcaggtggccgccttgtgccggtgggagccatacgagtcaacggagccgctgctggcctgcatccgcgacgtggtgctcccgcaccagtggtgccgcgccatctgcctcggcagcgaaccccgccccgtcgg

SEQ ID NO: 312178 - DNA, 266 bp, Zea mays
cccacgcgtccgctagttctagatcgcgggcggccgctcgcgatctagaactagcacgttcttggcatacacatgcttccacatgactcggaagatcccaagcatagtcaagagcgctctggacccgcagacgacggtggggttctcgcactggggacggttgcacgccagcagaaacgctctcaccaccggctggctgccgttcaacaccgccgacggctccgcgctgctcggcgagatagacgtcgcgttcctcgccgcgtact

SEQ ID NO: 312179 - DNA, 284 bp, Zea mays
gcccacagcggtcgccgtgcaggattgggtggagagggggtactcggtggtgacagtgagctgccgcgaccggcccaagctgctcttcgacgtcgtctgcaccttgacagacttggattacgtggtgtaccacggcacgttccacacagacgacgatcacgcccgccaggagttctacatcaggcggttggacgagcggccaattagctcggcgaccgagaggcggcgcgtgatccaatgcttggaagcggccatcgagaggcgcgcatccgagggagtgaggc

SEQ ID NO: 312180 - DNA, 219 bp, Zea mays
cggacgcgtggattccgatatgttatcttcaaaatcgaagataagcaaaagcatgtagttgtagtgaatgaaggggccactactgaaagctatgatgatttactggactctctcccagagaatgactgacgatatgcgctgtatagattttgattttgtcaccggggagtatgtgcagaaaagctagattatcttcattgaccaggccccgtcgacatc

SEQ ID NO: 312181 - DNA, 282 bp, Zea mays
actgaaatgccctgttttgtcatttattaaatctgaatcaaggggaagtggaaatttctgtttagttacatttgtttccttttttcctgtttttagacaggtgaaatttgtcttgatatattgaagaatgcatggagccctgcatggacccttcagtctgtttgtagagcgataattgctctgatggcccatcctgaaccagacagcccacttaactgtgattcaggtacctcttctcactctatatcaaactacagtacacgaaaaactatgacgttctac

SEQ ID NO: 312182 - DNA, 273 bp, Zea mays
cccacgcgtccggatgatgcaaaagtcgcagacatggaggaaataactgagatgatgaatatgttgttgtaatcattgtcccagatgggtggtgtgctgatgtcgtgctgtttatgtgttgcttatttctatccagctgtggtggatatgtatctgaatctgaagaagctgcaagtttttcaagttggatggagtccaaagaatgaaactatacttgcatcctgttgtctgggcagaaggctcatggtctgggatctaagcaggatcggccaa

SEQ ID NO: 312183 - DNA, 276 bp, Zea mays
cggacgcgtggggactagttctagaatcgcgagcggccgctcgcgatctagaactaggactagttctagatcgccagatcaagaacaagccgtaccctaagtccaggtactgccgtggtgtccctgaccccaagatcaggagctacgatgtcgggatgaagaggaagggtgttgatgagttcacctactgtgtgcaccttgtctcttgggagaaggagaatgtctccagtgaggcgctcgaggctgcccgcattgcctgcaacaagtacatgacca

SEQ ID NO: 312184 - DNA, 275 bp, Zea mays
acggaagaacgagcgggagctggcgactggcggacgcgtggtagcagtctagccagtcacaagacaagatttatcgaactgaaccgaagacggatagtcctcctggaaggtctagctgcatcattgcagtttgttgatgctctcggacccagcaaatctggtcattcatctgggtcagccctgaaggacgatgttatttttctgcgcattgtttctctgcccaaaggacgtaagtttttagcacgttaccttcggcttcttgtccctggcagcga

SEQ ID NO: 312185 - DNA, 265 bp, Zea mays
cggacgctgggcgtcgaggttaccagcgctcacgatctcctcccgaaagagcagggcacggcgaaccctatcgtggaggtcgagttcgacggccagaagtcccgcacggccatcagggacagggacctcaaccctgtctggaacgagcagctctacttcaacgtgtctgacccgtcccgcctcccggagctgcacctcgaggcctacgtgtaccacgcgaaccgtgccgacaactccaagtcctgcctgggcaatgttcgcatat

SEQ ID NO: 312186 - DNA, 263 bp, Zea mays
cggacgctgggcggacggtggcggatgacagcccgagaacgcgggttttgaacacaatcagaaagctgaatccccatctgttcgttcatgggatcgtcaatggtacttacaatgcacccttcttcgtgacgcggtttaaggaggctatgttcttcttctcttcgatctttgatatgctcgaagcgaatgccttacggatggatgagcataggctgctgatagagagagagttctttggccgggaagctgtcaatgtgattgcc

SEQ ID NO: 312187 - DNA, 261 bp, Zea mays
ggggaatgaacgaaggcgctgtttacttgtggactttgccaatgttccattgcaacggttggtgctatacatggacacttgctgctctctgcgggacaagcatatgtcttcgtcaggtttcagcgaaggccatcttctcagctatagccaacgagggcgtgactcacttctgtggggcaccggtcgtcctgaacaccatcatcaacgcccctccagccgacacgattctccccctacctcgtgtcgtcaacgtcatgaccg

SEQ ID NO: 312188 - DNA, 267 bp, Zea mays
cacatgtgcaatgaattagcagaggtgaactcaaacaaaattccatatactcaacagctctcataataaatcgcactgcaagtccccttgcgtggtttatggagtgcaaggatcgcaagaatcgtagctcagtgatgttatcctacaactttttgccaagtatgccagcggaaaaactgagggatgcagcgaataagatgaaagagatacttggtgattatgatgctattcatgtgagacgtggtgatctattgaaaaatcggaaag

SEQ ID NO: 312189 - DNA, 278 bp, Zea mays
cccacgcgtccgcagaagcggcggcggcggacaaacgcaggcgaaggcgagggtgtgagggaaggagcaccagccatggtgcacgtcaacttctaccgcaactatggtaagacgttcaagaaaccaaggcgtccttatgagaaggagcgtcttgatgctgaactgaagctggtcggtgagtatgggctgaggtgcaagcgtgagctttggagggtccagtatgcactgagcaggatccgtaatgctgcaaggcacttgctcacccttgacgagaagaa

SEQ ID NO: 312190 - DNA, 274 bp, Zea mays
gaaaattcggacagtagagcaagatgggaagaccataaaacttcaaattgtaagattactatgctgtattttcttttatttgtcatatgtatggttcgatgccttgtgatgtcatatttgacatgtgttccctaggtaaactggaaagtaaaaaaataagagttagccttttcatgatagtcaatagagaatctggaacattgatatctgctgactaattgtgtaggcaataagtttgaacctaaagtaacatatgttcccactatttagcaga

SEQ ID NO: 312191 - DNA, 266 bp, Zea mays
cccacgcgtccgcatgttcgtgccgtgcgcggtgatggcgcaggtgggcacgctgttcgtgaagcagggcgtgacgctggaccgccgcgtcgggcgcagctcgttccgggtgcctgccgccagcctcggcgcggtggtgacgctgacggtgctcgtctgcgtggcggtctacgaccggggcctcgtacccgccgtccgaagcgcaccgagaacccgcgcaggatgacgctgctgcatggcatcggcgccaggctggtcctccaggt

SEQ ID NO: 312192 - DNA, 264 bp, Zea mays
cccacgcgtccgcccacgcgtccgcccacgcgtccgggtgtggagggtctgcaaacatgcttggtggccttactgtcaatgtcaaggcggtttaaacctgctgcagaatcgtatgtgaaagtgccattttttggagctgtttcataccttacattggcagtttgtccgttttgcattctgtttgctgttctgtggggtgtttatcgtcggttgccttatgcttggattgggcaagatattcttggtattaccttgatcgttaca

SEQ ID NO: 312193 - DNA, 358 bp, Zea mays
tccggtaattcccggtgtcgtacccatcgtcgtccgctccacgcgtgccggtagcgacttagtgtgtcagttgtagttcttcgatatgatgatcgtatgcttgcggttttgcatccatcagatgttcgtatgtatgttctttgcaatctgtcggtatcatagctgtcggctgcggtctcatagctgtcaatgtgcggtcaagtaagtaccctcgacctggtaggagacgagcaccgccgcgcaggccaccgtcgtcctcggcgtggccccggagaataaggccgcgcccgagttcgtcgaggccgcggcggagtccgtcgatgtccgccacggctgcagctgcggtggcaactgcaag

SEQ ID NO: 312194 - DNA, 183 bp, Zea mays
cttcgtgctggtgcacggcacctgccacggcgcgtggtgctggtacaaggtggccaccctcctgtcatccgcgggccaccgcgtgacggagctggacatggccgcgtgcggcgccagccccgggcgcgccgaggaggtgccgtcctttgatgagtacagccggccgctccttgccacggtggc

SEQ ID NO: 312195 - DNA, 288 bp, Zea mays
atcctctccacaccccataccagacaccacccgagagagtcaacatgtcggccaagcccacgaccaagcagttcgggaaggcgacccgggaggttcccgcctccgccgaccaggccaagaagtggtatcccgccgacgacgacagcgcgcccaagaaggttcgcaaggctgtccgatcttgggctccccgaaagactctccagcccggcaccgtgctgatcctcctcgccggccgcttccgtggcaagcgcgttgtcctcctcaagaacctcgaccagggtgttctgc

SEQ ID NO: 312196 - DNA, 289 bp, Zea mays
tggaggaccctgctaattttgacacgctttccgtcgtcttcaacaggtcgagcaggttcgcgaggctgcagggggtgcagtgcgcgatggcggggaggaacctgtacatgagattcagctgcagcacaggggacgccatggggatgaacatggtctcaaagggcgtgcagaacgtgctggattttcttcaggatgacttccatgacatggatgtcattagcatatctggttcatcttgctctctcggtttttggcaacttctgctccgacaagaagccgtccgccgtga

SEQ ID NO: 312197 - DNA, 280 bp, Zea mays
cccacgcgtccgctgctgctgttcttgtttccccgctctccaagatgtcgtccccgagcaagcgccgcgagaaggacctcatgaagctgtgaggatgctggacctctctttggatgatgagcgactacaaggtggagatggtgaacgatgggatgcaggaattcttcgtcgaattcaaggggccggccgaaagtatctaccaaggcggtgtctggaaggttagggtagaactgcctgatgcatatccttacaaatccccgtccatcggcttcatcaacaa

SEQ ID NO: 312198 - DNA, 173 bp, Zea mays
cctggacccccgacgacgtggagaaggacgtcggcgtcggcctgcgctacgactacggcaagttctacgcgtccaagaccttctacgaccccgtgctccgccgccgggtgctctggggctgagtcggcgagaccgacagcgagcgcgccgacgtcctcaagggctgggcatcc

SEQ ID NO: 312199 - DNA, 285 bp, Zea mays
ttcattattgaatccaatgtcacgttcaccgggcttcccaaggaaacatatttcgcgacgaacaaggctaggtttgcgaagttccagcacaaaattgtttaccaattcctgccagatcatgctctaccacagagtagcgacccatgggtcatcgaagctgccactcgggacgcaatgaccgcgctgctccataaccatatcaaggcgcttccagcgaatgtcgagaccatggtcatcatgtcagacgttgacgaaatcccatcacagcactcgatcgcgctcctc

SEQ ID NO: 312200 - DNA, 273 bp, Zea mays
gtttgccaacaacaaccgcttcaacgtgaccctgtcttcgcagagcctgaccaattccacggcgtcggtcatcgtgctcgccaacaccgagctcaccggctgcctgccgccgagcatcggcgacatggccgacacgctggtggagctcatcctcctcaacaccagcatcagctcctgcatcccgccggagatcgggaagctcaagaagctcagggtgctggacctcagccacaacgagctcgccggggagctgccggagagcgtcggagacat

SEQ ID NO: 312201 - DNA, 275 bp, Zea mays
cggacgcgtgggcggacgcgtgggcggacgcgtgggcggacgcgtgggcaaggacatcgaagcggactcaaacgccctgactcggccggttgaactgttggaacacctggcagcgttgataaagctgagcagcttattaagagtgtcatagctgaggctgaggctggtggttcccctgccttaatagctagaggatttggaagtggacagcctggatcagagcaatttgagatgacagttcctgataacaaggtcggtctcattatcggaaaagg

SEQ ID NO: 312202 - DNA, 271 bp, Zea mays
atttgtatctcacaatggcgggcacaaagctaatatcacttgggctccttgttctcataggcataggattagccaatgctgtgagggtggttagataccactctagtgctgatgggactggcaacggagagggacaaggtggcggttatgtgaatcgagggggatcggggtttgggtctggtactggatctggtgatagtagaccttatggtacccatgcaagtgctggagggggtggtgcaggtggtggaactagccaatacggtggata

SEQ ID NO: 312203 - DNA, 274 bp, Zea mays
attatatctgaagcagggtcagctggtgtttctctccatgctgatagaagggcaaaaaaccagagaagaagagtacacataacacttgaactcccttggagtgcagatcgtgcaatacagcagtttgggaggacccatcgttctaatcaaacttctgcccctcaatataggcttcttttttacaaatcttggtggtgaaaagcgatttgcatcaattgtggcaaaaaggctagagtctcttggtgctttaacacaaggagatcgcagggctggg

SEQ ID NO: 312204 - DNA, 274 bp, Zea mays
cggacgcgtgggcggacgcgtgggcggacgcgtgggggcgaaggaaaatgatgggaaggaagctgcatttatttggacagcaaatgatgaaaagaatctgatggatcttggatattctgagatagaaaggaaccgcagttggaaattttgatggctagacgaagatcgaggaagaacatgacatttgaaatcgataacaacttgatagatgttcatagtgctggctctggtagaagtttagatgatttgtcacgcttccgtgcacaggtacctc

SEQ ID NO: 312205 - DNA, 268 bp, Zea mays
gctgactgactctggtggtttccaaatggtttcgttgctgcatttggctgatattactgaggaaggagttacgtttcagtcacctgttgatgggaagcccatgctcttgacacctgaggaatctattcatattcagaacaatattggagctgatatcatcatggcacttgatgatgttgtaaagaccacaattactggcccgaggataaaagaagctatgtatcgcaccattcgttggattgacaggtgcatagctgctcacaagaaa

SEQ ID NO: 312206 - DNA, 270 bp, Zea mays
gcgatacttcagacagctcttcttgcgttgcctactaagctctctctctctctccttctctcttgtgttcttgccttctgcctactacgagtgatggccagcctcactgacctcgtcaacctcgacctgagtgactgcacagacaggatcatcgccgagtacatctgggttggaggatccggcatagacctcaggagcaaagcaaggacggtgaaaggccccatcaccgatccgagccagctgccaaaatggaactacgacggctccagc

SEQ ID NO: 312207 - DNA, 225 bp, Zea mays
cagcccccaaggccccaactacccccagtctcggaagagaactatccagaagcgcaagactccaaagccgtcgccttcctatccatcccttcctcgccgcgggggtcgcctgagatcacataaacaatggtggaggctgttgctgtgcttggtagcagcgattgtgtcaaaggcaccatcttcttctaccaagaaggagatggccctaccactgtctacggaagt

SEQ ID NO: 312208 - DNA, 164 bp, Zea mays
gttgactatggcaagaagtccaagctcggtttcaccgtgtacccatccccccaggtgtccacatccgtggttgagccatacaacagtgtcctgtccacgcactctctcctcgagcacactgatgttgctgtcctggtcgacaatgagggcatctatgtgcatct

SEQ ID NO: 312209 - DNA, 281 bp, Zea mays
acaagtaagagcagtgtccatccggtgggtcggacggaactagctcctctgtcgccaaataccctaggccctgacttgctttggccatggtcgaagcagcgctagccaggcgagcctcctgctccagaagcagatcaaggatcttgcgaagaaccccgtggatgggttctccgccgggcttgtaggcgacagcaacatcttcgagtggcaggtcaccatcatctgaccgcctgacaccctatatgatggaggctacttcaatgcaataatgaccttccccc

SEQ ID NO: 312210 - DNA, 261 bp, Zea mays
cccacgcgtccgggtaccctttcacagaagaggccattgatcaaattaaaaaggataagattaccaagctcgttgttcttcccctttaccctcagtactccatatcaacaagtgggtcaagcattcgtgttctccaagacattgtcaaggaagattcatatttttctggtttgccaatttccattattgaatcatggtaccaacgagatggctatgtgaaatcaatgtctgacctaattgaaaaggagctctcggccttct

SEQ ID NO: 312211 - DNA, 157 bp, Zea mays
cccacgcgtccgcaatgtttgcctggtcatgaagtattattactttcgttgaaaccgtgatgctattaagacttaatttttttatggaacatcgaatgtcaggcataaaacaagaaagaaaaaaagaaaaaaaaaaaaacaaaaaaaaaacgaaaag

SEQ ID NO: 312212 - DNA, 302 bp, Zea mays
cccacgcgtccgcccacgcgtccgcccacgcgtccgggataaatatatatacacagagaatccgaatgcagttttaggatgggataagctctataccatagcaattgggattgctagagggttggaatacttgcaccacagttgtaatacacgcatagtccatttcgacatcaagcctcataatatccttctggatcagaactttcacccgaagattgccgattttggtttggccaagttgtgtcatatgaaggagagcaagctttctatgactggtgctagaagtacgcctggggtcatag

SEQ ID NO: 312213 - DNA, 287 bp, Zea mays
gcacccttcaccttgttctccttctggatgttgtagtccgcgagagtgcggccatcctccagctgcttgcccgcaaagatcagacgctgctggtctgggggaatgccgcactctcgcggactacaacatccagaaggagagcacccttcaccttgttctccgcctcaggggtggtatgcagatctttgtgaagaccctgactggaaaaaccataaccctggaggttgagagctccgacaccatcgacaatgtgaaggcgaagatccaggacaaggagggcatccccc

SEQ ID NO: 312214 - DNA, 281 bp, Zea mays
ctgcctcgagcacggcatccagcctgatggccaagtgcctggagataagaccgcgggacatcacgatgatgccttcagcaccttcttcagccagactggtgctgggaagcacgttccccgtgcaatcttcgttgatctagaacccactgtgatcgatgaggtgcgcactggcacgtaccgccagctcttccaccctgagcagctcatcagtggcaaggaggatgcagctaacaatttcgcgcgtggccattacacaattggcaaggagattgttgatctgt

SEQ ID NO: 312215 - DNA, 282 bp, Zea mays
cggacgcgtggggctcgttccggccgctggaggaggtgcacgcgctggtgccgcatgtggtggacgtcatcgagcggggcgtggaggagctgatcgcggagggggccgcggacctggtggtgccggggctgctccccaccggctgcttccccatgttcctgtccaccttcgtcggcaagccggccgcggcgtacgggccccgcagcgggtgcaacagggagctcaacacgctgtcgtgggtgcacaacgcggcgctgcagcgatatgtggaggagctccgcg

SEQ ID NO: 312216 - DNA, 280 bp, Zea mays
gttctagatcgcgagcggccgctcgcgatctagaactagtccggacgcgtgggcgacggcgaggcctctgtcccgtcatcgtctcctcgaggcccggaggctgcgcctctgtgacacttgaccgtgaggcggacggcgactcggaggacttcaccagcgagtccctcaagcaccgaggccgagccgcccaccgctcgccgccgcctcgcctggcgctagtcgccgttgccgagcctgttcggcacatccgttggggtgccggggcaccgatcaggctgcg

SEQ ID NO: 312217 - DNA, 271 bp, Zea mays
cggacgcgtggcgtgacgcgtgggctcgcgcaccttgacctggccttcaagttcggcgagctcaccgcccaactgcacggcgtggtcggccagacgtaccgctccgactacgtcaaccggttcgatgtcaaggcctcaatgcccaccatgggaggggacagcaactacaccacgtccagcctcttcgccgctgactgcgccgtggcgcgttacgcgccgaatggcggtagccgtgacgacggcgttgctatggtgtcagagatcgctggca

SEQ ID NO: 312218 - DNA, 263 bp, Zea mays
cccacgcgtccgcccacgcgtccgggaccgtggtcgaagaggctgaagcccatgtcgtcaagagtattgtttttgagtcgcggaccagagggaagaaaaatcgtagtcatgtttggactttaactttgttttatgttggaaagtacttgaaagacttttcctgtggtaattctaggcgtaggttgctgtgctggttggggtttactggtgaaccagagtttttctatctcccactatgaatttgttacctcaagttacctgga

SEQ ID NO: 312219 - DNA, 273 bp, Zea mays
cttcaccagaaatttgtaaatgctgtcaaccaaattggatttgacaaagtcgggccgaagaaaatactggatcttatgaatgttcctggcctgacaagagagaatgtggccagtcatcttcagaaataccgcctctacttgagtaggttgcaaaagcagaacgaggaaaggataatgggtgctgctaggcaagatttcaatcaaaagggaccatcggatcatcttaacctccgaagttccttccaagagcaaccaggcaacctttccaatgga

SEQ ID NO: 312220 - DNA, 278 bp, Zea mays
  unsure (1)..(278): unsure at all n locations
cccacgcgtccgcccacgcgtccgcccacgcgtccgcggacgncgtgggctgtagtggttcacatcgtggaggacggggcagggttaccccgaatggagctgatagggagcgtgcacttgcggacgccaacgagtgggccgaggcttggaggcgccaggagaaggcaagcaagatgcgatagcgaccagagcctgactgcatgagttttgacatgtcactgcaaagatgcttactttgcatacattttgaaagagatctgtgggctacacgaggggtt

SEQ ID NO: 312221 - DNA, 270 bp, Zea mays
gatctcgccggcggcgtcccgcggcttcctcacgtccttcccggaagtgttcatcaacgtcggcatcctgctcggctacctgtcgaactttgcgtttgcgcgcctaccgctccgcttcggctggcgcgtcatgctcggcatcggcgcggcgccggccggcctgctcgcgctcatggtgctctggatgcccgagtcgcctcggtggcttgtcatgaagggccgcctcgccgacgccagggccgtgctggagaagacctcggcctcgccgga

SEQ ID NO: 312222 - DNA, 265 bp, Zea mays
cccacgcgtccgcccacgcgtccgcccacgcgtccgctccgagtacctccatgccgtggaagctccgcacacttacttcacttccccgtgagtgctggtagtaacgtcatgatgtgactcgtgacctcacatctctcagcattggctctggctcctgtctctcgacgccgctttgtccgtgccagcccagatgtttctccactccctcttgatgcaaaaaatggcaaagaacacgcagcagccaagaaaagatggcggcgcgaga

SEQ ID NO: 312223 - DNA, 258 bp, Zea mays
gccgcgccaagacggacgtgcagctctcggacgggtgcatgatcccccgcgacggagctgctcatcccgatcatggccatccaccacagacgccaggttctggggccccgacgccgcgcagttcaaccccgcacggttcgccggcggcacggccagggcggcgaacacccgctggcgttcatcccgttcgggctgggctcccggatgtgcatcggccagaacctggcacggctggaggccaagctcaccatggcgatc

SEQ ID NO: 312224 - DNA, 271 bp, Zea mays
gctttctgggactttaggttacgtggctccagagtacctattagatgggaagctgactgaaaagagcgatgtatacgcatttggagtggtgcttcttgagctactaatgggaaggaagcctgtcgagaagatgagtcaaactcagtgccaatcaattgtgacatgggccatgccgcagctgactgacagaacgaaactccccaacatagttgacccagtgatcagggacacgatggacccaaagcatctgtaccaagtggcagcagtggcg

SEQ ID NO: 312225 - DNA, 273 bp, Zea mays
cccacgcgtccgcggaactgtggtgaaatcttttgtgacaaatgcagccagggaaggattgctctgacggctgaggataatgctccacttgtccgagtttgtgatagatgcatggctgaggtcactcaaaggcttagcattgctaaggatgttgccaacagatcttcaactgttcaaagtcatgaagatcttgcaagaaaactgaaggaggaaatggagaaaaaccgcaagtcatcagcatctggtggtggtgccctggtaccagaatgaggg

SEQ ID NO: 312226 - DNA, 266 bp, Zea mays
gcgacggtgaaggagccgactctgctgccgaagatgagcccggtgatgcatcgcttcgcttggcagtcctacagcgaggacacgaactcgctggatgacagcgcgtttgcaagggatggcctgatcgagcagctcagcttgacatgggacaagtcggactacctgtggtacaccacccatgtcaacattggtgccaacgaacgattcctcaagtctggccagtggcctcagctcactgtgtactccgctggacactccatgcaggt

SEQ ID NO: 312227 - DNA, 264 bp, Zea mays
ctagtcccaaatactagcaggcggcaggcggccaagaccggtgtccctcgacgacctgccgagtgccgaggcaagacgcgaggaggctgtaatggcgggcgccgaggtgggagaagacaagtaccgctccttcatccacggcgagggcgagagggacaccgtgtggaggtacggcgccccgcccaactacgacgtggtcaacaagctcttcgaggaagagaggactcaggtgtggcccgagggctcgctggaggagaaggtgca

SEQ ID NO: 312228 - DNA, 259 bp, Zea mays
cgccgtctgccttctgcgcctccatttcggcctctgtcccttgcaagttcaatctcacctccaaccatgggtaaagagaagtcccacatcaacattgtggttattggccatgtcgactctggcaagtcgaccaccacaggacaccttatctacaagcttggaggcattgacaagcgtgtgatcgagaggttcgagaaggaggctgctgaaatgaacaagcggtccttcaagtacgcgtgggtgctcgacaagctcaagg

SEQ ID NO: 312229 - DNA, 269 bp, Zea mays
cccacgcgtccgcccacgcgtccgggtggtagtccctgggtttattacttgacatatgctttccttgtcttcatcttcaatatttttgatattgctaacttacccaaagagatatctgattacctgaataagatgtgtgcgagggtaccaaggataaagcctggaagagcaacagtagactatcttacaaagatacaaacatcaacacgtttctggggaggtctactgctaagcttgcttgcaacttcctctttattgcttgaccgata

SEQ ID NO: 312230 - DNA, 215 bp, Zea mays
cccacgcgtccggaaggaggcggggccgagtagcagggcggtgttggtgacgggcggggcaggctacatcggtagccacgccgtgctacagctgctcaccgcgggcttccgcgtcgtcgtcgtcgatagcctcgccaactcctcagagctcgtgatccgccgcctgcgctcgcttgcgggggaacacgctaaaaacctcgcgttccataaggttg

SEQ ID NO: 312231 - DNA, 269 bp, Zea mays
cccacgcgtccgcgtcacttagcttcactcggttctgcttctacacatctatatatcgttagtttggcaaagaaaagaagcaacgacgatggctgctgcggcggcgatgatggtctccggaggacgggcggcgctggcggtggcgggcgtgctctgcgcggtggcggccatggcggcggcgcacaggcgtcgaacgtgcgggcgacgtaccacctgtacaacccggcgcagaacgggtgggactacgagacggtgttcaagaagatcga

SEQ ID NO: 312232 - DNA, 269 bp, Zea mays
gacctcctggagttgggaaaaccactctgatcagggaaatagctagaattttggcagatgaaggtaagaaacgtgtgatcatagtggacacatctaatgaaataggaggtgatggggatgtacctcactctggcattggacgtgctaggagaatgcaagttcccaaagttactatgcagcacaacgtaatgattgaagcagttgaaaatcacatgccggaagtaattgttatcgatgagattggtacagaacttgaggcaatggcagct

SEQ ID NO: 312233 - DNA, 178 bp, Zea mays
cccacgcgtccgcccacgcgtccgcccacgcgtccgcccacgcgtacgcccacgcgtccgactggatctgttagagaagatgttgactttagatccatcacagaggatatcagcaaaagatgcacttgatgcggaatatttcgggactgatcccttacaaggcgatcaaaaaggcttg

SEQ ID NO: 312234 - DNA, 285 bp, Zea mays
gcacaagcgcactctagcaatggcttctgaggttgtccgccctagcgacgccgagctactaaaggcacaagccgacatatggcggctcagcctctcctacctcacgcccctgtcactgaggtgcgccgtggagcttggcatccccacggcgatctaccgccatggcggggctgcctcagccgctgagctggtcacggcgctgtctctcccctccactaagctgccgttcctccgccgcctgctagggctcctcgccgcgtcgggcatgttcaccgtcgacaagca

SEQ ID NO: 312235 - DNA, 277 bp, Zea mays
caccctccctcccagtcgccctacccacctccctctccgcacggcggctgccgtcaaagccgccgagtccaagctcgtctcctacggatctgtatcacgggaagcacatctgctggcctacaccagattcttccatggttgtattatcacaatgtcattggtgtttcacatttctttctattagttgaaggagaggctgcaaagccagctgtcacctctgttcttgaatctattcagccgcatttggaatgagacttggctagcaggtttcttttac

SEQ ID NO: 312236 - DNA, 206 bp, Zea mays
caacgctctctagcgtccgagactccaagcactagcgcggcggagctactgcagcgaccatgggtgtcctggaggaccagaggatctccaatggggagcatggctgccaggaaaggaccgtcgaccctttctctaaggaggattggtatgacatccagggaccgtcggtgttcagtgtccgcaacatcgggaagactctcgtatcc

SEQ ID NO: 312237 - DNA, 232 bp, Zea mays
actccctccatttccctcacctcccgcagcagctagccgccagccaacaaccgaaccaaccaaccaacccacaggccacagcgagcgagtaaagcgtccaatggtagcgatagcggccgtgcagcagcagcagcagcagcagcgccgcgacgcggaggcggagctcaacctgccgccgggcttccggttcgacgcgacggacgatgagctggtagcgcactacctctgcgcg

SEQ ID NO: 312238 - DNA, 273 bp, Zea mays
cctacccagagtccatgccggatcatgttgagggtagctcggttgtaaagcctctttcttacgaagaggagcaattgacaagggtattttacgagcagaagattcaggaagtatgcgctgcattcaagttccctcacaaaatccaggctacagcaataatatatttcaagagattctatctacaatggtctgtaatggagcatcaaccaaagcatattatgttaacatgtgtatatgcttcttgcaaagtggaagaaaaccatgtttctgctg

SEQ ID NO: 312239 - DNA, 291 bp, Zea mays
aaaagtacttctacttccattggagttcgagctcaactaactaccttgtctaccataatgaaatctgttgacccaaagctgcatgaacatttagaaaatcttgatggaggggaatacttatttgccttccgaatgctgatggttcttttccgtagggaattctcatttgttgatacgatgtacctttgggaactcatgtggtctatggagtacaatcctaatctcttttcaatgttggagagtgacactggcacatccagcgcaacacaaaggatgaaagtgttctaggac

SEQ ID NO: 312240 - DNA, 280 bp, Zea mays
gttcaagggaacattgaaccaagtgaagcaaaatctatcgtagtaaatatagtgttttcgatttcttctacgatagatcgaaaacactatatttactacgcccaattctttgttcaaatccatgtctccatcagaatatctgattaaaagggtcatcatgcttgaaaatgacttgaaatgctactaccaaactgagggattaaaccagaagaatgagaattcatcagttatccaatatattcaggtgcatcaagatgacgccattttgaatatcaaactg

SEQ ID NO: 312241 - DNA, 294 bp, Zea mays
cgatacaaaccagcgccgcgccgcgccgcgcgagcacgtcgggcgacgttgcggcaggcgagatccgagagcgaagggatccgttacaagaagaatgaagtcttcttggatgtagtagagagtgttaacattctagttaacagcaatgggcagattgtgagatcagatgtggttggggcactgaagatgcgaacatatttgagtggaatgcctgagtgcaaactcggcttgaatgatagggttcttttggaggctcaaggcagagcaactaaaggaaaagcgatagaccttgat

SEQ ID NO: 312242 - DNA, 263 bp, Zea mays
cggacgcgtggtgaatttgaagacttgagcgctctatgcaagaatgatgattctactgttagcaacacagtagttggagcatctggtgaccttgccaagaagaagatatttcctgccctttttgctctctactatgaagattgccttcccaagcatttcaccatctttggctatgcacggcgcaagatgacatatcttaaattggggacatggttagcaaaacactggacttgcagaatagataaaagggaaaattgtagcga

SEQ ID NO: 312243 - DNA, 276 bp, Zea mays
cccacgcgtccgcccacgcgtccggaagctacttcgcttcgggggagaggagtctaccccgaagccagagaaggatgagattgtaattttcaaaagctttttaaaagctgggctgagatttcctctccatggaattattggagatgtgttgcaaaaatttggcatttattttcaccaattgactcctaacgccatcgttagactcaatgtttatatctgggccctccgaagccaagctgtggaaccgtttgccgacagcttctgccgagcccacga

SEQ ID NO: 312244 - DNA, 277 bp, Zea mays
cttaacattactttggttgatttgcctggaattactaaggtgccagttggtgaccagccaactgatattgaagctagaatacggactatgataatgtcatacatcaagcacaagacatgtatcatcttagctgtatcgccagcaaatgcagatttagcaaactctgacgctcttcaaatggctcgggttgctgatcctgatggttctcgaacaattggtgttatcacaaagttggatataatggacaggggcactgatgcccggaactttctgctgg

SEQ ID NO: 312245 - DNA, 261 bp, Zea mays
cccacgcgtccgcccacgcgtccgactagttctagatcgcgggcggccgctcgcgatctagaactagttgacaattctggtgatggggaaaggcggagtggggaagtcatctactgttaactccatcgtcggggagaggatcgacactgtcagcgctttccagtctgagggtctgagaccgatgatgtggtcgcgcacaagggcagggttcaccttgaacattatcgacactcctgggcttattgaaggtggatacattaa

SEQ ID NO: 312246 - DNA, 287 bp, Zea mays
cacgccgtagcctcgccgcgcgccgccgcgtcggcgcgccggaggtgcccatcgtcgtgcagttccacggcggcggcttcgtcaccgggagcaacaccgccgaggccaacgacgccttctgcaggagggtcgccaagctctgtgatgccattgtcgtcgccgtgggatacaggcttgcgccagagagcagatacccggccgcgtttgaggacggggtcaaggtgctcaagtggattaccagacaggcaaatctcgccatgatgaccagggccaggggtggtgtggac

SEQ ID NO: 312247 - DNA, 291 bp, Zea mays
ggcctctagcgtaatggttaaggcttccgagtagcacctttagtttctgggttcgattccccctcgggtacgaatttgggcttggttaacagaatcccctcgctgtgccccgcccgctcctgggttacgtcctgcgtgccaccctctgtctgggctgttgcagagtgggcggtgatggcatgctagtgatggggggctatggttcggggattttatcgtccgggactatgtttcggtctgttcttaatataataccgggagggcagtctttccctctccggccgagttttt

SEQ ID NO: 312248 - DNA, 296 bp, Zea mays
acggccgcctcctcgccatgtccgaggacgacctcccctaccacgtccgcgttgcggacgacggcgacctcgagaccgtcggccgctacgacttcgacgggcagctcggctgcgccatgatcgcgcaccccaagctggacccggccaccggggagctccacgcgctcagctacgacgtcatcaagaggccgtacctcaagtacttctacttcaggcccgacggcaccaagtccgacgacgtggagatcccgctggagcagcccacgatgatccacgacttcgccatcaccgagaat

SEQ ID NO: 312249 - DNA, 205 bp, Zea mays
ctcatggaccatatttatgtccaaaacatacaaggtgccacagctgtggatctggtgtgcctggtagtggacacagcacaaggtggtttttggggtacacatgctgtgatgcgtgtggacgattgtttgtgaaaggaaactactgtccaatctgcttgaaggtttatagagactctgaagtgatacctatggtttgctgcgatgt

SEQ ID NO: 312250 - DNA, 171 bp, Zea mays
cccacgcgtccgcgcatgtggaacctctcctctggttgggggcaattcatggcggtcacgacgagagcttacagatccgaatgggcccgtgtactacaacggcatgtaccacctgttctaccagtacaacccgcacggggcgctctgggacgtgggcaacctctcatgggg

SEQ ID NO: 312251 - DNA, 210 bp, Zea mays
cggacggtgggtggcggaaggtgcacggtatcatccaacaagtatgccgagcgtggtcttcgttcgcttgctgtggccagacaggaagtgcctgagaggatcaaggagtcccctggtggaccatggcagttcgttggtctgttgcctttgtttgattcgcccaggcatgacagtgctgagacgattcgcaaggctcttgttcttggtgtc

SEQ ID NO: 312252 - DNA, 278 bp, Zea mays
  unsure (1)..(278): unsure at all n locations
cggacggtggncgagacgcgtgggatcgggcgccgcctgaccgtggtcttcgccgccgtcatattcttcgcggggacgctgctcatgggcttcgccgtgaactacggcatgctcatggcgggccggttcgtggccggagtcggcgtgggctacgggggcatgatcgcgcccgtgtacacggccgagatctcgccggcggcgtcccggggcttcctgacgaccttcccggaggtgttcatcaacatcggcatcctgctcgggtacgtgtccaacttcgg

SEQ ID NO: 312253 - DNA, 245 bp, Zea mays
ctcgaaaccttttcttgtgctctgtctgtgtgtttccaaagcaaacgaaagagctcgaggatgtcttgcagctgcggatcaagctgcaactgcggatcaagctgcaagtgcggcaagatgtaccctgacctggaggagaagagcggcgggggcgctcaggccagcgccgccgccgccgtcctcggcgttgcccctgagacgaagaaggcgccgcagttcaaggcggcgggcgattccggcgaggc

SEQ ID NO: 312254 - DNA, 275 bp, Zea mays
cccacgcgtccggtcgacatcctcgacacaaccggcagcctatacaccatggcgcggttcgccggattcgtggacgatgcgacgggagagttcgagggccagtacttcgccttcatgtccgacgcgacggccattgtgtttggctcgctcctgggcacgtccccagttacggcgttcatcgagtcgtcgacggggatccgagagggcggccggacggggctgacggcgctcacggcggcgatctacttcgcggcggcgctgttcatcacgccggt

SEQ ID NO: 312255 - DNA, 231 bp, Zea mays
cgccgacgcatgacgatggacatgtcgtgttgcgcgtgcgtgcagatgcacatgtggggccacggccgcgagtaccgcagggcccggagtcgctcaagggcacgcaggcggcgacgctggcgctgctgaagctgccgtgctactgctgcgcgcccgggtgccgcaacagcgtggcgcacccgcgcgcgcgcccgctcaaggacttccgcacgctgcggacgcactacatgc

SEQ ID NO: 312256 - DNA, 272 bp, Zea mays
caactattcacaaactgcacagatgctgatatttcacttcttgtatggtatatttttctggacatgttttcactatttcaggctggtgcccttgataaactagaagcatttacaagctatcaatggccctgatttttatggcctcccaaggaacacttcaaagattatcgtgagaaagaatgcctggatagttcctgctacttataaacacagttcaggggagcatgagcctatgcttaatggcagcacccttgaatggcttccatctgatc

SEQ ID NO: 312257 - DNA, 268 bp, Zea mays
gcaatgttcctccagtggcatctgtccttccatcttttgtttccaaactgaagatggccaaaaataagtttttatcagcccatgttgctgcatcagcttctacttctgttaagggaaagaagtggaatctgtcattctctttggtctggaataccctggtgtggctcatggttgcaaacttcattatccagatagttacttctacagcacagggttatctcaggacacaacaggagcgagagatcagtaaaaagttggaaaccgagct

SEQ ID NO: 312258 - DNA, 261 bp, Zea mays
tgatgagcttccaatggacagctgtcaagttcttctggttcttcttcatttcctacttctccttcctctacttcacctactatggcatgatggctgtctcaatctccccaaaccatgaggttgcatccatcttcgcagcagctttcttttctctcttcaatctcttctcgggcttcttcattccgagaccgacaattcccggatggtggatctggtactactggatttgcccactggcatggacagtgtatgggctcatcg

SEQ ID NO: 312259 - DNA, 288 bp, Zea mays
ctgtggctggcaaggggtagctcctcctcctcctccaccacgtgctcgtcgatcctgcagacgccgctcctcgccgtgggcttcgcggcgcgcaggtgtacggccggccgtaccgggagtaccgcgtcacggactactcggcgtggctccagaagcgcatgcaggacgacaggtactggcgccccgccctcgcctgcgtcgtcgggtccaaggcctgccccaagatccagaactggacgcccatggactacctccagcacgatctcacgccaatacagtccggctgct

SEQ ID NO: 312260 - DNA, 285 bp, Zea mays
cccacgcgtccgcccacgcgtccgcccacgcgtccgcccacgcgtccgcggaaaggtgctccggcagcccttcttcgccacggagctcatctccaggctcgtccgcgactgcgaggccaccatggaggccgtgttcgaggccagcacaggccacgcccgctcgtcggcggggacggcccccgtggcctcagccaggcagggcatcttccggaacaccgtggccgcgctggtgaccatgggcgagctccgcagcgggagttccacgtacggtcacttctcgctgcc

SEQ ID NO: 312261 - DNA, 281 bp, Zea mays
ctcttcggcacccacggctgtgcgggccgctgccaacacctactgccagttgctctcgtcgcagagtgacaacaatgtgaagctcattcttctggatcgcctcaacgagctgcgaaccctgcaccgggatgtcatggtgggtgtggtgatggacgtgcttcgtgcactggccagccccaatttagatgtcaagagaaaggttctcgatttagttctcgatttgctcaccccgcgtaatgttgaggaggtggtgctttatctcaagaaggaggtggtcaaga

SEQ ID NO: 312262 - DNA, 264 bp, Zea mays
caccaacacacgcgcccgtcgcctccctttccccttccctccctccctctccccgcgggccgccagaggcaatttcgccctcgattcgaccccgattcgtccgcccgcgaccgggattccctccgccaagcgcggatctgaacgctgcgctccgtgtcgccgctcgaatccgccatgaagggggccaaatccaagggcgccgccaaggccgatgccaagctggcggtgaagagcaagggggcggagaagcccgccaagggcagg

SEQ ID NO: 312263 - DNA, 257 bp, Zea mays
cccacgcgtccgcccacgcgtccgggacgtccgcgcccctgccacctggcttgagactatctcgacgctgtcagagacgctgcggttcacgtattcagagacccttgggaagtggccgatcggcgaccttgccttcgggatcagtttcctcctcaagagacagggaaacttatctgtagcaagcatatacgctgggaatgatagtgtggagctcaaaggagctgaagtaattgctgatttaaagtatcttctcaatt

SEQ ID NO: 312264 - DNA, 297 bp, Zea mays
gacctttggtctggaccgtcaacgccgagctgtaccccatccgataccgcagtgtctgcatgggtattgccaccgcttctaactggttctggaactttatgatctcgttcttcacccgattcatcaccgacgatatcgactacttctacggtctcatcttcgctggttgctgtgctgctctcgtcctggttgtcttcttcttcgtcatcgagtccaaggaccgaactctcgaggagattgacaccatgtacgttcagcacgtcaaccccatcacgtcgagccgatggacccccaaca

SEQ ID NO: 312265 - DNA, 296 bp, Zea mays
gtcctgctgggcccacccatttccgaaatctcgacatcccaggcatggacagatatcttgatttctggaatctgatggcttacgactacgctggctcttgggacccgacgagcggccaccaggccaatctccacgggtcgcttgacaaccctacatctacaccgttttcaactgacgcggctattgaccactacacaaggaacggtgtggcccccagcaaaattgtgctcggaatgcccatctatggtcgtgcttttgagaatacggacggtccgggcaggccatacaacggcatt

SEQ ID NO: 312266 - DNA, 291 bp, Zea mays
  unsure (1)..(291): unsure at all n locations
gcgtacaagtccctgacccactcgatatgcgccgccccatccccaccggcggaccagacgctcacgtactggatgttgtacagcacgccggcgcggtgcgggaacggcgtcgcgtgctccggcacggcgccgacctgcgcgccgtaggggtccaggatcatgagccccgcgctgggctgcgcgagcttgccgaagataccgtcccacgcgcgccgcgngatggcctgccggacgtatcggacgtcatcttggcgtaggtgctcagggatgtggtccggttcatgatgtcct

SEQ ID NO: 312267 - DNA, 285 bp, Zea mays
ggacgtggtgagtgcctgcgcgcatgcagtcgagcgacgacgaggatagaagctgtgatcgatgagaacggcgagattgtcaagaggaagaagaagaagggccttaaggagaaggtcaaggagaagctggcggcccacaaggcccacgatgagggcgaccaccaccagacgcccgcgccgcccgtggtggtggacacgcatgctcaccaccaggagggagagcacttcccggcgccggcgcctcccccgcacgtggagacgcaccaccccgtcgtcgtccaaaga

SEQ ID NO: 312268 - DNA, 277 bp, Zea mays
cggatcgtggacgagtacgcgtgggtgcatcagaacaactaaccgagaatgtggaacgcttcttctgctgacattgtaacgatgttgcaccagataaaatgcctatagttctggagaatgttagaagtgtcttaaaacatggtggccgtgttctttttcgggactatgcctttggtgatcttgcacaggaaagactgatgtcaaagggccaacaaataagtgagaacttctatgtcagaggtgatggtacgatttattttcaaaatgtggacttact

SEQ ID NO: 312269 - DNA, 277 bp, Zea mays
cggtcgaatccgggcacccccacgccacggcggaccgggcgcgcgctcatcgacgtcgtcggccgattcgccatcacgctagcgcgcttcttcatgatgaccgtcttcatgctcggcctcgccatcccctaccaccactggaccacgccgggcaaccacatcggcttcgtcgtcatgtacgccttcaccttcttcttcgccaacttcgggcccaacagcaccaccttcatcgtgcccgccgagatcttcccggcgcgcctgcgctccacctgccacg

SEQ ID NO: 312270 - DNA, 279 bp, Zea mays
ggacctgcggacgcgtgggcggacgcgtgggcggacgcgtggggtgaccaacagtgactccgagaagagtaacaacaccatactccagatcaaccgcatcttcaaggaccgcatcggcctcggcggcatcttccacagcgccgtgcaggtctatggcgaggacgagtggtcgttcgggttctgcgagtccggcagcggcgtgtttagttgccccataggcaagaaccccatgtacacctaccgggagcgcatcgtcctcggggagaccgagtgcggcat

SEQ ID NO: 312271 - DNA, 285 bp, Zea mays
gaccaaactgccctgcacgctcgaagactcgtacgcaggctcagcacgcaagatgaagatctccaggaacgttgtgaagccgaatgggcaactagggaccgaatcggagattctaacgatcgatataaagcccggctggaagaaggggaccaagatcacgttcccggacaagggcaacgagcagccgaaccaactccccgccgacctcgtcttcgtcatcgacgagaaaccccatgacctgtacacgagagagggcaacgacctcctggtccaccggaagatcga

SEQ ID NO: 312272 - DNA, 228 bp, Zea mays
atcccatggtttggccaagtaacacttgcctacttccatgttgtggcgtcccaatggacgagggttgcactcaacccctttcaagtgatctgatgatcaactttaataccacagtcttttcctttagagtatgtttcccgtttgcgaggaatctccacaatttggagtctctcgcccttacaattgagatcacagagaaagcacagagtaaggttggggagagcaaca

SEQ ID NO: 312273 - DNA, 290 bp, Zea mays
ggacgctgggatgatcttcgcgtccgtccacttcgtcctctcgcagctccccaacttcaactccaactccggcgtctccctcgccgccgccgtcatgtcgctcagctactccaccatcgcgtggggcgcgtcggtgcacaaggggaggatgtcgggcgtcgactaccacctgcgcgcgaccaccacgccggggaaggtgttcggcttcttcggcgcgctgggggacgtggcgttcgcctacgccggccacaacgtggtgctggagatccaggccaccatcccgtccaccc

SEQ ID NO: 312274 - DNA, 309 bp, Zea mays
cagtacggtcggattccgggtcgacccgcgacgtacaggtccgcggaccgtggcgagctgggcgctgccgtggtacaccccgtacgtgtacaacaacccggtcggtcgggtggtgcacatcgtggtgcagctcaccctcgggtggccgctgtacctggcgaccaacgcgtcggggcggccgtacccgcgcttcgcctgccacttcgacccctacggccccatctacaacgaccgggagcgcgcccagatcttcgtctcggacgccggcgtcgtggccgtggcgttcgggctgtacaagctggcggcggc

SEQ ID NO: 312275 - DNA, 279 bp, Zea mays
acccccagtctcggaagagaactatccagaagcgcaagactccaaagccgtcgccttcctatccatcccttcctcgccgcgggggtcgcctgagatcacataaacaatggtgaaggctgttgctgtgcttggtagcagcgatggtgtcaagggcaccatcttcttcacccaagagggagatggccctaccactgtcaccggaagtgtctctggcctcaagcctggcctccatgggttccatgtgcatgcacttggtgacaccaccaatggctgcatgtc

SEQ ID NO: 312276 - DNA, 286 bp, Zea mays
cccacgcgtccgcggacgcgtgggtggcgctcatgtgcgtctgcatcgtcgtcgggcacctcctcgaggagaaccgatggatgaacgagtccatcaccgcgctcttcatcgggctgggaactggagcggtcatcctgttcgcgtcgagcgggaagcattcgcgcgtgctggtgttcagcgaggacctcttctttatttacctgctgccgccgatcatattcaatgcagggttccaagtgaagaagaaacagttctttcgaaacttcattactattacactgtttgg

SEQ ID NO: 312277 - DNA, 130 bp, Zea mays
cccacgcgtccgcactgatcaggctgcagggtaccatgaaatgtttgacgacttgggcaacctgttatgcacgatcacaggttttgattctttctctttgcaaccaaatgctggtgctgcaggagagtat

SEQ ID NO: 312278 - DNA, 269 bp, Zea mays
cccacgcgtccgcccacgcgtccgcccacgcgtccggctggtgcatccgtgcaggtaaccattttcctttgcttacttttcttgaggttgggaaataacaaaagccaaatagccaaaaaaatccccttttctttctgtggcacttctctaactaggaactttctcttgaactgatgttggaacagtggaatccaggagagggaacggagggtcgacagcttgtgaggtgctcttgttccaccacgaggacatgggcatcccgtacgaga

SEQ ID NO: 312279 - DNA, 261 bp, Zea mays
cccacgcgtccgcccacgcgtccgcccacgcgtccgcggaccgtggcgccgggcgggcccgctcccgagcggtgtccttcttcagatccgccctctggagcaacccctcccacttccccgccgcgccgcgtcggattgcggaccccttgggcttgcgacggtgctgctgcagctggggtcggggcttgtgctcgggcgacgcgggatttgagtcgccattattggatttttcttccattgattgcgaacattttgttctgg

SEQ ID NO: 312280 - DNA, 264 bp, Zea mays
caattgtgtctatagagaactctggtgaaaaaggcgcaatggagaaagctgatatgtgtgtggcatcaacttctataacaaatactgatgatacttctctttgtattggaattcactctcatgatagtattgttgaatgccaggattatgccatgcaacatactctttattgtgagaagcaccttccaaggttccttaaacgtgccaggaatggtaagagtcgactcgtttctaaagatatcttcgtcaatctactgaagggat

SEQ ID NO: 312281 - DNA, 257 bp, Zea mays
cgactccaagaaggtgaccccttgctgcctgctacaaggcgctcaacgagcaccatgtcctcctggagggtaccctcctgaagcccaacatggtgactccaggctccgactccaagaaggtgacccctgaggtgattgctgagtacaccgtccgtaccctccagaggaccgtccctgctgctgtgcctgctgttgtcttcctctctggtggacagagcgaggaggaggccacccgcaacctcaatgccatgaacaag

SEQ ID NO: 312282 - DNA, 291 bp, Zea mays
cgaaaccttttcttgtgctctgtctgtgtgtttccaaagcaaacgaaagaggtcgaggatgtcttgcagctgcggatcaagctgcaactgcggatcaagctgcaactgcggcaagatgtaccctgacctggaggagaagagcggcgggggcgctcaggccagcgccgccgccgtcgtcctcggcgttgcccctgagacgaagaaggcggcgcagttcgaggcggcgggcgagtctggcgaggccgcccacggctgcagctgcggtgacagctgcaagtgcagcccctgcaa

SEQ ID NO: 312283 - DNA, 271 bp, Zea mays
cggaccgtggcggacgcgtgggcgtagtttcataaactacgagagagatacgttttatgaacaaattatatttttattttgtcatatgaagaaatgttcaatatataaattgtacatcatgatgagttatacaaatttatagttgaaaaccttttcatttgaattaatttactatttaaaaatgtgatttttaaattgtttttgcctagtgttggagaaaaaacactcggcaaagagctctttgccgagtgttgtatttgtgacactcgcc

SEQ ID NO: 312284 - DNA, 267 bp, Zea mays
aaatgagggaacatctacttttgagcagtttattttgaccttaagatccacagttggtgctcaggttcttgtacaagcaattggaattggcaaaggaaaatatgacctgacaggatttgcattagatcctagtagaaatcatggtatctcagcacgcccagaaatccctgttggcaaggcttgctcagcactttcatctggagatatcataaagtttttgactggtgatttcagaatgagcaaggcaagatcgaatgatctattctg

SEQ ID NO: 312285 - DNA, 286 bp, Zea mays
ggccgctccgccaccccgcactcgcctgtcgcctcttctcgctttcgccaccggggcagcgctccggtgagtggcgaagggcccctcccggctcccgcttccctctgccatggctggacctgctgttctcaatgagcgtatcctttcttccatgtcccagaaacatgttgctgctcaaccatagcatgatttggagataggaccaggggctcctgaattcttcaattgtgtggttgagattcctagaggcagcaaggttaagtacgagttggacaaggcatctggt

SEQ ID NO: 312286 - DNA, 293 bp, Zea mays
agctcgtcggcgccaagttctttggcctggggtacgaggccgcgcacggcgggggcgcggtggacgagacggactccaggtccccgctcgataccaacggccacggcacgcacacctcgtccacggcagcgggctccgccgtgccgaacgccgccttcttcgactacgccaaaggcacagccatcggcatggctccgcgcgcccgcatcgctgcctacaaggcgtgctgggcgagggggtgcacgtcctcggacatcctcatggcgttcgacgaggccatcaaggacggggtc

SEQ ID NO: 312287 - DNA, 260 bp, Zea mays
cggacgcgtggcgagacgcgtgggttattctggccactttccctctgcttgtgcttgccaactttgatcagcaactttacaatgaagggctttgctggtgacacggcaaaggcacatgccaggagcagtatggttgcaggtgaagcagtgagcaatatccgcaccgtagcggcgttcaacgctcaaagcaagatcctgtcactcttcagccatgaactgcgtgtgccagagcagcaaatcctccgccgcagccagacatc

SEQ ID NO: 312288 - DNA, 257 bp, Zea mays
cccacgcgtccgcccacgcgtccgcccacgcgtccgcccacgcgtccggttgtgtctgatatgatgtcccccaagtttgctgccgagctgaagaaaaccatttatgacaacatgacatttgcgcctaaacattacggaggaaggtggaacatccttgaggaccatgggaccagccacctgtccatcgtcgacagcgagcgaaacgcggtgtcgatgacgagcaccgtgaacgcgtacttcgggtcactgatcctttc

SEQ ID NO: 312289 - DNA, 259 bp, Zea mays
cccacgcgtccgcccacgcgtccgcggacgcgtgggtgtttctgttttctcgaaaggagatcgtcgttttcggtatgttatggtcgctatgcctctgacctcctttagcccctgttcgtggccataagtcaacgggacacgcgtactacaaggggaggtctagatgagcaaaggcctaggtttgtcgacgagtatgttatttttagtcgaagcgctagtcgtcgttcgacaattgtcgtttcaactgctttaacatgcg

SEQ ID NO: 312290 - DNA, 265 bp, Zea mays
aaaatcccctcgtctgtcccacgccaaagcacaagtctaatgcttggccctggtcgtggttgttcagcgaggcaggggttcgggggggtttctcgacttgtgtgaggtcttcttaatacaatgtccaaggctgtctcacttccgcacgttgagttttttttcatgcactagcagtacacattcctaatgtatatacttgtattgtgtacattcatttttgattgtccacagggtacttaagcctttttcgattttccatatataa

SEQ ID NO: 312291 - DNA, 254 bp, Zea mays
cggacgctggtctcctccccctcttaccaagtcctcctcgggttagggttccttacggttttgtggacgcgcgatggcggcggctgacgtggggtagcgctgcttcctccgctggctttcctgggccaccagcaacgagtcgctggacgatgccgtcgccttctacggcgagatcctctactcgaaggtcatcaccgaccgggagatcgggaggtctcgcggcttcggcttcgttaccttctcctccgagaact

SEQ ID NO: 312292 - DNA, 243 bp, Zea mays
ccacgcgtccgccacgcgtccgccacgcgtccgccacgcgtccgctacgcgtccgcggacgctggcccgttgtctgcaacctttggtgtcgtgtttgccgatgtgcttggcttgttttttccttggaggcttcttgcgttaataggaaccttgccctgcctactgttgatacctggcctgttcttcattccggaatctccaagatggctggcaaggatgaatatgatggatgagtgcgaggct

SEQ ID NO: 312293 - DNA, 257 bp, Zea mays
ggttcctccaatgaaatttcaccagtctactctttgtgggctacattcatgggtctttacattgccaattatgtcatagagcgttcaacgggatgggttttaactcatcctttgacaatttcggagtatgagaaattgaagaaacagttgaaaccagattttgaggacatggttccctggtactctgggacatcaactgatttatttaaaactgtctttgacctcatgatatctgtgactctgtttgttggtcgatt

SEQ ID NO: 312294 - DNA, 290 bp, Zea mays
  unsure (1)..(290): unsure at all n locations
acaaggatgagtttttatcctatgaagaccgcaccacacgtttctttccttcctcctcctgtgatgcctaggataggtggactacgttctggagatactggtcttgcggatgagaacgaagaagctattccagaattttctagtgcttcctgtcagcgttttaacattctgtgcagtggtggcaaagatggttgtgtttgcttcagcgtttttggaatatttcctgttggaaagatactttatgcctttgaaatttcagaacataactanaatcccaatcaatgttggat

SEQ ID NO: 312295 - DNA, 284 bp, Zea mays
gacaagaagctggagcgcgagttcgcgtcggaggtggacatcctcggccacatccggcacagcaacatcgtgaagctcctctgctgcctctcccgcgcggagaccaagctactcgtctacgagttcatgggcaacggcagcctggaccagtggctgcacggccacagcaggctggccgggaccgggactgccatggccagggccccgtcggtccggcgtgagccgctggactggccgacgagggtcaaggtggccgtcggcgccgcgcgcgggctgtactacat

SEQ ID NO: 312296 - DNA, 290 bp, Zea mays
ggaccctgagatttgggatagacctgaaagcttcgtgccagagaggttcataggtgagaacagtgaaggcaagatgttcaacccatttggtatgggaaggagacgatgcccgggggagaatttgggcacgcagatggtaggacttgctctggggactatgatccagtgtttcaattgggaaagagtaggagatgatcttgttgacatgaccgagggagctggattaaccatacccaaaaaaagtgccactggaggccttctatgagccccgtgcttctatggcgaatctg

SEQ ID NO: 312297 - DNA, 320 bp, Zea mays
cagtacggtcggaatccgggtcacaccggtccgggacgctggcttcatcctacgcgagggcgaaacccagaaaccctctccctcctgtactccggacgacacatccaggggcgatgacgctgggtagctccggcgccggatcgagcgtcgtcgttcctcgaaacttcaggctattagaggagctcgagcgtggagagaagggcattggtgatgggacagtgagctatggaatggatgatgctgatgacatctacatgcggtcatggactggtaccatcattggccctcacaatactgtacatgagggtcgcatctaccag

SEQ ID NO: 312298 - DNA, 266 bp, Zea mays
aggggggcgtggagggggccaagccgcccgacgcgcacgccttcctgcagcacgtcgccacgttcgccgttgcggagaaggaggacaggccgctgtaccgcagattgttgtcagcttctcctggcgccgacagatgccacgactcgccctcactctcggccttgaggaagaaatggctgatatcattgaggaactaattgctaagaggcagcagcttgatgctgtgaattttgcttacgaggctgggcttcaggagaagttccctc

SEQ ID NO: 312299 - DNA, 275 bp, Zea mays
ctcactgctcgttgccggctgcccccgcggccccggccagtccatcccctcgctcgctccccaactccagcaggcagatcagatacatccatccattcgcggaccggaaggaaaggaagggttgaactatgagcgccgtggcggtttcgtcgtcgctgaacccggacgcgccgctcttcatcccggcggcgctgctgcaggtggaggacttctcgccgcagtggtgggacctcatcaccaccactgcctggttccgcgaccactggtcccgcgag

SEQ ID NO: 312300 - DNA, 278 bp, Zea mays
cccacgcgtccgcccacgcgtccgcccacgcgtccgcggacgcgtggggcgacagcgatatcgggaagaggaaactcgaaagcccggcgagcggtatggcaaccggccaggagcacgtggcggcgccggcgcaggcggtcgaggagacgccggagaagaagcaggccagcacaaccgagctgcccgcaccctcaggctggacgaagaagcttgccccaactcgaggtggacgaggtggacgatttgaggttatttttgtttccccaactggtgaggaa

SEQ ID NO: 312301 - DNA, 279 bp, Zea mays
tacggtcgaattccggtcaccacgcgtccgtcacggtacgacatagtacaaacgcgtccgcgacctgcgacgggtcatctgtacatcccgcccgacgcagttcttgctcaacgcggacggcaccggcggactcatcatcgactctggcaccaccatcacattactgggcaacacggcgtaccagcaggtccgggcagcggtcgtctccctggtgacgctgcccaccacagacgggtcggcagccacggggctcgacctgtgcttcatgctgccctcctc

SEQ ID NO: 312302 - DNA, 269 bp, Zea mays
gggtgttctagttttgcctacagatgctgcattatttgaggacccatcgtacaaggtatacgcagaaaagtatgcagatgaccaggaagcgttctttaaagactatggtgaagctcatgctaagctgagcggtgttggtgcaaagtttgatcctcctgagggattctcactcgacgatgacacaagctcttcaccttccgacgagaagacggaagaacctacactggtagcggtaggagcggcagtagcaacagcgacagcggacgaca

SEQ ID NO: 312303 - DNA, 266 bp, Zea mays
gctgatcaaatgtcgcacccaagccatgtcaagaaaggaatgccctacgtccgattgggaaagagcggcctaaaagtctctcgaatcattctaggatgcatgagctatggctctaaagaatggcaagactgggtacttgaggaagaagaggctttcaggcatattaaagcggcgtacgacgctggaatccagacttttgatacagcaaatgtatattcgaatggagtttcggagattattctcggcaaggcgatcaagaagctcaa

SEQ ID NO: 312304 - DNA, 161 bp, Zea mays
agaacagcaattgccttcctgagggttgacgatgaacatatgaaagtattcgagaaccgtgtccggcagattctaatgtcatcagggtcaacaacattcaccaagatagtcaataagtggaatacagctctcattggccttattacatatttccgcgaaga

SEQ ID NO: 312305 - DNA, 276 bp, Zea mays
tgcgcctctacatttcttctctctctgctcctccgcctccgcctgatccatccaagacagggatcgccatgtcggactcggaggagcaccacttcgaatcgaaggccgacgctggggcgtccaagacctacccgcagcaggctggcaccgtccgtaagaacggcttcatcgtcatcaagaaccgtccctgcaatgatgtggaggtttctacctccaagactggtaagcatggccacgccaaatgccactttgtcgccatagacatattcaatggga

SEQ ID NO: 312306 - DNA, 283 bp, Zea mays
tgacagaagtaacaagctatttgccagcttggttggaggtgacaaatccgacgtaaagtgtcccctcaagcacggtgagaatctcagtggcacgtgggtgtgtgtgtggaggattctgacctagtggtgcgtagtcaatgcgagccaacgagatccccaacgtgttgagtccaggcagctgcatgacattgatcaaagtaacgagctatttgccaaggttctcaacaagggcgatgtgtttgtattcccccaaggactaatccacttccagttcaacccagta

SEQ ID NO: 312307 - DNA, 277 bp, Zea mays
tacagcgtcgtacacgcgtcgtcagcgtccgggacgcgtggctcttaggtatccaaaagatactgaaaagctaatgttatcgagacaaactgggttgacaagaagtcagatttcaaactggttcatcaatgcccgtgtccggctgtggaagccaatgatcgaagacatgtacaaagaagagattggtgaggcggactagactccaactcttcctccgacaacgggcagcgaaacaaggacaaagcaccatctcccgaagaaaatgaggacctgcaga

SEQ ID NO: 312308 - DNA, 277 bp, Zea mays
atggcaacaccaaggctcgccgcaatcttcttctccttgctctgctgccgcgcagtcctccttgcgccctccgaatctcatctccaacagcagcgacggcgtcatcacccatctccctggcttccaggggcccctccccttccacctccaaacagggtacgtggaagtggacgaggacaatggcgtccacctcttctactacttcgtccggtcggagcgggaggacagccccggcgacgaccccgtcgtgctctggctcacgggcggccctggatgc

SEQ ID NO: 312309 - DNA, 270 bp, Zea mays
cggacgcgtgggcgaggcgctcaagaaggcacaggcagagatcgacgcatcgtgggcacctcccgcctaatcgccgcagaggacgtgccccgactcggctacctgcaccgcgtcatcagcgagaccctgcgcatgtacccggccgccccgctgctcctgccgcacgagtcgtcggcggactgcaaggtcggcggctacgacgtggcccgcggcacgctgctcatcgtgaacgcgtacgccatccacagggacccgctggtgtgggaggac

SEQ ID NO: 312310 - DNA, 271 bp, Zea mays
ctaatcctacacgtgacgctgcattgtcgtgtcacttgcctgatcaaggtaggggaaccggtgctgcaggtcgtcggtggtcggcacggcgccgcgcggcccgaaagcgtcgacctccgccagcagcttggcctcaacctccgggtggccggcgactaggtacactgccgacgagagcgtgaacgccgtggtggcagacccggcgaggaggtgctcgtaggtgagcgcgctcacgtagtccggcgtgagcagctcccgcagcgccgcactg

SEQ ID NO: 312311 - DNA, 260 bp, Zea mays
atttcccaatctcgcaggcgacgccgacgcgttccaccggcggcaccgatgcgggcgatctcgaccgccgcggggggcatgctgcgcgcgcggctccgctccgcctccgcgtgcgcggcggcggcgttggcgaggtcgcggggcggtggacgacgccggggcacgaggagcggcccaaggggtacctcttcaaccgcccgccgccgccggcgagggagacgcggaagtcggatgactgggaactaccctgttacatcact

SEQ ID NO: 312312 - DNA, 279 bp, Zea mays
gggcattcggtaaagtatttcaggtcagaaagaaaaacacctcagagatatatgcaatgaaagttatgaggaaggacaggatattagaaaaaaatcattctgagtatatgaaggccgagagagagatattgacaaaagtcgaccaccctttcatagtgcagctgaggtactcatttcagacgaaatatcgactttaccttgttctggacttcataaacggggggcatcttttctttcagctctacaagcaaggattatttagggaggagcttgcaagaa

SEQ ID NO: 312313 - DNA, 273 bp, Zea mays
aaaaaggctaaaatccaaaaaagttggccttcctcgagctagcggctagcgccggtgactcgaccggtgaggccaggatccttggctcgaagaagcgatcgagcaccacacggggttatagatcgacgaaggatccaggatgcggatgagctgcaacgggtgccgcgtgcttcgcaaggggtgcagcgacaactgcgccatccggccgtgcttgcagtggatccgcagccccgacgctgcaggcaacgccaccgtcttcctcgccaagttcta

SEQ ID NO: 312314 - DNA, 280 bp, Zea mays
  unsure (1)..(280): unsure at all n locations
gtgacagttaccttgttggaggccaaccattgccctggtgcagctctaatccacttccgactaagtgatggaaagacctgtctccacactggggattttagagcatcaaaaactatgcaatcgcatccacttctccagagaggccgagtaaatttggtttacctggacacaacatattgcaatcccaagtacaagttcccaccccaggaggatgttattgattttgttgtgagaaccactccaagatatctanagaaacaaccanaaaccctcattgttg

SEQ ID NO: 312315 - DNA, 279 bp, Zea mays
gcaagccttgcaggacaaaattgaacaaggtatccataacactgaacgagtaagggacagtgcaggcggaaggtacaaggatcttaagataccatgggaatggatgctcgactctggagtcataagccaactgaagatggcttccttgaagcttgcaaaggagtacatgaaccgcatcgcgagcactctgaagtcagatccatttgcgaacgacgaggagctacttctgcaaggcgtccgctttgccttccgcgtacaccagcttgctggtggctttga

SEQ ID NO: 312316 - DNA, 269 bp, Zea mays
caatagagctcgatcggcgatctgtagtagcagcactagcactagctacgtagtacattgcatcgtcgtctctttgctagtagtagctatctcctggccgccatggcgtcttcctcggtctcatcctgcctgctgcttctcctgtgcttggcggcggtggcgtccgcgcactctcgccgacgttctacgactcgtcgtgccccaacgcgctgtccaccatcaagagcgccgtgaacgccgccgtgcagaaggagaaccgcatgggggcc

SEQ ID NO: 312317 - DNA, 276 bp, Zea mays
gaggcatgcagatcttcgtgaagaccctgaccggcaagactatcacccttgaggtggagtcttcagacaccatcgacaacgtcaaggccaagatcaaacgctgctggtccggtgggatgccctccttttttttttttttttttttttttttttttttcaacaacagtatttcggtatttacaaaagttccatatccaattgacctacttggcaatacaaatgacatctaactgaatcaatctatatctacgtagaacacaacacgtacaacgcagt

SEQ ID NO: 312318 - DNA, 276 bp, Zea mays
tctcctctctcgcatccgcagcctctcgagctctactccatcccctcgatctcgaagcgcacagtcagcagtcaggcggccatggacgcgagcgcaccggagccggcgggaaggcgaagaagggcgcggccgggcgcaaggccggcgggccgaggaagaagtcggtgacgaggtccgtcggccgcatcgggcggtacctgaagaagggccggtacgcgcagcgatcggcacgggcgcccccgtctacctggccgccgtcctcgagtacctggccgc

SEQ ID NO: 312319 - DNA, 262 bp, Zea mays
gcaatcaacggcgtgttcggctggctacaagccgacactgttgcagctgtttggattgttgcagctgcaaatccatagagagaaaaatactgtagaagccgcagccgcagccggattgcagccgcagcgaacaagctgcaagtcctctttcttttccgtctggcccacctgccaatctccataatggggccgtcgcattatcgcgccgcggtcggcacaatagtcatctcccgggcccgctggccagcgtgccacggcgtcg

SEQ ID NO: 312320 - DNA, 246 bp, Zea mays
ccgacggtgtgggccgccgtggtggcggcggcggctaccgcggtcgcggccgcggctgcggtggcagcagcggctacggtggtggtggtggcggctacggcggtggcaaccgtggcggcgggtacggcaactccgacgggagctggaggaagtgagcggtggggcccgcgcgggcaagttatggtgttcgctaccgtgatgtttaggctagtgcggagggtttatcttcggtcgtctcgtttgttg

SEQ ID NO: 312321 - DNA, 259 bp, Zea mays
ggatcgacccacgcgtccgcggacggtgggcggacgcgtgggcggacgcgtccgcagctgtcgatccaattgtcacttgctctccctccaacaagctaattaaggccggtcgtcatccctcttctagctcgtttaataaccatggcggaggagaagcaccaccaccaccacctgttccaccataagaaggacgaggagcaggaagagcagctcgccggcggcgggtacggcgagtccgccgagtacacggaggcaacgg

SEQ ID NO: 312322 - DNA, 272 bp, Zea mays
tcgggacgcgtggcggacgcgtgggcggacgcgtgggaagttatgcgcgcacttggtgactaccttagtgttaaagtcattgcatgcgttagaggaacatctgttcgtgaggaccaaaggattctcgccagtggtgtgcatgttgttgttggtacacctggtcgtgtgtttgacatgctgcgtagacagtccctccgccctgataacatcaagatgtttgttcttgatgaagctgatgaaatgctttctcgtggtttcaaggatcagattta

SEQ ID NO: 312323 - DNA, 256 bp, Zea mays
atctgcccttgccgccgccaccgcccgatccaggtctgcagactgctccctcctcctctccgctccgaatggcccgcacgaagcagacggcgcgcaagtcgaccggcggcaaggcgccgcggaagcagctggccaccgaagcggcacgcaagtcggccccggccacgggctgcgtgaagaagccgcaccgcttaccgcccggcaccgtcgcgctccggagatccgcaagtaccagaagagcacggagctgctcatc

SEQ ID NO: 312324 - DNA, 265 bp, Zea mays
agacgcactccaccttcttcaaggcgtgccgcctcgccggcttcgaccccgccaacatccgctgcatccccaccggcccggagacggactacggcctcgacccggcgaggctgctcgaggtcatgcaggccgacgtcgacgccggcctcgtgccgacctacgtctgcgccacggtcggcaccacgtcgtccaacgccgtcgaccctgtgcgagccattgccgatgccgccgccgtgttcaacgcgtgggtccacatcgacgccgc

SEQ ID NO: 312325 - DNA, 289 bp, Zea mays
cccacgcgtccgcccacgcgtccgcggacgcgtgggacatctgcgaagttaattgctgcagtgttgggagctagctgcacagaccaaccgaccgagcttgccgtcggaaaccgggatcaatcgagagagtgatcatcggtcgatagcaaccgtgagttcgtgtcgtgaccgagagagagcatgacgaagcagtggctagtgttcgcatgggtcttgctggcggcggcctcctcggtggcggcgcgtccccacaacggctgcaggtcgggttctacgagcactcgtgccc

SEQ ID NO: 312326 - DNA, 286 bp, Zea mays
ccgccacgggcggcttctcgtccagggtggtcggccgcggcggcttcagcacggtgtacctcgcctcgctctcctcctcgcggctcggcggcgtcaaggtgcactgcagcagcgagcgcctccggcgcgcgttccgccgggagctcgacgtgcggctctccctccggcacccgcacgtcgtccgcctcctcgcctactgcgacgagcgcgacgagggcgtgctgctgttcgagtacgcgcccaacggcgatctccacgagaggctcacggcggcgcggctcgggca

SEQ ID NO: 312327 - DNA, 293 bp, Zea mays
gattttcgcggcgaaaggcctcgacctcaaggacctggctgtcctgtccggagcgcacaccctcggcacggcgcactgccggtcttacgccggccggctctacaacttcagcagcgcctacactgcggacccgtctctcgacagcaggtacgccgaccggctcaggacgcgctgcaggagcgtcgacgacgacgatgccgtgctttcggagatggaccccggcagcttcaagaccttcgacacgagctactaccgccacgtcgccaagcggagggagctcttccagtccgacg

SEQ ID NO: 312328 - DNA, 277 bp, Zea mays
cggacgcgtgggcggacgcgtgggcggacgcgtgggcggacgcgtgggcggacgcgtgggcgcgaaagcagcgacaggaaagacgtctccagcagtgagcatcgacgtcaaagcttccagagctagtagcaaagaagacaaggaggcaacggctggtggcaagaagggatggaagtttgcgcggcagccatccgatcaagataccaaatgaagccaggagtccttggtgaagactggactggctgccggcgcctgttaatagtctgctctactggac

SEQ ID NO: 312329 - DNA, 231 bp, Zea mays
ggcaatgggagctagcttcccatttggtgcaggttcttctgctgaaccttctggtactgaagaaactgatgtagaaggtggggatgatgatgaatccatcgttcatcacactgccagtgttggtgatgaagagggtctcaagaaagcactagatggtggagccgacaaggatgaagaagcctctgaggaaaaagggcctaatttttgagagggggccacggtgagtagaag

SEQ ID NO: 312330 - DNA, 227 bp, Zea mays
ggcttaagcaagtagcttcattcaccgagcgtgcaggcacaggcagcagcttgccatggcgtctcccaccttgatgcaatgcctggtcgccgtttccctcctctcctgtgtcgcccacgcacagctctcgcccacgttctatgcgtcctcctgccccaacctgcagagcatcgttcgggcggcgatgacccaggccgtcgcaagtgcacagaggatgggcgctctct

SEQ ID NO: 312331 - DNA, 244 bp, Zea mays
cagacggatgaactggcgaacggcatggagaaggtcgcggtgtccgaacccgaaaagcacggacacaatgaggaggagcacgaagtcgtcggcgaggagaaggagggccttctcgccaagctgcaccgcaccagttccaggtccaggtcgtcaggcgacgaggaagaggaggcggtcggtggggacagcgaggttatcgggaggaagaagaaggagatgggcctcgaggagaggctcgaggaga

SEQ ID NO: 312332 - DNA, 116 bp, Zea mays
agcccacaaccattattcttagtccactgcgtcaggtccaagtccgactctccaagcggcaagcgccatgccttcttccgcgcaggttctggtctggctcgccgccgtgctggcgg

SEQ ID NO: 312333 - DNA, 285 bp, Zea mays
caatatgcttgtttgttttactcatccagggtgttctactctacggtcctccaggaactgggaagaccctattggcaagggctatcgcaagtaacatcgatgccaactttttgaaggcgtgtgacttttcacttcattgatggtattcagtatttcttatccttcagatatgttgctccataatgcctgaaaacagattgtttcaagtgctattatcgacaaatacattggagaaagtgctcgtttgattagagaaatgtttggctatgcacgtgaccaccaagt

SEQ ID NO: 312334 - DNA, 248 bp, Zea mays
agcaactgcagtgacattaactttggtgcagccaaaatcggacgcgtgggcggacgcgtgggcggacgcgtgggcggcagcgagggcggcaaggactactggatcgtgaagcactcgtggggcacccagtggggcgaggccgggtacgtccggatggcgcgcaacgtcagggtgagggccggcaagtgcggcatcgccatggagccgctgtacccggtgaaggacggccgaacccgccgccgggcccg

SEQ ID NO: 312335 - DNA, 247 bp, Zea mays
gagcgtacactggagaactttgtgcttttaaaacttgccaaaaatgtttcgaaacctttgactgtagtaatattcaatgagtagctctccagtcaaatgtttcgaaacctttgactgtagtaatattcaatgagtagctctccaacacaacatcaggatttattccagaaagtgtctgtacagcagcatctgttttggtcattccaacctgttctgggcgaaagaacaacctattcatgttagccaa

SEQ ID NO: 312336 - DNA, 244 bp, Zea mays
cggacgcgtgggctagacgcgtgggcggacgcgtgggcggacgcgtgggctcgccgtctgccttctgcgcctcactttcggcctcattcccttgcaaattcaatctcacctccaaccatgggtaaagagaagtcccacatcaacattgtggttattggccacgttgactctggcaagtcgaccaccacaggacacctgatctacaagcttggaggcattgacaagcgtgtgatcgagaggtttg

SEQ ID NO: 312337 - DNA, 131 bp, Zea mays
agcaattgattttggcctgtctgtgttcttcaggcctggtgagcgatttacggaaattgtaggcagtccatactacatggccccagaggttctgaagcgaaactatggccctgaagttgatgtctggagtg

SEQ ID NO: 312338 - DNA, 274 bp, Zea mays
ttcctcctcgcggggcgcgacaccgtgtcctcggcgctcaccacgctcttcatgctcctgtccaagaacccggccgtggtggccgccatgcgcgccgaggccggggacggcgacggcgacggcgactcagcgccgctcacctacgagcacctcaagcgcctgcactacacccacgcggtgctgtacgagaacatgcgcctgttcccgccggtgcagttcgactccaagttctgcgccgggcccgacgtgctccccgacggcatctacgtgtccg

SEQ ID NO: 312339 - DNA, 202 bp, Zea mays
ctggaaggagactccagaggcgcacgtgttcaaggcagacgtaccggggctgaagaaggaggaggtcaaggtggaggtcgaggacggcaacgtcctgtgcagatcagcggcgagcgcaacaaggagcaggaggagaagacgggacctgcgcaggaatctcgcgcccacgcgtccgctcctgcgggaccccgaaggccgccgt

SEQ ID NO: 312340 - DNA, 243 bp, Zea mays
agcgagcgacacgtccgcggacgcgtgggcgacctgggcgagacgcgtgggcagacgcgtgggccggcctcgcccgccgcgccattgtccagatgtcctacgccatgcggcgtgccatatcccctttcggtgttcgtggacacgtacggcaccggcgcgatccccgacaaggagatcctgaagatcgtgaaggagaacttcgagttcaggcccggcatggtcatcatcaacctcgacctcaag

SEQ ID NO: 312341 - DNA, 125 bp, Zea mays
ataaatgttgtttgaatttattcatgattaagccatatgcggatcgacgatagttttgggtaacgagaacacaactatcgtgcgaccgcatatggcgtaatcatgaataagtggggtttgagttt

SEQ ID NO: 312342 - DNA, 273 bp, Zea mays
cccacgcgtccgcacctacagaagctgcgtttatcttttcaattaactactccgcttgggctcacatttaaacctcaccaggtgttcttgaagttgaagcatgagagtaaggttgaacacttatttgtggtacctggctctgcaaggcaattcaaaattgttctcgacttcctagggttggtggagaaattttactacctctctggaagatatgaccttgagcttgccgttggtgatgctgcaatggaaaattcatttctacgacctcttggc

SEQ ID NO: 312343 - DNA, 270 bp, Zea mays
tgaggccggcggtgagacattccccgcgcataggtgcgtgctcgcggctcggtcgccggtcttcgctgcagagttctttggcgcgatggaggagagtaaaagcggcagtgcggtccacattcacgacatggaggctcgggtcttcaaggctttgcttcatttcatatatactgacttgtgttggaaaacgaatgaagttgaagaggaagaagaagacgatgtcatggctcagcacctgcttgttgcagcagacaggtataacttgccaag

SEQ ID NO: 312344 - DNA, 273 bp, Zea mays
atgaaacggttcacccacctccagcatttggttcttcctccaatctagaggcgcttgcgctcgaaacaagtgagagtgatgtaaggagcactggtgatactgatcacagtgtacatctaatttccaggccgatgcacgagatcacttttgcaacgattgataagccaaagctccttagtcagctgacttgtttgcttgctgagctcggtcttgatatccaagaagcacatgcattttcaacaattgatggctactctttggatgtatttgttg

SEQ ID NO: 312345 - DNA, 264 bp, Zea mays
gaattgtcttccaggaatctggagcaaatttttatacaccggccccagtatcattatcaaatgaactggttactgtatgggaccctgaacttggaagaaccaatccatctgagcacaagcagttaaagcttgctaggagcttgactcgtgggatagttgatagagatctaaaaccaagctcaaatgagagaaagttactacaaacaattattaagtttcctcctacacgcaccttggaagtggatgagaagcaattggtgtgga

SEQ ID NO: 312346 - DNA, 287 bp, Zea mays
cggacgctgggcgtacgagcgagcgagatgaacggggcgatggaagttgaactcgcagcagtacgggatcagcccgatggggagtcagcgatgtcaggcactcacttaaagtttctctggaagatctttagaatggagtctctaagaagctctctctttcgcgcaatgtcatctggtccaagtgcaagggcaagggctcgaagtctggtgcttcaatgaggtgccctgggtgccagggctcaggtatgaaagtcaccattcgtcagctggggccttccatgatacag

SEQ ID NO: 312347 - DNA, 139 bp, Zea mays
cggacgcgtggggcattatacaaaagatttcaaaaacaaagatgtgacgaggaggcaaatagctgtggcaacataccttatcgataaactagcccttagggctggcaatgaaaaggacgacgatgaagctgatactgtt

SEQ ID NO: 312348 - DNA, 287 bp, Zea mays
caacatcaggctacctcctcaacagtgtcacaggcccagtctgggtgaaagcggttgcaaatctgtcggcattttttcagacagtcatagcgctgcacatctttgctagccccatgtatgaattcctggacacaaaatatggaagtgggcgtggtggcccttttgagatccacaacgtggcgttcagagtagcagtcagaggaggctacctgactatggacacactagtagtctgtgtgcaccgagactgtgacatttagcttaccgtagagagacatcctggcctt

SEQ ID NO: 312349 - DNA, 259 bp, Zea mays
gacgagagcatggaggtccaggtccagcagagaggatcccctgcccccgcggcagagctggaggtctccctccgcgagttcaccatgtcggacgcggaggcgttcatgtcgtgggcgtccgaccctcgcgtggtccgcttccagcgccgcgacgcctacgaacatgtggaccaggcccgccgctacatcgccgaccacatcctgccgcacccgtggtaccgcgccatctgcgtcggcgcgggcgacgccctccctgtgg

SEQ ID NO: 312350 - DNA, 268 bp, Zea mays
cccacgcgtccgcggtctactaccactttgtgcacgggctagcggagttcccgcgcgaggacgacctcgaggcgcggttcatgctcccgggcctcccgacgctgtccgtcgccgacgtgccgtcgttcctgcacgcgtcagacccgtacaaggtactcggcgacacgattcaggaccagttccgcaacatgggcaaggcgtcgtgggtgttcgttaactcattcgccgagctggagcgcgacgttatcgccgcactccctagcgtcag

SEQ ID NO: 312351 - DNA, 251 bp, Zea mays
aggttgatgttctgacacccaaagttttcattggactgattgttggtgcgatgctcccatactggttctcagcgatgacaatgaagagtgttggaagtgcagcaataaagaccgttgcgcgccacggcacggcagtaaaagaaaatacgcggggtcatggagggccttaggaagcgtgagtatgcgaagtgtgttaagatgtctactgatgcatctattaaggagatgataccacctggtgcacttgtgat

SEQ ID NO: 312352 - DNA, 251 bp, Zea mays
ggacgtggccgctgttgtccttgtcgaaatactggaatgctgtgtaaaggtgatcttctctatccagtttgttcatatgcactgttgcggtgacgaattcgtcgtagtcaattaacccgttgccgtcagcgtcacttggaaatgtataaagcatttcagcagggatgttttcagattacttcttcattttgaaaagaatcacaattccttttttttaaaagattgtactctgaaaactcactgcttccaaa

SEQ ID NO: 312353 - DNA, 194 bp, Zea mays
gtaagtctgtaacacagcaccttcaggatacttgcgccatgtctcgatgatactggtctatccatccctctatgatctcaacttcttgcctcctctgttctgtaacccagtccggatcctcatcggtcgcagacatgaggtccagatgatgcgcccctttctccgtgacaagggcgacgatgctggacgagatg

SEQ ID NO: 312354 - DNA, 179 bp, Zea mays
cccacgcgtccgcggcaacacctggtggtggatgtcgttcttggccgtctatctctcccagcaggtgttcctgaacggcatctgcctgccgatgtacgccatccactccagcaaccagccatggggcgtctgggacctggtggccgcagccacctgcgttgccggaatcctcatcgctc

SEQ ID NO: 312355 - DNA, 252 bp, Zea mays
cggacgcgtggggagaacaccaatattccaagaagatgagccttgtggttctccagtgaagagtatttaccaggttattgttgcctcttttaggaacatgagcttggaagtacctgctgatagctgtcttctgtatgaggtcgggagcaaccacatacaaaggacaaaacttgctcactctgatgattttaggttcttagataaggcggagttatttctgatccaagcctggtgtatggaggctgtcgagct

SEQ ID NO: 312356 - DNA, 233 bp, Zea mays
cagacgctggggcgccaacaacctacccagcccattcgacccgctcgacaagctccaggagaagttcacgaacttcaacctggacgacaccgacctcgtcgccctccaaggagcacacacttttggtaaagtacagtgtcaattcacacaagagaactgcacagctgggcagcagaggaaacactagaaaacctagaccaggtcacccccaacgtgtttgacaacaagtatta

SEQ ID NO: 312357 - DNA, 246 bp, Zea mays
gagaatttgtggaggctagaggacagtggttcagatgactggatggtcgttagtttcgagataaccttcccccagctgctggagatggcaagagacttgggtctcgacgtgccctgcgacgagccatccctgctagctatctatgcaaggagagacgcaaagctcgcaagaatccctaaagaattactgcacgcttcaccgacaactctgcttctgagcatagagggaatgccgggcttagactgg

SEQ ID NO: 312358 - DNA, 258 bp, Zea mays
caagcacacgcggctcaaggacttcccaagtttcgtgcgctcgacggaccccgacgagttcatgttccacttcgccctgaaggtgacagagcagatagtcggcgcggacgccgtcatcctcaacactttcgacgagctcgagcaggaggcgctggacgccatgcgcgccatgatcccgtcgtccgcgtccatccacaccatcgggccgctcgcgttcctcgccgaggagatagtgccccgcggaggcccgaccgacgc

SEQ ID NO: 312359 - DNA, 284 bp, Zea mays
  unsure (1)..(284): unsure at all n locations
cccacgcgtccgcccacgcgtccgcccacgcgtccgcggacggtggnggggaggatgagtttgagttcggttgtgaggagcctcctgtgaatgataaactgcatgttgaagtcataagtaaagccccgaatgcagggctgatacatggcaaggaaactttgggctacattgatattagccttgcagacgtgatcagcaacaagcggattaatgaaaagtaccatctcatagactcgaaaaatggtcagatccagatcgagttgcagtggagaacttcctagaca

SEQ ID NO: 312360 - DNA, 191 bp, Zea mays
cttgcgcatccttcctcctctctcgtctatacctctttcttctcctcttctctctatctatccttaatcaaaaatgccatacacaaagggcgacgccagcaagggtgcttcattgttcaagacccgatgcgctcaatgccacactcttggtgctggcgagcctcacaaagtcggccccaacctgaacggta

SEQ ID NO: 312361 - DNA, 273 bp, Zea mays
ggaaactaacatatgcccacctgcatgaggctaccaatggcttcagctcggaagctcttgttggcacaggaggattcggtgaggtttacaaggctaggctcatggatggcagcgttgtggctgtcaagaagctgatgcatttcacaggccagggcgaccgggagttcactgcagagatggagaccattggcaagatcaaacatcgcaaccttgtgccgttgctaggctactgcaaagttggcgacgaacgtctgcttgtgtacgagtacatga

SEQ ID NO: 312362 - DNA, 237 bp, Zea mays
gaagaaggtgcggtgccaggcgaaggtggccgggacgctggtgaccgtagccggcgcgatgatgatgacgctgtacaagggcccgctgatgaagatggcgtggaccagcagcggccacggccacgcgcacggcagcggcggcgccgaggcggccgtcatcgaccccagcggcagggagtggttcctgggctcgctcttcgtcatcgtcgccaccctcgcctgggcctcgctcttcat

SEQ ID NO: 312363 - DNA, 234 bp, Zea mays
cccacgcgtccgcccacgcgtccgcccacgcgtccgcggacgcgtgggtggagatgccagttcgacgcagtgactgatgaacccctgcaaaaattgtttgtagctgttagaagcgagttaaatctggacttaaagaacattaagacagaacaagcaaagttctggaagcagcatccatcactagtaaagatggaactgctgattcaggcgcatctcacttgtgagtcattcgct

SEQ ID NO: 312364 - DNA, 279 bp, Zea mays
aaccagacaagcaaggaatcccccgatggctcatcgcgttctcctcctcctctctctcgcgtcggccgccgcggttgccgccgccgtcgacgcggaggacccgctgatccggcaggtggttcccggtggagatgacaacgatctggagctgaacgcggagtcccacttcctgagcttcgtgcagcggttcggcaagtcctacaaggacgccgacgagcacgcgtaccggctgtccgttttcaaggccaacctgcgccgcgccgccggcatcagctgctg

SEQ ID NO: 312365 - DNA, 275 bp, Zea mays
ggacgcgtgggcggacgcgtgggcaagaacgacgcctccctcatgtcctccgtcatcacgggcctcgtcaacgtcttcgccaccgtcgtgtccatcgtcaccgtcgaccgcgtcggccgccgcaagctgttcctccagggcggcgcgcagatgatcgtgtgccagctcatcgtgggcacgctcatcgccgccaagttcgggaccagcggcacgggggacatcgccaagggctacgccgcggtcgtcgtggtcttcatctgcgcctacgtcgccgg

SEQ ID NO: 312366 - DNA, 279 bp, Zea mays
atgtacaggcacattacagttgatgagttggaagaagctttgaagaagtatgatatgggcgatgaggcaacagttaaagaaattattgctgaagtagacacagatcacgatgggagaatcaactaccaggagtttgttgccatgatgaagaataatagccccgagattgttccaaatcggaggcgcatgttttaagaaagacttctaagatatatttttccgcggtcagaggggagagcaactgatattcgaaagtgggattcagtctgggcatatgtg

SEQ ID NO: 312367 - DNA, 201 bp, Zea mays
gtttgatccagagtttgtaggagatgccatgtcaactatcgcagctaattgtgatgtcccagttagtgttaaatgcagaattggtgttgacgatcgtgattcttatgaagaactatgtgaatttgtagataaagttatctcaaaatctccaaccaggcatttcattattcatgctcggaaggcattgcttagtggtctcag

SEQ ID NO: 312368 - DNA, 287 bp, Zea mays
gccgcaaacgcgaaaccctagcctcgagctctatctccggccacagctggtcaggtaggaccgtaggaatctcctttcctcatcgttcctcgggtggttcgtgccccgcgccccgctgctttctggcgacgaaggatgagcaggcgctggagccgcacgatctacgtcgggaacctccccggcgacatccgggagagggaggtggaggatctgttctacaagtatggtaaaattgttgacattgacctgaaggtccccccaagaccacctggttatgcttttgttga

SEQ ID NO: 312369 - DNA, 287 bp, Zea mays
  unsure (1)..(287): unsure at all n locations
agagggtggttatgagctctttagggaccaaggtgtggaaggacaaagatgagcaagccagtacgattacaagtatcacagttgcacatagactgtccacagtcataaatgctgatacgatagttgtgatggagaaaggaaaggttgttgaacttggtaatcaccaagagttgatctctgctgaagatggcgtttactcaagattgttccacttgcaaagcaacatgaaagaatgaccatctattcaagttccattatggccanagaccanagacacttagcaagaa

SEQ ID NO: 312370 - DNA, 273 bp, Zea mays
cggacgcgtgggcgtacgcgtgggcgcgaccggcagagccagagccacagccacagccaccccgccggcgagtagggccaggggaaacggacgctcaagtgccccgacctcaacctggacctctgcatcagcccgccgtgccaggaggaggaggaggagatggaggaggctgcgatgagagtgagaccggcggtgaagcgggaggccgggctctgcttcggctgcagcctgggactccccaggaccgcggactgcaagtgcagcagcagcagc

SEQ ID NO: 312371 - DNA, 278 bp, Zea mays
acacacgcgtccgcggacgcgtgggcgcgagcagcccccctttttttttttttttttttttttttttggaacaccaaaaaaataataccatatccctacattatccgtcaacttactagagcaaaaacaaccacgctgacacagaaaagcattctcacaggatacaagagagagcctagttcatcctcttgatgagctcgttgatgtaattctcacggtttccggcgtcaccgccctccacgtagtgttcctcttcttcttgaggccgccgaggggtg

SEQ ID NO: 312372 - DNA, 280 bp, Zea mays
acgccatcggctgaccggagcccctgtccgtgttcgtcaactcgtacggcaccggcacgatccccgacaaggagatcctcaagatcgtgaaggagaacttcgacttcaggcccgggatgatcagcatcaacctcgacctgaagaagggcggcaacaggttcatcaagaccgccgcctacggccacttcggccgtgacgacgccgacttcacctgggaggtggtgaacccctcaagttcgacaaggcatcggcttaaggttgggagtgtcctgtggacatg

SEQ ID NO: 312373 - DNA, 275 bp, Zea mays
ggtagctgccgcccgctccacgctgggcccgtcagcctcatgcactggtcgggcaagggcaagccctgggaccgcctcgacgccggcaggccgtgcccgctcgaccacacctggaagtcgtacgacctctacatccccggcgactctggaggcgccgcctcgccggcgtccgggccggcattgtccgcatccgtgttctcttggtagagagatagcttctagttccattgtcttgctgtggctgttgccgccgctgctatgatctagctgccgct

SEQ ID NO: 312374 - DNA, 284 bp, Zea mays
cccacgcgtccggggcgccattaccgggcacagggaggtgggatgagagtgaaagagtcgtcgcatggatccggccgccgaccccctacgttccttcgccgtcctcgggctggcggcaaccactgccgcagccaactccggcttcgcggactccaacccgatccgtcctgtcaccgtccgcgcggcctctgcgctcttccaccgtcttcgtcgcgctcggccgcacccgcgacgcgcttcgattcgccatcctcgatacacctggtgcaggcctgggtgttgcg

SEQ ID NO: 312375 - DNA, 243 bp, Zea mays
gatttccacaggaatggatcacttcatgatctactccacctttcagatgagtacagcaagccacttagctggaacactcgtatcaagatcgcactcggctctgcccgtgcactggaatgctggacttgcaagctttattcctgatgctgaattccaggcagcagaacaaagtgccggatacactgccccagaagtggacatgaccggtcagtacaccctcaagagtgatgtctacagctttgg

SEQ ID NO: 312376 - DNA, 284 bp, Zea mays
cccacgcgtccgaaacaagggaggagacatggaggaggaaggccatggcatcgtcattgtcggcggcggcatctgcggcctcgccactgctcttgcccttcaccggaaagggattgctagtgtagtgctggagaagtccgagaccttacgatcagacggagccgcgattggtgttcacgccaacggatggagagccctggagcagcttggagtagctgcagagctcagggaaactgcagaccttatcaccgggactcatgacgtgtggcaggtggcaaacaaga

SEQ ID NO: 312377 - DNA, 199 bp, Zea mays
ggcgcccgagtacctcctgacgggccgcgccaccgagtgcaccgacgtgttcagcttcggcgtgctggcgctggaggtggcgtgcggtcggcggccgatcggcaccgccggcacggccgatggcggcaacctggtggagtgggtgtggagcctgcacggagaggcccggctgctggacgcggtggacccgcggctgggt

SEQ ID NO: 312378 - DNA, 277 bp, Zea mays
cccacgcgtccgcccacgcgtccgcccacgcgtccgcccacgcgtccgcggacgcgtgggtacgagagggggaaacggggggacgggaataggcgtcgtcggccatgtcgtcgtcgtggaactcggtgggtctggcgatcctgtaccaggtgctgggctgggtcgccttcgccgcgtggtccttcagcttctacccgctagtcctcctcaactacaagcgcaagagtgttgtgggcctgaatttcgattttctggtgttgaacttgacaaagcactc

SEQ ID NO: 312379 - DNA, 261 bp, Zea mays
agcaatttcagtgactttgcttggagtgagcagcctgaaggccaaatggcaggagcatcagaagcttttcagacacctggggctgtgagtaaccggctatcctgtggcatgacacccaaaactgtgaggctacccaagaatggtgagatgctcctatctgtgcatggttcacctcttggggtctataaagaagaaaatttagcagccattgaagaatctggtaacggaagtgaagatgctccctgataactcactgatatc

SEQ ID NO: 312380 - DNA, 263 bp, Zea mays
cccacgcgtccggcaaggaagtcgtagaaactagaccctcgtcttcgcagcagagcagactccagagggtagagccatggcagacagctccgatcaagttcctcccgctgcaagaaagctggacggcaaggtagcgctgatcaccggcggcgccacgagcatcggggagtgcacggcgcggctcttcgtgaagcacggcgcgcgcgtcgttgtggcggacatccagtacgagcctggctcccgcctctgcgccgagctgggag

SEQ ID NO: 312381 - DNA, 255 bp, Zea mays
cggacgcgtgggcggacgcgtgggcggacgcgtggggccgtcgccagtcgctacttcccctccgatcctcgccgccgacgcaaccacccgaaccatcctccgcgacctcgccgtcgccgcagccttggccatgtcgatcttcgagtataatgggtccgccgtggtggcgatggtggggaagaactgtttcgcgatcgccagcgaccggcggctgggcgtgcagcttcagaccatcgcgacagacttccagcgggt

SEQ ID NO: 312382 - DNA, 256 bp, Zea mays
caaaagagaggaccttgagcaggaagtcatgattgatggctggtttcacactggagatattggcgagtggcagccagatggatccttaaaagtgattgatagaaagaagaatattttcaagctttcgcagggggaatacgttgcagtggaaaatctagagaatgtgtatggtgttcttcaagatatagattcgatatgggtatacgggaacagcttcgaatcttctctcgtcgccgtcgccaacccgaaccagcaa

SEQ ID NO: 312383 - DNA, 282 bp, Zea mays
ctacaacttctgagagatcaagaactcatatatgcgcacaacactcttcctctgacaagagtttgttctgcaactaaccactatatatatagatcgatcctctatctgacaaggtgcaggtgcaggtgatcatatgaactccatggaatcatgcgtgcccccgggtttcaggttccaccccaccgacgaggagctcgtcggctactacctcaggaagaaggtggccgcccagaagatcgacctccacgtcatacgcgacatcgacctctaccgcatcgagcc

SEQ ID NO: 312384 - DNA, 285 bp, Zea mays
cccacgcgtccgaagaactcaagcgaggtcgaaatagttagcattctagcagagtcaggagatagaatggagttgcaaaagcaaagcaggtgggaaggggttgatcctgtcttagttttgaacgatgaagcggtgataaagagtatacaatccttctttggcatcaaggaatcattcccactcgaaggtcatctggtgactagaagtcctgataatgcaaggagaatatattacgtatcaaaatcagttaaagagattttggagctgaattcaaaagttggtggg

SEQ ID NO: 312385 - DNA, 263 bp, Zea mays
cccacgcgtccgcccacgcgtccgaccttccaaaggccaaagcttctctgactgctgccagaactgcagccaatgccatttatgtgccgccatctcagcagggcacaattgatctgcagagtgggatccttcatgctgaagagaaggattacaagactgcttacagctacttcttcgaagcatttgaagctttcagttcactggaagatcccaaggctatcttcagcttgaagtacatgcttctgtgcaagataatggtcaac

SEQ ID NO: 312386 - DNA, 279 bp, Zea mays
gtcgctggtgctcacgtacgccggccagacggcctacctgatcaaccacgtgggcgacttcggcgacgggttctacaagttcgtgccgcgccccgtgtactggccaatgttcgtcatcgcgacgctggcggcgatcgtggcgagccagtcgctcatctccgccaccttctccgtggtcaagcagtcggtggcgctggactacttcccgcgcgtccgggtggtgcacacctccaaggacaaggagggggaggtgtactccccggagaccaactacctgct

SEQ ID NO: 312387 - DNA, 275 bp, Zea mays
ttcttctctctctgctcctccgcctccgcctgatccatccaagacagggatcgccatgtcggactcggaggagcaccacttcgaatcgaaggccgacgctggggcgtccaagacctacccgcagcaggctggcaccgtccgtaagaacggcttcatcgtcatcaagaaccgtccctgcatagttgtggaggtttctacctccaagactggtaagcatggccacgccaaatgccactttgtcgccatagacatattcaatgggaaaacacttgaag

SEQ ID NO: 312388 - DNA, 256 bp, Zea mays
cccacgcgtccgccctcgtggccggcaggttccacgtcaacctgctcaggctgacgtggaggacgacgttcgtggtggtgagcacggtgctcgccatcgtgttgcccttcttcaacgatatcctgggcttcctcggcgccaacggcttctggccgctcaccgtgtactacccagtggagatgtacatccggcagcggcgtatacagaagtacaccagcaggtgggtggcgctgcagctgctcagcttcctgtgctt

SEQ ID NO: 312389 - DNA, 269 bp, Zea mays
cccacgcgtccgatccgttcgactgcgccgtgtgcctgtgcgagttctcgcccgacgaccggctccggctgctgccccagtgcagccacgcgttccacctcgagtgcatcgacacgtggctgctgtcccactccacctgcccgctctgccgccggaacctcctcgctgatctctcgccggcgtcgtccagccccgtcgtggtggtgcagctcgggtccgggagcgcccgcgacatggccgcgtcggcgggtggtgcctaccacgacgat

SEQ ID NO: 312390 - DNA, 259 bp, Zea mays
  unsure (1)..(259): unsure at all n locations
gccacgcatccgnccacgcgtccgcggacgctgggcgagcgtggggaccttcagcactactggtgcacatgaggctgcatatacccaggcaactggcaagcacatctctctctatgagcaacagcttattgactgtggttttgcattcaacaatttcggatgcaacggaggccttccatcccaggcctttgaatacatcaaatacaatggtggccttgacactgaggaatcttacccttaccaaggtgtcaatggaatc

SEQ ID NO: 312391 - DNA, 289 bp, Zea mays
cggacgcgtgggcagttgacaagtttctgccagatcaagtatactatcatggctgtttgaaatcatttctacagatcacaaaatggaaaggctcagaggtgatatattttggtgaccatcttttgagtgacttgagaggaccttcaaaagctggttggcgaacagctgctgtaattcgagaacttgaggatgaaatagaaatccaaaacggtgacagctaccgattccaacaggtgtgcactatatcatctgcttgtcgtgtttattgtatcctaatactttattttta

SEQ ID NO: 312392 - DNA, 285 bp, Zea mays
gtttctttggttaaaaaaacttcatgcattggatgcaattcaaccattccaaaccaacttattgataattaatactagaaagtagagagacatgaaagcatagaaaatacagggtccagaatgtaaccacagataatgataagtcaggtaggtacgacacccagcaaccccttgctgcgatttctgcttcttttgagcggcctaaagcaactctaataccaaagtcaattaaagcgagccctgatgcaagcaagccccaaattgaagcgaacaagcctacactag

SEQ ID NO: 312393 - DNA, 266 bp, Zea mays
  unsure (1)..(266): unsure at all n locations
ctcacgcgtccgcggcgcgctgcgatggatggcggagtccggcggctgacggatggtgagttgatcgacacgatgctcagctggtccccggtcgtgtgnctgatcgcgttctcgacgtaccgttatgtcctggcgaacctggccgtgcgcagctcctatctggatcggctcgacggctctgggctgcgctgtgcgtacgctgtcttggcgttgggcatcgcggaggtggacaaggagcggatcaaccacgtgtgcttcattccgga

SEQ ID NO: 312394 - DNA, 273 bp, Zea mays
cccacgcgtccgacttgctctccctccaacaagctaattaaggccggtcgtcatccctcttctagctcgttttattatccatggcggaggagaagcaccaccaccaccacctgttccaccataagaaggacgaggagcaggaggagcagctcgccggcggccggtacggcgagtccgccgagtacacggacgccacggtcgaggacgtggtgtccacgggcgagaacgagtacgacgagtacaaggaggcgaagcagcataagcacaagcagc

SEQ ID NO: 312395 - DNA, 297 bp, Zea mays
ggagatgatcatcccttggcagaccaatcttgggttctgcagataacgtcaagtcaatcaccaaagaggacctcgagaactacattgcaactcattatacagcttctagaatggttatcacagctgcaggcaatgttaaacatgaagacattgttgagcaggcaaagaagttgttcagcaagctatcaactgatcctacaacaacaaacatgttggcctctaagcagccagccacgttcacaggttctgaagctgcagactatgttagtggcatcgtttacgctcaatttgctgttg

SEQ ID NO: 312396 - DNA, 290 bp, Zea mays
cggacgctgggcacgctcaagatcaacgcgctggcgcggcagatcctcatcatcggcgacggcgtcatcgagtccgggttcacccctggccgctactgcatggagatgagctcgttcgcgtaccgggagctctggtggctagaccaggagggcctccctgccgatctcatcagaatgtacacaaatcaactggtacatctatgaatgtgtagtgcttcgtgcaatgcagtgcatggataactggaaatacgagccgcattcatgctgacatggtgttcccttgtcacaga

SEQ ID NO: 312397 - DNA, 271 bp, Zea mays
gttggcttctcctccccctccggttcgggttcgggttcgtgatgttctccggggttcggtttcgtgggtgagcggatcgagatggctgcgtcggatgttgagtaccgctgcttcgtcggctgcctcgcctgggccacggacgaccactccctctacaacgccttcagtacctacggcgaggtcctcgagtccaagatcatcctcgatcgggagacgcagaggtcccgctgcttcggcttcgtcatcttctccatggatgagttgatgctga

SEQ ID NO: 312398 - DNA, 265 bp, Zea mays
cggacgcgtgggcggacgcgtggggccgtttttcctcgtcctcgatccagcccctgccgcttccagctccgaacgatctgatcccaccccaccaccacgcccatggcggaccaactcaccgacgaccagatcgccgagttcaaggaggccttcagcctcttcgacaaggacggggatggttgcatcacgaccaaggagctgggaactgtcatgcgttcactggggcaaaaccctacagaggctgagctccaggacataatcaatg

SEQ ID NO: 312399 - DNA, 264 bp, Zea mays
aagagattcttgaagcgatccgtgatcttgtgaagagcaagagcgaattcgaatacaacccaaactggatcactgtgcttgaggggtctcaggagggatcttacctatgggtcgccctgaactacctgctgggcaagctaggtggggagtactcagacacggtaggcgtggtggacctcggaggtgggtcggtgcagctggcctatgccatctctgacgacgcgtccgcgaacgctcctgcggtgccggagggacaggaccctt

SEQ ID NO: 312400 - DNA, 259 bp, Zea mays
ggaggtcttcttcctgggacaactgaggcaccctcacctcgtgaagctgatcggctactgctacgaggacgagcacaggctgctcgtctacgagttcatgaccaggggcagcctggagaagcatctcttcaaaaagtacgcggcgtcgttgccttggtccacacggctgaagatcgccattggcgctgccaaagggttggccttcctccatgaagccgagaagccggtcatctaccgggacttcaagacctccaacatc

SEQ ID NO: 312401 - DNA, 290 bp, Zea mays
cggacgcgtggcggacgcgtgggcggacgcgtgggtttttttttttgccccacaaaaaagtaaaattaatatagtttaaactcttttagccactcattgagggactagagactaaatcagttcagtccatgttttagtcccaccatttggtaatttagagactaaatgagactaaaatagagggactaatctttagtccctcaaaccgaagagggccataatccgcattccgtgataaaagatgaccattaccagataaagcaaaacattaagtcttatgtttggactgc

SEQ ID NO: 312402 - DNA, 286 bp, Zea mays
atgacttcttcgatgttggtggatcaaaagaagaacaagaaaatctcatcgaattagttgagaactgggatgagcaccacaaagttgagttctgttcggagaaagtagaaatagttttctatgctgtctataatacagtgaaccagcttggatctatggcttctgcagtacagaagcgcgatgtgacaaaacacctcgctgaatcatggctaaaagtattgctgtgcatgctgacggaggcagactggcaaaggaggcaatttgtaccaacagttgaggaatacat

SEQ ID NO: 312403 - DNA, 289 bp, Zea mays
cggacgcgtggcgcgagcggccgctcggatctagaactagctggaagcctcaggagatacccaacccggagtactttgagcttgacaggcctgattttgatccaattgctgctattgggattgagatctggacaatgcaggatggcatcctgttcgacaatatcttgattactgatgatgagaaagttgccacctccattctcgagaagacctggaagcccaagtatgatgttgagaaggaaaaggagaaggctgaggaggctgctgctggtgcagatggtctttctga

SEQ ID NO: 312404 - DNA, 290 bp, Zea mays
cggacgcgtgggcggacgcgtgggtttgaattataaatatgcaacatataaatctcgtaccgaataacacattcctgacgaaagaactctctcctatgtagagagaatatctcctagatgagattatagttccttgatgggacttttcctgaagaaataaagtctgtgttaaacatcaaagtttgataatccctataaagggataaagacccatatagacccgaaaaggaataagatgaggtaccaaaggacttgaagttcaccgaataagcacatgtgcattccatgag

SEQ ID NO: 312405 - DNA, 268 bp, Zea mays
tgctgggatagttttggccacactttgctggttccttacaaacaagaaatggagaaacacaaccgaagtgattgttagagcagcatgtgaggcactctctccatatgctgcacagtaagctgatgttgcaaacacgaggaaaagaatcacttcggttgtgtttctccatttcttgtttgctgggatagttttggccacactttgctggttccttacaaattcttacttgagagaggaacctaacagccatgttgttgagcaacgcgtg

SEQ ID NO: 312406 - DNA, 289 bp, Zea mays
ggttttgctgctctccgaccccgagctccgaacgccgcagcatcaggcgcggcccccctcgcgtgtgaccgagatggcgctgccgaatcaggggaccgttgattaccccagcttcaagctcgtcatcgtcggcgatggtggaactggtaaaactacatttgtgaagaggcatctcactggagagtttgagaagaaatatgaaccaaccattggtgtggaagttcatccgttggatttcaccactaactgtggtaagatcaggttctactgctgggataccgcaggcaag

SEQ ID NO: 312407 - DNA, 291 bp, Zea mays
ggacagtgcagtgctccccgaggtccccaaaagacaagcaggcaagcagcaaagacacgcctccctgcttgcactccccacacgcccagtcgcccacacctccaacagacaaagacaatctagcaagcacacacagcatcaggaggaggagatcgagtaggagcagaagcaaagaatggggagagctccgtgctgcgagaagatggggctcaagagggggccatggacgccggaggaggacaagatcctggtcgcgcacatccagagcttcggccacagcaactggcgcgc

SEQ ID NO: 312408 - DNA, 290 bp, Zea mays
  unsure (1)..(290): unsure at all n locations
gtttgaggaaccactccatccaaaataagatgatgcatcatgagttcaatcctcaaatttggtggatgacctcatttctcatattagtaactaactaactatgaggaatgaggtggtgatggatctactcatttcattccacaaaccaaacaaagaagtaaggagtgagaagattatggactagctcatttctcaaaccaaacactccataaatgaatcatattggtgtattgcatatgctgtttagaggtatgcttcgtcttggattcaccanatgaaataaattggct

SEQ ID NO: 312409 - DNA, 281 bp, Zea mays
aaacaaacacgcgtccgcggacggtgggcggaccgtggcggacgcgtgggcggacgcgtggggcactacggaccttgcgggagctgaaactccttcaccatctccggcatgagaatgtcaacgctttgaaggatataatgatgccaatacacaggagaagctttaaggatgtgtacttggtatacgaactcatggatactgatttgcaccagataatcaaatcacctcagggcctttccaatgaccactgccagtattttctttttcagttgctccgagga

SEQ ID NO: 312410 - DNA, 174 bp, Zea mays
cggacgcgtgggtggccatgagagtagctccttcaatgtttcctctggacataaccatatttgacccattcaatgagattccagttgatgttcttctgttccaaatatgcatcccattcgctattgaacatttcaagcctcgtgcaaccattaaagctcttttacatcattggt

SEQ ID NO: 312411 - DNA, 195 bp, Zea mays
gtcgcccgccgaagcctccacggtggcaacttccagggcactcccgtcggggtgtccatggacaatactcgtctggccgtcgctgccatcggcaagctcatgttcgcgcagttctccgagcttgtcagtagcttctacagcaatggccttccctccaacctgtccggcgggcgcaacccgagcttggactacggt

SEQ ID NO: 312412 - DNA, 275 bp, Zea mays
cccacgcgtccgcccacgcgtccggaaatatgatggaatttcactcccattcaggctcaatcagcagcagttgcagagatctggctctgggaggttggaacatggaaagctgttgcccgcttgcaatctcacagtctaacagtgacacaaatggagttctctcgtaataatgcgtttcttttaagtgtttcgcgggatcgccatttgtctatcttttcaatcaggaaaactgaaggaggagcagagcatcgtctggttgcgaacgtcgaagcaca

SEQ ID NO: 312413 - DNA, 269 bp, Zea mays
gggcttcaaggacctggagggcgtggtggcgtacatgcacgggtgggaccgggacgggcaccccgtgtgctacaacgcgtacggcgtgttcaaggacagggccatgtacgagcgcgccttcggcgacggcgaccgcctggcgcgcttcctccgctggcgcgtccaggtgatggagcgcggcgtgcgcgcgctcacgctcaggccccgcggcgtcaacgccatcatacaggtgaccgacctgagggacatgccgaagcgggagctcagag

SEQ ID NO: 312414 - DNA, 271 bp, Zea mays
cccacgcgtccgcccacgcgtccgcggacgcgtggggtctcgctgggcctggccgctggcggcaagggagagatggggaagaaccaggcgtataaggcgatgcagcgggcgaggctggggacctcgtccggcgcacctggcgccgccgacgcccccgaagacggcatgacggacggttcatttcattctccagagtggcatgcggcgcgcctggccagccttaacaagacgcacaccgtcacctgggaggagtcaaaaagaagcagaagga

SEQ ID NO: 312415 - DNA, 294 bp, Zea mays
cggtcggaatccgggtcgaccacgcgtcgaacacgcgtccgcgaccgtgggtcgtggaacgtgacgaggtgcgcaacggcgctggaggaggctggcaccgactacgaactcgtgcccatcaacttcgccaccgccgagcacaagagccccgagcacctcgtccgcaacccgtttggtcaggttccagctctgcaggatggtgacttgtacctcttcgaatcacgcgcaatctgcaagtacgctgctcgcaaaaacaagccagagctgttgagggaaggaaacctcgaggaggca

SEQ ID NO: 312416 - DNA, 267 bp, Zea mays
cccacgcgtccgcggacgcgtgggcggacgcgtggcgtgacgcgtgggctgtgctgggactctctatgttgcaaacctgggcgactcgcgtgcagtacttggaaggctagtgaaagcaactggagaggttctggccactcagttgtcagcggacacaatgcatgctatgaagaagttagacaagagctgcagtcatcacatcctgatgatccacgtattgtggttctcaaacataacgtttggcgagtgaagggtctcatccagatc

SEQ ID NO: 312417 - DNA, 276 bp, Zea mays
atttcaggggcaatttgttgattcttttgggtaccacgcagagagacttgaggatgacacagtacacaagtatcgtgttaacagatatgaaggtgatgaggagatacatactgtctatttcaatcctgatcaaggtacggtgaattgtagttgctgcctgtttgagagctgtggtatcttgtgcagacacgctcttcggattttcattatcgaaggagtacatgaccttccaaaggcttatattctgaaacgttggacaaagcatgcaaaaaatat

SEQ ID NO: 312418 - DNA, 176 bp, Zea mays
gtctgcagcacccaactacacccagcctcggaaggaaccttccagaagcgcaagactctaaaggccgtcgccttcacattcttcctcgccgcgggggtcgcctgagatcacataaacaatggtgaaggctgttgctgtgcttggtagcagcgatggtgtaaagggcaccatctttt

SEQ ID NO: 312419 - DNA, 278 bp, Zea mays
ggccctcccaaagtcccaaaggccgccgccgcccgccatcccaccatggccgcgcagtccttcctcctcgccgccactgtcgccgccatgtcccccgcggtcttcgccgctccctattcctccgcacgccctttccactcggtccacttcgtctccggcccgttgggcgccgtcgccgccaaggctctcgtcgtcgcggacgccactatgaaggccgtagccgtcctcaagggcgcgtcttatgtctaggtcgtggtcacgctcactcaggacgacga

SEQ ID NO: 312420 - DNA, 162 bp, Zea mays
gtggatgcaaggtcgaagcaccgcttctgcccaaccttgattcgtgatccatcatcctgtacacggagtaaggatgagccacatgcataccttaaggttgatgcccttgggagactgccattttcttctgtacggagaccgcgtccactccttgacgttgac

SEQ ID NO: 312421 - DNA, 280 bp, Zea mays
gatcagagttatattgtctcgacgaggcattatcggactccagatatcacatgggtaactccatccaagtcccagtataactcctggagcccgataatgcctcgtcgacacaatataactctgatcctgttgatcataggtagtgctaccaaaatcaatcaccttgatagcactagacttgggcacccgcttgtaataggattatcctttggggatcgggatgaaactttgtaatcaggcactttaatgtactccggagaaacaaggagaatgttctcag

SEQ ID NO: 312422 - DNA, 230 bp, Zea mays
ggacgcccttgggtaactaattaggaaagatagtggaagactaccttacccgaaagcgggcaagggcagtaggggaattgcatgcagagaggttctcgggttgattttgttgcgatgacggtcagacgagggattcttgcaagtgatcttcccataaactgtagcgggtttttggaagctagtggaactttgtaaaggcatcgtagtggatccctagccattcaccttgg

SEQ ID NO: 312423 - DNA, 254 bp, Zea mays
cccacgcgtccgcccacgcgtccgcggacgcgtggggtcgaggtgtcgagggctcaggctcctggcttcttccgagggatgcccgggttcgagaagttcgcggacgatgtcgagcaggtgctgaccgaggccgacggcatcgtcacgaacagcttcgtcgagatggagccggagtacgtcgccggataccaggaagccagggcgatgaaggtgtggaccgtcgggccggtgtccctgttccaccagcgcgccgg

SEQ ID NO: 312424 - DNA, 281 bp, Zea mays
tgcacgacttcgccgtcaccgagaaccacgccatcatcccggaccagcagatcgtgttcaagctccagtagatggtgctgggcggctcgcccgtggtgtacgacaggaacaagaccgcgcggttcggggtgctgccgaagcgcgccaccgacgcgtcgcggctgctgtgggtggacggccccgactgcttctgcttccacctctggaacgcgtgggaggacgaggccacgggctaggtcgtgctgatctggtcctgcatgacccccgcggacgccgtgttc

SEQ ID NO: 312425 - DNA, 257 bp, Zea mays
ggaaaacacagagtatacaaggcaccttagagttcatggcaccagagctgtttcgtgaaaactacaacgagttggtggatatatactctttcggcatgtgcatgcttgagatggtgactgggtgtaaaaccagttgctctctccaaggtcaaagatgcagaagtaaggagtttcatagagagctgcctagcttcagctgctgatagattgccagcaatggagctctgaagagcccttttctcatgaaagatgacatc

SEQ ID NO: 312426 - DNA, 269 bp, Zea mays
ctcgattcgaccccgattcgtccgcccgcgaccgggattccctccgccaagcgcggatctgaacgctgcgctccgtgtcgccgctcgaatccgccatgaagggggccaaatccaagggcgccgccaaggccgatgccaagctggcggtgaagagcaagggggcggagaagcccgccaagggcaggaaagggaaggccggcaaggaccccaacaagcctaagagggctcccagcgctttcttcgtgttcatggaggaatttcgcaaggag

SEQ ID NO: 312427 - DNA, 267 bp, Zea mays
cccacgcgtccgcccacgcgtccgcccacgcgtccggatagccttggccgttgatcggtcaaccagcggtcaggatcaaaacaaacatgctgctttggtgggattggatccgaaccgtaggtgtcctgtgaacgactgaaattagaagacagacacccccttcagttaattaatgttgggtcctggattatgttataattgacccgcggtcccacaacatttataaaataattagatctaggtcctgaaattgatgatttagcctct

SEQ ID NO: 312428 - DNA, 268 bp, Zea mays
gagaggctccagcttaaccatgacactctatggacaggtggacctggtaattatacaaatcccaatgcacctgctgttctttctaaagtaaggagccttgttgagaacggaaagtaccctgaagccacatctgctgcatatgatctatctggtgaccaaacacaggtctttcaacctcttggggatattgatctggtctttggtgaggacatcaagtacacaaattacagacgagagctagatcttcacactgcaacagtcaccgtca

SEQ ID NO: 312429 - DNA, 259 bp, Zea mays
ggacgctggcgtgaggaggtgtgggaggtgcggcccggcgtgatgctggtgcagaaagcgggctgcggcgacgacgagccgtcgcccaacgtgaagcccgtgcccagcatccgggtcaaggtcaagcacgccggcatcacgcacgagatctacagcagttccgaggcctcctgcggtgagctgaagaagctggtggccgccaagacggggctgcaccccgacgaccagaacgtgctgtacaaggacacggagcgtgact

SEQ ID NO: 312430 - DNA, 278 bp, Zea mays
cagacacacaccgctgcttcaagaaaccaccgagagcccaaccgcacaggcaggagagagagcagggagccagggacagtagcgtggggccggggagcaacgatggaggggaaggaggaggacgtgcgcctgggcgccaacaagttctcggagcgtcacccatcggcacggcggcgcagggcgcggcgccggggacgacgacaaggactacaaggagcccgcgccggcgccgctgttcgagccgggggagctcaattcctggtccgtctacggggggg

SEQ ID NO: 312431 - DNA, 117 bp, Zea mays
tacttgttgccgtcgtgtcgaatcttgtactacgaggctccgtcgaacctcgatggcttgcttctttatcagaacatgtttgaataaacgctatttggtaaaaaaaaacaaccaaaa

SEQ ID NO: 312432 - DNA, 309 bp, Zea mays
cttgttttgactgtgacattctcgagtatgtctccatggaactcactctcggtcatatcatgtgaactttggtcccaaatatccatcttttcagtagcgttaattatgctctgtttccaactgcatttcctttccaattgaattaaagtgtggcctcgtttttagtcatttaaaattgtgttctaagtaattgctgcctctattatggcacttcaattttgcactgtcttttgagattcaagagaaatttctattcttttttttgcatccaattgtgcctgaacttttaggatatgtagatgctgccag

SEQ ID NO: 312433 - DNA, 211 bp, Zea mays
gaagatgagaagaaggctgctgaagagcgtgctgcagctgccaaggcttctggcaagaagaaagaatctgggaagtcatcagttttacttgatgtgaagccatgggacgatgagactgacatggccaagctcgaggaagctgttaggagtgtccagatggaagggctgctctggggcgtatccactcttctcagattgggataggatctcg

SEQ ID NO: 312434 - DNA, 303 bp, Zea mays
atgacacttaagggaatatactgattctgtctccatgctctcctcaccactttctgcacagtggaccctggaaaaaaagcattcatcaacaaatatcacaagttcacggcgatcatttcatatttgttacatacttacatgaacacccaatctaccagttgttatgacaaataccaaatggaaacagaaggactgtttggtttgttgcctaacttgccacactttaactaactttttctgcctaaggttagttcttcaatacgagcgactaaccttagccaaagtgtggcacagttagccgcg

SEQ ID NO: 312435 - DNA, 296 bp, Zea mays
cgagaagttacccagcctgagacatggaaaggacagatagagaaggttgttttctgcaacagttcgaatttagaggaagcatgccatggttgacaacctctagtgtttctatacacttgatttctgtttccattacaggatttgccacgaacatttccaggacaccctgcattagatgaggatgggaggactgctttgaggcggttgttaaccgcatatgcgaggcataatccatcagttgggtactgccaggtaaattgatggccaattgaaggaattttgttttgtttatctag

SEQ ID NO: 312436 - DNA, 201 bp, Zea mays
ttactttgcttcgtggaacatgaatttcaagtaagatacgctaaagcgaaaggtcagggaaaggatccggacttaagcgacggcatcgaggaaagccttcccaggagcacgcttctcaagtctgccgtggttgccgttgcttaagtgcggatgcgaatcctgacgttttgctttagcgtatctaaattggcttcgtggaac

SEQ ID NO: 312437 - DNA, 309 bp, Zea mays
gcttagaaaaagtacaatactttatgtatgaattcagaaatcccaatgatattcattctgaatatgtgcaaatgcagaatgttgcatttgacaaatgactactctcaggcctgcaaactgcacattacaacgtgaagttggttattgaaagggcgcccatagctgcaaacatagctgtgaccacatgatgatgacgatttactccagcaggcacttgcaatgtcaatggagggtggtgcttcaggatctgcagctgtgactgactctgctatggcagaagctagtgcagttgaccctgacttagcgttg

SEQ ID NO: 312438 - DNA, 220 bp, Zea mays
gaacacaacaacagccaaaaaaaaacattgttgcttgcttcgacttcgacgcttcccaccactagttccattccatgccgtccgtccacttccttcctgtgtaatcctcctccaataatagacgtgtcatgctgcatcctctgcattgtataaaagaaagtggtgtaatcctaaaaaaaaaaaaaaaaaaaaaaaaaaaaaaaaaaaaaaaaaaaggaag

SEQ ID NO: 312439 - DNA, 300 bp, Zea mays
ggttttagtatccagcacaccactttaccatgcttgcaagtgggcaatcaacaaagaccaaattatctgcctatggaggtttgcaagatagttgaaggacagcattactcaaagagactcaatgagaaacaaatcactgctctactgaaagtgacctgccagcgccctcaaaagcgtgagctggacatcttagaggattccggctctcatcaagtgactcctccccctcacgatgactttgcggacaaatgtctccattctagtggtggagctatgaacaacaatccgatgtcctgatcg

SEQ ID NO: 312440 - DNA, 297 bp, Zea mays
agctgagctccgacgacggcgccacgaagacgtcctgagcggctgcgagtgtgcatggacctggccttcgcggacgggggtacgtcgggtcgaggaagacccagaccatcggcgccctcgagctccgggtcctccggaagggagccttcgcgcaggtcatgaaccactacctgagcctcggcggcgccgtcagccagttcaagacgccgcggttcgtgagccagtccaacagcaaggtgctgcagatactgagccggaacgtcacccggagctacttcagcactgcgtatgggctct

SEQ ID NO: 312441 - DNA, 300 bp, Zea mays
cagatgctctgtattttcctcagggttattggcaaaactttacgatcggcattgttcctgggtttcatgaattgcagcatcttacgtcttctctggcttcataatcgtgagagttgatgcctgtgtggtggcggtgggtgtactgggcggatccggcggcatggacggttaatggcagagcgccccttgtttgtggagttcctcgaggcatatttataataatattatatatttatattatggtgatattttgtatttgtgaatgatctagctagctatctgtaaatgatctagttgtga

SEQ ID NO: 312442 - DNA, 292 bp, Zea mays
gattgttcctgatcgaaacccgaactttttggcaaatgagtgccggtggtgcttttggcggaaataggggggtgaggcctgtacctcctgaaaaaggtgtgttcccattggatcacttacatgagtgcgacttggagaagaaagattatcttggctgcctgaaatctacaggattccagtctgaaaaatgtcggaagttctcaaagaagtatttggagtgtcggatggagagaaacttgatggccaagcaagacatgtcagagcttgggttcagaattgtggatgaagcggg

SEQ ID NO: 312443 - DNA, 294 bp, Zea mays
tacatgtgaggatttcttttgcttgagtggacagtagcacctgtatcattgaactcattttgtatcagagcaattttgcttgcagaaagctatgaaataaaacacgtcccttaactgcaaaaaaaaagaaaaagaaagacaaaaaaattggagttcaaattatcaagaattctttgaagggtcacttgatgaccatagctgcaaatgctggcattgatggagctatagtcataaggaagctgattgaacaagaggacctcagtttgggctatgatgcagcaaaatgggagtacg

SEQ ID NO: 312444 - DNA, 103 bp, Zea mays
ctcgagcgctcggtttcagtagacccatgcatcaaacagcttggactgcggaacgatggatgctgttacccccgtcaggctttattctaagttaatcttaagg

SEQ ID NO: 312445 - DNA, 273 bp, Zea mays
agggcggttcgccgcccgacgtcgcgagaagtccattgaaccttatcatttagaggaagaagattagagtgcactacgcttataatttaggaatggacttcgtggcattttgatacctgtacccgtagtttcgcaaatgtcccatgttatggtgtggtatggttaatttgaagaatccttatgtactgaatctctgcaaaaagctatgttgtggacagaaaaaaaaaaaagaagataaatagaagaagaaagcagagagagaggtgtagtaga

SEQ ID NO: 312446 - DNA, 283 bp, Zea mays
cttctctgtgcttcaggtccttgctctagcatattatgccatctcatacttccctggtggatctgctggaatgaagtttctatcttccgccgttgtgtcctcagtgttgagatgctttgggcgatgagttcacctgactgctgctttcctgtgctgattgcagtatttcttctggatgatctagcacctttgtggctttgtcgtttagcctgtgcggcttcattaatttcagaagtttgatgccagttgaagcaccgaggtgaactgtgaggaaaggatgttg

SEQ ID NO: 312447 - DNA, 168 bp, Zea mays
tggtggctgtcggagtcatcaagagtgtggagaagaaggacccaactggagccaaggtgacgaacgctgctgccaagaagaaatgatctatctgtctggtgctgtgcttgcttgctggttacctcgtggaagcttaaaatatctcgtcttggtgacatccttgcagtt

SEQ ID NO: 312448 - DNA, 303 bp, Zea mays
agcttgtctaattccaactttataaactagcaaaaaagtgtttgcttattccaccagttctactgtgacatactcgtgtatagtgacatgtagcaataacggggagtgtggggggagtctcacagtgcctttggaagggcccgaacttgccttaaatcttcctcaaccaaataagtattgtattagtgcttgagagaatctgaatgtaggatgggttcaactgcacgaaaggacaagattgttaccacttgttgtatatagatataaagtgaagcaaccgccttagtgctgaaatatgtagta

SEQ ID NO: 312449 - DNA, 279 bp, Zea mays
ctcgaagtgatcatcagattatcaaacgacgacttcgaacaaaaacagccagatatatcacttatggaaatgtgtaatataaatcttatagtcatagtcattggaacttgcatcctgtattgtaaatatttatggatatattatgcatgagatcactctgcatatagattgcagtttgatacatagtataattgtaattcaataaatgagtcaaaatttgtatatgtttataaggctttttgataatagcttcttgcaaactgaatgtccctattatct

SEQ ID NO: 312450 - DNA, 242 bp, Zea mays
cctaaagtcggcatcggagatgatgtctttgattttatcggcgtcatacaacccttgctccttcaaggcgtgctcaagctcttctttagtaatgtacctgtgagatcaacgaattatatatgtgtcctgttatgatatgtgtcgtccagaattcaggtaccagctgtatcattttaacgttcaacttacccgctgttgtccttgtcgaaatactggaatgctgtgtaaaggtgctcttctct

SEQ ID NO: 312451 - DNA, 294 bp, Zea mays
actggataaggctttagctattgaacacaaacgtgttcagctgggtgagatgaagaggaaggctatcacccaagggtaggggagcagtagcatccgtccttgctatgttccaccccagggtacaccaactcgtcctggaggaggacagcgacaagctcagtatacaacacaccgactcgtggtaattctcagggcaagcagacatagactccaagaagcaactgtggttacaacattgccagggttaatcaattccatgttgaagctactgaggatggtccaacatcgtcattg

SEQ ID NO: 312452 - DNA, 303 bp, Zea mays
gtgatggatttatgactgtggtatactgactaactgtgtatgtctttatgacttgtgtataaaaatctgtgctttgtggtgcttaattaaatgtatatctcttattaataacaactataagacgagccccattgacaccgcaaccctgtccttggtcagagagcttggcaggtattcccgatctgccatgtattccagcaaaggccatgtacaagaggacgtactcagccgctacatccaaggttgcaaagaacaagaaggagcgggttctcgcaactgttaccaaaccgttggtggtgacag

SEQ ID NO: 312453 - DNA, 295 bp, Zea mays
cggatcgtctcagccgccgttggattcaccctcctagcggtagggtatataacctggacttcaatcaacctcatgtacatggtattgatgacgtcactggtgaaccgttagtccagcaggaggatgataaacccgaagcagttgctgccaggctaagacagtacgaagacgtggcaaagccagtcattgaattatacaagagccgaggagtgctccaccaattttccggaacgagacgaacaaagctggcctacgtttacacattttctcaacagtagtcaactattagtccaag

SEQ ID NO: 312454 - DNA, 295 bp, Zea mays
cggcccgggcggttcgccgcccgacgtcgcgagaagtccattgaaccttatcatttagaggaaggtgctcaacagaacaatcgtagaccaagatcactggtgccaatgcttccatgaaatcacatgcccctcttgtgcacctgtccgcgcttccagaaggcaccgttgtggactcgagatagcgacctctactcggaatttactttcagctcttgcatatttgtggttgtggccatcatgtactgattttcgcttttcaacagttgtcgtgaggctgtatcgtctaggagtaaaa

SEQ ID NO: 312455 - DNA, 300 bp, Zea mays
gccaaccagctcgccgaggcggacgagttcgaggacaagatgaaggagctggagagcctctgcaaccccatcatcgccaagatgtaccagggcgcgggtgaagacataggcggcgctggcggcatggacgaggacgcccctgccggcagcggcggccctggccccaagatcgaggaggtggcataagcggtttgttgtcagtcttgagtgtgctgcagttgctggctggcccagtggctgccgagagttatcgtcagttggtgcggtgtatccgcttaatatttatttgtggttggttgg

SEQ ID NO: 312456 - DNA, 154 bp, Zea mays
gactttggaagttatgctatgtcagtggattgatcagtgagtgccgtaggtagaatgataagcctctacgatttgttcaccagtggggcggataatgtaggagtcacgtgctagcatttctggtcggagctatgcgtgcatgaagaattgcgca

SEQ ID NO: 312457 - DNA, 252 bp, Zea mays
ggttgagcaggccattgaacttcttaagcagatgctagtgaatggatgcagtcccgacctgattagctacagcacagtgatcgatggacttggcaaggctggcaagacggacgaagcactggagctgttaaatgtgatggtcaacaaagggatgagcccaaacacaatcatttattcgtcgatagcttctgctctctccagagaaggcagaattaacaaagtaattcaaatgtttgataacatccaagatac

SEQ ID NO: 312458 - DNA, 192 bp, Zea mays
gttggagccttgctacctatcttgcttttagctcatccctgatgctaatattctgtggattgtggttgaacaatcacacttgtaagactagcttgggaatactatttttctaagagattttcatttttccaaggaaaaataaactaattttctttggaaatttcaaatgaaaatactatgctaaaatgtggt

SEQ ID NO: 312459 - DNA, 275 bp, Zea mays
gaaagtggttctcctcatgtccaagattggtggattgcagctgaacatggttacttcttgaggtggtctagagaagaagaaggcttacgtgaagctgactcccgactatgatgctcttgatgtggccaacaaaatcggaatcatctaagtgctgcattaggcatctgttgtttcctagttcaatctgttgtgtcctagttctatgtgaaaccagagttttgtagctatggatctcaatcgttccattaccatgtgttatgcacacttctgaattt

SEQ ID NO: 312460 - DNA, 317 bp, Zea mays
cggtcgagcaggcactgaaatgtgaccgctggtttgatgcagttgctgtgtctgctgaggtctcagcagaaaagccaaaccctacaatattcttgaaggcctgcgagctgttacgagtgaaaccagaagaagtcgtggatattggtgacgaccgtaggaatgacctatggggagctagggatgcaggctgtgatgcctggctttggggcagtgatgtttactccttcaaggaggttgcggagaggatcggggttgaggtataggaagaagtcgctctcctgagccgcaagaagactcgtccttgtacatagtgttag

SEQ ID NO: 312461 - DNA, 229 bp, Zea mays
  unsure (1)..(229): unsure at all n locations
aanaaaaaaaatagccgttggctgccgcgaactagagtacatagctgcctatgtatctgatatcacaaatggggcgctggaatccattggcactttctgcaagaatctctatgatttccggcttgttctacttgacaaacagaagaaaaaaaaaaaaaaaaaaaaatacccgttggctcccgcaaactagagtaaatggccccctatttatctgattcccaaaatgggg

SEQ ID NO: 312462 - DNA, 280 bp, Zea mays
caaaagttcacctctgtgagatgaaagcacacatcacaaagcattttctcagaaatattctgtctaatttttatgtgaagatattgcctatttcaccataggctgtaaagggctcaaaaatatccgtttgcatattcaaaaaaaagactgtttccaaactgctcaaacaaaagaaaggttcaaccctgtgagatgaatgcacacatcagaaacaagtttctcggaatgcttctgtctagtttttatgtgaagatatttctttttcaccatcagcctcaaa

SEQ ID NO: 312463 - DNA, 298 bp, Zea mays
ctcgaaagagaccgtgcgctgtgtcagtgtctgtaaatttgctgcaagttttgtatggggtgaccgagtcggtcgtgtgtgagaatcgaacggcgcagcatatccgccagtgctctgaggacgcaagccgtggatatctcacaatgtacctgagtgagctgtaacctgttgtgggcatattcggcaaccgattctgattcatcccgaaaatcaaaaccattgccgagtgccttgcagatgagctgatcaacgctgccaagggctcatccaacagttacgccatcaagaagaaggacga

SEQ ID NO: 312464 - DNA, 293 bp, Zea mays
gtgatgtgtgtcaaagagtcaaaactgaacatcaaattctagctggactactgcactcgataaagatacctaaatggaagtgggaagaaatcggcatggatatcattgtcgggttgcctcgcaccccgaaagggtatgattttatatgggtgattgtgcataggctaaccaaagtagctcacttcattctggtcaagactacttacaagggatctctgttggcagagttatacatgactcggattgtgtgtttacacggtgtaccaaagaagatcgtttctgatcgaggctca

SEQ ID NO: 312465 - DNA, 292 bp, Zea mays
actaatctagatcctgcttagtattatatatttttcctagtggatcagtgaataataagtaccaaacactagactagaaggtaatttctacattgtttagacttggtgaaacaatttatcccctctggtattgttctagcataagctttagttatacatgattaagatagaaaacttcatatataaatttgattcgcaaacccacatttatagctgcagctaaaatatgtttccttagggcacagtaatcctttctgtgaatttagaccttgtttgtgattttgtgaatgaa

SEQ ID NO: 312466 - DNA, 281 bp, Zea mays
tggttctgttgggctgtatgtcccaggtggcactgcagtcttgccttcaactgcattgatgcttgctgtgcctgcacagattgctggatgcaaaactattgttcttgccacaccacctagccgtgatggcagcatatgcaaggaggtctttactgtgcaaagaaagctggcgtgacacacatattgaaagctggaggagctcaggcaatctcagcaatggcatggggaactgcatcgtgcccaaaggctgagaagatttttggacctggtaaccagtatgt

SEQ ID NO: 312467 - DNA, 141 bp, Zea mays
gttagctaaaaatatacaagtagaattagctatttaacaaatagttagctaactattagctaatttaataaaagaatagttaatagatgaactattagctagggtgtttgtatatctgtagctaattttagccattaaaaa

SEQ ID NO: 312468 - DNA, 293 bp, Zea mays
agattggatctccactctccaggactccaggtcttgtgatatgtgtggttagctaatctaaattatgtcattagcaactaaatgctaatttagcgattcttctctgctttggttgtagggtttgccgtttgcttgacgatcacacgtatcaaaaagggttctcaagtattattggttgatgctatgctccaagaattagaaaaggagattgatgatgtggatgcacaaattggaaatcgttggcaactgcttgataaggaccatgatggcaaagtgacccctgaagaggtggc

SEQ ID NO: 312469 - DNA, 291 bp, Zea mays
  unsure (1)..(291): unsure at all n locations
ctcgcctggattacttctttaaatgtttggtggaaggttgtacatttttaaaaacagttttaaagaatatatttactcnagtgaactgagggaattgttacatttaggattaagagaagtttggaaaactgtggggtttccagattcattgttttatctccaagtgacaattcgcttctgctctcccgagtctttaccacaggactgaagattcagtttggcctctgtgatgtggcctggccgacagtctgttgctctctcatcctttaggcgntctggatgattagtaag

SEQ ID NO: 312470 - DNA, 278 bp, Zea mays
ctacaatgagctgagtgtagcacctgaagagcaccccaccctgctcacagaggctcccctaaatcccaaggccaacagggagaagatgacccagatcatgtatgaacccttcaatgtccctgccatgtacgacgcattcaagctgtgctctccctctatgcctctggccgcacgacatgcatcgtcctggattcaggtgatggctcatttaggaagttcccatctatgacagctatgactgcgccatgccatcatgcgcctggacttggctggtcgtg

SEQ ID NO: 312471 - DNA, 275 bp, Zea mays
ctccgagctgtccatcgagacttccaactgcttatgagaggaacgggagatatcagggctcaagtcgcaatgtatcttcggaacaaaaggatgagaacagagaggccagacctcggaccctgcgcttcacctggagcatgaaaaccactagttccatggatcccagtgacatgatgcgggacatccgcaaagtgctgcaggccacgacccgcgactatgagcagatggagcgcttcctgctcttctgtgtccatggcgacgggcacgctgagagc

SEQ ID NO: 312472 - DNA, 288 bp, Zea mays
  unsure (1)..(288): unsure at all n locations
ccccccccacccacncacccagcagcgtacgagctcggcatcggctcgagacaaagctccgaccccttactctctccctccgcagccgatgcgcacgcagggaacaagcgacgtgcgcgtctacacctttgtgtgccgaaacaacggcggcgagtggaccgacaagcagcactccggcgagatcgaggattccgccgctaccccatacgagctgcagcgccgcgtcgtcgctgccgcatccgcggcatggactgcatacggcgtccagtcgtcgttgtccatggtcac

SEQ ID NO: 312473 - DNA, 192 bp, Zea mays
gtcctactggcaggcgctcttcgctaagctcatggagaagcgcactctcgaggatctagtcctctccgtgggatcatgatcgaggcgctgctccagttgctgcttccgcaccagctgggggtgctgcagctgctgctgcccatgctgcagaggagaagaagcaagagcccaaggacgagtctgctcgacgac

SEQ ID NO: 312474 - DNA, 197 bp, Zea mays
ggctgatgacatggaagcactgtacaagcaggtccgagcagccaaccgaggtgatccttctgaggtcagtacaccaagcaaccaccaaagggagcacaaagaggtacacccccagccactgccgtacgagcagaggaaggccagtatcattgaaaggaacgaccaactcaactcctcgggcggcgcgcatgacgacg

SEQ ID NO: 312475 - DNA, 312 bp, Zea mays
caaattcgcagtaatgtttacatttggaaacatattggcagttgggagcacagcctttgttatgggccctcaaaaacagctaaggatgatgtttgatccagttcgtctgtatgcaacggctgtttatgttggatgtgttgttttggctctaatctttgctctttggattcatgacaagctgctaacactgatcgctgtcatatgtgagatctgcgccctattttgatttttgcacctcaggtatagtttgagctacattcctttggcacgaaggatggtttccgacctgatggtgaagttctgtgacactga

SEQ ID NO: 312476 - DNA, 299 bp, Zea mays
gctggatcgataagaacaatggcttcggtggaggacgaagctgattattctgtggaaaaagatgctatggaagggatcagactttaggctgtggagaatatcaataaatatcaagccgcaacaataaaatggcgtgacagaaaagttcggttaaaaaatatcaagccagggcacttggtactttggagagttgctaacctagatacagtaggcaagctgcagttaaagtgggaaggaccttttctggtagtatcttcgtcaagacacggttcttacagattgaaggatatggacggcaa

SEQ ID NO: 312477 - DNA, 266 bp, Zea mays
gagaatttagtgtttcaaagattgcagtttggaccacggtggcaaatccaataaccaaatatgcattaaccataaccccactgactatgagtttggaagagttgcttccaccaaatcaacagaagtactcagacatagtcatgcttagatcagccctggtggtgtcaaccctcctcattgctctatctgtacccttttttggacttgtgatggccttagttggttctttacttacgatgcttgtgacctatattctaccttgcgcg

SEQ ID NO: 312478 - DNA, 179 bp, Zea mays
atagcacctgcagcaagatggatgtgggcagcaaagatgtcctgatggagagcccgccggactactccgcagctccccggggccgatttggcattccctgctgcccagtgcacctgaaacgccttcgtatcgtggtggtggtggtggtcctcatcgtcgtggtgattgtgggagccctg

SEQ ID NO: 312479 - DNA, 179 bp, Zea mays
gtcggataatcgaactcgagatgactaaaacggcatctgcataacaatggaaaaggaagaacaaggtcttgaagggacagcattgccagctgctgctgagtcacagatttcattatatctagcctccctaaggaaaatacactgaatgctatttttactaaccattctatttttataaa

SEQ ID NO: 312480 - DNA, 153 bp, Zea mays
ggacattaccgagctcattgctgctgtcagggagaagtttgcttcagtcgcatgtggcggtgtcgagtgtggctgttgtagcagctgcccctgctgatggcggcgctactgcaactgaggcgaagaaagtatagaaggtgcaggataactaat

SEQ ID NO: 312481 - DNA, 303 bp, Zea mays
gtagcagttgagaatgaaagagagcaagatgatccattgaagctatcagggaaaactagacaacttggcctcattgtgtgcagaggcacggcagtcatgctggtctcaccgactgatgggactgatgagatcgccaaccctttcctcgcggacggagcatagcttgcacccctcggaacaatatgtccctgtgggaaaagaaccggtttctcgtgtatctgttgtatcgtgtgcagctgtgcggcttattagtggtgtttaaatgcactagatctaatagttagtgactaaaattattggaga

SEQ ID NO: 312482 - DNA, 128 bp, Zea mays
ccgacgtggacggtgatggccagatcaactacgacgagttcgtgaaggtgatgatggccaagtgagatatgcccgccgtttttaagctagttcctctcctgatggtagtaactagtctagttttggag

SEQ ID NO: 312483 - DNA, 301 bp, Zea mays
  unsure (1)..(301): unsure at all n locations
ggcggcgctcctgcagctgaggcgaagaaagaagagaaggtggaggagaaggaagaaagtgatgacgacatgggcttcaggctcttcgactaagcctgtacaatactcttgaaagatgnacaggcttagtcgaagaggctgaagcctgtgcaatagtcaagagtattgtttttgagtcgcggaagcagagggaagaaaaatcgtagtcatgtttggactttaaaattgttttatgttggaaagtacttgataagacttttctagtgtnattctangcgtaggttgctgtgctggttggggt

SEQ ID NO: 312484 - DNA, 316 bp, Zea mays
agcggcggcgcaagtccccttcatctccggcgcggcacttgacgtctgacttcaacaccaggcaaatggcaggtggcagggttgcacatgctaccctcaagggccccagcgtggtgaaggagatcttcattggactgaccctgggtctgatcgctggaggtatgtggaagatgcaccactggaacgagcagaggaaaactagatccttctacgacatgcttgacaagggccagatcagcgtcgtcgtcgaggagtagttcccacgtgtcacctcagaagtttttttttccagttgtttttgaaaactcactctgga

SEQ ID NO: 312485 - DNA, 220 bp, Zea mays
cgttctggctggcacatggctgactataataacatgccattttcacaaaagcacggcatggatcccaactgctcctgcgccgccggtaaagaggctggggatgcccagtgtagcctgtagcgctagagaagcacgttctgacccctctgtctttctctggtcactcaatttcaggacaggagtttcgccctcccaaagagttttggggtatctttctctc

SEQ ID NO: 312486 - DNA, 266 bp, Zea mays
atcgctcgaagaactgctgtatcgagtgctgcttgaagtgctaataatgttaaagagcattaagaatgtgtgataatattcaaatggcattgtgtcctttgtcaattgatcggtggagtgcaacagatattgctgctatattgtttgtattagtatgggttagtacgaagttgtgacaatgttcacatttgtgaattaagctggaattatgatgggagctataggagcaggtttatttggcttaccacagggttatggcgggttct

SEQ ID NO: 312487 - DNA, 253 bp, Zea mays
cacgcggggggcctggcgcagggtttgcaggggctgcttccggcagcagcaaccacaggcagctaatggctgatgctgcagccgcaccggagatgatcagtgttttcaagtctgttgtccgaagtcggtttctgtagcccgattagggtttgtttgggtaatcttggattggagtggattaaggtagtataaggtgtattgaagtgtaatatgaactaatttccctttcaatccctaaaatacattttaatct

SEQ ID NO: 312488 - DNA, 267 bp, Zea mays
gcttcattttataagaatggacgcagagacaataaaaaggtgaccataagagttgaagtcgtgactgcttcacttggcttccttactaactttgaagatgtttacaagatgtgggcttttgttgccaagttccttgatccttcatttcttgaaagtgaacgccttaccattgctgctgaccactcagaagggcaaacttgagcatgacatgtagcatagcaacaaaaaatgagagggaggtgatttctcctgttgaagcattgttgt

SEQ ID NO: 312489 - DNA, 273 bp, Zea mays
caaagttcctctagtgattcagtctgtcttcattcgatttcgttgaccgtgctttgagtgtccaatgttcagagaaaaagacgccgagacacgggagttcttggaagctgccaaggcctgtgtggaaatctgcaagtccagtggagtgccgctactgatcaatgaccgcgtagatgttgctctggcatgcgacgcagatggcgtccacgttggccaatcagacatgccagcatgggaagtacgacggctcctaggaccggaaaaatcatcggc

SEQ ID NO: 312490 - DNA, 231 bp, Zea mays
gtcctactggccggagctcttcgctaagctcctggagaagagcacgctagaggatctaatcctctccgtgggatctggtggtggcgctgctccagatgctgcctccgccccaactgggggtgatgcagctactgcagcacctgctgcagcggagaagaaggaagagcccaacgaggaatctgatgacgcacatgggcttcagcctgctcagatgagaccctcgctacccag

SEQ ID NO: 312491 - DNA, 281 bp, Zea mays
caacggcgtgaacttcgccatcggcggtccacggcgaccggggggctctcccttctcgctggacgtgcagctccatcagtggctctacttcagggccaggtccatggagatgatcaacctaggacagaggcctcccatcgatcgcggaggattccgaaaggccatctacaccatcggcatcgggcaaaacgacgtgtctgcttacatgcacctgccctacgaccaagtgcttgccaagatgcccggatttgttgctcagatcaagtacaccatcgagacgc

SEQ ID NO: 312492 - DNA, 247 bp, Zea mays
gattggcgaggctcctccggaactcggaaacgcatgcgacgacggacgttgccggtactttcggttatgtggctcctgagtacgcaatgacatgccgcgtgtcggacaaggcagacgtgtacagctatggagtggtgctgctggagctgatttcagacaagaaggcgctggacccgtcgttttctccatacggaaacggcttcaacatcgtcagctgggctgtgaggcttatccagagaggcagggt

SEQ ID NO: 312493 - DNA, 301 bp, Zea mays
cggacgcgtgggtgttggatcgcaaggtaaaggatcagtccaaaaagcttgcccaagtatgaggcatcacatgaattccagactaagaaaaagcgtcagcaacagcggcaggcagaggaagctgcaaagcgtcaaaaacttaatcatcctccaccacattctcgcttgcctccaatccagcagccagggcaagcacatcctcaaatcaggcctggccagggtatgcacaatgtgcctcctgtggcagctgggccaggccatcactatacaaagccccgaggaccaggaggccctaaccggt

SEQ ID NO: 312494 - DNA, 288 bp, Zea mays
gggacaaatgttattggtacctgaacatgctgggacttgcacagagagttggagctatgattttgttggcatcaacatctgaagtttatggtgatccacttgagcatcctcgaaccgatgcctactggggcaatgttaacgcaattggagctcatgagctgttatgatgatggtaagcgtgtagcatagacgctgatgttcgactatcacaggctgcattgcgttgtaatccgaattgccgatattttcaacgcctatttgccaaggatgatcattgacgatggccgt

SEQ ID NO: 312495 - DNA, 317 bp, Zea mays
tgaagatattaggactagagatatgtgcagacacaatggtaggggatgagatgctcaggggcatatctggtggacaacggaagcgcgttacaactggtgagatgctggttgggccagccagggcgcttttcatggacgagatctcaactgggcttgatagctccactacattccaaattgtgaactcgctgaggcagtccattcacatcctcggtggcacagctgttatctccctactgcagccagcacctgagacatataacttgtttgatgatatcatactcctctcagatggtcaggttgtgtaccacggtccc

SEQ ID NO: 312496 - DNA, 153 bp, Zea mays
cttctccagcttcgtcaggcagctcaacacctatggcttcaggaagatagtcgcggacaggtgggagttcgccaacgagttcttcaggaagggcgccaagcacctcctcgcagagatccaccggaggaagtcgtcgcagccgctgccgacgcc

SEQ ID NO: 312497 - DNA, 319 bp, Zea mays
atgcctcaaaaagggtggcattgcttcattatatactggatggggtgctgtcctttgcagaaatatcccacattccatagtgaagttctattcttatgagagtctgaagcagtctctgttgaaatcagcacctgatagggccaaactcaattctggccaaacgcttttatgtggaggttttgctgggtcaactgctgctctctgtacaacaccgtttgatgttatcaagacacgagtgcaattacaggcactcagccctgtttgcaagtatgatggggtggttcatgcactaaaagaaatttttcggcatgaaggcttg

SEQ ID NO: 312498 - DNA, 313 bp, Zea mays
atttggcttctacggcttcaactcactcaagccattctgttagtattgagtctcttgaggaatctgttgctgatgccagaagcaataagaatgatctgttaccttctttggagttggttacaaaaatgatagaggatgttgagcttcttgaagaaaaggctaaagtagccaaacgtgaatcatctgttgctgggacaggcattctaaccaaagttgaggagctcagagaaatgttaactcatgcgaaggaagcaaatgatatgcatgctggcgaagtttttggcgagaaagctaatttaaccacagaggcacg

SEQ ID NO: 312499 - DNA, 312 bp, Zea mays
ggagcaagcgggcaaaccaaactatcctcctgagaagcaactggtagaatttgaggaagcaaggaaggaactgcaggctgaggtggacaagggaatctctattgatcagttgaggcagaaaattttgaaaggaaacattgagagtaaagtttccaagcagctgaagaacaagaagtacttctctgtagaaaggattcagcgcaaaaagagagatatcacacaacttctcagtaaacataagcatacagttatggaagataaagtagaggttgtaccaaaacaaccaactgttcttgatctcttcaccaagtc

SEQ ID NO: 312500 - DNA, 247 bp, Zea mays
gtcatcaccgacgatggtgccacggctaacacaagcaagcaagcaagtcactgagtagctagcagtgtgtaccaccatagaaacaacacacacacacacgtgcgctaataaggtgagcttgaggcggtagccgtagctcgtctcggtgtccgggtcggacggacgacgttggcgtggctgctcaagtgcatcacgcagtgtgcgaggtgctgcacgaagcagcagcagcgcaacgaggtgtgctggt

SEQ ID NO: 312501 - DNA, 279 bp, Zea mays
tatggcaaccggtccagcactttcacgctcagctccagcaatggctggctccaccatggcggtgtgctccacggcggtggccggcacccccatcaaggtggggtccttcggcgaggtgcgcatcaccatgcgcaagaccgtgggcaagcccaaggtggcggcgtccggcaacccgtggtacggccccgaccgcgtcaagtagctcggcccgttctgcggcgagcccccgaggtacctgaccggcgagttggccggcgactactggtgggagcaccgcgg

SEQ ID NO: 312502 - DNA, 296 bp, Zea mays
tgtctttttattccaatgtgctaaactttatcagagtggtccaaacacccccaaggtgctaaactttagcacttcactaaagtttagcaggaagctaaagtttatctcgtgagattgaatcaggcccttactcctagtaggccttactttcttctggcggctcgtgactatggtttacaatcttggcaatgccaattgacatatgacagtattagttgcgtctgtttcaaattgctatctttatatctctacaatcatggaatgttgcaggaaatactagacgccttcaaccgggc

SEQ ID NO: 312503 - DNA, 310 bp, Zea mays
cacgcgctctgtctccgtgcggaggagggacagcagcgtcaatccggtggtgttatcgccatcggcggtgtctccaagtgccaacgatggacctaaggatgcgtctgccgttttcggtgagatctcctacgagcagctggtccttgccaccggcggttttggcgacgaccagctcatcaaacacgggcattcgggggacatgtaccatggtgtgttggagaatggctcccatgtcattgttaagaaggttggtgcaaagggcgccaacagacatgcgagtgaattggatttctacgtgaggtactcgcac

SEQ ID NO: 312504 - DNA, 309 bp, Zea mays
cgcttcctccgcttaattatccttgcgattgagcaatagacgcgtgcccccgaggacaccgtcactggcttcttgatggccggcgttggcaatgttgatctgcgcaagaaaaccaattacctcctcgtcgacaacaagacgacagttaaacaaatcgaggacgcgttcaaagaatttactacaagggaggatattgctattgtgctcatcagtcagtatattgccaacatgataagatttctggtggatagctacaacaagccagtccctgctattctggagatcccatccaaggaccatccatatgat

SEQ ID NO: 312505 - DNA, 310 bp, Zea mays
cccgtcgcatcccatcccactaccacccatctcgtcgtccgccgattcgatccggttcttccaacccaggggctgtgatggcgacgaagaggagcgtgggcaccctcggcgaggcggatctgaatgggaagaaggtgttcgtgcgcgccgacctcaacgtccctctcgacgacgcccagaagatcaccgacgacacccgcatccgcgcctccgtccccaccatcaagttcctcctcgagaagggcgccaaggtcatcctcgccagccacctgggtcgtccaaaaggtgtcaccccaaagtacagcttgaa

SEQ ID NO: 312506 - DNA, 301 bp, Zea mays
cgcaaccgccgcaacgcaaacccagaaaccctccgccgccgccgccgccgccgtaccacgtaccgtcccgcttctcctccgcccttgtgcgagcaggcaacggcagcagagcccgcacaggttgctcccggacggagggataacgcgcggggctgggctagccgggggcggccggaggaggtacgtatggacaagtacgaagcggtgcgggacatctggtctgggaacttctgggtggcgcgcctgatgcgcaacagcgagacccgggagctcgtcgcagtgaagtgcatcgagcgcagct

SEQ ID NO: 312507 - DNA, 327 bp, Zea mays
gtggcaaatggaggcgatgcggtggcggaggcaggccccgcgagctgggacgaggtggtgagggtggtgccgtgcatggacgccgtggtcaaggtgttctgcgtgcacacggagcccaacttctcgctgccgtggcagggaagcggcagtacagctctagcagtagcgggtttatcatcagcggccgccgtgtcctcaccaatgcccactccgtggagcactatacccaggttaagcttaagaagcgcggctctgacaccaagtaccttggcaccgtcctggccatcggcacagagtgcgatattgcggtcttaactgtcaatgacg

SEQ ID NO: 312508 - DNA, 246 bp, Zea mays
gtcttcacactcctcgccgtcacgtgacaccagtgcaggccgaagcagcgcaatggcgagccgcaccatggccctctcctgcacagccttcggcggccaggcagtgaacgtgccgtcgtctggcttcggcgaggcacgcctgcacgatgcggcaagcacggcgagcgaaaggcaaaagaccggcagcgaaggtccggcagcccgtggtacagccccgaccgggtggtgtagctggggccggtgtcc

SEQ ID NO: 312509 - DNA, 320 bp, Zea mays
gcggtccagcagtttcacgctcagctccagccgtggctgcctgcaccatggcggtgtgctgcacggccatggccggcacccccatcaaggtgggctccttcggcgaggcgcgcatcaccatgcgcaacaccgtcggcaagcccaacgtggcggcgtccggcaaccgctggtacggccccgaccgcctgaagtacgtcggcccgttctccggcgagcccccgacgtaggtgaccggcgagttgcccggcgagtagcggtgggacaccgccgggctgtccggcgaccccgagacgttcgccaagaaccgcgaggtggaggtg

SEQ ID NO: 312510 - DNA, 333 bp, Zea mays
cggacgcgtggcatcggccttcaagtctcgctacgtagcagtgcagtgaaaaaagcagccgcaatggcgagcagcaccatggccgtgtcctccacggcgttcgccggcaaggccgtgaacgtgccgtcgtcgtccggcttcggcgaggcccgcgtgacgatgcgcaagacggcggcgaaggccaagccagctgctgcgtccggtagcccgtggtacggccccgaccgggtgctgtagctgggcccagtgtccggcgagccaccgagctagctgacgggcgagttcgcgggcgagtacggctgggacaccgcggggctgtcggcggacccggag

SEQ ID NO: 312511 - DNA, 302 bp, Zea mays
cataaaaccagtgcaagcagaagcagcgcaatggcgagcagcaccatggccctctcctccacagccttcgccggcaaggcagtgaacgtgccgtcgtgtctcttcggcgaggcccgcgtgacgatgcgcaagacggcggcgaaggcaaagccggcggcgagctccggcagcccgtggtacggccccgaccgcgtgctctacgtgggcccgctgtccggcgcgcacccgagctacctgacgggccagttcccgggcgactacggctgggataccgcggggctgtcggctgacccggagacgtt

SEQ ID NO: 312512 - DNA, 296 bp, Zea mays
ggccgcatcgcgatcagtcatctctttccctcccagccttcctcctgcgtctcgctctcgccggaggtcaggcgcaccgccgccgggctatggacgcctcctaccgccgctccgccatcctccgcgccctcacccacgacgttgaggagttctacgcgctgtgcgatccagagaaggagaacctgtgcctgtacggctacgcgaacgaagagtgggaggtagcgctgccggcggaggaggtgcccacggagcttccggagccggcgctcgggatcaacttcgcgcgcgacgggatg

SEQ ID NO: 312513 - DNA, 311 bp, Zea mays
gtcgagagtgagctcatggacatgtactccaaatgcgggttgatggaggatgcgctcagggtgttccgctccggccaggatcctgacgaagtttccttgacggtgattcttgctgggtttgctcagaacggactggaggaggaggcgttcaggttgttcgctgagatggtcgggaaaggaatcagcgtcgacgcaaacatggtttctgcagtcctgggtgccttcggtgcttcggcgccgtttgctcttgggaaacagatccacgcgctggccgtcaagagatgcttcggagggaacacctacgtctgcaa

SEQ ID NO: 312514 - DNA, 305 bp, Zea mays
gtgagcggccacaccttcttcgcataaaatattatggtaactttgacagacctttaggcaggtttttgcgtgaccagctatttgatcagagcaagctttgccaatcttgtgagctaccaccagaggcccatgtttattgctatgtacatccccaaggcagtttaacaatatcagtaaggaaactttcaataaagttgcctggcaatggtgaaaatgatggtagaatttggatgtggcatagatgcttacgctgccctcgagtcaatgggctccctccagcaactaaaagagtagtgatgtctgat

SEQ ID NO: 312515 - DNA, 308 bp, Zea mays
acgacttccaaacatttcaacaagaaggttggcactatgagcttgacaaccctgaagaagagataacatacaaaggtgtcgtcttcaatgagatgaaaggagtttactctcaacctgataacataatgggacgtgtatcccaacaggcactttcccctgataacacatatggtgttgatagtggtggggacccaaatgaaatcccaaaacttacttttgaagaattcaaggagttccatagtaagtattatcatccaagcaatgctaggatctggttctatggtgatgatgacccaaaagagcggctg

SEQ ID NO: 312516 - DNA, 290 bp, Zea mays
gcatcctatggcaagatggaaagatgggtagaatctgtgaaggattatgagattctcagaaaagaacttccaggtgacgcggaggttgctgaggcctatttccacgcccaggttgctctcaagtcatctcgtggtgaggaggtatccaacatgaaatttggaggagaggttgaaacaattatagggatggaacagttccagatggccacatctttgccaggtgtttcagtcatccatttcatgacgccttccaatcagcagtgctgcaaggtttccccattcgtgaacac

SEQ ID NO: 312517 - DNA, 286 bp, Zea mays
cttaggtgagaggttggcaagctgtctcagaatggagccggtggagcctcagcagcaagtggagctcaaccgcctgaatgccagctccaggccaggcaccaatggcgggagtgcaagaacagagagagaagaggaagtagacgactgccccatcgaggaggtccggctgacggtgccgatcaccgactacccggcattgcccgctctcacgttccggacatggttcctggggctcctctcctgcgcgctgctggccttctccaaccagttcttcggctaccgccag

SEQ ID NO: 312518 - DNA, 304 bp, Zea mays
cagagggagctccaggagcgcatcgggcgtgcgggcgggcccgaggccacgctggcgcgcgtccggcgcgaggtggtggacttgcacggcgagatggtgctgctgctcaactacagcagcgtcaactacacgggcctcgccaagatcctcaagaagttcgacaagcgcaccggcggcgtgctccgcctccccgtcatcgcgcgggtgctgcggcagcccttcttcaccaccgacctcatctccgagctggtcagggactgcgaggccgcgatggaggccgtcttcccgcccgccgccagcaggg

SEQ ID NO: 312519 - DNA, 316 bp, Zea mays
caagacgtcgtcgggcaggcacacgacggccgccctcctcgacagcggcaacctcgtgatccgcgactccagcagcggcagcaacaaggtcgtgtggcagagcttccgctcgccgaccgacaccctgctccccgggcaggagctgaccaaggacacgaggttagtctccggctaccaccacctctacttcgacaacgacaacgtcctgaggatgctctacgacggcccggagatcaccagcatctactggccgagccccgactacaacgccctcaagaacggccgcaacaggttcaacagcaccagggtagcggtc

SEQ ID NO: 312520 - DNA, 307 bp, Zea mays
gcaattcaacggttatacatttcaaggaagacctctgagggtgaactgcgggccaccgccacctagagatggatccgcaccaagagcaccaagcggtggtggtggtgggggtggtggcggcactttgtcaacgccccatgcaaggttccccacgtataggattttgttgacatcaacctctgaagtttatggtgatccacttgagcatcctcaaactgaggcctactggggcaatgttaacccgattggagttacgagttgttactgctgcggtaagcgtgtagcagagacgctgatgttcgactat

SEQ ID NO: 312521 - DNA, 298 bp, Zea mays
aaaaaattactctcagtttgtgtctttccccatatacacatggcaggagaaatcaagaactgttgaggttgaagaggatgaagagccgaaagaagttgaagaggcaacgaagggtgagaaaaagaagaagactattacagagaaatattgggattgggaactagccaatgagacaaaacccatatggatgagaaatccaaaggaaattgagaacaccgaatacaatgagttctataagaagacattcaatgagtttttggaccctcttgcccacactcacttcacaactgagggtgag

SEQ ID NO: 312522 - DNA, 291 bp, Zea mays
cacatgtccacgttagatgacccacttatgtggggattcaagggttttccaacttcggatgctaagcttggaaggtgggtgctgacagcagaagatatatgcttcaagaatgtagtcatgtcctacatgtttcgacttgggaaatgcataccaatcacgagagggggtgggatttatcaagaacacatgaatgaagcccttgacgtgcttagaaatggaggctgggaaaaatagcccaagaagatcagccgattagaagattgaagtggggaactgccagtcttattgtcc

SEQ ID NO: 312523 - DNA, 316 bp, Zea mays
gtcttcacactcctcgccatcacatagaaccagtgcaagcagaagcagcgcgatggcgagcagcaccatggcgctctcctccacagccttcgccggcaaggcagtgaacgtgccgtcgtctctcttcggcgaggcccgcgtgacgatgcgcaagacggcggcgaaggcaaagccggcggcgggctccggcagcccgtggtacggccccgaccgcgtgctctacctgggcccgctgtccggcgcgccgcgcgagctacctgacgggcgagttcccgggcgactgcggctgggacaccgcggggctgtcggcggaccc

SEQ ID NO: 312524 - DNA, 308 bp, Zea mays
catcgacacgatcgcgagcgcaacacgtacgttgtcggaagctcaagttagaagaagcaccagtgcctgatcgatggcggcccaggctctcctctccggccggcagctgctgggccgccccgtgcagtcggccgtctctaggtcgtcggcgaggaaggcgcccttcgtcgtcagggccagctccagccctccagccaagcaaggtgccgacaggacgctgtggttcgcgtccaagcagtccctctcctacctcgatggcacgctgcccggcgactatggcttcgacccgctgggcctctcggacccgg

SEQ ID NO: 312525 - DNA, 297 bp, Zea mays
gggtttaaacaatgtgtcggctatgaacaacactgaggaatttacaaatgtgaattccaacacagagaatggaggagtcttcaatgatgggccaggagcagttttggttaacattttgaccagaatgaggcatctacctcctgggatgcattcagtgcttctagttatggccctaacatggttgtcatggtttccctttttcctttttgacactgactggatgggacgcgaagtttaccatggggatccaaatggagatttgagtgagatgaaagcttatgacaatggtgtccgaga

SEQ ID NO: 312526 - DNA, 304 bp, Zea mays
cggacgcgtggcgtgacgcgtgggtgctgccagtgccagcacgcttgtggccaagaaacgttgggggcagtttggacctcggagcagcatcatacatggcgggagacgaggccgggaggaggggcgttccctctctgctgaacccgccgtccgcttccagcgaggggcagcaagagcacatcgcctctgatgtcacacagctcatcggatggacacctctggtcgagctcaagcgaatcgccgccaaggaaggggtatgcgcgcgcatcgtcggcaaggtggaggcgtaccagcctctgtgctc

SEQ ID NO: 312527 - DNA, 203 bp, Zea mays
cccacgcgtccgcttggtgttaacgtcaagatgatcacgggtgatcagcttgctattggtaaggagactggaagaggcttggcatgggtacacatgtatccatctctgcgctgtcgcaaacaagatgtagctgacgcttcgtaataccatgagagcgtgtttcgagctccgaccagacggtcgtaagctgagagagaccatgt

SEQ ID NO: 312528 - DNA, 327 bp, Zea mays
cccacgcgtccgcccacgcgtccgcccacgcgtccgagcacgcccaaaaattccaaggtttttcacctcttggagcgcaccaacaccacccggagaccggagccactcgccaccggcgcggaaacagagggcggatgctcgatggcggatgagaatcaggctggaaagaaagatgaggaggaatttagcacaggccctctgtcagtcctaatgatgagtgttaagaacaacacccaggtcctcatcaattgccgcaacaacaagaagctacttggccgtgttcgtgcttttgatcgccactgtaacatggtgctcgagaacgtgcgt

SEQ ID NO: 312529 - DNA, 304 bp, Zea mays
gaccaattaactagcttcttctagctctagctaggctcgtctgctgcaagaaggtaacagcgcaggcatggaggggaaggaggaggacgtccgcctgggcgccaacaagttctcggagcgccagcccatcggcacggcggcgcagggcacggacgacaaggactacaaggtagccccgccggcgcggttcttcgagcccgggagctcaagtctggtcctttaccgggccggattgcggagttcgtcgccaccttcctcttcctctacatctccatcttcacggtcatgggggtctccaagtcca

SEQ ID NO: 312530 - DNA, 296 bp, Zea mays
  unsure (1)..(296): unsure at all n locations
ggctctcttccagcagatcgctcccacctcctccccgccgtctcacgaggagctagaggaaggggaggctctgtaccagcctgttggaagggggcgagaggagcatgtacgngagggatccctggggcggcccgctgggagatatgccacgactcggccacggacgacgaccgcagccgcaacctggacatcgaccgggccgcgctgtcgcggacgctcgacgagacgcagcagagctggctgctggctgggagcccgaccagccccgcaagaagaacaagtacgtcgacatcggc

SEQ ID NO: 312531 - DNA, 275 bp, Zea mays
ggcgccgacgagactagtcttctcagccaggaccgcgtctgcatggagtggctagacgcacgggcccctggatccgtgctgtacgtgagcttcggcagtgttgttcatgtcaccccagacgagttggtggagatcgcgtggggcttggcgaacagcggcgtgccgttcctgttggtggtctggcgtggccttgtggtcggagtggacaagcaggagctcccggacgggttcatggcggccgtggagggcaggggcaaggtgatcgagtgggcgcc

SEQ ID NO: 312532 - DNA, 284 bp, Zea mays
cccacgcgtccgcccacgcgtccgcccacgcgtccgcccacgcgtccgcaatgagcagggctgattgaagccacagctcgcagagcaggaccaatacccagaagacttgcccagaatttctgcatgaccgattggctgcaaagcttaagcattggaaggctgaatttgttactacactgcagcattactggttagggacaaagctactatgggcagatgttagaatctcatcaagattactggtgaaacttgctggtggaaaaagcctttctagaagagagagg

SEQ ID NO: 312533 - DNA, 311 bp, Zea mays
cccacgcgtccgcccacgcgtccgcccacgcgtccgcccacgcgtacgcccacgcgtccgggcacttatctacgagttcatgccccatggatctctcgataagtacatcttctcgtcggagaagagtttctcatgggacaaactcaatgagatcgctttgggcattgctagaggtctcaactacctacatcacgggtgtgatatgcagattgtacacttcgacatcaagccacacaacatccttcttgacagtaactttgttccaaaagttgttgattttgggcttgccaaactgttcccaagagacgaca

SEQ ID NO: 312534 - DNA, 297 bp, Zea mays
gtgacgcagccgggacggacgcctcgcgccgccgatcgagttaatggacgccgaggctggcgtcgccggcgccgaccagttgccgcggaggcagtactacatgaatctattgcttttggcttaccagagctttggtgttgtttacggtgacctaagcacatcgcctctttacgtttataaaagcacattctctggaaagctcaatcagtaccaagatgaggagacagtgttcggtgtgctttccctcatcttctggaccttcactctgattcctttgctgaagtatgtcactattgt

SEQ ID NO: 312535 - DNA, 303 bp, Zea mays
gaaaaagggtgcctttgatgccgcgtctctccagagactagttaatggaaagtctgatggtggtgtcaccccgcttcacttggcagcccttcatggacatgctgagagtgtacagttgctgctagaccttggagcctctgtctctgaggtgactgtcaatgatggttcaacaattgacctcattggttcggggagcacacccctccattacgcggcgtgtggtggaagtgctgtttgctgccaacttctcattgcagcaggagcaaacatgggagctcaaaatgttaacgggttgactccttt

SEQ ID NO: 312536 - DNA, 266 bp, Zea mays
ccagccaccgtccgcgacgtggcggacgtggcggacgcgtgagctgacgcgtggccggaccgtgggcggaccgtgggcttggactaaagatgctgttacttcggaggaagccaaggaatgacgctgggctccgatatttgtgaggcaatcaaacttcaaactacccgctgatccttcagtaccgattatcatgattggccctgggaccggtcttgcacccttccgtggcttcttgcaggaaagacttgctcaaaaagaatctggag

SEQ ID NO: 312537 - DNA, 297 bp, Zea mays
cccacgcgtccggttctagatcgcgagcggccgccctttttttttttttttttttttaagcagcaaatgattagtttttcatgactgacggtgactgaatgtgaagcagactattctagtcctggagatctccctcctcctcgtcctcgtactcgccctcctcgtcggcggtggcgtcctggtactgctggtactcggacacgaggtcgttcatgttgctctcggctcgtggaaccaactcgtccatgccctcccccgtgtaccagtgcaagaaggccttcctgcggaacatggcgg

SEQ ID NO: 312538 - DNA, 295 bp, Zea mays
cgacggtgcactcaacgtgttcgaggaaatgaaggcaatcggtgtgaggccaaacctggtcgtgtacaataccatgttggatgccatgggccgcgcattgcgaccttgggtggtgaagaccatccacagagagatggttgaccagcaggtgcagcccagcagggcgacctattgttgtctcctgcacgcatacaccagggcacgctatggcgaggatgccatggccgtgtaccgactgatgaaggatgaggcaatgggcatcgatgtgatgctgtacaacatgcttctgtccatg

SEQ ID NO: 312539 - DNA, 285 bp, Zea mays
ggagcatcagagatggagatgatgaaggagcggttctccaagctgctgctcggcgaggacatgtccgggagcggcaagggcgtctgcaccgcgctcgccatctccaacgccgtcaccaacctctgcgcgacggtgttcggccagctctggaggctggagccgctgccgccggagaagaaggccatgtggcggcgcgagttggactgcctgctctgcgtcacgaccacatcgtggagctggtgcccacgtggcagacattcccggatggtacaaggcttgagatca

SEQ ID NO: 312540 - DNA, 300 bp, Zea mays
ctccaggagcgcctcgacttcctcctccgcctcggcctctccaccgacgacctctccaactacccgctattactggcctgctccctcaggaagaacgtcatccccgtcctctcctacctcgagaagctcggcgtcacgcgcgcccgcctggccgcctttgtccgcgcctacccggcctgcctccacgcctctgtcgccgtcgacctcgctcccatggtcaaggcgctccgtggcctggacgtcgaccgccaggacctcccccgcgtcctcgagcggtaccccgacgtcctgggactcaag

SEQ ID NO: 312541 - DNA, 295 bp, Zea mays
gtagaagttgatagtgatccaagagctgcatattttaggcaggctaagaatggcctctacataaggatggcattgctcaaacttctgcttgttggtcactgacatttcggctagtgctttagcttgtgctgcgtcaagggattagaaggtattattcttaatataatgatcgaggctgtcttacccacgcaggtcgagtttttagaaacatgtactaataatcagcagcttgtgtcaaaattcaatgttcgctgttgcaggtaaaacatacaaaaactaaaaaaaagggcggccg

SEQ ID NO: 312542 - DNA, 299 bp, Zea mays
cggaccgtggtcgcccacgcgtccggctgcctccgcctctcgagtctcgtccaaccgtcatcctcctagctcctctactcgccagtcgccatgggcatgattaagatcggaatcaacggcttcggaaggatcggcaggctcgtggccagggtcgccctccagagcgaggatgtcgagctcgtcgccgtcaacgaccccttcatcaccacggactacatgacctacatgttcaagtacgacaccgtccacggccactggaagcacagcgacatcacactcaaggactccaagacgcttct

SEQ ID NO: 312543 - DNA, 259 bp, Zea mays
ggacatctggtcaacagggattgcttgcgtttttttgggctgggctctaaagttgctatgtttcggtactcatctgttgagatctacactacctgcaaaccacaacctactctccagttcgtcaaccccatcagacaggattggtttgaaggacaaaggaggaatgttcatgctaaaggtatggcgcttttctctggggttgcaagatttctacagaacttgaagaatgaacatcctgatgcaataacgttagcaatcc

SEQ ID NO: 312544 - DNA, 293 bp, Zea mays
gtgttcgtcaactcgtacggcaccggcacgatccccgacaaggagatcctcaagatcgtgaaggagaacttcgacttcaggcccgggatgatcagcatcaacctcgacctgaagaagggcggcaacaggttcatcaagaccgccgcctacggccacttcggccgtgacgacgccgacttcacctgggaggtggtgaagcccctcaagttcgacaaggcatcggcttaaggttgggagtgtcactgtggacatgaggactaccttcctctggctctgctgttacctgcaagcat

SEQ ID NO: 312545 - DNA, 317 bp, Zea mays
attactttccagggctatgatgatattcccaaggaaattcctgaccctgatgctaagaaggtacttatgtggttatttgttatgtagtttctgtcatatgattaataacatgggtatataaattctaaaatgtccattgcagcctgaggactgggacgatgaggaagatggtgaatggactgcccctaccattcccaacccagaatacaagggaccatggaaacaaaagaaaatcaagaacccgaactaccagggtaaatggaaggcacctatgattgacaacccagattttaaggatgatccatacatttacgcct

SEQ ID NO: 312546 - DNA, 311 bp, Zea mays
gtttctcatgtcattcaggcagaatttgctgcctgtgctgttgattttttgcacagggtgggccgcacagccagagctggccaatctggtatagttactagcctatacacagaggcaaatcgtgatctggtaagagcagttcgtcaagcagaggagttggctcagccagtggagagagcattcagcaggaaaagaagctttcgcaacaaactaaagaagcaagcattacaaaaacgcgaacacgtggtatcttgatagcgtgactcactatatttgtagtaaggagaaaatatatgttttttttctctatt

SEQ ID NO: 312547 - DNA, 307 bp, Zea mays
caccggtatctattggggagtgaacaagtttgttattgataactcatctgtgcccgtggttgagcggaaaaagaaggttggacctggcagattttctattgttcttcttcttgtgtttatggatctctccttaacggttctgcgaacataacctttcaggacaagccaaagctcagcatgggtgagagcatgaaggttctgttgtcatctcggtatgtgagggatcttgctacattggttgttgcttatggaataagcattaaccttgtcgaggtgacatggaaatcaaaactgaaagcacagttcc

SEQ ID NO: 312548 - DNA, 318 bp, Zea mays
gccagggtcgggctggacaaggccaggatgcgcgccacccgccacgtcctctccgagtacggcaacatgtccagcgcctgcgtgcacttcatcctcgacgagatgcgcaacggctccgccgaggacggccaggccaccaccggcgaggggctcgactggggcgtcctcttcggcttcggcccgggcctcaccgtcgagaccgtcgtgctccacagcgtccccatcaccaccggagcgcccaccgccgcctgagtcgtccatcctcgatcgctccagtccagacatgaacgacccggcctacgaataatgtatctgcgt

SEQ ID NO: 312549 - DNA, 316 bp, Zea mays
cccacgcgtccgcccacgcgtccggagagatccggagcagccgcagtcccaccgacctcgccgccggtcgccctccatctcctcgccgctgcctctcggaagtcgcaaacattctagccagtggcatcaaactgcgcgagtacacaaaaggcgtcgagaataacatacgccaaatcgagctggattctatccaggattacattaaggaaagtgaaaatctagtttctctgcatgatcaaatttgtgattgtgacaatattttgttacaaatggaaacagttctgactggattccagaaattggttccataagttca

SEQ ID NO: 312550 - DNA, 307 bp, Zea mays
ggtttcgatacctcggttggcgagcatgggacacagctctctggtggacagaagcagaggatcgccatcgcaagggctattctgaaagatccaagaattctactgttagatgaagctacaagtgcgctggacgccgagtctgaaaggatcgtgcaggaagctcttgacagggtcatgtcgaataggacgactgtcatagtcgcacaccgtctgagcaccgttagaaacgctgacaccattgccgtcattcatcaaggaacactagttgaaaagggcccacacaatgagcttctaagagatccagaag

SEQ ID NO: 312551 - DNA, 289 bp, Zea mays
gaagaattgcctgctgatcctggaaataaaggagggcaaaccacgaatgaggatatcaccaacaatagccgttctcctgttgctgatactgacttaactatcccatccaagaaaactattcatgtcccacccttcaatagttttcttgtcttggaggtgtccgaaaaacataaagctgatgattcatcatgtgatcgctaccctgttaaggttctgcgtctgctgaatgaacactctggtacagaatgtgccgtgcatctgtgtgatgagtggttcgacagtattgttg

SEQ ID NO: 312552 - DNA, 312 bp, Zea mays
atttgagcaaaaagcttgaagtcacggagaaatgtatggaccacacaagcaacctactctctgcgacaaaagaagatctgaaacaggcacagtataatctaaaggagaaagattatataatttccgagcagaaaaaagcagaaaatgctttaacacaccaagcttgtgtgctgagatcagacttggaaaaatatactcgcgataatacttcactgtattcaaaaattgctagaggagacaagctaagtgcaacaaacaggtcggtcgtgaatacattccaaactgaccttgcttcgaagttggatactcttt

SEQ ID NO: 312553 - DNA, 139 bp, Zea mays
gtcgcgatgatgttcgtgagaggtctaggtcgtcgtctcccagtcaactatggctgctggatcgttgtcttcatatgatataattatttaattattttgtacacaattcccatatatattaaagatttgacatttgttt

SEQ ID NO: 312554 - DNA, 297 bp, Zea mays
gtccgtcggacgggagagtgcaaaaccaagatatcaagtaacttcgaaagaagaggacacacaaaatgcagaccgcgaggggtggcaatatagtacagaaggcctttcaaagagcatgtccaagtcaaggtacatcaaagtatttggggttgatttgtcccctgataatgtggctgttgctattgtttacttcgtgcaaggagttttaggcctttcgaggcttgctgtcagcttctacttaaaagataatcttcatcttgagccagcagagactgcagttatatctgggttctcagc

SEQ ID NO: 312555 - DNA, 150 bp, Zea mays
cctggtcccatctcgcggttgctggtcctgtgcgccgcccttagaacaagcaacccatctgctcttcgtgaaactgttgtcgaagtcccaaatgtctcttgggaggatattggtaggctggagaatgtcaagagggagctccaggagact

SEQ ID NO: 312556 - DNA, 304 bp, Zea mays
tcggtcatgctcatgcccaagttcgagatgggcgccatgctggagggcatccagcggtggcgcgtcacagtggcagccgtcgtgccgccgctcgtgctcgccctggccaagaaccccgcgctcgagaagtacgacctcagctccatccggatcgtgctctccggcgctgcgccgcttggcaaggacctcgtcgacgcactccgcgcccgcgtgccacatgccgtcttcggacagggatacgggatgacggatgccggtcccgtgctgtccatgtgcccggcgttcgctaaggagccggcgcccg

SEQ ID NO: 312557 - DNA, 310 bp, Zea mays
ctcgatcgagctccagagctaaagcagatagaaagctcagagtgagagagcagcatctgatcgaccaattgttcaccttcgtcatgaggtccacttggttggcatttgccttgtcggcgctcgtcgtcgtctcctcatcagcggcacacgtacacgcctcgccggggaaacttgaggtcggtttctacgagcactcatgcgcacaggccgaggacatcgtgcgcaacgccgtccgccgcggcatcgcccgtgagaccggcgtcggcgcggggctcatccggatgcacttccacgactgcttcgtccgggg

SEQ ID NO: 312558 - DNA, 275 bp, Zea mays
ctcttacaggtgatgaaaatgtggatatgtggaatggttatgttaacaatgatgatcgggcacttttgaaggtgataaagtattcatcgcctacttctgctggagcagagtgtgttgatcttgactgtagctgggtggagcaatgggtgcatcgagcaggaccacgcaaggagatatactatgagccagaggaagtaaaagctgctatagttacctgtggaggtctatgtcctggtttgaatgatgtcatcagacagatagtattccacctagag

SEQ ID NO: 312559 - DNA, 276 bp, Zea mays
aagagcccaaaatcagataaacagtatgtgtgggaagctgtggctgacagtagctcttggtggacaccacaaccttctctgcaacaagagcccaaaatcagataaacagtatgtgtgggaagctgtggctgacaagtagctcttatgtcataaaggaagagactgatcctgagaaaatgcttactcgtggaactcagattaccctgtttctaagacctgatgataagtacgagtttgcggacccttcaaggattcaaggcttagtaaaaaattact

SEQ ID NO: 312560 - DNA, 302 bp, Zea mays
cgcagattcggtgcaggaaggacccgtcctgctccgggcggacggagacggtgatcatcaccgacatgaactactacccggtgtccaagtaccacttcgacctcagcggcactgcgttcggcaggctggccaagcccggactcaacgacaagctccgccactccggcatcatcgacatcgagttcaccaggtcggtggtgtgcgtgctgttgaatttcgtagcgcggcaagtgaaagtttggtggtagggcggaggcagcagcatcatcatcattagccgctcacgttactcaccgtcgccg

SEQ ID NO: 312561 - DNA, 312 bp, Zea mays
tccaaccaagggttcggaaagtcaaggctaatttccccaatgtgggaaaccgaggctgggattgaggctaaccttaatgggcaaaaggcttctggcttgagcgacttatctcgagttaccagtgtcgcatccttctttgtcagtcgagtcgacacccttatcgacaaaatgcttgagaagattggaacacctgaggcacttgccttgagagggaaggctgccgtcgcacaggccaaactagcaaatcggctctaccagaagaaattctctggcccgaggtgggaggcgttggccaagaaaggtgccaagaaa

SEQ ID NO: 312562 - DNA, 315 bp, Zea mays
tggatatgaaaagggtcactctagaaatatacttacacctgtatgctgaatatgttttgttctgggcaactatattatgttgtttcctggtgcttgctgattgactgatggttagttccttgtcattttgtagatcgaagccacgatcatgcctcttgtgtatcgctacaagatttgggtgctttgcaacgattgcaacaaggtctcagaggtgaactttcacgtgattggccacaagtgcagccactgcagatcgtacaacacccgaacgacatcgcgccctgcagatttatcgggaagcagctcaccttcaac

SEQ ID NO: 312563 - DNA, 311 bp, Zea mays
gtttccctccacaaccacttgctcctcatctacttttctcctccgccttaaactcatccttgctcctgcctgccgtcgtgcatcatcatctccggccagggccagggcattcgtctccgcctcctcaacaccaagatcaccggcgacgacgcgccgggggagacgtggcacatggtcttcagcaccgaagggtctcagaatccggggggaaaaagaaaagaaaagaaaagatgatgactgtctctacctcttgctacatgtgccgcttcctcgtccgggctcctccgctcaagtccaggagtgcagtgcgc

SEQ ID NO: 312564 - DNA, 241 bp, Zea mays
ggacgcgtggcaactatattaaaaccttcagagttggcttctgtgagctgcttagagcttggtgcaatatgtatggaaataggcctaccaccaggtgtacttgaacataattactggtctgggccctgaagctggtgctccattatcctcacattcccatgtggataaggttgcttttactggaagtacagagactggtaagaggataatgatttcagctgcccaaatggttaagcctgtt

SEQ ID NO: 312565 - DNA, 301 bp, Zea mays
cggacgcgtgggctgccagcgtatgggcctgacgggaaacccattggtcctcctgtacgtatatctttccaacactatatgaatttgttcacattattctcatttatgtttaaagtgattggtgtaaaaaattcatccaaaaatataagcacagaagaatgtttgctcatggatgaaattatacgtgttgagtagcaaatgttttgtgttggcagtaaagcagaacaaatctttacttttttgtggaaatatgcatgttgttaactagtgaataatattcgctacaatttgcagatgggaa

SEQ ID NO: 312566 - DNA, 286 bp, Zea mays
  unsure (1)..(286): unsure at all n locations
ggacgcgtggcggacgcgtggngcaacgccacagcttgcgcccgcaatggcactcgtctccgcctcctcgtcctccacagccgccgtcacagcgctccccaggaatgggcagcgggcgtcgtcctccttcctcggcggcaagacgctgctgagacaggccgaggcggcccggccgtcgttcgccgtgcgcgccgcggcggaccccaacaggccgatctggttccccggcagcatccctccgccgtggctcgacggcatgcttcccggcgaattcggctttgatcct

SEQ ID NO: 312567 - DNA, 260 bp, Zea mays
  unsure (1)..(260): unsure at all n locations
cccacgcgtccgcccacgcgtccgcccacgcgtccgctcccacagcagggcagccgccggctgtccccaccctacagccgtcgcctaccatcgttgcccccgggaggctcaaccttccctcccgggggcggcctccctcctcccaaccgtacgcttcnccacttcttccccaaccgacctctggcagccgccacccccgagccggcgagctcgggctccctccggccgcgtccatcccttacccgaacggcgccttcctc

SEQ ID NO: 312568 - DNA, 336 bp, Zea mays
cagacgcgtggtcgctagttctagatcgcgagccgccgcccacgcgtccgatcccgtcgcatcccatcccactaccacccatctcgtcgtccgccgatctgatccggttcctccaacccaagggctgtgatggcgacgaagaggaacgtgggcaccctcggcgaggcggatctgaaggggaagaaggtgttcgtgcgcgccgacctcaacgtccctctcgacgacgcccagaagatcaccgacgacacccgcatccgcgcctccgtccccaccatcaagttcctcctcgagaagggcgccaaggtcatcctcgccagcccactgggtcgtccaaaa

SEQ ID NO: 312569 - DNA, 333 bp, Zea mays
ggctggtcgaaataaagacgatgctgaggaagctatctcactggtggaggcactagctgtccagctgacacaacgagaaggggagttaatttatgagaaggctgagataaaacgattggctaacttccttaagcaggctaatgtagatgcacgcaaagtagctgaagaggaaagggctcttgcacttgctgaaattgaaaaggctagagctgcaatcgaaaaagtcgagaaagcatttgatgtgcatgattctacgaaaagcagcagaggtgaggaaatagaagaacttaggaaagaggtccgagaggctaggaggataaaatgctacaccag

SEQ ID NO: 312570 - DNA, 263 bp, Zea mays
cccaaccaaacccggacgacacgacaccaagtcgaggaggtcgagggcaccaatcatggccggcgtgaactccaacgtcgtcgggctcaaggccagcgggggggtggccgaaggcgagagggacggctcatcggcggcgaacagagtgcagctggacgcagccgaagagcgccgcgccgctgtagatcagcctggacgccgtcttcgacgtcacagccagcaccgggtcggccaacgccaggatcttcgatgagtacctcgag

SEQ ID NO: 312571 - DNA, 295 bp, Zea mays
gtcaagagcggcgcgccatttgcgcgtaagtttcccaaggacgacaaggtcctggacaagatagaccgcgagctcttgcaccgctcggagggctggttcacccctggagcatggtgtgacgggggctctgaaggaggagctgatccatgcctgtctaggggtgaagactctgttttcgagcctggacctggtgccgaaaggctgcgaggcctgatgaagaaggtgctctcgtgggattaccgcaatggcagctgttcctcgcttgcttatgatcagacgaagagggactggtatg

SEQ ID NO: 312572 - DNA, 291 bp, Zea mays
ctggagaacatctttggtcaaactcctgctgttgattcgatttgggtctacggcaacagcttcgagtcgagcctggtagcagttgtgaaccccaacacgcaagcactggagcgctgggcagagtcgaacggggtaactggagaatttgccacgatatgcgaagaccctaaagcgagagagttcatcttgggagagcttacaaagatgggtaaagaaaagaagctcaaaggcttcgagctcatcagggctgttcatctggaccccgcaccgttcgacatggagcgcgacctt

SEQ ID NO: 312573 - DNA, 324 bp, Zea mays
  unsure (1)..(324): unsure at all n locations
cctttcgtgtggngctgacgcgtccgcccacgcgtccgggactccgttcgtccctcccagtcccagcgcgcaacccaacccgccgttcctccgcctcctcccgcacagctaaatggagaactccttcctccctaccacgctcgccaccgcaaagcccctcccggcattccgaacccacgctgtagccgcatcgaaacttccccaacagcgccctcgccgctgcaccatacgcgcggccatcacccgtggccgcaaggaggagacggtgaccaccgtccgggagcagctggagggctgctacctcctggctggtatcaagtacga

SEQ ID NO: 312574 - DNA, 249 bp, Zea mays
cccacgcgtccgcccacgcgtccgcccacgcgtccgctgaatcccgcctccaacctccgctcgaaacccataccttcggtctcctccgtctgtccgttcgccatccggccgcctcttctcccaccagccgccgctgccgcacgttagctcctcctgcatcgtcgccggacctccgctacgcccccgtgcatccttggcttggcaggcaggatctggccacctttcgccggcaacagttgggcgccgcat

SEQ ID NO: 312575 - DNA, 294 bp, Zea mays
cccacgcgtccgcagcttcagagctgggaaaaaacaatggactgccatagtccaggtcaaggtttaatgcccgccagcttcaaagtgcggacaattccacttgatggtgatgaggatgcaactgaggaggtcttggatcctgattttggggaagccgcaataggccgtgtggcacctgttgattcaggtctatggtggatcatattgctgagggcatacggaaaatgttcaggggatctgtcagtacaagagagaattgatgtccagaccggaatgaaaatgattctgaagctt

SEQ ID NO: 312576 - DNA, 250 bp, Zea mays
agaggaggcgatgcgaggcggaagtggggctccgcgtccgcgcttcgtcggttgtggtatgcctcgccatcgaggtcgcggccgtgctcgtctcggtgtcggcgcacagaagttcggggtgaactacgggcaggtcgcgaagaatctcccggacccgacgcaggtggcgacgcgcctccgaatcgggaacgtgaacaaggtgaagctctacgacgcggacccccggggtctgacggcgttcgcgaacacg

SEQ ID NO: 312577 - DNA, 124 bp, Zea mays
cgcacgcatacacagcacgagagtggaggtaggcatccgaaaaaagctgtggtctggtcgacatggccgccggcaccatggctctcacgtcccgggcggtcgtcggcgaaccggcgaccagcac

SEQ ID NO: 312578 - DNA, 312 bp, Zea mays
cccacgcgtccgcccacgcgtccgattccgccgcccgccccgcgaccccgaggaggaggcaagatgaagacgatccttgcgtcggagacgatggacatcccggaggacgtcacagtgacggtggcggccaagctggtgacggtggagggcccccgcgggaagctcacccggaacttcaagcacctcaacctcgacttccagctgcaggagggcggccgcaagctcaaggtggacgcatggttcggcacccgccgcaccatggccgccatccgcaccgccatctcccacgtccagaacctcatcaagggggtc

SEQ ID NO: 312579 - DNA, 300 bp, Zea mays
ggcgtgccacgggcgtgcggactctcctccgtggatctccgcgcagtcgtggcggcacggcgtgcgtccctgcttgcgccttcctcgtgaggccgtatacatggacgcgaaggacatactagggcttccgaagacccccttctcgtcctcccaggagaagaaatcgcggccgcccaaggagccgcagcgcaagcctgatggcgtctcgcgcgaggtctatgccctcaccggaggggtgggaatgcccccgctcatgccgaccattgaggcatcgcacctgaagaggcggcctgctgcgga

SEQ ID NO: 312580 - DNA, 298 bp, Zea mays
cggtgctcatgcatgtacggggcatggttttggactcgtgtgtctgcagttccaggtgcgcgctcaggtagccggcggcagcagcagtagcagcatcggagccgatggtgggaagatgatggtttccaaggagccggcggcgtcggccacgtcgtcgggaccgtggaagatcgacttctccggcgagaagccgccgacgccgctgctggacaccgtgaactacccgctccacatgaagaacctgtcgatcttggagctggagcagctggcggcggagtccgcgcggaggtcgtgcaca

SEQ ID NO: 312581 - DNA, 316 bp, Zea mays
actagttctagatcgcgatctgccgccctttttttttttttttgataaaagaaaagaatttattgaaaaacaaaccaatgatggtaagataaccaaatgcaggtaaatgttaatgctgatcatcgggttatttatggagctgaccttgctgcttttctgcaaacacttgctaagataattgaggatcccaaggatcttacattttaaaagtccctgagtgattgtttttaaaagttcctgagtgattgtttttccttgagccaatcacaattgggtgcttctcacccatagtagatttggaggatgtcgtattgtg

SEQ ID NO: 312582 - DNA, 400 bp, Zea mays
gttacctcatctaagaatggtgccacggtaccactggtccaccgtcacggcccgtgttctccggtcatgtccaaagagaagccttcgcatgccgaaacactcggccgagaccaactacgtgccgccaacatccacgcaaagctttcttctcctcgaaacagtagcgccaaagagctccagcagtcgggcgtgactatcccgactagctccggctactccctgggcaccccagagtacgtgatcaccgtcagcctgggcacgcccgccgtgacccaggtcatgagcatcgacacaggcagcgacgtctcgtgggtgcagtgcgctccgtgtgctgcgcagtcgtgctcctcgcagaaggacaagctgttcgatccggccaagtccgcgacgtactccgcct

SEQ ID NO: 312583 - DNA, 375 bp, Zea mays
atagaatcttgggtcagccttcgctgatccgtgagtcatcaatgtcaaagttcccactaccaatgtctaggctactcaaacctagttcagcatctttgtcggagggagcaggctttgagaaagttatcctgcacccttcactaaagcggaggattgaacatcttgcacgagcaactgcaaatacgaagtctcatggtgcaccattccgcaacatgctgttctatggacctcctggaactggcaaaactttagtagccagggagatggctcgcaaatctggcctggactatgccatgatgacgggaggagatgttgcacccttaggatcagaggctgttaccaagatccatcaaatatttgactgggctaagaagt

SEQ ID NO: 312584 - DNA, 321 bp, Zea mays
aggacatggactcgctggggttgtctctgttccggccagacttcatcatcacttcattttacagggtctttggggctgaaccaacgggttttggatgcttgctgatcaagaaatcggtaatggcatgcttgcagagcccgagcggtgggacgggggcagggatggtgcggattgtgccggtcttcccacagtatctcagtgattcagttgatgggtttgacggtgtcctggatgggctggaggatgataatatcattcaaattgaggaggggtcagtgttgaacagtcaccatgcaccccatttgcctgcattctcaggcg

SEQ ID NO: 312585 - DNA, 313 bp, Zea mays
cacaccccctctccagctccgttggagctccggacagcagcaggcgcggggcggtcacgtagaggggatcggaaggatgacggcatcggtttccagggccatctgcgtacagaagccgggctcaaaatgcaccagggacagggaagcgacctccttcgcccgccgatcggtcgcagcgccgaggcccccgcacgccaaagccgccggcgtcatccgctccgactccggcgcgggacggggccagcattgctcgccgctgagggccgtcgttgacgccgcgccgatacagacgaccagaaagagggtgttccac

SEQ ID NO: 312586 - DNA, 306 bp, Zea mays
gcggttttgtcttaagccagcagctccccggccgatggcgataagctgcttcagcggcggcgccggctggccggagcccgtggtgcgcgtccaggctgtgtcggacacgtgcggcgacacgatccccgagcggtacgtgaagcccctgtcggagcggccccggctctcaccggcctccgatggcggcggcccgaatatcccagtcgtagacctgtcaatgctagacgtggacgcgacatccagcgccgtggcggcggcgtgccgggagtggggctttttccaggcagtgaaccacggcgtccgccc

SEQ ID NO: 312587 - DNA, 297 bp, Zea mays
cttcaattgtggatgttaaggaagtagtagttggaagtagtctagatagtatttttatggttatggagtacatggaacatgatcttaaaggtgtcatggagaccatgaaacaaccatatacccaaagcgaggtaaagtgtttgatgcttcagctgctagaaggtgtaaaatatctacatgacaattgggtgcttcatagggatctgaagacctcaaatcttttgttgaataaccgtgggccccagaattgttgttaggaacaaaggagtattctactgctattgatatgtggtctgt

SEQ ID NO: 312588 - DNA, 314 bp, Zea mays
ctcgacaatggcactccaggcagcctacgtagtaaccgtgcagcatggccgttcggtcaaagggagccgtgggcgtccacggaggaagcgcggaagggaggggcgacgccgggacccaccgtactactgctgctagcgtccctcgccaagagcacgtcgtcgtccggtaggggcaagccgccgctccctccctcgccgcggggcaccctccccatcgtggggcacctacaccacatcgggccccagacccacatctcgctccaggagctggtggccaagtacgggcacaacgggttcctgttcctccgcgccgg

SEQ ID NO: 312589 - DNA, 293 bp, Zea mays
ccctccctctccccgcgggccgccagaggcaatttcgccctcgattcgaccccgattcgtccgcccgcgaccgggattccctccgccaagcgcggatctgaacgctgcgctccgtgtcgccgctcgaatccgccatgaagggggccaaatccaagggcgccgccaaggccgatgccaagctggcggtgaagagcaagggggcggagaagcccgccaagggcaggaaagggaaggccggcaaggaccccaacaagcctaagagggctcccagcgctttcttcgtgttcatggag

SEQ ID NO: 312590 - DNA, 360 bp, Zea mays
aaactggtacgctgtagaggaccgggtccggaaatttcccggggtgcaccaagggttcgggacccactattcttcttcctacccatcatcaacagggtcttgaacttgcaggtgaggggtgcgaaaaaatgagggggggggttggggagaaaagaggggtgtgggttttggctaccctatacgcgtgggtcttcaattccgcactgcttatgttgctccatcttcacgcgtgtttgggactggtgagcttgtgattgatccgatgctaattgcaaagcgatacattaaaagttactttgcaatggactttgttgcattgctaccacttccacagattgttgtatggagatacctccatat

SEQ ID NO: 312591 - DNA, 286 bp, Zea mays
cttcaccgtgcgcgcctctctccgcaaggccaccggcaccgccgccgtggcaatggctgccagcgccctgcttgccggcggtgccatggcccaggaggtgctgctgggcgcaggcgacggcgggctcgtcttcgagcccagccagttcaccgtcaaggccggcgacaccatcacattcaagaacaacgccggcttcccgcacaacgtcgtcttcgacgaagacgaggtgccgagcggcgtcgacgccaccaagatctcgcaggaggagtacctcaacgcgccaggc

SEQ ID NO: 312592 - DNA, 328 bp, Zea mays
ggtgaatgcggggtaccagctcagaatatgttctacgtgccagcagaaaaccgtgagcagttctggtactcaacggactacgggatgttccgtttctgcgtaccaataccgagttggactggaggccaggaacggagcaatacaggttcatcgagcactgcctgtcatctgttgatcggcagaaacagccatggctcatcttcctcgcgcaccgtgtcctgggttactcgtcggccaccttctacgccgacgaaggaacgaccgaggagcccatgggccgcgagagccttcagccactctggcagaagtacaaggtcgacatcgctat

SEQ ID NO: 312593 - DNA, 321 bp, Zea mays
acacgcgtccgcggacgcgtgggatacaccagacgctggcgctaggtgagcggttcaagaagtactacctggaaaacaggaagctgcagctgacatcggactttgatgtcattgctgcgacgcattcctcgagtcccaccaggtgtttttctcgcagattgctgggttctttattgttgaagaccgggtgtttagaacagggggtgggctcacatctcggccagatgtagatgcactttgggatgccgctgtggggaagatggtctctgtcatggaagataacttctccaggatgcagacagcataccacttgcttctcat

SEQ ID NO: 312594 - DNA, 315 bp, Zea mays
ggcaaccggtcttgtaagtgcaagtttctgtcctttttttctagagatggcacccgtggagccccttccggaggctcccaacgacggcaggcccatcgtgtgccccatgtcagacttctgccctctcacgatcgatggggtgctgaaggagttgttcctagagacactacgaaagaagcgaagatcgagtggcttgcgaggagcttggcaggaaggccatgtacctaggagtgccattcgtatgcgagtgggttaggaacaagagtcattcatggaagtcacagatcacaacattgaaagcagcagtcgatgctt

SEQ ID NO: 312595 - DNA, 313 bp, Zea mays
cccacgcgtccgcttccttttctaccccgcgggccgcggcgcgtagtcttctactctctagctcgccatcaccgtcgtcatcaatcacggtgaccttgccctcgctgcccgactggatccggacgctgctgctgctggtaggctgacagcgaggaggacgagacgagggggccatggctcagatcttgctccacggcacgctccacgccaccatcttcgaggccgagtcgctctccaacccgcaccgcgccactggcggcgccccaagttcatcgctagcttgtggaaggatcgaggacaccgtggtgtcggc

SEQ ID NO: 312596 - DNA, 308 bp, Zea mays
ccggcgtgtcggcgacggtagatggatcatttatttgtcggcgtcggcgtcggcgagaaaggggtagtctgtgtatccaatgacggggtcggatgtgtagaaggtggtgcggtcgtacttgttgagcggcgcttcggggaggcggaacctccggggcagatccgggttggccaggaacagcctgccgtagctgacgaggtccgtgtagccttcctccaccaccttgtccccctccgccctgtcgtaccctccggcggcgatgaaggtgccccggaatgcctccctgaacgggcgcaggcggtgcggga

SEQ ID NO: 312597 - DNA, 312 bp, Zea mays
cccacgcgtccgagttctagatcgcgagccgccgctcgcgcccacgcgtccgcccacgcgtccgacaatttcaggtccaattggctggactgatgataaaagcagcgttaatgagcagagccttcattctgcgacggaatttggagcaaaatcaagttcgcttacttttcacatgactgacagtcaccagggtaaatctgaacttagttcaccaaggagggcaccttcagtcaaaggtactgatgcaagaacctcagaggataaatcagaaaaggagttgcttgacaatggtgagtatcttatcaggcctta

SEQ ID NO: 312598 - DNA, 328 bp, Zea mays
cggacggtgggcggacgcgtgggcaaaggccgagctagaagcaaaatcacttgaatttgaacaggaactcacaagggctggcgctgagaatgacgcactacacaagagcactccaagaacgggcagaactgccgatgaaaaccgacgaggaaaaagcccaagcagaagccgagatcgaaaccttaaagagcacaacccaatcaggcgaaagggaaacaaacccacttaaacacgaaccgcatgttgcctccaaagagctcgacatccgcaatgaagaacagaacatgagtgtgcgctcagctgactgtagcaactaaacagcaccagg

SEQ ID NO: 312599 - DNA, 309 bp, Zea mays
tctgacgagaccaccacgggcgtcaagaggctccaccagacgcaggagaccggcgccctcctcttccctgccatcaacgtcaacgactccgtcaccaagagcaagtttgacaacccgcatggctgccgccactcgctccccgacggcccgacgagggccaccgacgtcacgatcgccggacaggtcgccgtggtgtgcggacacggtgatgtcggcaagggtcgtgctgctgccctcaagcaggctggcgcccgtgtcaccgtgaccgacaccgaccccatctgcggcctccaggctctgacggagggt

SEQ ID NO: 312600 - DNA, 305 bp, Zea mays
acacgcctcgcccacggtccggtacggtgggggacgctgggcctcgatgtgtgagagcgttgaagcggatattcattatatgtgataatgacaaggatggtgctctcagtgacgtggagctcaatgaattccaggtccggtgttttagtgctcctctccagcctactgacatttcaggagttaagagagttgttcaggagaagatgcctgacggcgtaaatgacactggccttacttctgactgggttcctttttctgcatgccctatctattgacaaacgtcgtttggagactacatggactgt

SEQ ID NO: 312601 - DNA, 282 bp, Zea mays
cctcaagccaggtcccaacaaacgaggtgtcacggccaccgtcgacgagcgcccccacgttgagctgtttctgtcaactcactgcaagattgctgttgctggcccagacctcacaagcggtggatggggctttgcatctccaagggactcccctccgcaaacagacccgtccaccgcaaccctgacactgtcggacaacggggagctgcagcggacccatgacaagcggcccaacacaggcgaccgctcaacggacaacgccgagctcgtggactcgaacca

SEQ ID NO: 312602 - DNA, 286 bp, Zea mays
cagacgtggggactctcacctcccgcgcgctcgtcggcaagccggctaccagcaccagggacgtcttcggcgaggtgcgcgtcaccgtgcgcaactactgctggcaagcccaagccagcggcgtccggcagccccgtggtacgggggccgaccgggtcgtgtacctggggccgctgtccggccaggccccaagctacgtggccggcgagttccccggcgagtacggctgggacagcgcgggggtgtccgccgagccggagagtttcgccaagaaccgcgagctgga

SEQ ID NO: 312603 - DNA, 303 bp, Zea mays
cacatctgctgtggataaactggataagggtctgacggacgctggtgtctcgtaccacaacctttccgggaggcacaagagcgtgtacagtatccactccaagatgctgaagaagaacttggcaatggaggagatccacgacatacatggcctgcgccttgtggttgacaacgaagaagattgctacgaagccctctgtgtcgtccataaactgtggcctcgagttactggtcggttcaaggactacatatcacgtccaaaactaaatgggtaccggtcgctgcacaccgtcgtcatgggcga

SEQ ID NO: 312604 - DNA, 189 bp, Zea mays
gagcctcattcatctccattcgaaacaccctcgcacccacactctcccttcgtccccagcctaaatccccgcaacgatggctcgcacgaagcagacggcgcgcaagtccacgggcggcaaggccccgaggaagcagctggcgaccaaggcggcgcgcaagtcggcccctgcgaccggcggcgtgaagaa

SEQ ID NO: 312605 - DNA, 305 bp, Zea mays
gttctagatcgcgagcggccgccctttttttttttttttttttaactcaaagtctcaaacgtgcctcttgttgcattgacacacatgtacaatacaatcgtacatatagtacgttttattcgacaagcagcctctgcatgcaataatagtacaacccccgatttaattaattggactaatgcatgctgaggatggatcagatggagatgctgctggggatgcccctcccggtgactcccggcttggagaagggcttgagcagctcgtacggcacgatcccggcgccgcagcggttcttgaggtcc

SEQ ID NO: 312606 - DNA, 301 bp, Zea mays
cggacgcgtggcgtcaggatgcatcgacggcaaggtgcgcatctgggacagcctctctggggattgtgccagggagttcagtgggcatgcagatgtactacagtcgatggccatcacagctgacgcaacataccttgacgaacctagccatgccagtgatgtcactccctcatcatgttcacaagtacatcggctggattggtgtgtgaggtcccatatgatcagcttttgatccatgctccctgtagctacccagccatagcttgatgagataccaacccacgcgtccgcggacgcgtgg

SEQ ID NO: 312607 - DNA, 238 bp, Zea mays
tgttgattggtggtttgaaacttgccagtgttggtttcatttctagtgtcggggctggggtttcctcagatctcatctatgctgctcgaggaattgtgaaaccttcagaaaatgtggaaacgggaaggaagagaactcccatctggaaatcagcagctgtttatagttgctttcttggaacatcagcaaatttgcggtatcagattattgctggtctagtggagtatcgactaggaga

SEQ ID NO: 312608 - DNA, 296 bp, Zea mays
  unsure (1)..(296): unsure at all n locations
cctgtggcgggcctggggagctgatgggactgtgccgggaggggcgggtaaaggatgccgtggagcttctctccaagggtgcgcgcaccgacctggacaccttctacgagctcgcggccacctgctccaaccctaagctgctggaggagctcaggaaggtgcacgacttcttcctccgctcgcccttccgcggcgacctccgggtcaacaacatgctgctcgcgatgtatgccaagtgcgcagcnatgccacatgcccgcaagacgtttgacaatatgcctgaccgcgacatggac

SEQ ID NO: 312609 - DNA, 261 bp, Zea mays
gggagaacatcaacaagtacttccgcaaggccaaggagagcggcaagaagcggccggcgcacgccaagacgtgcccctacttcgacgagctggaccggctctactcccggtcggccgacggcgggggaggcgaggccaggcagctggggagctcagagctgctggacgcggtgatcaagtaccccgacgtgcgctacgggccgccggtgttcggtggcggcaatgctaataatgaaggtggagaggacgacgacagcgacg

SEQ ID NO: 312610 - DNA, 289 bp, Zea mays
gctcgatctccctccgccactcccatccatctcctcgctcccagtcccccggaagctacgaagcatggcgtccgtcaccgcccgcgccccggtcgcggcccttcgcccgtcgtcggccttccttggccactctagccgcctcggccgcaccgcgtcgcccacgaggcgcacctcaaggcggaggccaagggcgagtggctccccggccttccctccccctcctacctcgacggcaggtcagtgattcttttgctaactctggtctggctctggccacactggatagccc

SEQ ID NO: 312611 - DNA, 289 bp, Zea mays
  unsure (1)..(289): unsure at all n locations
atatttgatgagcatggtagagtcaatcgttttatgtctattgaagaagcagatatgttgatcagaacacgtgctaagcagagtgaaattgctgcaaattatgtgaaggttgttgatgaggaggacatcaatcatgtccgctgcctcccaatgaaacatggtacagaacatggtatgaatggaagggaccatattaatgggtatactgcatcttttcggaatggtgtgggtttcaatgatggaaatggtctgtctggtgagcaggggttgctantggctggggagagcg

SEQ ID NO: 312612 - DNA, 296 bp, Zea mays
ggagaactccggatgagcggcaagagctacgacggcgtcgcgctggaccgcggatccgtcgtgcccctagacgtcggcaaggccacacagctggacatcgaggccgtgttcgacgtggacgcggaaggcgtgggcgtggcggaggaggccgacgtgacgttcaactgcagcaccagcgcaggcgcggcgagccggggcctgctcggcccgttcggcctgctcgtgctggcggacgaggacttgtccgagcgcaccgccgtgtacttctacctcgtcaaggccacggacggcagcct

SEQ ID NO: 312613 - DNA, 108 bp, Zea mays
cccacgcgtccgaacccaaatcccaagcaaccacttcgtcgaccatggggcagggcactccgggagggatgggcaagcagggcggcgtcggcgaccgcaagccggggg

SEQ ID NO: 312614 - DNA, 319 bp, Zea mays
cctctgggagcaggtctccaggaagctggctgagaaggggtacaaccgcagcgccaagaagtgtaaggagaagttcgagaacgtgcacaagtactacaagcgcaccaaggagagccgagccggccggaacgacggcaagacgtatcgattcttcacgcagctggaggccctgcacggcaccggggcggctcccgcgtcggtggcggcgtcgcaggtgccccctgcgatctctggcggggtgtccggggcagcggggccgttagccgtgcgcttgcctgccgagccaccgcctgcggtgtcgggcggcgtggggatgccg

SEQ ID NO: 312615 - DNA, 316 bp, Zea mays
cagctggtcccctgctcggctcgtctgatccagcggctgaatccgcaggccatggggttcgacaaggaggcgagctcctcctcctcgcggctcgacgcggcgccgctgctcccgcagcacggcggcggcggcgcgggcgggcacctgtcctcgcagcccaagacgttcgccaacgtcttcatcgccgtcgtcggctcgggcgtgctgggcctcccctacaccttctcccgcacgggctgggcggcggggacgctgctgctcctcgccgtcgccgcgctcaccttccactgcatgatgctcctcgtcgcagcgcgcc

SEQ ID NO: 312616 - DNA, 314 bp, Zea mays
cgggcaacgggagctgcgcgcggactgcgggggcttgacggtgcagtacccgttcggcttctcccccggctgcgagatacggctcgggtgcgacccggcggacggcaccgcgtggctcgggaagtcgcgcgagctgggcctgctcgtgtccaacgtcacggcgcgcgcgctcttcctcaccctgcgcccgaactgctcgcgccggctcaacgcctccgtcgaggcgctcttcaccaaggcgtacgcgcccggcagccagaacgggctcgtcgtgagctcgtgcagctccgcctcccaggccgaccacatccgta

SEQ ID NO: 312617 - DNA, 324 bp, Zea mays
gatcactgtggcagcaccggaggcgcacgccaggtggcggcggcggcggttgcggcgccggaggagaccgtgttccggtcgaagctgccggacatcgacatccccacccacctgccgctccacgactactgcttctcgagggcggcagatgccgcgggcgcgccgtgcctcatacgcggcggccacggggaggacctacacgtacgccgagacgcgcctcctgtgccgcaagccgcggcgtgcctccacgggctcggcgtcgcccagggcgaccgcgtcatgctcctgctccagaactccgtcgagttcgtgctcgccttcttc

SEQ ID NO: 312618 - DNA, 322 bp, Zea mays
gccaacacaagaactccaggactccttccggttcaagcactacctgttaatcgtcagaatgcttgagaggaagacccctccaaaacataaatcaaaggcgaacaaagatgatgacgaacctattatctatccaaagtttgaggatgaaatttttcacgagcttagctcatggtctttcacttttccaatacgttctgaagagtcagctcagcaggagatgaagaattacaaggagatgggcttagtgatggcaattaaagcaggcacagttccgaagttcagaaagaagttgggggatttggtgtccgaataggagcgtaat

SEQ ID NO: 312619 - DNA, 309 bp, Zea mays
aagtgtctgatgatttgattacaatgaagagaaaatctgatggtgaggagttatcagttccttacggaatggctgtttggtctgctggcattggtactcgtcctgtcgtcatggacttcatgcaacaaattgggcagaccaatcgtcgtgccttggcaactaacgagtggttaagggttcgcgagtgtgaaggcgtctatgcaattggcgactgtgctacagtgagtcaaagaaaaataatggacgatatttcaacagtattcaagatggcagacaaggacaattccggcaccttaacactaaaagaga

SEQ ID NO: 312620 - DNA, 310 bp, Zea mays
gttctagatcgcgagcggccgccctttttttttttttttttttttttttttttttttttattttttttttttactgacgaagaacagagtcactttattccttgcattaattaatcttgttcccggtacagctagcaagacacaagttttacagatgtaggattatcaggaagcaatccttggaacaaggagaagcttctccttccggcgaacgtcagcccaaaggactcgtccatggacacccctgctgcagagcccggaacctcccaatcaaaatggtacatgagattggccagcatgatctccatgg

SEQ ID NO: 312621 - DNA, 314 bp, Zea mays
tggatatctgcaccagtattatgttcattgccctattgaatcatttttgttgccttcttacgttctgttatatttcagattttcacctcttataactatattgtaagtgcatttggattatgtgacaggtttccctttgggatggcattatacctgcaaaggagcatgccaagtttttgatccatacaacaaataagtacagatttattgaccagggaagcaatctaaagggcaaggaattcaacttgacaatgcactggcacattatgccaaagactggcaaaatgtttgcagataagatagtcatgacaggc

SEQ ID NO: 312622 - DNA, 317 bp, Zea mays
gcgtcgccgaggtccgggaccgtggcgagcgtggcgtccatggcgtccatctccccttccctccatcacccttgcaattctagaactggcttccttggatagacacacgggatctcgtcctcgctttttctctgctggaagagttggatttgtcagaacactagtggagtgcaaggaatctagaattggaaagcagcccattgaagtcccaccgaatgttactctcacattagaagagcagtttgtcaaagctaagggcccactaggggaattatctctcagcttcccaggtgatgtgaagattgtgaaagaagaat

SEQ ID NO: 312623 - DNA, 319 bp, Zea mays
caaacagggtagagggagaggagaggagaggagaggagaggttgggtctgggacaccatggctccgatgaagctgtacggggcggtgatgtcgtggaacgtgacgaggtgcgcaacggcgctggaggaggctggctccgactacgagatcgtgcccatcaacttcgccaccgccgagcacaagagccccgagcacctcgtccgcaacccgtttggtcaggttccagctctgcaggatggtgacttgtacctcttcgaatcacgagcaatctgcaagtacgctgctcgcaaaaacaagccagagctgttgagggaaggaa

SEQ ID NO: 312624 - DNA, 219 bp, Zea mays
gcaagaaacatgtagtattcataaagtgccggcaaattggccggaccccagactccaagcgagctagtttttttagaaacaatgcaacatatatcgactaacggaatattgcacaccatagcagatctacaaaaactagctcgcttggagtctgctatggtgtgctttattccgttagtcgatatatgttgcattgtttctaaaaaaacttcttctaat

SEQ ID NO: 312625 - DNA, 269 bp, Zea mays
agattaaataatgcaaggaataaagtgactctgttcttcgtcagtaactattcatcatcaggactcctacaatatatagttactgacgaagaacagagtcactttattccttgcaataatttaatctggttcccggtacagctagcaagacacaagttttacagatgtaggattatcaggaagcaatccttggaacaaggagaagcttctccttccggcgaacgtatgcccaaaggacctcgtcatggacacccctgctgcagagccgg

SEQ ID NO: 312626 - DNA, 296 bp, Zea mays
gttctatctatatatgtggctgaatctatgcaaaggatcgccgctaacaaccggtgccccggccgggataacaaccggtgatgggcgcgcggccggccggatgacgagtgcagttcacgtttaacctgatggcgaagaacataatgagcatggaccccggcgaggaggagacggagcggctgcggctggagtacatcaccttcatgaagggcgtcgtgtcagcgccgctcaacttcccgggcacggcctactggaaggcgctcaagtcacgcgcgtccatacttggagtgatagag

SEQ ID NO: 312627 - DNA, 302 bp, Zea mays
cccacgcgtccgcccacgcgtccggagagacgtttcagtgtttggattggagggagcattctactgagtttccggttgccatatccttgacacgagcagcttgaggagactcctccagctgctcgtgtcaagttatggcaacgaactcatagagagacgtttcagtgtttggattggagggagcattctagcatctcttgggtcgttccagcagatgtggttctccaaagcagagtatgaagagcatggggtttcagctattcagagaaagtgcccttgaagcaggggaaggaatatgtaca

SEQ ID NO: 312628 - DNA, 309 bp, Zea mays
cccacgcgtccgcccacgcgtccgcccacgcgtccggctgtttggccacaggcatggagctgatcacaaatgtcaccgagtacgagaagctcgcgaaggagaggctgccgaagatggtgtacgactactacgcctccggcgcagaagatcagtggacgctcaaggagaaccgggaggccttctccagaattctgtttaggccacgggtactgatcgacgtctcccgtatcgacatggccacaaacattctgggcttcagcatttccatgcctatcatgatcgctccttcagccatgcagaaaatggctc

SEQ ID NO: 312629 - DNA, 246 bp, Zea mays
ggagttttaattttggcaagctaataaacagcaacgttacccttggacccactgtccgtgaaggagagtttgtctttggtgttgctcacatctttgcatccttcaatgacaccttcattcatgtcactgatttgtctgggaggcgaactttggttcggatcactggtggcatgaaggttaaggctgatcgtgatgagtcgtctccttatgctgctatgcttgctgctcaagatgttgcacagcgtt

SEQ ID NO: 312630 - DNA, 286 bp, Zea mays
gagccatcgacacgatcgcgagcgcaagcacgtacgttgtcggaagctcaagttagaagaagcaccagtgcctgatcgatggcggcccaggctctcctctccggccggcagctgctgggccgccccgtgcagtcggccgtctctaggtcgtcggcgaggaaggcgcccttcgtcgtcagggccagctccagccctccagccaagcaaggtgccgacaggcagctgtggttcgcgtccaagcagtccctctcctacctcgatggcacgctgcccggcgactatggct

SEQ ID NO: 312631 - DNA, 285 bp, Zea mays
gctcttttacatcattggttttctgtggttggttggggccttggcttaaccgatttcttactgccaaaatctgaagaaaacggtgggcaggaaaatttgaatgcaagggcagaaagaagagacagaggacatggtgggagggaaatggtcgccccacaggttgaacaactcatgatacaacatgttgccgcagaagataatggcaggggggattcaaatgaagccaatgatgtaactgaggactctgatgtagatgaccagggagactctgagtatggctttgag

SEQ ID NO: 312632 - DNA, 295 bp, Zea mays
tgcctgccgtttccatctccatccagttctccgcccccacccacccgcccactcctttccccaacccatggccgccgccgccgccggcacccgggaggagatggtctacatggccaagctagcggacaggcggagcggtacgaggagatggtggagttcatggagaaggtcgcggccgccgccgagctcaccgtcgaggagcgcaacctgctctccgtcgcctacaagaacgtcatcggcgcgcgcacggcctcctggcgcatcgtctcctccatcgagcacaaggaggagacgc

SEQ ID NO: 312633 - DNA, 315 bp, Zea mays
gttccgtccaggcaaccaaaaagcgttgccccgccgcgcagaggaagaagagagcagaggaggatggctcgtacgaagcagaccgcccgcaagtccacgggaggcaaggccccccgcaagcagctcgccaccaaggcggcgaggaagtcggcgccgacgaccggcggcgtgaagaagccccacaggtacaggcccggaaccgtggcgctgcgcgagatccgcaagtaccagaagagcacggagctgctgatccgcaagctgcccttccagcgcctggtgcgcgagatcgcgcaggacttcaagacagacctccgg

SEQ ID NO: 312634 - DNA, 306 bp, Zea mays
cggacgcgtggttgcaatccagccaatgcgccggccaaggaggcgactaggaggcccgtgctgccgacgcccaaggccgagaacaaggtgctagatccgaacaaggcgcagaacattgccatcttgctgcgcgcgctgaatgttaccaaggaagaggtcagcgacgcgctctgtgaaggtaacacggagaactttggagcggatttactggagaccttgctgaagatggctcccactaaggaagaggagattaaactgagagaattcaaagaggagtcttctccagttaagcttaacccagctgag

SEQ ID NO: 312635 - DNA, 208 bp, Zea mays
caccgatgatggcctcgcaagcgatggtaccgctgcggcactctttgtcgacggcgagtggcgcccgctcgcgctaggccgccgcctccccgtcgtcaaccctaccactgaggctcacatcggcgagatcccggctggcacggctgaggacgttgacgccgcggtggcggcagcgcgcgcggcgcgcaagatgaacctcggccgcgat

SEQ ID NO: 312636 - DNA, 290 bp, Zea mays
cccacgcgtccgcccacgcgtccgcccacgcgtccgcccacgcgtccgtgaacactctgtatgctttgctgttccagaaaaggaagttgcattggtttctgcagccttgcatgctaggtttcgtgaagcattggcagcagggaggttatctaaggttgaagtcattcataattgtagcatccttgctactgtcggcctgaggatggcaagtacacctggagtcagcgcgaccctttttgatgcactagctaaggcaaatattaatgtaagggcgatactcaatgttgcag

SEQ ID NO: 312637 - DNA, 271 bp, Zea mays
tgacgtggcgcgtccatgtccgccaagctgtgcgacttcgggtcggcgcggatggggttctcggccgccgtcagctcgcgctcgtccgcgcgcaccatgctgggctcgccaggctacgtcgacccgcactacgtccgctccggcgtggtcaccaagaagagcgacgtgtgcagcttcggggtcgtgctcctggagctgctcacggggatgggggccttctgcgcggaggaaggccggctcctcaccgccgtcgtcgcgccgcggctcaggg

SEQ ID NO: 312638 - DNA, 298 bp, Zea mays
gttctagatcgcgagcggccgccctttttttttttttttttatacagccatttcacagccggtctctcattatcatcttcttggtactcatatggaggaaagaatacactacaaactaaaagttttgaaacacactgtcagcctctaaccccccataagaaaataatctcaaaattgacgtctcggctttgactccgcagccgtgactcggatctgtctaccatccaagtcgatgccatcgaggtttgatatggcattgttgacctctttggcggagcagtaggtgacgaaaccaaac

SEQ ID NO: 312639 - DNA, 302 bp, Zea mays
attaattattgccctttcagttcgccatcggcagccgagcaccatgagctccacaggcggcggcgacgatggcgccaagaagtcttggccggaagtggtcgggctcagcctggaagaagccaagagggtgatcctgtgcgacaagcccgacgccgacatcgtcgtgctgcccgtcggcacgccggtgaccatggatttccgccccaaccgcgtccgcatcttcgtcgacaccgtcgcggaggcaccccacatcggctgagggacggtggagcggcggcggcgggtgcagcgggcgcgagttt

SEQ ID NO: 312640 - DNA, 305 bp, Zea mays
gttcagggcgctcatagaggccacgacgacgccgcccccgcggtgccgggcgggttcgggtcggacgggagcgacgacgacgacgacgacttcggggccggggacggctacggcgacgatccgatccccatcgccaagccggtgacggactatgacgtcgtcatcgatgctctctcgccggggtccatcgccaacgtccagcagatcgccaggaggatggtggatgccggctttggccgcgagtgcgctgaggcctacgccgcggcgcgcgcggcatttgtcgacgaaagcgttgcgcgcctcgg

SEQ ID NO: 312641 - DNA, 288 bp, Zea mays
cggaccgtgggctcccaacagcaagaagagacggatttgccagatgatggcgaagagagcttccggagcatggattcctctgatgaaggtgtccggagctccttatctggggctagtcaccctccagaggctattgacatggatatcatgaagacagtctatgttgcaatcgacgagaagtccgagccaccggttagtttagtgcgaggagtctcggtgaaggggcctttcatagatgacctctcgatccgtgttacaagcgcaaaggcaaatctggtggtaggtgca

SEQ ID NO: 312642 - DNA, 297 bp, Zea mays
cggacgcctcacctcaaagagtgatgtttatagttttggagttgttctcttggaactgattacaagaagaaaggctgtcgatggtggttaaattagccttactgaaaacttcagttaagctctagcgaaacgggataagatacgggaattttatgatgtaaaagttgcagatgagaacagtttgaggattcttgatggaattgggaaactagcagcaaaatgtttagcaatggaaatagagaaacgtccagaaatgaaagatgttgcagaacagcttcggatgtttagaaaaactca

SEQ ID NO: 312643 - DNA, 122 bp, Zea mays
gcagccattcttgtaccaggagacattgttagtattaaactcggagatattatacctgcagatgcacgcctccttgagggggatcctttgaagatcggtcagtctgctctgaccggagagtc

SEQ ID NO: 312644 - DNA, 330 bp, Zea mays
cggacgcgtgggtgatgagatatttattatacacaccacaaaatagccatttcgttgcaggtacctttccatcttgtaacgcgcctgtgggatacataccttgccgaagcgactatctgccagattttctcgtgtacatatcggccagttttttgctgacgtggtcggacaagctgcagaagctggattttcaagagatggtgatgttcctgcagcacctccccacgaggacctgggcgcaccacgagctggagatggtcctctcgagggcatacatgtggcacacgatgttcaaaagctctcccagccacctcgccggctaggacccac

SEQ ID NO: 312645 - DNA, 328 bp, Zea mays
cacctgcaaatggcgatgctagctcaagctctggtggcaaggcttcttgtggacaggtatgtggcgccgtgaggagagaatgcaagcatacatgcactgcctcatgccacccatcgtccccatgcccagatttgagatgtgaattttctgtgcctattacctgttcttgtggccgaatcactgcaactgttccctgtggtgctggtggatcctccatgggtgataatatgtttgaagtctcgatcatacagaagctgccgatgcctcttcagtcagtggaatcaaatgggagggtacctcttgggcagaggaagctttcttgtgatga

SEQ ID NO: 312646 - DNA, 309 bp, Zea mays
caattgtacatcatgttagaggaccttgtcaacaccgctggtaagaaattggtaatctgggtccagcaagggaagagatggatccagagtctttttgtactttcaaggagcgtttgtgtaacttactagaaaacagagcatggtagagtatgttttggtagatcaggaattcataggtggggactttttgctcggagggacattcaagaaggagaaatggtccttgagtatcgtggtgagcaggtcagacgaagtgtagctgatttacgtgtagagcaatatcgtttgcagggcatagattgctatctt

SEQ ID NO: 312647 - DNA, 305 bp, Zea mays
  unsure (1)..(305): unsure at all n locations
gtcgtgggcttcgcgcgcgacgtgggcttggatgaacccgctggtgcagcgcgggcacccctgncgctggagctgtcggacgtgccgacgctggcaccgtcccaccgcccagagcgcatgcacgagctcttcaccctgcactggccgtcggcgtgggcgtccaaggacaacaacccggtccggcacacgctgttccggaccttctgggcgcagttcctgctgaacgcgttgctggcgctgctccggctgaccgtcatgtacgtcggcccgacgctcatccagagcttcgtggacttcacgtccgc

SEQ ID NO: 312648 - DNA, 294 bp, Zea mays
agcagaccgaattcccctactatgcaaacaccgacctcttaatcgtgttcccatgcgagcacgaatgtcacacaggtacaaatacaagttcctccgagcgaccacctcgaacatccccagcagtgccgtgaaggagaaccgcaggaccaaggtctcgatcgggaggggagggatgctgaaggtccagcacctggtgtcgcttgccaggccaggcatgccgtacttccgtagcattggtggagggaacgagcagacgagccggatcgcgcatatagagttcttcgtgaagccaga

SEQ ID NO: 312649 - DNA, 297 bp, Zea mays
cgtcctctgttacctctccctccgccgccacacccctcccattcaccgccagcgccaattccataccgtcctccgccacctctgctgagagcgagaagagatggcaggcaagggtgatgggccggcaatcggcatcgatctcggcacgacgtactcttgcgtcggcgtctggcagcacgaccgtgtcgagatcatcgccaacgaccagggtaaccgcaccactcccctcccattcaccgccaccgacaattccataccgtcctccgccacctctgctgagagcgagaagagatggca

SEQ ID NO: 312650 - DNA, 304 bp, Zea mays
agcagagcgagcagcaggagtcggcgctggtgacgtgctcccaggagagcaccctcggcgaggcgatcgaggcggcgacatcgaggcacgtgcaccggctgtgggtggtcgacgaggaagggctcttgcgtggggtcgtgtcgctcaccgacatcctccgggcagtgcgggaggccgcgctcggcgaggacctggagctgcacagcatcgtgccgtgagcccgtgggccgtgagtcgtgacgtccaagaacaagctcgtagctgtttctgcccatagtgtccgtccacctgtcgtgctcctgca

SEQ ID NO: 312651 - DNA, 245 bp, Zea mays
gtgggccgggacctcaagggcggcaagaacaacgtggtcgcggtgatcggcgacggcgccatgacggccgggcaggcgtacgaggccatgaacaacgccgggtacctggactccgacatgatcgtcatcctcaacgacaacaagcaggtgtccttgcccacggcgacgctcgacgggccggtgccgcccgtaggcgcgctcagcagcgacctcagcaagctgcagtcaagcaggccgctcaagga

SEQ ID NO: 312652 - DNA, 309 bp, Zea mays
  unsure (1)..(309): unsure at all n locations
ctctcccctcgcctatctcctcccccgacgcgcctgcaccaacagtggaagagctcgctagcgaacaggcctgngttgcggcgcacagcgtgaacgcgttcggcaagagaccctcctcgagcgtctcaccgaaaaggcggagcgcctccgcctcagcgccattttgcgagacgcaggacaccatggccgtccaggagatgaggtcccgcacgccgacgggcattccgtcgaacacgctgcgcgcagcggccacgacgctacacatgcagtagagcgtgaggagcgagttggcgacgacggaatcagtct

SEQ ID NO: 312653 - DNA, 280 bp, Zea mays
gtctccgcccccgacgactgcgacaggttcgttcggaccgcgatcagtcactacgaccgattggaccatctcgtgtgcaatgccggcgtcgcgagcgtcggcgcgttcgaggagatcccggacgtcaccagctacagctcccagcttgacgtcaatttctggggttccgttcaaacaaccttcgctgccctgcctcacctgaagaggagccgaggaagaatcgtggtgacggcatctgcgaccggatggaacccagttcctagaatgagcatctacaacg

SEQ ID NO: 312654 - DNA, 284 bp, Zea mays
agcagttcgtaaccaaggatcatccagaactcgggcggagagggagacggcggcgggcgaggttcaagtggtgctggtgtcggccatggatcgggttcgcggatccgcgttcctgctcggcgtcctgctcgcaggatccctgttcgcgttttcagttgctaaggaggagaccaagaagctcggcaccgtgatcggtatcgatctcggaaccacctactcctgtgtgggtgtgtacaagaacggtcatgtcgagatcatcgccaatgaccagggtaaccgtatca

SEQ ID NO: 312655 - DNA, 204 bp, Zea mays
aacgcaaacacgaccacagacagagcgcgcatcaaggccttttttttttgagacaacaaggaggacacgaggagatggcggtcacgatcaccatcggtaaggcgaggcagatcatcgacagccgcggcaacaccaccgtcgaggtggacgtaggcctcagcgacggcagctacgcgacgagggccgtacccagcggcgcatcca

SEQ ID NO: 312656 - DNA, 202 bp, Zea mays
gcggcaggagctctgggcagcgtgcgcacgtggggtaccaagctcgctcagctagcctaccatggctgatcgcgaccggggtgcgacgggaggaggcgggggctacggcgacaaccagcgcggggacggcatgcacggcgaggcgcacagcagcagaagcagggcgccatgatgacggcgctcaaggccgcgacgaccgcga

SEQ ID NO: 312657 - DNA, 219 bp, Zea mays
gacgagaagaggagagagagacgcgaggaaggagggagagagcacgggggcttgatcgaagatggatgccggagcaaaggtggtgaagaaggccgcggcggggcgtcgcggcgggggcggccccaagaagaagccggtctctcgctccgtgaaggccggcctccagttccccgtaggccgtatcggccgctacctcaagcagggtcgctactcccagcg

SEQ ID NO: 312658 - DNA, 200 bp, Zea mays
tgccagcaagccagcgcacgtcggtaggcacgccaccatgccggggctcaccatcggcgacaccgtccccaacctggagctggactccacccacggcaagatccgcatccacgactacgtcggcgacggctacgccatcatcttctcccacccagccgacttcacgcccgtgtgcacaacggagattgcggcgatggcgg

SEQ ID NO: 312659 - DNA, 148 bp, Zea mays
accacaccgacaccgacgtggtgatcgtaggcaccgggtccgcagacctgtcctgcgcgtacgaactgtccaaggaccccacagtgagcatagccatcgtggagcagtccgtgtccccaggcagcagcgcgtagctgggccggcagct

SEQ ID NO: 312660 - DNA, 137 bp, Zea mays
atgatgattcgctgcagcctgaccgccccgacgagctcgaacggatccacgcagcgggagggcgcgtcatcttctgggacggcgcccgcgtcttcggcatgctcgccatgtcccgagccatcggtgacagctacctg

SEQ ID NO: 312661 - DNA, 146 bp, Zea mays
caggataataaagatgtgaggcatgtcaagacttatgaactcgcactgaaggacaaagattttatcgaagggccttggtctcagaataatgtagacaatggtgctggtttgtcgatacctgtaccagctccacttggcggtgtgat

SEQ ID NO: 312662 - DNA, 306 bp, Zea mays
gtccccgacaagccactcgaagccgagatacggccatggactccaccggcaccggagcagcggggaagggaaagaagggagcagccgggcgcaaggtcggcgggccaaggaagaagtcggtgtcgaggtccgtgaaggctgggctccagttccccgtcggccgcatcgggcgctacttgaagaagggccgctacgcgcagtagtcggcaccggcgcccccgtctacatcgccgctgtcctcgaatacatcgccgctgaggtactgcagattgagcccagttctttgtttgtactgatttggcgacg

SEQ ID NO: 312663 - DNA, 200 bp, Zea mays
cttctcttctctctagttatacatatcaaacacttggccgccacagcggtctctgttcgccgcgcaccgccgcagaaatgagcgtgccgaatcagcaggttgtggattacaccagcttcaagctcgtcatcgttggcgacggtggaacaggcaaaaccacatttgtgaagaggcatcttactggcgagtctgagaagaaa

SEQ ID NO: 312664 - DNA, 180 bp, Zea mays
cggcggtacctcattccgtcctcgcacttctctcgcgctgcgctcgcttacatcgcttcgcataccggtcgagcagtggagcggccatgagaacggaacggagggaattaatgcaagatgttcatcgagagcatgcgcgtcgagagaacccacgttcggtagagcccgacggagatcgag

SEQ ID NO: 312665 - DNA, 225 bp, Zea mays
gcacgatgaggagcagcagcagcaggcggcgccgaggagcggcatcccactcagtgcttgcaaccatggctaggggattgaagaagcacttgaagaggctcaatgcgcccaagcattggatgctccacaagcttggcggagttttgcacccaagccatcttctggagctcacaagtccagggagtggcttcctctgatcctcatcatcaggaacaggctcaagta

SEQ ID NO: 312666 - DNA, 289 bp, Zea mays
  unsure (1)..(289): unsure at all n locations
agcttggacgagcagggaggttggatgaagcaagaaaggtaatagaagaagctggtgatgttggtgctggtgcatggaggacataccttgcggcgtgccggatgcatggtgataaggagagagcacaacaagcagctaggatgttgatgatggcagaggaatcagggagcgggggatgggttctgctcgccaacacttatggttcggatggaaactttgaggaactcgaagaggtgagataggagatgaaactccanagggtgcagaaggcagttggttgcagctgggt

SEQ ID NO: 312667 - DNA, 172 bp, Zea mays
  unsure (1)..(172): unsure at all n locations
aatgaaggtcatgcgatgaaagacctcgatggcgcggaacttttggattcaaccgagttgttagcgcatgtccgtgctgttcttgtcccccgngncttaggtggagtccttaacaaggataacgcaccagacgtgaacgccaaacttgtaatcgaagccgntaaccatccaa

SEQ ID NO: 312668 - DNA, 164 bp, Zea mays
  unsure (1)..(164): unsure at all n locations
aaacccctcaaaccccagccgcctcccgcaagtctcagagctcaggaatccgcgccatggcgagtgagacggagaccgtncgatttcaggctgagatcaaccagctgctctcacgcatcatcaacaccgtctacggcaacaaggagatcctcctccgcgagctt

SEQ ID NO: 312669 - DNA, 164 bp, Zea mays
ccccagcaacccagcgcacctcggcaggcacgccaccatcccgggcgtcaccatcggcgacaccgtccccaaccccgagccggaccccacccacggcaagatccgcatccaccaccacctcggcgaccgctacgccatcatcttctcccacccagccgacctca

SEQ ID NO: 312670 - DNA, 215 bp, Zea mays
agaggccgcgggacttccacctctctcacgctcggctccggccacatcgcctctacccccttcgcgctcgcacacgcgctcgacccatctgggctggggcacgcagcacactcactcgtcggcttagggacccccctgtctcgaaacgccgacatgatggttctattgttaagcaaaagtaggctaaatgcctaagatgttcacataaagctaag

SEQ ID NO: 312671 - DNA, 287 bp, Zea mays
gtgcagcctcgggaagttagtgacgccaaaagtcccagcggaggagcccgaggacgccgaccccgtccctcgctggtgggacggcatcatggccgcctcgtagtagagcctgccacggtacgccgcgaggtcggcgtagtagacgggcgtcgccagcgacacgggcttggtgcaccgcgcgaacacgaagcagaggttgtagaccagcttctgcaggtcgtcggaccggaagccgtgctcgtccaccaggctgtagtagtgcgtcggcctgctcgtgcccaggatcc

SEQ ID NO: 312672 - DNA, 160 bp, Zea mays
ccaagtgcgtctctgcatccctcaagaaactgtggacgctgcacatactgagatttgtgggcaactgttcgaaaaggttgtcaaagaagccattgcatctgttgacggatataatgctgatagacgtgaggctgttaggaaggcagcacaaagtctaaac

SEQ ID NO: 312673 - DNA, 305 bp, Zea mays
ctgccgccgcccgccagcaccaaacttccatccgccccgagctctgcctccgccgccgccgcgccatgaggcctctcgacgagaaggagacgactcaggtattcgagaagctgttcaagttcacggggcccaacctgaagcacctcctggagcgccccgcagtggagggccccgacgcggagcccggccgctactgcctccggcttcaccgcaatcgcgtctactacgcctccgaggcgctcgtgcgccgcgccaccgccgtgtcccgaccgcgcctcgccggcgtggggacgcccatcggcaag

SEQ ID NO: 312674 - DNA, 301 bp, Zea mays
ctgttttgactcctctctagccacttggccatacttgtgctaacccttaacaagtttttgtggcttaagtattgaagttttacaggatcacctattcacccccccccctctaggtgctctcatgactgccatacctgcagggtgctgcacaagtgctgttttattttctatttttgtggccgtttgcttttcctcaacggcctttggtctccatttcttttgcagtgcaataagtgtggctctgtagtatgtacgtgcggatacgatgctgtatgctactgaggcaagtcccataaataaa

SEQ ID NO: 312675 - DNA, 163 bp, Zea mays
ctgatccaagatcgaaactagagaccttgaaagatgcattcgatgtttccatagaggcgatcatcagcaaagtgacaaagctgagaagagacatcatcgcaggacaggaagacaaaggttttgttgaggagaatagctggaagtatagtctgttagaagacgg

SEQ ID NO: 312676 - DNA, 291 bp, Zea mays
ccttgacagattcatggacacatcattgccttcaagaaacatggacatgaggtcacagaggcttgacttcgatgatgtctctgagtgcgaaattccttgggaagatcttgtgattggtgaaaggattggcttaggttcatatggagaggtttaccgtgctgactggaatggaaccgaagtagctgtaaaaaaattcttggatcaagatttttatggcgatgctctggatgagtttaggagtgaagttcgaattatgcgtcggctgcgccatccaaatattgttctctttat

SEQ ID NO: 312677 - DNA, 285 bp, Zea mays
acagtcttcaccatttctgaacaagcctttattgccttatgaggaatggtgcattgagttttcagagatcactgttggcattcgtgtgggagtagggttttttggggaagtcttccgtggcctttggaacggaacagatgtagctataaaagtatttctggagcaggatttgacaacagagaatatgaaagatttctgcaacgagatatcaatacttagccgacttcgacaccccaatgtcatactctttcttggtgcatgtatgaagcctcctcacttatccct

SEQ ID NO: 312678 - DNA, 171 bp, Zea mays
acgctcgctcaggaaattgctgcttacctgggtatagaactcggcaagatcctgatcaagcgctttgctgatggagaaatttatgtgcaactgcaagagagcgtgagaggatgtgatgtgttcttgatccagcccacatgctctcctgtcaacgaaaacctcatggagctc

SEQ ID NO: 312679 - DNA, 278 bp, Zea mays
gcttaatccagccttccccgtctctcctcttctgccgaacgagacagaccgggttatgtagcctgcctcgttttcggcgagagaagaagaagcggaggagatcagggcaatgggcggggcggaggcgctgggccagccggacggccatgcgaacagagccgtggtggaggagaagctggacttgctgcggcggcagctggggaaggcggacagcgacccgctccggatcgtcggcgtcggggcgggcgcctggagcagcgtcttctgcgcgctgctgc

SEQ ID NO: 312680 - DNA, 286 bp, Zea mays
agggtccctgtatgcaggtcgctacttaacttgacaagcagtgttgctgtgtaagagattgtgtaggcgcggttcgcgatcacttctttcctttcccaaccaaataaagaaatgcaaaaaacgactaattctagaccagaagatcttctcatgttggatatcagaaataaaataggtgatctttcgggagggagtgccagtagcaccagttcatcgtcttttttgtcttgcaattctagtctacactctcatagtccttcttcttcagaaggattcatttcttttg

SEQ ID NO: 312681 - DNA, 294 bp, Zea mays
cccgaaagccgccaagcggctgctgcgcaaggagcgaaaggcacttccctacccgattggcgatttaagtggtgggggagggaaggccgatggtcagtgaaagagaggtaggtggccggacggaggtggcatcgccaattcaactccgcatctgaatcggcactcggcagcgcgccagcaccataggaggagatggcgctcacaagaatcggtcttgctggccttgcggtcatggggcagaaccttgccctcaacattgcagagaaagggttcccgatctctgtgtacaacagg

SEQ ID NO: 312682 - DNA, 291 bp, Zea mays
gaacagtagtagtccctgtgtacgtctagcaacgatccgcaccgagctcgccagttttgctcgttagtttggggacggcgatggcgtccggtcaggaaagcagggaggagctggcgcgcatggccgaggaggggcagaccgtcgtccccggcggcaccggcggcaagaccctcgaggcgcaggagcacctcgccgaaggtttgtatcctacggccggccggccttgtgatcctcttatcttcctttcacttgtgtgtgctataaacccactactaatgcgcgtaagtagcc

SEQ ID NO: 312683 - DNA, 191 bp, Zea mays
gagaaccggagatcgacatgagccaggcgcagccgaggaggcggcagggcgaagagggcatgcacgcgcaggacaagcccgtcaagttcggcgacgtgctcgacgtctcaggcgagctggccgaccagcccgtggctcccagggacgccgcgcggctgcaggctccgcagcattccgtgctcggcgggacg

SEQ ID NO: 312684 - DNA, 131 bp, Zea mays
gccactctccctggcagccgccgccaggaagcctccacgccagcgcccgagcgcgacggcacgaggccgtgagcacctgcagcccgcagaggcagaggcgctgagtggcttcgtccgagcgatcgagccca

SEQ ID NO: 312685 - DNA, 295 bp, Zea mays
ggcaacttcaagggcgtgaccaagcacctggacaagaatcccaacccggtgtggcgccagaccttcgccttctcccgggagcacctgcagtccaacctgctggaggtggccatcaaggacaaggacatgatcaaggacgacttcgtcggccgcgtcctcttcgacatgaccgacatcccgcagcgcgtgccccccgacagcccgctcgcgccgcagtggtaccgcctcgccgaccgctccggcgagaagctgcggcacggcgagatcatgctggcggtgtggatcggcacgcaag

SEQ ID NO: 312686 - DNA, 294 bp, Zea mays
agcgacgcgcggccggtcgacgacaaggacaccgacgccatgccgtacctccaggccttcgagaaggagcagctccggaagcacccgcccacgtacatctcgctcacccacgccgctgtgcagccgggatgcaagctcgccggctacgacgtgcccgtggacgcgaaccaggacatcttcctcccgaccatctccgaggacccaaagctgtgggaccggccgacggagttcgacccggacaggttcgtgtccggcggcgagacggcggacatgacggggtcggcggggatccgg

SEQ ID NO: 312687 - DNA, 279 bp, Zea mays
ctcgagccgcacgacctccgtgtgcaacgcgtcgccgccatggcggcccccctgcacaccagatccggccacaacgccgccgcatgcggtgtctcaagaccatcgaggagatgtaccagaagaaaacgcagctggagcacatcctgctgcgccctgacacctacatcggctccgtggagaagcacacccaggcgctttggatatacgaggacggtgccatggtgaaccgctcggtcacctacgtccctggactctacaagatcttcgacgagatcctcg

SEQ ID NO: 312688 - DNA, 128 bp, Zea mays
gcgaacaaagcaatcggaattctctgcgatttctctagatctcgactaccccccactagttttggttcctcctttcgttcgagagagcgattctggtggcaatggcgaagagcgagggtccggcgatc

SEQ ID NO: 312689 - DNA, 220 bp, Zea mays
  unsure (1)..(220): unsure at all n locations
gtaaccagtgcctcggttaggagcataccagagctctanaggaaattcttcagagaatgatcctaacaatacaacagtcatgtgcagaggaagccatccgaatgctgaatgggagtcaggttggtgggcagaaagttcggctttcatggggccgtagtcctcaaaacagacaggcttctcagcatgatgccaacaaccagtataatgggaacagctatta

SEQ ID NO: 312690 - DNA, 299 bp, Zea mays
gctccccttcctctccagcgcgctgagcaacgcaagtaagatggccggcaagcgccgccatcctgccatcgggatcgatctgggcacgacctactcctgcattggggtgtggcagaacgaccgcgtggagatcatcgccaacgaccaaggcaaccgaaccaccccatcctacgtcgccttcaccggctccaggcgcctcatcggggatgctgccaagaaccaggccgaaatgaaccccagcaacacaatcttcgattccaagcggctcattggtagaagatttagcgatgcatctgtac

SEQ ID NO: 312691 - DNA, 296 bp, Zea mays
gccgcgcgcgcctcgccgtccgacgtcgaatggaagagcggcaaagcgggaccaggcgtcacgtcaagggcgtctcccagttcgccgtgtacgcggtcgaggccaggacgctgcagctgctgcgccccgacgagggcgtcgacctcacgctgcagcccttcacctacgagctcttcgtcgtcgcccccgtgcgcgtcatctcgcacgagcgggccatcaagttcgcgcccatcggactcgccaacatgctcaacaccgccggcgccgtgcaagcgttcgagagccagaaagatgct

SEQ ID NO: 312692 - DNA, 306 bp, Zea mays
tctaggcgagggagtggtgacgacgatcgagaacggcgagaggcggtcatacaccatcaagcaaggccacgtcttcgtggcgccggccggggcggtcacctacctggccaacaccgacggccggaagaaactggtcatcgccaagatcctccataccatctccgtgcctggcgagttccagttcttcttcggccccggcgggaggaacccggaatcgttcctgtcgagcttcagcaagagcatccagagagctgcatacaaggtacaacacacgtgctacgtgtgctgctgctgctgctgcaacgt

SEQ ID NO: 312693 - DNA, 315 bp, Zea mays
gcgcactcgatcgacctcgccgccgaggccatcggggtcatcgccgagccggaggtcaagagcgtcgagatcactccatcgcacctcttcttcgttgtcgccagcgatggcgtgttcgagttcctctccagccaggaagttgttgacagggttgccacgtatcaagatcctcgagatgcctgctcagcaatcgctgcagagtcatacaaactatggctggagcacgaaaataggacagatgatataacgataatcattgtgcatatccgagacatggaaagtgccctgcagggagtgacaaagcggactacggta

SEQ ID NO: 312694 - DNA, 307 bp, Zea mays
gcggcaggagctctgggcagcgtgcgcacgtggggtacctagctcgctctgctagcctaccatggctgatcaccaccggggtgcgacgggaggtggcgggggctacggcgacctccagcgcgggggcggcatgcacggcgaggcgcacagcagcagaagcagggcgccatgatgacggcgctcaaggccgcgacggccgcgaccatcggcgggtcgatgctggtgctgtccgggctgatcctggccggcaccgtgatcgcgctcacggtggccacacccgtgctggtgatcttcagcccggtgctgg

SEQ ID NO: 312695 - DNA, 304 bp, Zea mays
tgcggattggacagctgaagcactagcggaacaggtaaccccggagcatattgagaaaggcctgatctacccgcccttctccatcatcaggaagatttcagctaacatagctgcccatgtcgccgcaaaagcttatgatctcggtattttttattttttatttttttgggggtacatttttactagaaatcttatgtaagtcagtacattttttggtgcaggaattgctacccagctccctcggccaaaagacctggtgaagtacgctgagagctgcatgtacagccccgtctaccgatcgtac

SEQ ID NO: 312696 - DNA, 246 bp, Zea mays
gacgacgggcgccatgaaagtcccggtgcttctcctcctggtctccctgtgcttctcgctcgcgctcgcgtggcaaacggacacggaatcgggctcaggcaggccgtaccactacggcgaggagagtctccggcactggacgcgctcccggcagggaccgttcagggtgctggaacggttcacccacgagctgctggaggacgccgtcggcacctaccgcgtcgccgagctggaagccgcgccgcg

SEQ ID NO: 312697 - DNA, 294 bp, Zea mays
cgattggtacaatgatcgctggatgggatgagaagggtcctggcttgtactatgttgacagtcagggtgcgcggctcatcagggaacaggttctctgttggctctggttcactttaccgcttcagcatgtcagttgaggaagccgccgaattagcgcgacgggctatttatggggcaacattccgtgatgcagcaagtggtggttgtgttagtgtttaccacgttggccctgatggttggacgaagctttctggggatgatgtcggggagctgcactaccactactacccggtt

SEQ ID NO: 312698 - DNA, 239 bp, Zea mays
tgtgaactagaaaggactgggcaacctgtgtgtatatatgagatctatagtggagaacgggcatggccatttttacaccatggatctttgtatcgtggtgttacactttcgaaaggaggaaggcgaccaagatcagatgatgttgatgctgttaccaggctttcagttctagacaacccatactatcgagatcttctttgtgaatttggtgctatatttgccattgcaaatagagtcga

SEQ ID NO: 312699 - DNA, 313 bp, Zea mays
ggagactcccacaaatccatttctcagatgcattgatattgaacatgtatcaaatatgtgccatagcaagggagcgttgctttgtatcgacagtacttttgcctcccctatcaatcagaaggcactgactttaggcgctgacctagttattcattctgcaacaaagtacattgctggacacaacgatgttattggaggatgcgtcagtggcagagatgagttggtttccaaagtccgtatttatcaccatgtggttggtggtgttctaaacccgaataacactgctcttcggatggcccagtttttagaggaa

SEQ ID NO: 312700 - DNA, 153 bp, Zea mays
cacacgagcatatgacagtggcagacacgatggtgagcgccagaattgttgtcatcctcgccaaactcctatgcgctgccaacacagtcgcgtcgtcctagggaggacgcagccagcaccagcgcgggggccacaagtccgagcagtgcgtgc

SEQ ID NO: 312701 - DNA, 299 bp, Zea mays
ctagttcttagatcgcgagcagccgccctttttacttttttttaattgtacacatccacattagcagcttataataattaatcgaccaacacagcactcaagctccctagcttagcttacaacagatccagcacataacaccagagacacacggtgaaactgaactgaacacaacacagcacagaagacagcacatcgaatcctcctaattactccattaattaattgagcaacgacgacgccgacgacgacaacaattagatgaagcatggagaccaagcctaccaacattaacacgg

SEQ ID NO: 312702 - DNA, 111 bp, Zea mays
ccgcgaccatcggcaggtcgatacaggtactgtccgggctgatccaggccggcaccgtgatcgcgctcacagtgaccacacccgtactggtgatcatcagcccggtgcagg

SEQ ID NO: 312703 - DNA, 122 bp, Zea mays
cgagctcaaccgccgccagctgctgtacatcctccagatgcccgtcatgaacctgtacgtacctgggcttgacaaggggaaagctctccatttcctggtcgtcaagtcggagaccaagacac

SEQ ID NO: 312704 - DNA, 278 bp, Zea mays
  unsure (1)..(278): unsure at all n locations
tgttgatgaaataaatctattggatgatggcataagcaatctacttctgnatgtcgtgacggagggagttaacattgtggaaagagaggggattagctttcgccatccctgcaaaccacttctaattgctacttacaatccagaggaaggatctgtacgtgaacactctgctgatcgtattgcattaattaagtgctgatcagcaatgagtttgatgacgcgttgaacatggatatcacaccggttcagagctacaagaatttcaatcgtggagaaaa

SEQ ID NO: 312705 - DNA, 260 bp, Zea mays
ggaacacacggagtttgtgttctttcagcaaatagctccatatcaaatgtaacgcttcgtcagacagctcactcaggcagaactgtaacatacgagggtcaattcgagatactgtcgctgtcggggtcattcttcctggctgaggatggtgtccagcgcaccgaaacggaagcctcagcgtgtcgctggcaggtcctgatggccgtctgttgggtggtggggtcgcaggacttctagtagcggcttcaccggttcagata

SEQ ID NO: 312706 - DNA, 231 bp, Zea mays
aaacagcattcataaaatatttcaagtcattttgggttcccaaattggagatgtggatcgactccatccgaaatctgccattagcaagtcaggagtcatgcggtgccattgaaggttaccatctgaagctgaaggtaaaagcatatgatgacgtgcagctggatgctcttcaacgtgtggacaggctagtgcataagctcacaacagagctgcattcgagctactggatca

SEQ ID NO: 312707 - DNA, 192 bp, Zea mays
ttttataacagcaacagcagatagtcccaagcatatagagacaacacttaccagggctaaatttgaagagctatactcagatcaccttgacaggctgaggacacctgtggacaatacccttagagatgcaaagttgcaattcaaagatatagatgaggttattcttgtaggtagctcaacaagaataccagc

SEQ ID NO: 312708 - DNA, 176 bp, Zea mays
agcagcaggagcacagggcagcgtgcgcacatagggacaccagctcgcacacctagcctaccatggctgatcaccaccggggtgcgacgagaggaagccggggctacggcgaccaccagcgcgggggcggcatgcacggcgaggcgcacagcagcagaagcagggcgccatgatga

SEQ ID NO: 312709 - DNA, 293 bp, Zea mays
gttccagcatctttggattacactcgtgcagtattgacgatggtgctaactggttgcagattcgcagactcggtgtttgttatcttcttttcatgaccaagtgttgaacaggttttcaggtgaacccagacgacattgtgttcggaggctgggacattagcaacatgaaccaggccgactccatgaccagggccaaggtgctggatattgacctgcagaagcagctcaggccctacatggagtccatggtgccacatcccggtatctatgatccggacttcatcgcggctaac

SEQ ID NO: 312710 - DNA, 145 bp, Zea mays
acaacccaccggttcgggttcgggttcgtgaggatctccggggatcggtttcgtgggtgagcggatcgagattgcggcgtcggatgttgagtaccgctgcttcgtcggcagcctcgcctggaccacggacgaccacaccctccac

SEQ ID NO: 312711 - DNA, 145 bp, Zea mays
agagcaattacaactttgagaagcccttcctttacctcgcaaggaagcaggcaggggatcagaaccatcactttgtcgaagccgttgctctgaagccaccggaagtgcagattgatatggccatgcagcagcagcatgaagctga

SEQ ID NO: 312712 - DNA, 259 bp, Zea mays
atccaatctagaagcacaccacaccctctctctctcttcgccgtccgaagcaccgcacaccaatctaatcgacacatcaccgagatgggccgcaagttcatcgtcggtagcaacaggaaatgcaatggaaccacagatcaggtcgagaagattgtcaaaacactgaatgaaggacaggttcccccatcagatgttgtggaggacgttgtcagcccaccttatgtcttccttcctgtggtcaagagccagcagcgccaag

SEQ ID NO: 312713 - DNA, 225 bp, Zea mays
gagtaccgcacgaggagatgaccccagggagtgtttgcatggcgtacagaggaagcgccctataccattttctcgtgagtagcgtggtaacgatccacaggctcaccggaagcaagagcgtttacacgcatatgacccgaaagatcgaccagcagcacaagaacgtttagctgatccatgcatcagtagcctttctggataggaacaagagccatcagcacaacc

SEQ ID NO: 312714 - DNA, 156 bp, Zea mays
  unsure (1)..(156): unsure at all n locations
ttcagaagatataggatgctgtaccaaaacaccatgcccataaagaaactccacttagcgaatttttcgatgtacaagttgtggcnatgtccagttatgcagtcaaagaagagttgttcaaacagcaggtttctgatttaagagataggtttcagt

SEQ ID NO: 312715 - DNA, 183 bp, Zea mays
ctcgagccgagtcgctatgaacacttggctgccacaagccagtcatccctgtggtaactactctgacacatctagcttcaaactccgaacgtctaaaggatcgataggccacgctttcacggttcgtattcgtactcgaaatcagaatcaaacgagcttttacccttttgtaccacacgagat

SEQ ID NO: 312716 - DNA, 305 bp, Zea mays
  unsure (1)..(305): unsure at all n locations
gctttttaccagaaacagcaaccttatctgcattgaccacaataacaaaagctttataggaggcactccggaaggcctggagggatgaaagaagaaacttttgaccaacttcagaaaagaattccagagagaatcattgaacatgcggttcgtggcatgctccccaagggaaggctgggaagaagattatttacccacctcaaggtatacaaagggacagaacatccgcacgaggctcaaaaacctgtcccactcccgatcnnaggataaagaatacnaaaaactggatagangatcatcgactg

SEQ ID NO: 312717 - DNA, 119 bp, Zea mays
aggatccacatcaagaacacaaggaagacagcttttacgcatcgcaagcagcctttgaccaaagctaagcgatacaatgaggatgttataactcacaagcaggcaatacccaaccggag

SEQ ID NO: 312718 - DNA, 104 bp, Zea mays
caactctaagaccggcagggattcacaggacgcccttgcaccgcaggttgatgtagcgctcaagctcaccaagatgcaagagtacacaggacgctcagccccca

SEQ ID NO: 312719 - DNA, 218 bp, Zea mays
tggcgtgcaggtgcggaagcaggacgcggatgcggagggactgacgcgctgttcgtcgagctgtggaaggcctgcgcggtgccgctgtcctgcgtaccgccgcttggagagaaggtctacaacatcccgcagtgccacatcgagcaggtggaggcatcgacgaaccagcttgccgaggaccatggcacgcacctctacaacctgccatggaagattcc

SEQ ID NO: 312720 - DNA, 126 bp, Zea mays
gtacggcggcgagcgagcagcaggaagggcgtcaacatcgacgagtccaagttcaccaagtagtcctatagacatgtgcagttgcgtacgcagcgttcgtagctgtctgcgtagtgtaccttggcc

SEQ ID NO: 312721 - DNA, 327 bp, Zea mays
tgacgctccacgcagctcttcatggccgcgctgcacgcgctgtcgccgcccgcgggagccggcgccggcgctgcgcccatgagcgtggtgtccacggcgccctactactcgtcctaccctgccgtcacggatttcctccggtcggggctcttccgctgggccgtgcgtacgccaagctagcgttcagtggagcgacacctcacatcgagctggtgtgctcgccgaacaaccccgacggcggcatccgcgaggccgtcctgtcctccgccggctccggcgtggcggtccacgacctggcgtactactggccgcagtacacagccatca

SEQ ID NO: 312722 - DNA, 317 bp, Zea mays
agcttgcggttgcgggagggaagctgcgcgcgctaggctgccatggcggtggagaagacgctgcccggcgcgagtacggggaggaccgtgctggtcacgggcggggcgggctacatcggtagccacgccgtgctgcagctcctcctcgcgggcttccgcgccgtcgtcatcgacaacctctctttccacaagattgatcttcgtgacaagggagcacaggaaatggttcttgcttctacaagatttgaagctgtcattaacttcgctggattgaaagctgtgggtgaaagcgtacagaagccattactttattatga

SEQ ID NO: 312723 - DNA, 207 bp, Zea mays
cgcgacaccgcggcgacggtaccgagcgcccgcacgtgcgctacggccactaatggttcgccaagcgcggcgaagactacttcctcgtcaagcccgacagcatccgcgtccccggagacccttccacctctttctccgtcttcgctgtattcgacggccacaatggcgtgtcggcggcggtgttgaccaacgagaaattgctggagc

SEQ ID NO: 312724 - DNA, 295 bp, Zea mays
cgcggatcgggcggcggaacggctggagagcgagtacgacctcggcgaggagatcgggcacggcaagttcgggtccgtccgcgtctgccgccccaaggtccggacccggggcgaggaggagttcgcctgcaaggcctagccgaagaacggcggtgacacggcccaccgcgaggtcgagatcatgcagcacctctcgggccacccgggcgtcgtcacgctcagggccgtctatgaagacaccgacgccttctacctcgtcatggagctctagcaaggcggacggctcctcgatgag

SEQ ID NO: 312725 - DNA, 282 bp, Zea mays
agtcgtagctcaagcatcagcggcaggagctctgggcagcgtgcgcacgttgggtacctagctcgctctagtagcctaccatggctgatcaccaccggggcgcgacgggaggtggcgggggctacggcgacctccagcgcgggggcggcatgcacggcgaggcgcacagcagcagaagcagggcgccatgatgacggcgctcaaggccgcgacggccgcgaccttcggcgggtcgatgctggtgctgtccgggctgatcctggccggcaccgtgatcgcgct

SEQ ID NO: 312726 - DNA, 271 bp, Zea mays
ctcacctcaactaacgctcgctagctacctagctagcacgtactatagataattgcgacatattttgatttgatgtatatacacacgtggcaggggtccatgagcgcaccattgttcaacacccgttcgttcaagatcgcctacgtgccgaacggcaagggctacgccgagatcgtgtgcccgcaccgccagtcgcagggcggcgagagcgatcgcgactcgacaagggcaggaggatcgaagaagaagaagaagaatcgtctgatgagca

SEQ ID NO: 312727 - DNA, 278 bp, Zea mays
cttagatgatctagacgttataaaagtgatcgggaaaggtaacagcggaaatgtgcaattggtccgccataaatttactggccagtattttgctctgaaggtatttctgacgcaatcattctttgatgctgcttatttatggttctttacagtcaagactttagaacgatctctgcattgtactccctccattcgacaaatattcgacaacggaggtagtactacctccggtctcgaatatttgtcgtccgctagtttatttttgaactaaatgcgac

SEQ ID NO: 312728 - DNA, 151 bp, Zea mays
agcgcgatcacggcgtcacccgaaagggaatcgggttaagatttcccgagccgggacgtggcggcagacggcgacgttaggaagtcccgccggcgccaacacgtgcgctggtacgcgcgactgctccgtcgagcggccggtgcagggcgag

SEQ ID NO: 312729 - DNA, 147 bp, Zea mays
agaaaatggataagaagcatgtaaaagaacaatttggcatctgtatacggccaggtttaccttgattttgagttggcgattccaaaacttagtgttcatggaatgacatcgtccctgaaagagctgctggagccagctcccataaag

SEQ ID NO: 312730 - DNA, 168 bp, Zea mays
cattgcagtcgtcttggtacacagcgtgtcagtaaccacttgactgtatgtacggcacaagcatcgacattgccaatgctcaaatagagagctgagaccagctaagagcacagcatacactttccggaaggataacatgaagatccagcctgatatggaggacttgaa

SEQ ID NO: 312731 - DNA, 307 bp, Zea mays
atccgataaaattggaacgatacagagaagattagcatggcccctgcgcaaggatgacacgcacaaatcgagagttctattcttccagtatactagtatttagttgtatatctcgatgaattccaaccatgcatggaacatggttcccatgtcctgatacaagttatgatggactgtcgagcaggtttttaatgatgcaattgaagcactgagggtctcttacaagaaaatgaacccattttgtgttccttttgcaactacgaatatgggctctgcgatccttgcaatggatctgggatggatggga

SEQ ID NO: 312732 - DNA, 273 bp, Zea mays
ccggtgcttctcctcctggtctccctgtgcttctcgctcgcgctcgcgtggcaaacggacacggaatcgggctcaggcaggccgtaccactacggcgaggagagtttccggcactggacgcgctcccggcagggccggttcagggtgctggaacggttcacccacgagctgctggaggacgccgtcggcaactaccgcgtcgccgagctggaagccgcgccgcgcacgttcctgcagcccagccactacgacgccgacgaggtgatgttcgtg

SEQ ID NO: 312733 - DNA, 276 bp, Zea mays
gttaccacagacgacgggcgccatgaaagtcccggtgcttctcctcctggtctccctgtgcttctcgctcgcgctcgcgtggcaaacggacacggaatcgggctcaggcaggccgtaccactacggcgaggagagtttccggcactggacgcgctcccggcagggccggttcagggtgctggaacggttcacccacgagctgctggaggacgccgtcggcaactaccgcgtcgccgagctggaagccgcgccgcgcacgttcctgcagcccagcca

SEQ ID NO: 312734 - DNA, 294 bp, Zea mays
  unsure (1)..(294): unsure at all n locations
ctcccgtctccgtcgtctcgtctctgctcctcacctcgtcgccagccatgggcaagatccagatccgaatcaacgcgttccgaaggatcggcangctcgtgagcagggtcgccctgcagagcgaggatgtcgagctcgtcgccgtcaacgaccccttcatcaccacggattacatgacctacatgttcaagtacgacaccgtgcacggccaatggaagcacagcgacatcaccctcaaggactccaacacgcttctcttcggcgagaagccggtcaccgtctttggcatcagga

SEQ ID NO: 312735 - DNA, 251 bp, Zea mays
accccccaagtgattaacctgaaagcacgctgcacgctaggtgatatagcacttttaataccttctggtgtctctcttatgcaggacaaattccacaccttccacccggtggccaccatcctgagctacctcaccaaggcacccctggttccccctggcacaccggtggtgaacgctctggccaagcagagggcgatgctggagaacatcatgagggcctgcgttgggctggccccagagaacaacatgat

SEQ ID NO: 312736 - DNA, 265 bp, Zea mays
aataacttagtctcctaccatgagcttgttcgcgccacacaaagatttagcgataacaacctgctggggactgggagctttggcaaagtattcaagggtcaactagacaacggtttggtggtcgcaataaaagtgctagacatgcatcacgaaaaagccattggaagctttgacgccgagtgtcgtgtgcttcgcatggctcgccaccggaacctgataaggatactgaacacctgctccagccttgattttcgagccctggtgc

SEQ ID NO: 312737 - DNA, 258 bp, Zea mays
ccccctgtcccgctaggatccccccgaaaccctcccccaaaaccccagagcggagaagagcgcaagatgttcggcttcgggcaccacggccaccacggccagaacccgccggcgcacggcggcgtgcaccagcccaccttcaagatcttctgcaaggccgacgaggggtactgcctcaccgtccgcgacggcaacgtggtgctggcccccgccaacccgcgcgacgagcaccagcactggtacaaggacatgcgcttc

SEQ ID NO: 312738 - DNA, 170 bp, Zea mays
gagcatcggccgcaagaagacagcagtagccgtcgccaacacaaagccggggcgcaggcagatcaaggtgaacagcgtcccgattgaacacatccagccggagatgaaccgcctcaaggccttcgagcccatacagcaggcagagcgcaccaggatcaaggacatcgaca

SEQ ID NO: 312739 - DNA, 187 bp, Zea mays
gctgcagggaagcgaggatatggaacggggagttccagagagcggagaaagctgctgggatcgagctcgggagcatccgggcaacggtgctggtggagacgttgccagcggtgttccaaatgaacgagatcctgcacgagctgcgcgagcactcggcggggctcaactgcggccgctgggactacat

SEQ ID NO: 312740 - DNA, 299 bp, Zea mays
caatccttcaagcgcaacagcctcctcctcgtcgtccggtcgtgagaagggatggcgggccgtggcaaggctatcggcgctggcgcgcgaagaaggcaacgtcgaggagctccaaggccggactccagttccccgtcggcaggattgctaggttcctcaaggcgggcaagtacgctgagcgcgtcggcgccggcgcccccgtgtacatcgccgccgtcctcgagtacctcgcggctgaggtttgtgccccgcttcgttttctttcccctctccttgttgcgattcgcttcgggtccgcg

SEQ ID NO: 312741 - DNA, 122 bp, Zea mays
agcggcaggagctctgggcagcgtgcgcacatagggtacctagctcgctctgctagcctaccatagctgatcacaaccggggcgcgactagaggtagcggaggctacggcgacctccagcgc

SEQ ID NO: 312742 - DNA, 287 bp, Zea mays
gtcgttattacatgtgaccgtggcgacgacgacggtggctgcggcgcgcaggagacgtactgccggttgctggagcggtacaaggaggagctgtcgcggccgttcgacgaggcggcgtccttcctcagcagcgtcaggacgcagctcagctccctctgcggcggcgccgatcgctctccgatgaaatggtggagtcctctgaggacgagccatgctcaggcgacacagatgcgacgacagacccagggcaggagcacagctcgcgcctggccgaccgcgagctcaag

SEQ ID NO: 312743 - DNA, 200 bp, Zea mays
  unsure (1)..(200): unsure at all n locations
ggagcgcgcggggctgctgtacccgcacgagcagtgcgacccaaagatcatccaccgcgacgtcaantgccgcaacgtgctgctgaacgagcaccacgaggccgtcgtgggcgaactgggcctggccaagctgctggaccacggcgactcgcacgtcaccacggcggtgcgcggcaccgtgggccacatcgcgcccgagt

SEQ ID NO: 312744 - DNA, 195 bp, Zea mays
caagcatcagcggcaggagcgctgggcagcgtgcgcacgtggggtaccgagctcgctctggtgagcgaccatggctgatcaccaccggggtgcgacgggaggtggcgggggctacggcgaccgccagcgcgggggcggcatgcacggcgaggcgcacagcagcagaagcagggcgccatgatgacggcgctcaag

SEQ ID NO: 312745 - DNA, 261 bp, Zea mays
gcggcgctgctgcactgttggcgcgctctgctgcccgccggatgtcgcgagcgcgcctgcgccttgtgtacaggttaccgtacatgacagtcagtctcaagcagttatttttgttgataactctggtgctgaaattatcttgggtatattaccatttgcgagggagttgctccgacgtggcacaaaggtgatacttgcagctaatgatatgccttcgatcaacgatgtcacgtatccagagcttgttgagattataaacaa

SEQ ID NO: 312746 - DNA, 309 bp, Zea mays
gctgatcatatccaagtgacgaccctcaacaggcccaaagacagagtccttgacaggctgctcggaccacaccagctcatcaaggatcaaatgaagaaacaggaggtcaccgaagacgaggagatgtacctgaggaagctgatcatgacaagcaagaacgagaagccatctgacagggacgattcgggtttcccgtcagacgacaacataaagagaggccagctgcagtcgataatcagaaggttgcaagggcatgtagcctacatgtcccgagtaacgagtttcaggaggcgcttcatcaaccaggtc

SEQ ID NO: 312747 - DNA, 235 bp, Zea mays
tccaaactcgtgagcactttctcctcgtccccgacaagccactcgaagccgagatacggccatggactccaccggcaccggagcagcggggaagggaaagaagggagcggccgggcgcaaggtcggcgggccaaggaagaagtcggtgtcgaggtccgtgaaggctgggctccagttccccgtcggccgcatcgggcgctacttgaagaagggccgctacgcgcagtagtcggca

SEQ ID NO: 312748 - DNA, 208 bp, Zea mays
  unsure (1)..(208): unsure at all n locations
tcagtattcatttaatctggatttatttttaattttcgttctataaacaaccatgtgtaggtactcaaccgggaccacggatacccgctccgggttgttgtaccaggcgntattggtgcacgctctgtaaaatggctggacagtatcaacgtaaaagacgaggaatgccagggagtttttatgcaaaaagattacaaaatgtttccgc

SEQ ID NO: 312749 - DNA, 221 bp, Zea mays
gcggcaggagctcagggcagcgtgcgcacgtggggtacccagctcgctcagctagcctaccatggctgatcaccaccggggtgcgacgggaggtggcgggggctacggcgacctccagcgcgggggcggcatgcacggcgaggcgcacagcagcagaagcagggcgccatgatgacggcgctcaaggccgcgacggccgcgaccttcggcgggtcgatgct

SEQ ID NO: 312750 - DNA, 252 bp, Zea mays
caattagctagcttcttccagctctagctaggctcgtctgcagcaagaaggtaacagtaacagcaggcatggaggggaaggaggaggacgtccgcctgggcgccaacaagttctcggagcgccacccatcggcacggcggcgcagggcacggacgacaaggactacaaggagcccccgccggcgccgctcttcgagcccggggagctcaagtcctggtccttctaccgcgccggcatcgccgagttcgtcgc

SEQ ID NO: 312751 - DNA, 299 bp, Zea mays
cttcaatctttggcgatggtggtccccttggcgccggtgatctgcatgtgcctgtgatctactgctggctgcatcacctcaatagtctacctgggggcgtatgacagcgaggaggcagctgctcgtgcctatgacctcgcagctctcaagtactggggtcctgagactctgctcaacttccctgcatcaccacaacgggaggtgggaggcacggattgggcgagtctttgggaacaagtacctctacttgggaacatttgacactcaagaagaggcagccaaggcctatgaccttgcgg

SEQ ID NO: 312752 - DNA, 307 bp, Zea mays
cgcaaccgatatattccccagcacccccagtccagccgtccaaccgagacaccgcgtgcgaaccaagcagaccacagcaagaagcgtagtcgtcgccggaaggaaaggcgcggacaagatgtcgtggcaggcgtacgtcgatgagcacctgatgtgcgagatcgaaggacaacatctcagcgccgccgccatcgtcggtcacgaggcagcgcttgggcgcagtccgagagcttccccgagttaaagcctgaggaggttgctggtatcataaaggactttgatgaacctggtactcttgcaccaactg

SEQ ID NO: 312753 - DNA, 297 bp, Zea mays
ccagaatatattctgttcttgccaaatcgagggacaaacttgatctctatcaggagctgcttgcaaggctcaaggaaagccagcgctcccttggggaagctactgctgatgctgaacttcccaagagtgcttcggatagaaccaaagcaatgggccaagttttatcaaaagcaagggatctattgtacgattgcaaggaaattacccagcgtttgagagcaatgcttcagtcagcagatgagcaggtccggagcttgaagaagcagagcaccttccttagccagctagcagctaaga

SEQ ID NO: 312754 - DNA, 298 bp, Zea mays
ctcaagcatcagcggcaggagctctgggcagcgtgcgcacgtggggtacctagctcgctctgctagcctaccatggctgatcaccaccggggtgcgacgggaggtggcgggggctacggcgacctccagcgcgggggcggcatgcacggcgaggcgcacagcagcagaagcagggcgccatgatgacggcgctcaaggccgcgacggccgcgaccttcggcgggtcgatgctggtgctgtccgggctgatcctggccggcaccgtgatcgcgctcacggtggccacccccgtgctggt

SEQ ID NO: 312755 - DNA, 170 bp, Zea mays
cagggtcgagctcacccgcctggagaacgagctcagggacaaggagagggagttggggaggcacagacggagatacgcgcatgcgttgtcggagagggcgcgggagaaagccgtcgaggagcttacagatgaattggagaagatggctgagaaactcaagctgacagaat

SEQ ID NO: 312756 - DNA, 291 bp, Zea mays
ctctccctgtgcgacaacccagccctcatggacagagatgaagctcgtgccttattcagcccttgtagcataagaagggccaggaggatcctaaactcgatccccagcaaagacactggtggatatactgattgccggggaatcaaatgcctgcgtcaagtagtagcagatgggattaccgcaagagacggttttccatcgacagcggacgatatctttctgacagatggagccacctcagcggtaagactctgcatttcagaacctacatctacatgacgcagcacagat

SEQ ID NO: 312757 - DNA, 282 bp, Zea mays
catcgtggccttcacgcgcgcgctctcgctgcagctggccgacaggggcatccgcgtcaacggcgtcgcgccgggccccgtctggacgccgctcatcccggcgtccttcggcaaggagaaggtggagcagttcgggtcccaggtgcccatgaagcgcgccgcgcagccggccgagatcgcgcccagcttcgtcttcctcgccagcaaccaggattcgtcctacatgtccggccagatcctccacgtcaacggaggcgtcatcgtcaatagctagatacggaa

SEQ ID NO: 312758 - DNA, 164 bp, Zea mays
agtgcttgcttggaacgagaagatgaagctacttgcttggattggaacgagggggcggagacggagagagacagaaaagctttatagttgtttggtttgtggagtcactctatgcttcatgaagtggtgcatcataagttcatttcattaattttggtgtaatc

SEQ ID NO: 312759 - DNA, 283 bp, Zea mays
gaatttccggatgttgatcctagcacattcttttctatgtttatctggaagatccctgctgaaggatacaggatccaaaaaggcacccgacaagtgaggatccatgaacctgaacctgtggtggctgatccgggtggtctctgcaaggctaggaatagcttgtgcaatcttcaaagggaaggttttgttgaatcatcaccagcacgggtttgtaatatctgctgcaaagagcctggtttctgtcgtgagtgctgctgccttctctgtaacaggaccgttgatt

SEQ ID NO: 312760 - DNA, 292 bp, Zea mays
cacaaatcagacatcaaaatggaatgcgacggagaaaacctttgtctttgtttcgcagcggatatccagctggcgcacacgcaaggagaggtaaccagcaatctgctgccctatgcaccagggcaggaagtggcaaccaggctccaggacctcgctgaatttgccaaaattttctttgatggctacagttgactgatcaacctgaactaacccaaaatctgacccatgtcttatctgcgcacaataagacggacgtctgtcatgtatgctaccagcggtccagtaatgcttc

SEQ ID NO: 312761 - DNA, 288 bp, Zea mays
agcgaacaagtaccgcgagggaaagatgaaaaggactttgaaaagagagtcaaagagtgcttgaacatgcggggagggcgacgggggtgctgctggagacagtgcagatgatggggatgccaaggggagcggcgatgatgctgacacagacaaggactccaagaggatgaggaccaagtttgaggagctttgcaatgaagacaagattttggtgttctttaagaagctgcttaatgagtggaaccaggaattggatgagatgactgagctagagaagcggacagcaaa

SEQ ID NO: 312762 - DNA, 280 bp, Zea mays
gatccgtgcgccctcatctgacacccggatgttcatgcgctgcgatgtgaattttgaccagtccaaccacggacggagcctgaacaccatgattggcagggcagctcacattgagttccttgagaccgacatctacgccaagttcatcatgtggtccttccctgacctgttccgatgacgacgacaacgcataccaaacctaccaaaccgatagcgcacactgattagtactgaccaggcaaggaaaagtaggcttgcataaaggctcccccagaatcca

SEQ ID NO: 312763 - DNA, 280 bp, Zea mays
ggaaattacaccttctgcaccagttcttggttgcacaaagtttcctttttggaggatctgccattgaatcagaaggatactttgtgcaaccaacaattgtggaaattacaccttctgcaccagttgtgaaagaagaactctttggtcctgtcctttatgctatgaaatttcagaccttgaaggaagcaattgaaatcaataactctgttcctcaaggattgagcagttctatatttacaaagaggccagatattatttttaagtggctcgggccccatgg

SEQ ID NO: 312764 - DNA, 186 bp, Zea mays
cgtcacactgcaattttgaaaactgaactgtaagatggcatcagcagagctttcccgtgaggaaaatgtgtacatggtcaactcgccgagcaggcagagaggtacgaggaaatggttgagttcatggagaaggtagcgaaaactgttgactcggaggagctcactgtggaggagcgcaacctcctg

SEQ ID NO: 312765 - DNA, 297 bp, Zea mays
caagcatcagcggcaggagctctgggcagcgtgcgcacgtggggtacctagctcgctctgctagcctaccatggctgatcaccaccggggtgcgacgggaggtggcgggggctacggcgacctccagcgcgggggcggcatgcacggcgaggcgcacagcagcagaagcagggcgccatgatgacggcgctcaaggccgcgacggccgcgaccttcggcgggtcgatgctggtgctgtccgggctgatcctggccggcaccgtgatcgcgctcacggtggccacccccgtgctggtg

SEQ ID NO: 312766 - DNA, 289 bp, Zea mays
cgttgatcggcaaagagactttagggttttagcggcttctatttctgagcgagggtttatccgccaggggcggcgcgacgcggcggcagttgagctgggatttccttcccatcccgttcccttccaggcgaggcgatggacgaggcggcggtcgacgacctcatccggcggctcctcgaggcccgcagcgggcgcaccccgcgcaacgcgcaggtgaccgacgctgagatccggcgcctctgcgccgccgccaaggatgtgttcctctcccagcccaacctacctggag

SEQ ID NO: 312767 - DNA, 211 bp, Zea mays
ccatgaaggtgctgatcgttgcccttgctctcctggcgctcgctgcgacgccgcctccagtacaagcggcggctgtggctgccagacaccaccgtttcatctaccgcctccgttctatatgccgcctctactctatctgccgccaagcagcatccgcagccatggcaataccccactcaaccagcgcagctaagcccgtgcccgcagttcg

SEQ ID NO: 312768 - DNA, 299 bp, Zea mays
cgccgtcggcaactaccgcgtcgccgagctggaagccgcgccgcgcacgttcctgtgcttctcgctcgcgctcgcgtgagcaaacggacacggaatcgggctcaggcaggccgtaccactacggcgaggagagtttccggcactggacgcgctcccggcagggccggttcagggtgctggaacggttcacccacgagctgctggaggtgatgttcgtgaaggaaggcgagggcgtcatcgtgctgctccgcggcgggaagacggagtcgttctgcgtcagggagggcgacgtcatggtc

SEQ ID NO: 312769 - DNA, 264 bp, Zea mays
gtgtttttagggtgagcccgtccaagatggccatgcgtccccgcgcacctcgccagctgatgtcgtactaggctaggggattgaagaagcacttgaagaggctcaatgcgcccaagcattggatgctcgacaagcttggcggacttttgtaagtcaaaaatattttctagctttggtacctacaatcttctgtacttccccatttgtctaatgcttcaggttgttcttttttctgtagatctgtgtaccttatccttgctatac

SEQ ID NO: 312770 - DNA, 253 bp, Zea mays
gatgtggtctcttttttttttgggtgtggccatccatccgaaagcaaccagccacactgccgaaccatccatttgtctcgttgtccgcaaccacttggaaatttctgggattagcggcggaggagagcaaataacaacgggctcaaaaaaatatcttggtgctgtggtgcagggcatcagcaaaggcgtggtggtggacagcctgctgtcgtccatggtgaggacggggaagccgccggacttcgtgctgtgc

SEQ ID NO: 312771 - DNA, 223 bp, Zea mays
aaattggatgctttatctgaaataactttttccaaatgtcagaggcacaccctgatgcgatacaaggcgagggaggtgctacattggaagcatatagcaatgatcttgcgtacttgaagagaaaggttgatgctggtgctgaccttattgttacacaacttttctatgataccgacatctttctcaagtttgtgaatgactgccgccaaattggtattacttg

SEQ ID NO: 312772 - DNA, 226 bp, Zea mays
cgaagcgccgcccgctcgctcgcctccgctccggcagcgagctctatcccccgcgacgagcagcagctgccaacgaagcacgcagaccggggaataaatattggtattggtagtgtgatatctataagaagtcaagcccttggtgagaggattaggccagttctcacggtgaacaagatggacaggtgcttccttgagcttcaggttgagggtgaggaagcttatc

SEQ ID NO: 312773 - DNA, 213 bp, Zea mays
cgcctccttcagtccatcccctcaaccccggctgccaaaagccggcacaccgaagcggcggccatggcggactaaagcggctgtcagagagccgggacctgacgcggatcgagcgcatcggcgcgcactcccacatccgggggctagggctggactcctccatggaggcgcgcgacgcctcggagggcatggtcggtcagctgcccgcgcgcc

SEQ ID NO: 312774 - DNA, 138 bp, Zea mays
gcagccaaaccctacataggcgccgccgcatgctccccccgcatcgtcgccaaagatgcagatctttgtgaagactctgacggggaagaccatcactttggaggtggagtcatcggacaccatcgacaatgtgaaggc

SEQ ID NO: 312775 - DNA, 238 bp, Zea mays
gaagctaccgttctccagtgctcctcaggacgataggaaccttcctgatgtgcacttgggactctatgatgatgttctagtcttcgataatgttgagaaggtactattcaagaatttctgttctcgttcgtaactaactcatgatgttctctgtgtttcagagtattgtcctacagttgcagttatgattaagtattaatcactttgccttggagcaccaattttttggaggctgaat

SEQ ID NO: 312776 - DNA, 230 bp, Zea mays
cacggttgtccctcctgggaaggacttcattgacataatcctgtcccgcacccaaaggcagacaccgacagttgtccacaagggatatgctatctcccgcattcgtcagttttatatgcgcaaggttaggtattcccagcagaacttctatgaaaagctctcgaccatcatagatgagtttcctcgactggatgacatccaccctttctatggtgatctcctccatgtgc

SEQ ID NO: 312777 - DNA, 233 bp, Zea mays
atctaatcattttgtgatagtcttgttgtgccttgattcaaatgcatagctacattattgagggcagagtatgttatctgactatgtgtgaccgctcttatccgaagaaacttgcattccagtacctagaagatctgaaaaatgaatttgagagggtcaatggcaaccaaattgaaactgctgcaaggccatatgcttttatcaagtttgatacattcatccagaagactagg

SEQ ID NO: 312778 - DNA, 175 bp, Zea mays
cgtactcaagcatcagcggcaggagctctgggcagcgtgcgcacgtggggtacctagctcgctctgctagcctaccatggctgatcaccaccggggtgcgacgggaggtggcgggggctacggcgacctccagcgcgggggcggcatgcacggcgaggcgcacagcagcagaagc

SEQ ID NO: 312779 - DNA, 221 bp, Zea mays
atgaagctaaggattcagatggccgtccggatgaagaggttgcagatgagtattggggcaaccatttagctcgaaatgactctatcatagttgatatctgccaggttagttttgaatgaatggtcagtacaagtcaacattagtttgccccatctgcaagaaagtttctgtaacatttgacccgtttatgtatttgtctttgcccctgccttcaacaacaa

SEQ ID NO: 312780 - DNA, 166 bp, Zea mays
ccgcggaggagatcggaggggaggcggcggatgatttcatgttcgctgaagacacgttcccctccctcccggacttcccttgcacttcgtcgccgtccagctccaccttctcgtccaactcctcgtcaaactcctccagcgcctacaccaacacggcaggaagagc

SEQ ID NO: 312781 - DNA, 293 bp, Zea mays
agcagttgaaagggctgaaatggatggagggcttgagaggaatggagtatcatcagtagcagatatactggcccaagatgttcatgagcttcatacgagctcaattgttcatgaagatggcgttgagaataacttattagctcagataccgagcttcactattaatgtccaaaatgcatggcaatcctttgttgcatatgatgcatgcttcaggttatgtctgaatgcatgggcaagaaactgcatggaagctccagacttccttcgggatgagtgcatggtactgcgaagtg

SEQ ID NO: 312782 - DNA, 304 bp, Zea mays
caagcatcagcggcaggagctctgggcagcgtgcgcacgtggggtacctagctcgctctgctagcctaccatggctgatcaccaccggggtgcgacgggaggtggcgggggctacggcgacctccagcgcgggggcggcatgcacggcgaggcgcacagcagcagaagcagggcgccatgatgacggcgctcaaggccgcgacggccgcgaccttcggcgggtcgatgctggtgctgtccgggctgatcctggccggcaccgtgatcgcgctcacggtggccacccccgtgctggtgatcttca

SEQ ID NO: 312783 - DNA, 206 bp, Zea mays
cgcgctggcatcggagaaggcagcggcggtggtggtcgcggagaaagcgggcggcgaaggtggaggaggagatggcgagggtccgtatgatgcgatcgtggtcgggtcagggatcgggggcctggtggcggcgacgcagctcgcggccaagggcgcgcgggtgctggtcctcgagaagtacctcatccctgggggaagctccgggt

SEQ ID NO: 312784 - DNA, 300 bp, Zea mays
gtcaggtaatcgagcttggagagcttattaggacaaagcaaataacatcacgtgaacttacagatatatttctgaggagattaaagaggtacaatcctgttctagaagctgttattacatatactgaagatttagcatacaaacaagccaaggaggcagatgacttgctggcacaaggaaaatatcttggtaaatatattgctaaccaggctgatcctctaaggcattatcgccactattggcagcacttgcaccttttccctcagcttcatttagaattatgtctggtatacatagctt

SEQ ID NO: 312785 - DNA, 178 bp, Zea mays
cttcgtgcacaggtacgtcggtgagggtatggaggaaggtgagttctctgaggcccgtgaggaccacaagttcgacctcatgtacgccaagcgtgccttcgtgcactggtacgtcggtgagggtatggaggaaggtgagttctctgaggcccgtgaggacctggcggcgctcgagaag

SEQ ID NO: 312786 - DNA, 239 bp, Zea mays
atcgatcacatcacaccaccagccgcagcgcacgaacgtacgactcatggcagatcgcgaccgcagcggcatctacggcgctgcactcggcgctgctggtgccctacttctcgtggaagtacagccaccggcgccaccactccaacacggggtccctggagcgcgacgaggtgttcgtgccgaggaccaaggaggcgctgccgtggtacgccccgtacgtgcacggcagccccgcgggc

SEQ ID NO: 312787 - DNA, 130 bp, Zea mays
ggcaatggtgcatccatatttacaacatctggcgtctcagccaggaaatttcaaacagacattgaagctggccaggtatagtatcagtcgttttcaaaggctgctgatatcagattgcatatgctactcg

SEQ ID NO: 312788 - DNA, 296 bp, Zea mays
aacaaacaagcgcataggcttcttgaatttgagcccagatgaagtgattcggagcttgttctacaacaagaacaacgattcccttattaccgtttcagtttatgcatctgacaatttcagcacattgaagtgcagaacaaccccggttgagtatattagaaggaatcagttagatgctgggtttcccctctttgaatcagagtctctgaaatagcctggatttgtggagtttgatgacgtaaatgcgaaaagtactcacatattcagcgcaggatggtatatataaggtctttgac

SEQ ID NO: 312789 - DNA, 291 bp, Zea mays
gttttgggtccgaccgcacacccggggttgcccctcaaggtgtttttaggagtacgacggtgtcgacgactgtagcaaaatggttcgtgcggatcgcacgagggacaatggacaagatttacaggttcgggccgcttagaagtgcgtaacaccctacgtcctggtgagtatatgagcgtggttacaagagggctctctggatagagggcgcagagaatttacgtgggtggctaagtaaaacagggtccctccttctgaaggggtgccccctaggccttatatattcgaccg

SEQ ID NO: 312790 - DNA, 229 bp, Zea mays
  unsure (1)..(229): unsure at all n locations
agctcagagaacatggacgtaagaaacaaggaggatgtagtgttgaggatgagatcagctgtacgaagcaagcagtntggccaggaggatatgctgtgccctcttgtggctgatgcctgcattcaagtttgccccaaaaatccagcaaactttaatgtcgacaatgttagagtagctaagctactaggaggaggtttgcacaattcatctgtggaacgtgggatggatc

SEQ ID NO: 312791 - DNA, 305 bp, Zea mays
ctcgagccgaactcgagccgctccgagaaggcgcggcggcgcgcacctcggcccagcacctcaacacgtcgtcagcaacatcctggagctccgaggtgagccagaccacgcccacgccaggcttgcagagacgcacgggccggtcatgtccctgaggttgggcacaaccgacgccatcgtggtcacctccgccgcggcggcgcgcgacgtgctgcagaggtacgacaacgtgctggcggcgcggtcggtgaccgacgccggacgcgcgctggggaaccacgagcgctccgtcatcaggctcccag

SEQ ID NO: 312792 - DNA, 302 bp, Zea mays
  unsure (1)..(302): unsure at all n locations
tgcccagcttcgcttcacggcgcgccgaccggcttggacgcgccgaccggctcgtgatcagctcggtcggatccgatggtcgctcgctgctgcagcgggcgcttgctgtgcgtcgcgagggctcggccggatcccggagggaggcggagcttccccgggtctcgaagattgcggcgcgccggctatggcccgggccgactacgactacctcatcaagctgctcatcatcggcgataggtgtgttgggaaaaagtgtnctcttttgcgggtctcagatggctctttcaccactagctttatca

SEQ ID NO: 312793 - DNA, 268 bp, Zea mays
  unsure (1)..(268): unsure at all n locations
gcgcaatccatgctgcccgagaaatggctgtaactgaaggaagaccaattttagttgaggtgctcagtagatccatggagtttcattacctgaaacgcacaaaaaaaaacttcagtatataattaatctgagtatcgactaatgagatttcaggcactgacttaccgagtcggccatcactcgacatccgatgattcgaccaagtacaggccagttgatgagattgagcattggcgaacagcganggatccgatttccagatacagaa

SEQ ID NO: 312794 - DNA, 312 bp, Zea mays
ggcccaagtcctagatcagatgcgtgcccccgcttagcatgtagcacgtagcagcaggaatgtagtgtcgtcgtagtagtagggtacagcgagatggggaggaagggcggcctgagcaccatgcaggagtccggcggcgagcgcgccgcccgggagggcatcgagatcgacgagtccaagttcaggaccaagtcctagatcagatgcgtgcacccgcttagcatgtagtacgtagcagcaggaatgtagtgtcgtcgtagtagtagggtagtcgtacgacgtgcggctcctcgtttggcacgtgtgccctga

SEQ ID NO: 312795 - DNA, 298 bp, Zea mays
gaaatcagaagaggcctggtatgagatgcaggatctccatgttactgagacccttcctcaaatgcgtgctctctcagaaacctacatgcaaatatacgagcaacacgaatgagtaatggacagtggtcatcctatggtcagtctgtttgcttaacagagatcagaatatcacaaactaatccttatctttggagcagctttttttggggcagaattttgtagtatcttcacacatgtccagacttaatttcttgacaagcagagatcgagggaatgtacttgggtcatcaagtcaatg

SEQ ID NO: 312796 - DNA, 202 bp, Zea mays
acgagtctgaggggcccattccggttgaactcggggaataccggacactcgtgagggtgcggctgcagagcaacaggttgtctggcccagtgccaccaagattttggggattgcccaacgtgggcctgcttgagattcgcgagaataagctctcagagtcggttgatcctgctctttctggtgccaagagcctatccaagct

SEQ ID NO: 312797 - DNA, 203 bp, Zea mays
gcgttccgcccgtcgcggttcgcgccgcccgaaggggaggccgcggggctcgacatcaagggcgggtgcttgagttactgccggtcggtgtcggtcgccggtcctagcccgggatggcgctcggcctgtacgcgctggagctcgccgtcgcccagctcgcgcacgccttcaactggtcgctgcccgacggcatcaagccctcg

SEQ ID NO: 312798 - DNA, 312 bp, Zea mays
gcttctgaaaaggcaatagcaccaaccacagcaaaatcagaaacaaaaccagcatcatcgcagccacctgttcgacccccagcagcaggtgccccagctccaagggttgaaagcaaaacagaacaggagaagaaggataatccaccaccatcagcaaaagtcccggaagggacagcagataatgagtttgaaaagcgtataagaccagaagtgatcacagcaaatgcgattggagtatcatttgatgatataggtgccttggatgatatcaaagaatcccttcatgagcttgtcatgctagctctgagacga

SEQ ID NO: 312799 - DNA, 309 bp, Zea mays
aatatcttccctcatgttacatatgatgggatggtggacattgataaaatcactgatccagtgcaacgtcgaagtgtacaaaatcaaatatgttattttggacagacaccatctcaattgctgacagttccacacataagaacgcggtcgttgacacaaatattacaattgcagacaatattccggaacccaagtgaggttagatcctatgtgcttccaagtccagagcactgcaatgttcctgctagcacgatgcttgtatccaatgattgtcttgtagtcatagattctaatgttcccacagcacat

SEQ ID NO: 312800 - DNA, 236 bp, Zea mays
gtcttggaaggttgtggagaatgcagggggtcatggccgcaacctaatggcatcctcgaccttctgtgaagggaacgcttccctagacttgttgagtacgccggagtgatgggcccagcctacatcttcgaccactatgtcgtcacccccgatgcagtagatcgagacgatagagaattcaacaacaaggtagagcgggtgaaacaagagtgggatttcttcagatgcgaggcttg

SEQ ID NO: 312801 - DNA, 194 bp, Zea mays
actagttaccacagacgacgggcgccatgaaagtcccggtgcttctcctcctggtctccctgtgcttctcgctcgcgctcgcgtggcaaacggacacggaatcgggctcaggcaggccgtaccactacggcgaggagagtttccggcactggacgcgctcccggcagggccggttcagggtgctggaacggttc

SEQ ID NO: 312802 - DNA, 280 bp, Zea mays
gttcttgctgctgatggggcatggaaactatgcgattttggtagtgtatcgacaaatcataagtgctttgataaacctgacgagatgggcattgaagaagataacatcaggaagcacactactccttcatatagagctcctgagatgtgggacttgtacagtagggaggttatcagtgagaaagtagatatctgggctcttgggtgtctcttgtatagaatttgctacttcaaatcagcatttgatggagattcaaagctccaaatacttaacgggacta

SEQ ID NO: 312803 - DNA, 288 bp, Zea mays
ggcggcggggccatgccgctgtactacgggaccccggcctcttgctcaggattgagctcggtgagcttgagcaccagcatgcagggggcaatggccagggtgagggccccattcacgccgtcccagtggatcgagctggaacaccaggccctgatctacaagtacctggccgcgaacagccccatacctcacagcctcctcatccccatcaggaggagcctcgctgcgtctccctacccgccttcatacttcggcacgagcacattggggtggggctctttccagctg

SEQ ID NO: 312804 - DNA, 306 bp, Zea mays
gctcgctctgctagcctaccatggctgatcaccaccggggtgcgacgggaggtggcgggggctacggcgacctccagcgcgggggcggcatgcacggcgaggcgcacagcagcagaagcagggcgccatgatgacggcgctcaaggccgcgacggccgcgaccttcggcgggtcgatgctggtgctgtccgggctgatcctggccggcaccgtgatcgcgctcacggtggccacccccgtgctggtgatcttcagcccggtgctggtgccggccgccatcgcgctggcgctcatggcggccgggtt

SEQ ID NO: 312805 - DNA, 307 bp, Zea mays
ctccaacatcagccagctgatcagccagaggctggcgccacgcgcgacgacggtccgctccggcgcggcgccagggccgtcctctacttcgcggaggacaactggaagcgcgtctgggtgatggcgctctggctggccatcaacgccggcctcttcacctggaagttcctcgcgtaccggcgccaccccacgttcgacgtcatgggctactgcgtctgcgtcgccaagagaggcgccgagaccaccaagttcaacatggcgctcatcctgctccccgtgtgccggaacaccatcacgtggctgcggt

SEQ ID NO: 312806 - DNA, 206 bp, Zea mays
tgaggagggaggccagcttgccgctaaggttagggtttcgggcgggaaggacagaggcggggctgcagccatggcgctcaagttcctgaacaagaagggatggcacacggggtccctccgcaacatcgagcgggtatggaaggcggaccaagcggaggaggcggacgccgcaagacggaggagctcaagaagcaggtcgcggccga

SEQ ID NO: 312807 - DNA, 297 bp, Zea mays
ggcatctcccacttcacctcccacatgggattcctcgacgtcatgcgctccgtcgtcaaccgccacgacgagtggaagtggcagacgatcgtcatgggctccgccttcctcgccatcctcctcctcacgcgccaaatcagcgccaggaacccaaagcttttctgggtatcagcaggtgctcccctggcgtcggtgatcatctccaccatcctctccttcatctggaaatcccccagcatcagtgttgtaagcatcttcagttccattgagacctcaccaatcattattcgtcagttc

SEQ ID NO: 312808 - DNA, 272 bp, Zea mays
gtcaccatgcatgaaggccatccccggatcattcaccgcgacatcaagtcggccaacattcttctcgacaacaacttccaagccaaggtcgtcgacttcgggctggccaagctgacgtcggacagcaacacgcacgtgtcgacccgtgtgatggggacgttcgggtacctggcgccggagtacgcgtcgagcgggaagctgacggacaagtcggacgtcttctcctacggcgtggtgctgcttgagctcctgacgggtcggcgcccatcgac

SEQ ID NO: 312809 - DNA, 195 bp, Zea mays
tgacggcccagagatggtgacgcagtgccccatccgccccggcagccgttacacctaccgctacaacgccacggtgcaggatggcacgctgtggtggcacgcgcacagctccatgctccgtgccaccgtccatggcgccattgtcatcaagcccaggaacggcgcccaggggtaccctttccccaaacccgacca

SEQ ID NO: 312810 - DNA, 314 bp, Zea mays
cctcactcaaaaccctcaccgtgcctctactgcaccccccccccccgatgtccgccgccgcgtcctcggaggaggccgtcaaggcagcgaaggtgctgatggtcggggcgggaggcatcggctgcgagctgctcaagacgctcgcgctctccggattcagcgacatacacatcacggtgcacccaagtaatccaacatttttctctgcagattgacttggatacaattgaagttagcaatctgaatagacagtttttgtttcggcagagtcatgttggtcagtcaaaagctaatgttgctcgggatgctgtgtt

SEQ ID NO: 312811 - DNA, 303 bp, Zea mays
catctccctggcatgcctggctcgcccgtccgcgctccacctcgtccatggccgccagtcgagtctctctgtccctgctcggatggcgcacgcccctccctctcggctccttcctcttacttcccatgggcgctttcctcgcggggttcacgcagctcgtcgagtggtggacgaggtgcgccaccgcccaagccgaatcgagctgcagaaaccaccttgccatggcgacacaggccggccgtcgtgtgcccctgtagcacgcccttgtcttctccccatcgtccgaccgtagcccagctcgga

SEQ ID NO: 312812 - DNA, 305 bp, Zea mays
ttctcgtcagccttgcaatggatccaccgaagctaggagatgaatctttcgagtcatttgataaggagaaggaacagatccgttcatccttctgcaagcgagccaagaccctggagaaagctttcagcggcctggagggcgtgacttgcaacaagttagagggtgcgctgtacttgttcccacggctccacctcccctccgctgcgatcagggccgccgatttcgagggagtttcacctgacatattctacgctcaccgcctgcttgatgccaccgggattgccgttgtgccgggctctgggttc

SEQ ID NO: 312813 - DNA, 292 bp, Zea mays
aagaaagcaaaagttgccacaccgtcagctcagaagacaggtgtgccattgaacagactaacaaaactatcatcgaagattgtataggtgtgactctgttcagggatagtcttgaggttctagaacagaagggtagtggtgtgcattagtgtatctgtttacaggataatagtggttggttaggtgtgtgcagaaaaagtttagcgttatggtttgtatgtgatacatattaactgtgccttggaatgttcatgtgttgtcctgattgcgtgtgatatctctcattcagttt

SEQ ID NO: 312814 - DNA, 304 bp, Zea mays
ggcgcactcgtgttcgtgtcatcccgcccgcacgccgcagtccatggccaccgccagcctcgcgctctcgctgcgcctcgcgccgtcctcgcgcccgctgagcctccgccgccggggggccaccggcgtcacctgccgcgccaccaccgccacgttccaccagctcgacgccgtcgcggtgagggaggaggagtccaggttccggacggcggcggcggagggccgcaacctgctgccgctcacgaggtgcatcttctccgatcacctcacgccagtgctcgcgtaccgctgcctcgtcaaggag

SEQ ID NO: 312815 - DNA, 189 bp, Zea mays
cgagcatatcacagtgacagacacgatggtgagcgccagaattgttgtcctcctcgccaccctcctatgcgctgccgccgcagtcgcgtcgtcctgggaggacgacaaccaccaccaccacgggggccacaagtccgggcaatgcgtgcggcggtgcgaggaccggccctggcaccagcgcccccggtg

SEQ ID NO: 312816 - DNA, 218 bp, Zea mays
gcggcaggagctctgggcagcgtgcgcacgtggggtacctagctcgctctgctagcctaccatggctgatcaccaccggggtgcgacgggaggtggcgggggctacggcgacctccagcgcgggggcggcatgcacggcgaggcgcacagcagcagaagcagggcgccatgatgacggcgctcaaggccgcgacggccgcgaccttcggcgggtcgat

SEQ ID NO: 312817 - DNA, 309 bp, Zea mays
actccctctctctcctccggcccccttttttatcgcccgaactcacacattttggaaggagagagagagaggcagagggagagattggagggaggcccctgcccaaggcaagagaaaccgcggcgcgacggagatggaggaagggcagacgcagacgcagacgggcgaacaagatgagggagatcatcagcatccacatcggccaggccgggatccaggtcggcaacgcctgctgggagctctactgcctcgagcacggcatcgagcacgatggcaccatgcccagtgattcctcggttggcgtcgcac

SEQ ID NO: 312818 - DNA, 311 bp, Zea mays
cgtcgccatcctcgtcgaccgcgggctcagcgccgcggcggcgcggagtggccaccgagcaccacgtagcgctcttcttcttcggcgggcccgacgaccgcgaggcgctcgagtacgcgtggaggatggtcgagcaccccggcgtcaccctcagcatcgtgcggttcgtcccgccggactaccgggcgcggaccgtctcttgctcggcttaccgcccgccggccgactcggactcgcgcgccatcaccatcaacacggagggcaagagcgagctggagatggacgaggactacctcagcgagttccgggcg

SEQ ID NO: 312819 - DNA, 306 bp, Zea mays
actacctcttcttcgtgctggcgctctacgccagcgtcaccgtcgtcgagagcctcatgatggccatcgccagcgtcatccccaacttcctcatgggcatcataatctgcgcagggatccaggggatcttcatgctggtgtcgggttacttcaggcttccgcacgacatccccaagcccttctggaggtaccccatgtcatacatcagcttccactactgggcgctgcaggggcagtaccagaacgacctcaggggcctgctgttcgacaaccaggacgacgagctgcccaggatcccgggggagt

SEQ ID NO: 312820 - DNA, 292 bp, Zea mays
atggaaatcaggcatattccggtgatgtccgaatcttcagagcagctcttctctgtggatagcattgctgtccctgagccgattcagcaactccttcacaaatatgaagcactgtttcagcctcctactacattgcctccaagccgattctgtgaccactctattcctctcatcgaaggagcaagacctgtcaatatcagaccatacagattttcgccagacatgaaggatgagatagaatcccaggttaatgagatgttacaaagtgggctgattcaacactgctccagtg

SEQ ID NO: 312821 - DNA, 287 bp, Zea mays
aggcgatgccgccggcgagcgtgatgacgcggctcatcctcatcatggtgtggaggaagctgatccggaaccccaacacctactccagcctcatcggcgtcgtctggtccctggtctcctacaggtggggcatcgagatgccagcgatcatcgcccggtcgatttcgatcctgtcggacgcgggtctcgggatggccatgttcagcctaggcctgttcatggcgctgcagccgaggatcatcgcgtgcgggaacaagctggcggccatcgcgatgggcgtccggttc

SEQ ID NO: 312822 - DNA, 280 bp, Zea mays
ctcgaccgcaagtgcaaggtgaaccaggagacgcgcggtatatacatagtagctgcaagtacattaattcgcactgaagattaccaaaaccaatggctgctcggtgcagcggcggctgcgacgggcgcgaggacagcgccgtggaggcgctggtgcagtggcagaaggtgagcgacttcctgatcggtgcgtcctacatgtccatcccgctggaactgctgcacttcgccacctgctccgacctcgcgccgctgcggtgggtgctcctccagttcggcgc

SEQ ID NO: 312823 - DNA, 282 bp, Zea mays
aaaccctctccaccgtccacctcagctcccatatccgctcccctacctctccagcatctcccgtctccgtcgtctcgtctctgctcctcacctcgccgccagccatgggtaactcctcgctcccggccagccccccgcgtcggggttttccatttactactactcgctgctccctcctgctccgtgctcagactcagatccgaccaaagctgtttcgctgactaaattctccttcgttttttctttttatggacggattcccggacgcaggcaagatcaaga

SEQ ID NO: 312824 - DNA, 275 bp, Zea mays
gatcttcaataggattacgcagaaggatgttgcttcatggaacactatgatcttgggatatgggatgcatggtcaaattgatgttgcatttgaattatttgatttaatgaaggatgatggcatcgaatatgatcatgtatcttatattgcagtattgtcagcatgtagccatggtgggcttgtagacagaggaaataagtacttcagtcaaatgatcgctcaaaatattaagcctcagcaaatgcactatgcttgtatggtagatcttcctgggc

SEQ ID NO: 312825 - DNA, 313 bp, Zea mays
gggatgtgcctacagccaaattcgtgaagaaatgcaagtatcctgaggatggttcaccgcctagatccttgagatatatcggaagtatggttgctgatgtccatcgcaccttactatacgggggcatatttttgtacccagcagaccagaagagtccaaacgggaaactacgcgttctgtatgaagtcttcccgatgtcattcctgatggaacaagctggaggccaggctttcacaggcaaacaacgggcccttgaacttgctcccgctaaacttcacgacagatccccagtgttcctcgggagctacgatga

SEQ ID NO: 312826 - DNA, 313 bp, Zea mays
agccggcgccgccattcgatcaggccgcttcgccggcgacagcctattccaggtcggttggttttggcacttcggaccggcggccatggcttccgacggcatcggccccagagatgtatgtgttgttggggttgcacgcaccccaatgggcggtttccttggtgccttgtctcccttgcctgctacgaaacttggctctatagtaattcaaggtgagatccggatcttctctgcatttacatccgagctctgaacatggtcatggctgggggctgttagctgctctggaaagagcaaacgtggatccagccct

SEQ ID NO: 312827 - DNA, 300 bp, Zea mays
ggaaagtacttgatgactcattacccgatggcgaaacgcatctcgtaacgagcttccgaaaaaacatgctcgacaaagagaagttcaggaagtttttggaccccaccctggagctcagcgctgaatcttggaacagcctgctggaggtggccgatcttgctcgccattgcacggcgcgggaaccgtaccagcggccagacatgggtcactgcgtgaacaggctttccagcctagtggaccagtggaagccaaccaacattgttgatgatgacgatgaggagggtgggacaagcgagatgg

SEQ ID NO: 312828 - DNA, 300 bp, Zea mays
ccttaaggcaccggttgctcagcacctgcagccatccagcaatctcggagatggcaacgggctaagtacagcccgtgcccctgttgatctcatcacagttcttgatgtcagtggaagtatggctggtaccaaacttgcattgttgaagagggctatgggatttgtcattcagaatcttggatcctctgaccggctttccgtcatcgccttctcatcatccgcacgtaggctcttcccactccgtaagatgactgagtctggtcggcagcagagcttgctggctgttaattcactgacgtc

SEQ ID NO: 312829 - DNA, 303 bp, Zea mays
  unsure (1)..(303): unsure at all n locations
gaaatgccaggagatgaatatgaatgtcgtttcggctacactgtagnacacagnacctctacgnagaggcccttgtacgtcacatagatataagaaacttcctcggcgagaagaaggtcaggaaggtggacatgcttgatggcgtgaccatcctccggtccgagaaggtcaaggatgagctcatccttgacggaaacgacgtcgagctcgtatctcgctccgccgccctcatcaaccagaaatgccatgtgaagaagaaggatatccgaaagtttttggacggtatctatgtgagcgacaagg

SEQ ID NO: 312830 - DNA, 312 bp, Zea mays
cgtggaggtgccaagaatggagcagcacaatactttccagaacgacaagggcaacctgtatgtgagtattatttgaagactgggacttgtaaatttggttccaattgcaaatatcaccatcctaagcaagatggatctgtgcaatctgttatattaaacaacaatggattccctctacgcccgggtgagaaagaatgctcctactatatgaagactgggcaatgcaagtttggttctacatgtaaatttcatcatccagaatttggtggtattccgttcctggatcatatatagcaggctcatacactccaa

SEQ ID NO: 312831 - DNA, 276 bp, Zea mays
cacagacgacgggcgccatgaaagtcccggtgcttctcctcctggtctccctgtgcttctcgctcgcgctcgcgtggcaaacggacacggaatcgggctcaggcaggccgtaccactacggcgaggagagtttccggcactggacgcgctcccggcagggccggttcagggtgctggaacggttcacccacgagctgctggaggacgccgtcggcaactaccgcgtcgccgagctggaagccgcgccgcgcacgttcctgcagcccagccactacg

SEQ ID NO: 312832 - DNA, 244 bp, Zea mays
accagacctccatttcgatcccatttgacatcaacccatcctcgtttcctccgtctagcagcctctcaccctcatggccaagatcaagatcgggatcaatgggtttggcaggatcggaaggctggtggccagggtggccctgcagagcgacgacgtcgagctcgtcgccgtgaacgaccccttcatcagcaccgattacatgacctacatgttcaagtatgacactgtgcacggacagtggaag

SEQ ID NO: 312833 - DNA, 297 bp, Zea mays
gccttctgcgcctccatttcggcctctgtcccttgcaagttcaatctcacctccaaccatgggtaaagagaagtcccacatcaacattgtggttattggccatgtcgactctggcaagtcgaccaccacaggacaccttatctacaagcttggaggcattgacaagcgtgtgatcgagaggtttgagaaggaggctgctgaaatgaacaagcggtccttcaagtacgcgtgggtgctcgacaagctcaaggctgagcgtgagacaggtatcaccattgatattgctctgtggaagtt

SEQ ID NO: 312834 - DNA, 273 bp, Zea mays
gtagctcaagcatcagcggcaggagctctgggcagcgtgcgcacgtggggtacctagctcgctctgctagcctaccatggctgatcaccaccggggtgcgacgggaggtggcgggggctacggcgacctccagcgcgggggcggcatgcacggcgaggcgcacagcagcagaagcagggcgccatgatgacggcgctcaaggccgcgacggccgcgaccttcggcgggtcgatgctggtgctgtccgggctgatcctggccggcaccgtgatc

SEQ ID NO: 312835 - DNA, 305 bp, Zea mays
acttggtcagaaaattgaatatgatcttataccagacgtggatatatacaagcatgaaccatgggatttacctgcaaagtgcaatcttccaatcaaggacaacaagtggcatttctttgcctctcgtgacaggaagtaccctactggctctaggtcaaacagggcaacactagctggttactggaaatcaactgggaaggaccgagccataaagctgaacaagctaactctaggaacaaaaaagacgttagtttttcatgaaggccgacctccctctggcagacgcactgagtggattatgcatg

SEQ ID NO: 312836 - DNA, 183 bp, Zea mays
cacctgagtacgtatattgctccagtctccgaaatttgatcgatattttgtctgcttttcaggtgcaccgagctggctcctgatagggttcggccagcactcgagaaaacactcaaggacttgcagctggattacctggatctctaccttatccactggcccttcaggctgaaagacggggcg

SEQ ID NO: 312837 - DNA, 212 bp, Zea mays
tgtcatcggcgacggcgtcctcacgcccgccatctccgtcttctccgccgtctcagggctcgagctctccctgtccaaggatcagcatgaatatgccgtcatcccgataacctgcgccatcctggtgttcctgttcgcgctgtagtactacggcacccaccgcgtggggttcctcttcgcgcccatcatcctcgcctggctgctctgcatga

SEQ ID NO: 312838 - DNA, 300 bp, Zea mays
agcaaatgcatttctctaggatgtttgtggcaattagagcatgtgttgatggatttctaactgggtgcaggccttaccttggggttgattctactcacttaactgggaaatataaagggcagttagccacagcaactgcaattgatgggcacaattggatgtatccagttgcatatgggatatttggcaaggagacaaattccaattgggcatggtttatggcacaactaaaaagagcaattggggaatcccctggattaacaatccacactgatgcttgtaaaggactagcctatgctg

SEQ ID NO: 312839 - DNA, 290 bp, Zea mays
ctccgaggaggaggccgggaagcggctgtcgcaggtcgtgagcgaccccagcaccgaccaagtccggcgtgtactggagctggaacaagaactcggcgtccttcgagaaccagctctctgaggaggccagcgacgccgacaaggccaagaagctctgggagatcagcgagaagctcgtcggcttggcgtgacgacctgatgcccaccgtggccggcgccggcagccggtgacagttttttcctaggacatgttcgttacttgatctcagtcgacgcgtggtgcactcgtg

SEQ ID NO: 312840 - DNA, 247 bp, Zea mays
ggtttgaggatgaccgtctcatgcaagggaactggaccaaggagccaaattcttccacaattctactcttcttcaggatacttgctctgtgtcacacagcgataccagagataaatgaagcaactggttctattgcctatgaagcagaatcacctgatgagggggcttttctcgtggcagccagggaatttggatttgaatttttcaaacgaacacaatcaagtgtctttgtcagggagaaacacac

SEQ ID NO: 312841 - DNA, 293 bp, Zea mays
caatgagctcccacctagccgctgctcttgtccagcgggagaagcagcagcagacaatgagaagtctcagctctcgtgaccttgggcctagtgcggcgcgagcatcggctcttggctcccctctaagctcatcatggtctaagtggggatctccttcggggacaccagattggggcataaatggtgaagaattgggtaagctccggcgctcatcgtccttcgagctgaggtctggtggtgacgaccctgatctctcttgggtgcatacactggtcaaggaatctccaccggag

SEQ ID NO: 312842 - DNA, 275 bp, Zea mays
acttcatcgagatcgacctctccgaggagtccccttcctcttcatccggaggaggaggcgcgggcgaccccgccacggttcaggcgcagatggggtcgcggcgcctggaggacgccatccatggggtgctcgtgcggcgggcggcgcctgaatggctccccttcgtgccgggggcatcctactgggtcccgccgttgccgcgggcgctcggggtggcggacttctcagctcggctatgcacatcacgaggggcgccgaagcgatgacggaagaag

SEQ ID NO: 312843 - DNA, 142 bp, Zea mays
tgtcgaccacgttccggctggccttgatcaccgtcctccacatgccgtctccgacgaacatcaggttcgtcttctcgctcccgacctccacgttctcgaagtagccgcccgccttgatgtagatcacgaaccgcgtctcgct

SEQ ID NO: 312844 - DNA, 125 bp, Zea mays
gctctccaagagttcttcttgtttaggcaaaggcaaaagcaggagcaaaaatgtttcgttggcgaatgcgagctcgtggacgcttcctgaccaaccgaagctccccaatgggaagccggtggctg

SEQ ID NO: 312845 - DNA, 320 bp, Zea mays
gcgtgcgcgcgtgcgtgagctcggggttgggctcgggctttgtttgcgagctcctcgtcggtgcgtcggtggctgcaccggccgggggcaccgcgctcgcaggggctggccgacgagacggcagcagtggcggaccgtgaccgcagcggcgtctgcggcggcgcccacgccgcctgcgggcagcagcagcagcacggagcaggcgggcgcccggtgggtgagcaggtgaagggcgtgctccacgacaaggggccgacggcgtcgcaggcgctggcggtggcggcgctgttcccgctgggcgggctgctgctggtgctgtc

SEQ ID NO: 312846 - DNA, 239 bp, Zea mays
caaccacttactctcgtgcgctctccgtgggagcgaggactcgcggccggcggcagcggcaggttctcctagatctccgggtaagcggtgaaagaagaggaggtgttggaggaattagttccgaatctttctccattacgattttcgtggcgtcgagcatcatcagtaacaaatggctgacggtgaggacattcagccccttgtttgtgacaatggaactggcatggtcaaggctggtt

SEQ ID NO: 312847 - DNA, 304 bp, Zea mays
gcaattgatgggcataattggatgtatcccgtagcttatgggatttttgacaaggagaacgactctaattggatttggtttatgatgcaattgaagatagctattggtacaccacatggattgacaatccacaccgatgcttgcaaaggtttggcaaatgcagtcctcagggtcttccaaggtgcagctgagcatagagagtgttttagacacctcatgaagaatttcagaaaaaagtaccagggtgatgtgttaaagtacatgtggccttgtgcttgggcatgcacacctcgtaggcaccagg

SEQ ID NO: 312848 - DNA, 176 bp, Zea mays
agcgtcgcctacgccttcgtcgccgccttcgggtcctcctccctcggcctcggctactcgctcgtcctcagcgaaggggttcttggccccggcaatcccttcggtctcggcgcgcgctggcggcatcttcctaccgctcgtcaagtctctctgtgaggcatgcggctcgcgcgccg

SEQ ID NO: 312849 - DNA, 324 bp, Zea mays
gggcactgggctaggtccgttggcaacagccgccacactgctccgctctgctctctggaagcattgcccggctcgaagtggccatgccggcaccggggacgcagctgggtcggctccttgttggcggcctctggctcctggccgcgttgctgcagcgggacgctgcggcggcagtggccgccgtggatgggcggcgcgccatcgcagcgactggggagaacttcgtgtgcgcgacattggactggtggccgccggacaagtgcgactatggcacctgcccctggggccgcgccggcctgctcaacctggatctctccaacaagg

SEQ ID NO: 312850 - DNA, 324 bp, Zea mays
gcaagcaatccgaattctctgcgatttctctagatctcgaccacccctactagttttggttcctcccttcggtccaaaaaaccgttcctagtggcaatggcgaagagcgagggtccggcgatcgggatcgacctcggcaccacctactcgtgcgtcggcgtgtggcagcacgaccgggtggagatcatcgccaacgaccaggggaaccgcaccacgccgtcctatgtcggcttcaccgacaccgagcggctcatgggcgacgctacaaacaagtaggtcgcaatgaaccccaccaacaccgtcttcgatgccaagcggttgatc

SEQ ID NO: 312851 - DNA, 103 bp, Zea mays
gggcagcgtgcgcacgtggggtacctagctcgctctgctagcctaccatggctgatgtacaccggggtgcgaccggaagttgccgggggctacgccgacctcc

SEQ ID NO: 312852 - DNA, 308 bp, Zea mays
gtactcgttctcttccgcatcctcctcctcgtcaactccaatcgtcttcaacccttcaacaaaaaccaggccaacttcccacaacaacatttcttctcatccaaccgccccgtaagatcacagagaagggggatggcgagcggcggggcggtgagggatgtgggctcgccggcggagctggaggcggcggtggccggggcgcgggcggtggccgtgcacttctgggcgtcctggtgcgaagcgtccaagcagatggacgaagtcttcgcgcaactcgacgtcgaccttccccacgcggccttcctgcg

SEQ ID NO: 312853 - DNA, 304 bp, Zea mays
gtgaatttcagactgtccgtgccattccaattctctgatgcggcgtctggtttggaacctcgtgtgtcgttacaggagaccgcgaacggttggaggcagcggcggtcagacgacgcagacggctcgtcgccgttcttcgctctgggcgacctctaggactcgttcaaggagtgcagcgcgtacggcacggctgtgccccttgctctgaactgctgcagcgacggcgtcgttcagtactacgtcccctacctgtctgcaatccagctttacggagccctcagcaggcacatcggctcttcgagga

SEQ ID NO: 312854 - DNA, 262 bp, Zea mays
agggagggtcgtggccatgattatgacaccgtttctggatcaaagcgtccatatgcagatatggatgatgcgcctcggtatcaagaaattggtgttcgtcagtccaaggcacgcttggactatgacattggtggcagcagtgctcgctatggagatacatacaacgagacgcctggacgaccacatgcgggatatagcagtagtcggtctatccctggtcatgattcagcatatggtagcagccgtaatggcatgagttatg

SEQ ID NO: 312855 - DNA, 307 bp, Zea mays
atcagcggcaggagctctgggcagcgtgcgcacgtggggtacctagctcgctctgctagcctaccatggctgatcaccaccggggtgcgacgggaggtggcgggggctacggcgacctccagcgcgggggcggcatgcacggcgaggcgcacagcagcagaagcagggcgccatgatgacggcgctcaaggccgcgacggccgcgaccttcggcgggtcgatgctggtgctgtccgggctgatcctggccggcaccgtgatcgcgctcacggtggccacccccgtgctggtgatcttcagcacggtg

SEQ ID NO: 312856 - DNA, 169 bp, Zea mays
taggcgtgcaaaaccccgcaaccttttcgacaggatcctgctggcgctagagtcttctcccggacgcagaaactctttgcttccgcatggatcgcgatgcttgtatgggtgcgctggcctgcagcgaggtgaggagactgcggcgccgggcggttgcatggtggacgat

SEQ ID NO: 312857 - DNA, 220 bp, Zea mays
ctcggcgactcccggaccgtcctcgggaagaaggccggccgcgctggccagatcgccgcggacagttgtccagcgagcacaatgccaaccaggaggctgtcaggcaggagatcatggcgcaacacccagatgatgctcagattgttgcgctcaagcatggggtctggagagtgaggggcctcatacaggtgtctagatcaatcggtgatgtatacctgaa

SEQ ID NO: 312858 - DNA, 317 bp, Zea mays
ccgccccgctccttgcctccgatccccaattcctccttcggatctcgcattcagcgcagcaggtgtgaaggaagggggacgcggaggaagatggggctcgcgttcgggaagctcttcagccggctcttcgccaagaaggagatgcggatcctcatggtcggcctcgacgccgccgagatgagctccacaggatgctgaacgaggatgagctacgtgatgctgtgctgcttgtttttgccaacaagcaagatcttcccaatgccatgaatgctgctgagattactgacaagcttggattacactccctgcgccacgac

SEQ ID NO: 312859 - DNA, 311 bp, Zea mays
acatggttgatgggtgggttggacatgcatagtccagcagcatggggcctgagtgttggagcatctggttggggtcatcagggtgacacttctacttcactcatgcctggggtgcaaactgctggaccaagttctacgggaggagccgacattcaacctctgcaggttgacgagaatgtgagctttaaagatataggtggactttcggagtacattgatgctctaaaggaaatggttttctttccattattgtatccagatttttttgcaaactatcacatcactcctcgcagaggtggtctgctttgtgg

SEQ ID NO: 312860 - DNA, 300 bp, Zea mays
ggagaatggagctgcgattggctgccactcctgccagaacaaaaccctggaagagaggcctccggagtactccttccgcaggcactcagggtggccttccagttcatcacatcctcacctcacaagccagtagtcttctacagaacgtgggctccctcgcattttgagaacggcgagtggttcagcggcgggacttgcaacaggacggccccattcaagccaggggaggccggtgacagagaatgggacaatagtatgtggaggattgagagagaagagtttcacaacgcggtgcctatc

SEQ ID NO: 312861 - DNA, 185 bp, Zea mays
ataaatttgacaaggtaaaaccggtacgtgacaccattatacatgcaattcagctgtggaaagctattccagggtctcatactcctgaaccatcagaagctgggtcatcaacaaaagagcactactttggagacaatcatgacgccagaagtatacatgatggaggatcaagagatacttctttt

SEQ ID NO: 312862 - DNA, 170 bp, Zea mays
gaactcagatgacccagacattcatagcatcagtgaccgcatgatcaagccgacatcgatcgctaagcatgcggcgaactgggaaggggtggactacctgatcttcaacacttacatctggtggatgaacacgccacagatgaaaactctgcacggtggatctttttcga

SEQ ID NO: 312863 - DNA, 283 bp, Zea mays
tgctgtcccgacgccaagcgccgccggacgttcgtcgatagctcgatgcaggaggccattggcgcgcagtacatgcagaggcatctgcccaagctggagccatttctgcgcagagtcgtgcaggaggaagtgcaaaatgttcttatccgacacatcgattccgcacacaggttagcctctactacgcactgattgctaagctgctggatcactatttaacgttcagactgccgagtctccgtggtcgtggactacaacatggctaaatgcaatgcatgctggt

SEQ ID NO: 312864 - DNA, 314 bp, Zea mays
aagcatcagcggcaggagctctgggcagcgtgcgcacgtggggtacctagctcgctctgctagcctaccatggctgatcaccaccggggcgcgacgggaggtggcgggggctacggcgacctccagcgcgggggcggcatgcacggcgaggcgcacagcagcagaagcagggcgccatgatgacggcgctcaaggccgcgacggccgcgaccttcggcgggtcgatgctggtgctgtccgggctgatcctggccggcaccgtgatcgcgctcacggtggccacccccgtgctggtgatcttcagcccggtgctg

SEQ ID NO: 312865 - DNA, 310 bp, Zea mays
attatgcgtcccctcttgccaagaggtgcatggctgtctaccagacatacataaactccatgaatgaaaggataaggaaccagtttgcgcaatccaacccgttccatttcaagcacatcgagtccttgaatagcatcgataacttccacgatgtgggtccatcagtggtgatggctagtccaagtggcctccagagtggtctctccaggcagctttttgataagtggtgcacagataagaggaatgcatgtgttattccaggttacgttgtggaggggaccttgcgaagaccattatcaacgaccaagag

SEQ ID NO: 312866 - DNA, 305 bp, Zea mays
gtttcgtaactggtgagggactgagggtctcggagtggattgatttgggattctgttcgaagatttgcagaggggggcaatggcgaccgcggggaaggtgatcaagtgcaaagctgcggtggcatgggaggccggcaagccactgtcgatcgaggaggtggaggtagcgcctccgcaggccatggaggtgcgcgtcaagatcctcttcacctcgctctgccacaccgacgtctacttctgggaggccaaggtatctaatcagccatcccatttgtgatctttgtcagtagatatgatacaacaac

SEQ ID NO: 312867 - DNA, 311 bp, Zea mays
ggattctaatcccctcaagaaaatgactggcttcaatgccttttggtttacgcaccacctatttgttattgtgtatgcactgctcgttgtccatgggatctgcttatatctaagcaggaaatggtataagaaaacggtaaacatatatgtaccctcattggctagagagtgtctaatttctgaatgttagtgcttacatagcatttctaccattgcagacctggatgtaccttgctgtccctgtgctcttgtatgtaagtgagcgcattcttcggctatttaggagccatgacgctgttaggattcagaag

SEQ ID NO: 312868 - DNA, 99 bp, Zea mays
gtccgtgtgacaaagaagaacgaagtccgcgcacggataaagaagatgctcgagactccagggccgtacctcttggatataatcgtcccacaccaggag

SEQ ID NO: 312869 - DNA, 303 bp, Zea mays
  unsure (1)..(303): unsure at all n locations
agaatcgatcttcctctcacaaaagcactttggttagcagccaccaactcctgtaggtgaggacccaacctattagcaagcattttggtgaccaacttagcaaaactatgaattaagctaattggtctaaagtcccttgctgtcaaggcatcaattttcttaggaagaagagctataaaagcagaattcagcatccccaacttgtaagcatttccttgatgaagcgaatttatagctgccaacaaatctgacttactaatatgccaacaacgcttatanaacctcctgtanaccatcaggaca

SEQ ID NO: 312870 - DNA, 304 bp, Zea mays
  unsure (1)..(304): unsure at all n locations
actgattgttctggcaactgtttgtcatccttagttccatgtggctgtgcaagaatgacggggggcgaattcccctatacaccagagggcctgcttaagacagaattccttgatgaatgcacctcagttaatcatttcccacaagagcatcataggttctactgtacagtttgccctcttgaaagatctaagaataaagcctcacctggtccgtgtaaaggccatcttatgagaaaattcattaaagaatgctggagtanatgtggatgtggcatgcagtgtggaaatcgtgtgattcagcgtg

SEQ ID NO: 312871 - DNA, 307 bp, Zea mays
gtgcggtgccttcgttcgctttgttggtcgcgggtttgatataatttgggtgtgcagatgagcgcggacgcgagcgccgcgatggagaagatccgcgccgcggtctgctcaagacgcaggggctcatcgccggacagtgggtcgacgcatacgatggcaagaccatcgaggtgcaaaatccagcaactggtgaggtccttgcaaacgtgtcctttatgggcagcagagaaacatctgatgctattgcttctgctcacagtacattctattcttggagtaaactcactgcaagtgagagaggcaaggc

SEQ ID NO: 312872 - DNA, 307 bp, Zea mays
ctccctttccccttccctccctccctctccccgcgggccgccagaggcaatttcgccctcgattcgaccccgattcgtccgcccgcgaccgggattccctccgccaagcgcggatctgaacgctgcgctccgtgtcgccgctcgaatccgccatgaagggggccaaatccaagggcgccgccaaggccgatgccaagctggcggtgaagagcaagggggcggagaagcccgccaagggcaggaaagggaaggccggcaaggaccccaacaagcctaagagggctcccagcgctttcttcgtgttcat

SEQ ID NO: 312873 - DNA, 318 bp, Zea mays
cccgccgtgcgccccgacctggtccggaagcgagacgacaggtacggcctctccacggaggagctccgcgccgctagggccgacgtcgaggctcccgccgaggagcacccggaccaggccgactactggctccgccaccgcaagggcttcgcggtggacgtcgtgccgcacgagatgaagcgtcacgcgccgtttccgtgagccgtgaccaactggtgttttacagtggcgcatgtgtaagacattgcatcgtagattgcaatgtttatggagtagtttgaatatgggtatggatagatgtctaataaaaccaaacga

SEQ ID NO: 312874 - DNA, 304 bp, Zea mays
ggcgcggcgcagatgggctcgggcatcgcccagctcgccgccgccggacctgtgccgtacttctcctcgacgccgaccccactgccctctcccgtgccgtcatctccatctccgcctccctacggcgcctcgccgccaagggccagctctcccaggatctcagggacgcggatcttgtgatcgaggccgtcgtggagaacgaagctgtcaagaagaagctattcgtggagctggataaggtcacgaagccctcggccatcctcgcctccaacacgagctccatctccataacccgcctggcttc

SEQ ID NO: 312875 - DNA, 299 bp, Zea mays
  unsure (1)..(299): unsure at all n locations
ggagaagatggctgagaaactcaagctgacagaatctctccttgaaagcaaaaaccttgaagttaaaaagataaatgatgagagaaaggctgcattggctgcccagtttgcagcagaagcaactttgcggagagtacatgcagcccagaaagatgatgacatgccaccaattgaagccattcttgcaccacttgaagctgagctanagctttctcgccaggagattgcaaatctccaggatgacaacagagctttggatcgtctaacaaaacaaaaggaggcagctctgctagaagcag

SEQ ID NO: 312876 - DNA, 173 bp, Zea mays
gtggtggtggcggcggctacggcggtggcaaccgtggcggcggctacggcaactccgacgggaactggaggaactgagcggtggggcccgcgcggccaagttatcctgttcgctaccgtgttgtttaccctagtccagagtgtttatcttcgttcgtctcgtgtttgttgttg

SEQ ID NO: 312877 - DNA, 281 bp, Zea mays
gcgccgcgcacgttcctgcagcccagccactacgacgccgacgaggtgatgttcgtgaaggaaggcgagggcgtcatcgtgctgctccgcggcgggaagaggaacagatccgggagctgagcaggtcctgctcacgtggtggccgcggcagccgcggcgagggtggcgactcgggttcttcttcttcttccaagtgggagatcaaaccgtccagcctcacggacaagaagccgacccattccaacagccacggcaggcactacgagatcaccggcgacgag

SEQ ID NO: 312878 - DNA, 235 bp, Zea mays
ctgcggcggacacggaggcgaaggaggaggagcagcagcagcaggcggcgccgaggagcggcatcccactcagtgcttgcaaccatggctaggggattgaagaagcacttgaagaggctcaatgcgcccaagcattggatgctcgacaagcttggcggagcttttgctcccaagccatcttctggacctcacaagtccagggagtgccttcctctgaatctcatcatcaggaaca

SEQ ID NO: 312879 - DNA, 287 bp, Zea mays
gaggtgatcaatgcgtgtaacgtgtaattgttctcgggcagaggttttcacgcataaatgtcctctgccgggaaaagcccctgcgcctcctctgggagctcatcaggctggtactgaagctgttcatagttcagctgtctagcggcttcgtacagcgcgactccgacgctgacggagaggttcaggcaccggacgtaggtctccaccatgggaatccggagggtcccgccgcctaggccttctctgcagcaatcctcgagggcttgctgaggcaacccttttgtttc

SEQ ID NO: 312880 - DNA, 275 bp, Zea mays
cgaaaaccaaatggatttctcagcttaaggagccatatctggacagatactgataataatcgtgcagggatgctcccttttgtctttgacgactcatttgggattttatgcaaggaaagcttccacaggctcctggggagttgcccactcttaacgattgggagaaccatctaacaacaatttttcctgaggttaggctaaagaggtaccttgagatgagaggtgctgatggtggccatggaggagattgtgtgcgttgcctgcattttgggttg

SEQ ID NO: 312881 - DNA, 306 bp, Zea mays
cgccgacctcaccggcctccccatgtccaacgcctccctcctcgacgaggccaccgccgccgccgaggccatggccatgtgcagcgccatcctcaggggcaagaagaggactttcctcatcgcctccaactgccaccagcaacatctgctttgattctgccaatttcctacacatatatagccatgatgggctcacaggggctcactgatgcttcgaagatcgcgatcttgaatgcaaactacatggcaaaacgtctagagaaacactacccagttctgttccgtggagtcaacggaactgttgcc

SEQ ID NO: 312882 - DNA, 303 bp, Zea mays
tctgccccggtgggaggaacccggaatcgttcctgtcgagcttcagcaagagcatccagagagctgcatacaaggtacaacacacgtgctacgtgtgctgctgctgctgctgcaacgtactgtcgtcctgtgtgtgtgctcacatcgatcgcgttgcgcgtgcagacctcgagcgaccgtctggagaggctgttcgggaggcatgggcaggacaaggggatcatcgtgctcgccacggaggagcagacccgcgatctgcggcgccacgcctcggagggcggccacggcccgcactggctcctg

SEQ ID NO: 312883 - DNA, 290 bp, Zea mays
ctcaaaagttttgcacggcgcgttgtgaagagattgatccagctttccccattgccacaaaaggatagtgccatgggacaatttaaaaaggagtttggtgaatcagatgacgaggggatacctgaacatagcacaaaacctgcagactttgacctcctttttgccggagacattgatgaccactttgtttttggcgtaaagttaacaaagaaatctattaagctgtacagtaacttctattcttctgatataatagttgcatctcctttagcgctgaaacgtaaaattga

SEQ ID NO: 312884 - DNA, 221 bp, Zea mays
ctccctagcagcagatcctcgtgcaacgcaaagcgctagccttcctactgtcccgatggcccgcacgaagcagacggcgaggaagtccactggcggcaaggcgccaaggaagcagctggccaccaaggcggcgcgcaagtctgccccggcgaccggcggagtgaagaagccccaccgtttccgccccggcaccgtcgcgctccgggagatccgcaagtacc

SEQ ID NO: 312885 - DNA, 217 bp, Zea mays
gtgatcacttctggaactctcagcccaatagatctttaccctcgtctcttgaattttaatcctgtcataagcagaagcttcaccatgtccttaacaagagattgtatttgtcccatggtcttgacccgaggaagtgatcagctacctgtgagtacaaagttcgatatgcgtagtgatcctggtgttgtgaggaattatggccgcctcttgctggaaa

SEQ ID NO: 312886 - DNA, 220 bp, Zea mays
cgacgagggtttggaaccttttgatggggaaatcagccgagtcttatgggactgatgttgaaaaggagagatggtggcagcaagaaagagaagtgtttcaaagccgtgctaattcgtttatagcacgcatgcgacttgttcaaggggacaggcgcttttctccttggaaaggatctgtagtcgattctgtagtaggagtgttcctcactcagaatgtagc

SEQ ID NO: 312887 - DNA, 222 bp, Zea mays
cgctgcctccgcctctcgagtctcgtccacccgtcatcctcctagctcctctactcgccagtcgccatgggcaagattacgatcggaatcaacggcttcggaaggatcggcaggctcgtggccagggtcgccctccagagcgaggatgtcgagctcgtcgccgtcaacgaccccttcatcaccacggactacatgacctacatgttcaagtacgacaccgtc

SEQ ID NO: 312888 - DNA, 224 bp, Zea mays
tagaaggcctttctcttagttctgatatggtctacatcagacagagtgctggacgtctcttacgggcactatttgagattgttttgaagaggggatgggctcaactagcggagaaagcactgaatctttgcaagatggttgataaacaaatgtggagtgtccaaactcccttgaggcagtttactggaattcctaaggagatcttgatgaaacttgagaagaag

SEQ ID NO: 312889 - DNA, 217 bp, Zea mays
gtgctggcttctcgtccccctcttatcaagtcctcctcgggttagggttccttagggttttgtggaggggcgatggcggcggctgatgtggagtaccgttgcttcgtcggcggacttgcctgttccaccatcaacgagtcgctggaggatgcgttcgcctcctacggcgagatcctcgagtccaaggtcatcaccgaccggaagacgtgaacgtccc

SEQ ID NO: 312890 - DNA, 286 bp, Zea mays
gccatacggatgccgatgctcagagtgtccaacttcgtcgacgcatcatcctcattatccgatgggcagggagctggtgtcagctacgcgatcatggtcttggtccttccggctccagttccgaccactaagaatcacaggactagaggacccagaggagaaggaggagcacgagagtggagcaggcaggagctggagatcgtggaggttgcggcggaccagttagccgtggcgctgtcgcacgcggcggtgctgaaggagtggcagctgactcggcacaagctgg

SEQ ID NO: 312891 - DNA, 295 bp, Zea mays
acgagatctatatgaccttccgttctcgtgttggagtgcctgatcacatggacgatgatctgtgtttcaccgttcttcgtaacaacggtgataagaaggttcgcacggcagaggagattgctctcatggctgaatgcaacatgaaactcatgatcgccacgagtatcatggaagagtgtttcctgcctattctagatcccaggacagggatagacattattccctccatattgtataactggaggtctgatttacatttcaattacaaggggttctatacagtagtcttggaaag

SEQ ID NO: 312892 - DNA, 267 bp, Zea mays
gttggaagctggaaaacttggatgctatgaatggtggggtggttggggtatttatagccccaaccaccaaacttgaccgttggtggaggctgtctgtcgtatggtgcaccggacagtccggtgcacaccggacatgtccggtgcgacagccacgtcaagtaatagccgttgggtcaaccgttggagctctgtctctgggcccgccttgatgtccggtggcgcaccggacatgcactgtagagtgtccggagcgcctgctcccgcgtg

SEQ ID NO: 312893 - DNA, 276 bp, Zea mays
ctagttctaggtcgcgagcagccgctccgatctagaacctgctcgaggctctgggcagggttcgcacgtagggtacctagctcgctctgctagcctaacatggctgatcacgaccggggtgcgacgggaggtagcgggggctacggcgacctctagcgcgggggcagcatgcagtgctaggcgcacagcatcataagcagggtgcgatgatgacggcgctcaaggccgcgacggccgcgaccttcggcgggtctatgctgggtgtgtccgcgctga

SEQ ID NO: 312894 - DNA, 295 bp, Zea mays
gtcttaggttattatagaagttaaaatgttattccaatgaggcaatgactactcacaatggaatatcaccttgcttgttggattatttacggtgaagacttttagatatagtttgaactgtacctcatttatagcgtatttacataaatgtgatacccatctgattgttgtgatttttgatgtgtaaggtatcctcctggtcatggtgatgtgtttccttctttgaataacagcggaaaacttgacatcttattggctcagggcaaggagtatgtctttgttgcaaactcagaca

SEQ ID NO: 312895 - DNA, 281 bp, Zea mays
gcagcagaagcactgcgcggcattgcagcgatcgagcgggaggcatttggggcatggtggtcgccaacggcgctcggatctagaggcccgcacgggcggttggtctccgcccgcctcgtcggtgttggtgtcgttggcgtgtggagccgtctcggtgggagcagcggggagggagcggagatggcggccaacaaggggatggtggcgggctcgcacaaccgcaacgagttcgtcatgatccgccacgacggcgatgcgccgggctcggctaagcccacaaa

SEQ ID NO: 312896 - DNA, 284 bp, Zea mays
cttactatgtaactaccccatcaagtttggctgatgtcctagcaaatccattccatgcactgttttatgtggtcttcatgctgtcagcctgtgctctgttctcaaagacatggattgaagtttctggttcatcagcaaaggatgttgctaagcagctcaagctacagtactctgtgaggacgccaacagctttacactgcagccgaacaggcccgaatgccaggctgaggaacaacaaatggtgatgccaggccatcgtgagtcgaacttgcagaaggaactta

SEQ ID NO: 312897 - DNA, 300 bp, Zea mays
ctcaagcatcagcggcaggagctctgggcagcgtgcgcacgtggggtacctagctcgctctgctagcctaccatggctgatcaccaccggggtgcgacgggaggtggcgggggctacggcgacctccagcgcgggggcggcatgcacggcgaggcgtacagcagcagaagcagggcgccatgatgacggcgctcaaggccgcgacggccgcgaccttcggcgggtcgatgctggtgctgtccgggctgatcctggccggcaccgtgatcgcgctcacggtggccacccccgtgctggtga

SEQ ID NO: 312898 - DNA, 315 bp, Zea mays
gcaccatggtagttggaatgttattacagaatcaagcagtaatagcatagaactgttcactctgtatccggccgctgggaattgtatatgcgcctacttcagaaagcttttattggtctgatctgctggtgcaattggtgcttgtattggtagtcctgctgatctggcactcattagaatgcaagccgattcgaccctgccagttgcacaacgacgcaactataagaatgctttccatgcactctaccgtatcagtggtgatgagggagtccttgcgctttggaagggtgcaggtccaactgtggtgagagctat

SEQ ID NO: 312899 - DNA, 303 bp, Zea mays
caggaagaagcgtacgtgtggtttggatctgtgttccctttggcttgtgacgtggtgaatgctcgattcacattcgaagctctcactgccaccacagctaacaggctgcactaccctgcctatgacaggttcctgaaagagatggataagtccttcaagttcttccaagacttgccaactccgactggagttgaattcgctgaggatgagttcattttgcacatggagggcacggcagggacacagagagtggtgaggcacattggaaccactagctggccaggtcgagtgactctgacgaac

SEQ ID NO: 312900 - DNA, 302 bp, Zea mays
gcgcgggccaagcggcggctggtggaggtccctacaccgcgacgctggcgcacacggccaacgcgctcctggcagcgcgcgtctctgccgtggccgtggctgcgccaccgggccactggatcggcgccggcggctctatgatcctcgagtccgcaagcactacatcggcatggtgaacatgctcgacatccttgcccacatcgccgaggccagcgacgacgacgaggcggtcgatctcgaccgccggattgccgtgccggtgtcctccgtcatcggacactccctcgagggcctcactctgt

SEQ ID NO: 312901 - DNA, 300 bp, Zea mays
ctggcgagggaggcgtgtttaggggggtggcgaccgaagctagacgccgagctcggcagcgttttgcgtgattgagcgaaggacgtacgacgacgcggacgcaccgtcaaagtctacaggctgcgcaatccctttctccctcttatccccaaggcgaggagctgagggaggggccttctgctgctgttcttgtttccccgctctccaagatgtcgtccccgagcaagcgccgcgagatggaccttatgaagctgatgatgagcgactacaaggtggagatggtgaacgatgggatgcagg

SEQ ID NO: 312902 - DNA, 291 bp, Zea mays
ccgcgcctctacatttcttctctctctgctcctccgcctccgcctccgcctgatccatccaagacagggatcgccatgtcggactcggaggagcaccacttcgaatcgaaggccgacgctggggcgtccaagacctacccgcagcaggctggcaccgtccgtaagaacggcttcatcgtcatcaagaaccgtccctgcaaggttgtggaggtttctacctccaagactggtaagcatggccacgccaaatgccactttgtcgccatagacatattcaatgggaaaaagctt

SEQ ID NO: 312903 - DNA, 136 bp, Zea mays
ccccagacaacactcaccgatagcaagtagcgccgccgacgtttcgagagcagagtatccaagctagccaagcgcgcacctcggtgacctagctagctacctagctagttcaggcgacgatatggcgtctggtcag

SEQ ID NO: 312904 - DNA, 308 bp, Zea mays
agaagatcctcatcgacatctttcccgcggacaggaagacggaccaaatgccaggaggattggcaggctttgcgagtatgttgctagaaatcctcatcgcgtgccaaagatcacagcttacttggcgaggacgtgttacatggagttgagaaatgagcagtatgacattgtgaaagttgttgtgctaatataccgcagctattggtctcttgtaatgaacaaatgccgttactggcaaatagtttattaagcatcatacaaacacttttggatcaatcaaggcaggatgacatgtgcatcattggctg

SEQ ID NO: 312905 - DNA, 172 bp, Zea mays
ggcgcggcgatgaagtcgccggagctgcaggcgtcggtgatcagcgacctggtcctgctgtcctgcgtcggcctccgctccactctcgtccacggcggcgtgctcgagatcaactactggctggcgcgcgtcggcgtggagcctcagttccgcaacgggctccgcgtcaccg

SEQ ID NO: 312906 - DNA, 190 bp, Zea mays
cacagttaaaagaaacactgaagtcgctctgatcaatctgtataccacctgcaggttgtctacatcttggatcaagtgcgcgctatggagaacgaaatgctgctgaggatcaagcagtgtggtcttgacatcacgccgaagatccttattgtcaccaggttgctccctgatgcaactggcaccacctgtg

SEQ ID NO: 312907 - DNA, 157 bp, Zea mays
  unsure (1)..(157): unsure at all n locations
atcagcggcaggagctctgggcagcgtgcgcacgtggggtacctagctcgctctgctagcctaccatggctgatcaccaccggggtgcgacgggaaatggcgngggctacggcgacctccancgcnnaggcggcatgcacggcgangcgcacagcag

SEQ ID NO: 312908 - DNA, 210 bp, Zea mays
gtagtcgtatctgtatgactgtatcccagcaaatagcttaccagtacgcaaagaaggtagcgagactggcgctagtagcgaggatggtgggaagcctgcatgatgtcgcggcgagagccagggatggcggctcgccagacgttctggttgttgccggggacgttgcgaaaccagaggattgccggaggtttgtgcaggccacagttgaac

SEQ ID NO: 312909 - DNA, 193 bp, Zea mays
ctcaagcatcagcggcaggagctctgggcagcgtgcgcacgtggggtacctagctcgctctgctagcctaccatggctgatcaccaccggggtgcgacgggaggtggcgggggctacggcgacctccagcgcgggggcggcatgcacggcgaggcgcacagcagcagaagcagggcgccatgatgactgcgct

SEQ ID NO: 312910 - DNA, 200 bp, Zea mays
gtgtggcagtatgatgcagcagatgtctcgtgcattggaacatgaacagtttggtgcatgtaaacacggaagcccaaacagtccttcaacatgctttggtacacatcaaagatgcttctggcagctattgatgaaagtcaccggggaacttatgattttatctaccagccaattgactttaagaataagtgcaatgttgg

SEQ ID NO: 312911 - DNA, 195 bp, Zea mays
cgcccgttgttgtatcttgtcactgatcagtgttgtttgctttgctttgccgtgctaatggcgcacgctccatgtggccgttcgtcgcagagggtgttccacttcggcaagggcaagagcgagggcaacaagaacatgaaggagctggtgagagggtcctacttctgtattcaattcgcttgctttgctactgca

SEQ ID NO: 312912 - DNA, 183 bp, Zea mays
gtttgacaaagattctattgagagtgatgatagatctcttgaagagctaagctgggagacactagaacttcttgtggtacctcatatattcagcatcagacgaagcacatggagatcaaccttcacttcgtccgtgagcgtgtcgccgacggtgatgttcgcattctcagcatcccgaccact

SEQ ID NO: 312913 - DNA, 312 bp, Zea mays
gcaactggtgtggcccaataatatggtagagctagagcttgaactctggtttcgaaagtggcataattcccgcctcgccagaggagtacccaattttgggactcaatcttctgaggctgttggttcagaatagaattgccgagttccacactgagctggagcttttacctgtcaaggcactcgagcatccttgcatcaagcatgctgtagagcttgagcaatccttcatggagggtgcctacaaccgagtgttaagtgctcggcaggctgtgccacatgagacctacgtttacttcatcgaccttctcgcca

SEQ ID NO: 312914 - DNA, 264 bp, Zea mays
aatcacgcgtcctaacacgcgtccgcggacgcgtgggcagtatgagctgcggccaagatggcctcttggtgaggaatattcagaaggaagaagatttgcacgatcattgaagaccgctcgagtccatccatcactaacgtccatgatacagggctcgcttcaaaagtagttgagttggaagttggaaactaattattggtctcaactgctttatgcagttgagtttcccgtcttctagttttggggtcacaaatcagctgcttt

SEQ ID NO: 312915 - DNA, 233 bp, Zea mays
gttccctcaacactactcgtcgatctcagaaaataatctccctgcggaactcttccctcagtataccaccgtcgagtacatatcttcaactgaaactggtcctatagttccaccagttttcatttttgttgtagatacttgcatgattgaagaagaaattggttatttgaagtctgcactggcacaagctgttgagctattgccagataattctcttgttggattcattacgt

SEQ ID NO: 312916 - DNA, 237 bp, Zea mays
atcacgcgtccgcggacgcgtgggggttgtttgacgctatgaaggaagcggggatgcagcctaatcagtatacatacaatgtgctgatgagcggtcactgtcagagagatgatgtcaacagtgcagttgtgttgtaccaggaattgctgaagagtggcctgaatccaaatgctgttatctttacaaccctgattgacggtttctgtaaagcgaagagtttcagtgaagcaaaaggta

SEQ ID NO: 312917 - DNA, 277 bp, Zea mays
  unsure (1)..(277): unsure at all n locations
cggacgctggcgagacaggttcacctttctgagccctttgaaccgtcagttttccttcgacttcagcctgacgtacgttcgtgctcggatgatctgctcgcacctcggnaagctctcgttgctgctcggtgccgtcgtttcctcgggcgtcatgtggccactcatcggcaagcagaagggcaactggtatgcggcagatgcatctcagcataggatgccacgcatctacgggtacaaggccttgctttgcattgcccttttcgtgggagacgtctct

SEQ ID NO: 312918 - DNA, 311 bp, Zea mays
tgaaattaagaggaagcaactcctgagaaattgggcacttaattggcttgacttcacatggcaacctattgatgagatttactcctactttggaacaaagattgcaacatactttgcgttcctaggaatgtatacacgatggcttttcttcccagctgtttttggactgacaactcaactaatagattttgggtcattgcagtggttggttcttcctgctttctttatctttgttatttcttgggccgtcttctttctgcaattttggaaaaggaagaattcagcacttcttgcaagatcgggtattaatt

SEQ ID NO: 312919 - DNA, 323 bp, Zea mays
cccacgcgtccgcccacgcgtccgcccacgcgtccgtgcttaagcccctactttagtatggacattttcaattcagatccaacctaaaggcatgtacatatatagtctgataaggtagccgaacggatggtaacccctggcatgccgaactaacaagggaggttctcggtttacgcccccggaggcaggcaggaagggggcgtcggtctaacaggggaaaaggatgggggacacgtcgcggcgtaccggttctcggtgaggtccacttgctcatcttctctcgcacacagcactgctcttgctcacttcccatcggagcaccg

SEQ ID NO: 312920 - DNA, 249 bp, Zea mays
cttcatggaatgctgaagccacatcttcttcgaagattcaagaaggatgttatgaaagaacttcctccaaaaaaggaattgattctacgagttgaattgacaagaaaacagaaggagtctataagccatctcacgagaattataatgtacccgcgaatggggaataatcctataacgtgaatgagtcgaactcgtgcatgatcagatgatgactgtctgactgcatcagagagttagagctcaatacag

SEQ ID NO: 312921 - DNA, 291 bp, Zea mays
gacaaggccaccaaggtctcccgagggtgctgcttcgtcatatgcccctcaagggaggaagctgacaaggcggtgaatgcctaccacaacaagcaaacgctctctggggcatcaagtcctttgcaagtaaaatatgctgatggggagttggagaggcttgaacataagcgtttcattggaatgcttccgaaaaatgttacagacactgagttgactgatttgttttccaaatatgggaatgtcacggatttgcaaattttgagaggttcacaacaaacaaacaaagctggc

SEQ ID NO: 312922 - DNA, 316 bp, Zea mays
cacaaatgctggtctggtaggatctgatggtccaactaattcaggaccatttgatattacattcatgtcatgcttgccaaacatgattgtcatgtcaccatctaatgaggatgaacttattgacatggtggcaacagctgcaatgattgatgacagacctatttgcttccgctatcctaggggtgccattgttgggactagtggaagtgtaacatatgggaatccatttgagattggtaaaggagagattcttgtcgagggaatagagatagcttttcttggctatggcgaggtggtccagagatgcttgattgct

SEQ ID NO: 312923 - DNA, 318 bp, Zea mays
gtttcttctctgtagttccagcgtaattttttctactttcaagtaattttactttgctgcatctgcgaactcgtgagatagttcagctacgtagcccccgtgaagatctcaagacctaccgataggaagtgccgtttgacactgtaaacagcagctgctgcactcagctgcaggtgttccatctctcgaccataacctttgtggtttggtcaggctggatctcccatctgcatctgctctgtgtttcagctgtggtgtgtgattaagatcgggtctctgagggactcttcagaaccgtcgtgctgttctcattgctga

SEQ ID NO: 312924 - DNA, 144 bp, Zea mays
cagaggcgaactgaatgtggcgatcaacggcttcggccgcatcggccggaacttcctccggtgctggcacggccgcgatgactcgtcgattgacgtcgtcgtcgtgaacgacagcggaggcgtcatgaacgcttcccacctcct

SEQ ID NO: 312925 - DNA, 304 bp, Zea mays
  unsure (1)..(304): unsure at all n locations
nccacgcgtccgcgacgcgtggcgactggancgcgacgcgtggggcaaaatctgcacgagagacagacgacgagatggccgatgcggagagccgccgccgccgcgcgccgacgggccgccataaccgactaccgcaagaagctgctcaactgcagggagctcgagtcgcgcgtcggcaccgtgagagaaagccttaaaaatgcaaagagggattttaccaagactgaagacgacttgaaatctctgcagagcgtggggcaaataattggagaggttctccgcctcttgataatgaacgctttat

SEQ ID NO: 312926 - DNA, 307 bp, Zea mays
  unsure (1)..(307): unsure at all n locations
cccacgcgtccgnccacgcgtccgcggacgcgtggggcaagccgcaaagttctatgtagctgaggtgctccttgcattggaatacctgcatatgcttgggattatataccgtgatcttaaaccagagaatgtcctcgttcgggaagatggccacatcatgctgtcggacttcgatctatctcttcgctgttcagtgagcctaacggtgatcaagtccgcaaatcctggcctagatgcaatgcggaggaacaatgcagcgtactgtggccagcctgcttgcatcgaaccatcctgcattcagcctcct

SEQ ID NO: 312927 - DNA, 316 bp, Zea mays
tggaaatctaaacttgtcaagagctatcggtattcttcactcgcttcttctcgttcgtacctgacaccttacctgatggtcttgcttgcatatgccaaatgccttttcaggagacatgaagttcaaacaaaacaagttcttgccccccgataagcaaatcctgactgcgaaccccgacataaacattgtcgagctatgtgatgacgacgaattcattgttttggcatgcgatggcatctgggactgcatgtcaagccagcagttggtcgatttcatccgcgagcatatagacacagaggaaagcctctcggcagta

SEQ ID NO: 312928 - DNA, 324 bp, Zea mays
cggacgcgtggcgagacgcgtgggctcgatggggcacagacatgtttacttatggatcatactcatatgtggctattgcggcttctggtgatgactacgacattttggccgaaagtgtgcatgatagagttttctttgctggggaggcaacaaataggcggtacccagctacaatgcatggagccctgcttagtgggtatagggaggctgctaacatcttaagggcagctagaaggagagcaaaaaatgtgtactcacctgagaaaatggatattaatgttgatgtagaagtgggtgttaatggtgaagtagaagatactgtta

SEQ ID NO: 312929 - DNA, 302 bp, Zea mays
gccacgcgtccgcacacgcgtcagccacgcgtcccgcacggtccgtcactcgtcgggaccatggggcggctgagagaagagctcagcttgttgagctagacgactagaaagtattgaaccctcgagctgttcatgtaccagagttttcattgttgatggcgtttgtggatccggacggggctcggctatggccctgccccttaggacgacagcagttctggtcctgagctcaattctggacaaaactattttccgtttccaccctttttgtatgtatagctttttgttaccactttaaatgc

SEQ ID NO: 312930 - DNA, 244 bp, Zea mays
gagaagggaatggatccagatgttgttgtccacaacacaatgattgaggggttgctgcgtgggcagaggcgacccgaggccgtgaagatgtttgagctgatgaaggcaaaggggcctccaccaaatgtgtggacttacacaatgttaatccgtgaccattgtaagcaggggaagatggacatggcaatggagtgctttgaggagatgcaggaggctaaatgccaaccagatgttgctacctata

SEQ ID NO: 312931 - DNA, 310 bp, Zea mays
cccagatcgagaacgaatacggcaacatcgactcggcgtacggggcgcccggaaaggcgtacatgcggtgggcggccgggatggccgtctcgctcgacaccggcgtgccctgggtcatgtgccagcaggccgacgcgccggaccccctcatcaacacctgcaacggcttctactgcgaccagttcacgcccaactccgccgccaagcccaagatgtggaccgagaactggagcggctggttcctctcgtttggcggcgcgtcccctaccgccccgtcgaggacctggccttcgccgtcgccaggttctac

SEQ ID NO: 312932 - DNA, 321 bp, Zea mays
  unsure (1)..(321): unsure at all n locations
aaacaatcttcagaatactctggggggctggatttctgacaagattgtggagtactttgcattgtatgcagaagcttgctttgcaaattttggagacagggtaaagcattggataacaatcaatgaacctctccaaactgcaatcaatggttatgggattggaatttttgcacctggaggatgccaaggtgaaactgctagatgttacttggctgcccatcaccanatcttggctcatgctgctgctgttgatgtttatagaagaaaattcaaggctgcacaaggtggtgaagtanggctgcgttgtgattgtgaatgggc

SEQ ID NO: 312933 - DNA, 313 bp, Zea mays
aacacgcgtccgcggacgcgtgggtttggtaccaagacagaatctgtttatattccacgtggtacacttcaggcaacctttcaacacaaaggatttgaagaaactcgacgtcttggcctccggaatgaaacggagcagatggtgcgtgtagtttctccagaaggcgagactggaatgctggttgtcgattcagtggtacctgaaggccctgcacataaacatttagaacctggtgatgttctagtacgcatcaatgaggaggttgtaactcagtttcttagattggagactttacttgatgatagtgttggca

SEQ ID NO: 312934 - DNA, 358 bp, Zea mays
cagtacggccggatccgggtcgccacgctcgaccacgcgtccgggacgctggcgtacgcgtgggcggacgcgtgggctcgctcggctacggctcctcgtgcacggcctggacgccgccggaaacgcgtcctacgccttcaacatgtacttccaggtgcagaaccaggtggagggcagctgctacttccagggcctcgccgtgcccacggcgcagaacccgtccacggacgcctgcaacttcaccatacagatcactccgtcggcagcggggagacgacgcgccgccgccgcgacagctctgctcctcgtggttcttcttactgccgtgcatgtcgcgccatgactgagcccgtgactc

SEQ ID NO: 312935 - DNA, 316 bp, Zea mays
gagctggtcagttatagatgatgccacacctgttcgttctagctacgaggaatcttcatccattgttgctgatctgaagaaattcagaactcagctgcttgcctttgacaaagcttggtgtgcttatctttaccattttgtggcatggaaagcaaaagatgctaaatcattagaggatgaactcattagggctgcatgcaagcttgagctgtcaatgattcaaacatgcaaaataactgaaggtgaatctgataacctgggtggtgatttgaaagccatccggaaacaggtcgcagaagaccagaaacttttaagg

SEQ ID NO: 312936 - DNA, 306 bp, Zea mays
  unsure (1)..(306): unsure at all n locations
cggacgcgtggcctccgcctgccgtcctgtcctgcgcccttactcctcggaccacccccacgncancaaaccccaaccccccattccgcactcccctctccctgccccgccgcgcttccttcgctcctaaagcggctgcgatcgcgctctgggcgctgccggtcggcttccgcttccaccccaccgacgaggagctcgtcagccactacctcaagggcaagatcaccggccagatcaactccgaggccgaggtcatccccgagatcgacatctgcaagtgcgagccgtgggacctcccaggtaagt

SEQ ID NO: 312937 - DNA, 273 bp, Zea mays
cggacgcgtggcggacgcgtggggacgtccaggcggcgctgcacgcgaacgtgaccaagatcggctacaatctggacgcactgcagcgatgtgatcaacacttggaacgacgccgccttctccaccctccccaccatccgcaagctcgtcgccggcggtctcagggtgtgggtcttcagcggcgacaccgacgggaggatccccgtgacgtccacgaggctcaccctcaacaagctagggctcaagaccgtccaggagtggacgccgtggtac

SEQ ID NO: 312938 - DNA, 305 bp, Zea mays
cggacgcgtgggcgggccggtgtacgtggtgacggacccgtcggaccgcgaccccgtgaacccgtcccctggcacgctccggcacgccgccatccaggagggcccgctgtggatcgtgttcgcgtcggacatggccatccggctgaacgaggagctgctggtgaacagctacaagacgatcgacgggcgcggcgccgcgtgcacgtgggcggcggcggcgcgtgcatcacgctgcagtacgtgtcgaacgtgatcatccacaacgtgcacgtgcacgactgcgtgccggcggggaacccgacgtg

SEQ ID NO: 312939 - DNA, 243 bp, Zea mays
cggacgcgtgggcgcgagccatggcgaagaactacccgaccgtgagcgccgagtacagcgaggctgtggagacggccaggcgcaagctccgagccctcatcgccgagaagagctgcgccccgctcatgctccgcctcgcgtggcactccgcggggacgttcgacgtgtcgtcgaggaccggcggtccattcggcacgatgaagcatcagtcggaattggctcacggcgctaacggggggctgg

SEQ ID NO: 312940 - DNA, 300 bp, Zea mays
agccacgcgtccgcccacgcgtccggcgcaccgcaagtgctgcgtgacaacatccagggcatcaccaagccggcgatccgcaggttggcgaggacgggcggcgtcaagcgcatctccgggctcatctacgaggagacccgcggcgtgctcaagatcgtcctcgtcgctgtgagctggttgggggctgtgtggatttggttttcttatcgcgggacatcagaggctgtgattcgagtgcgatggcatctgacactgatgagaaagctaagatggagagttgacatctgctgcagcctttgt

SEQ ID NO: 312941 - DNA, 323 bp, Zea mays
cccacgcgtccgcccacgcgtccggtagtttaggatttcttttctgacacttcgattcttaccaatccccctggcctgctgctttcctgacaatcgaccagttccccagtcttgctccctgcagtcctccctcctccatctccagcgttgtgttctgactcacctgcaccaatggctgttctttctgctgctggtgctcccccggcctcagctatcgggtttgagggctatgagaagcgccttgagatcacattctctgaggcacctgtctttgtggacccccatggcagcggtttgcgtgcactctccaggtcgcagattga

SEQ ID NO: 312942 - DNA, 314 bp, Zea mays
gcgactacggctgggacaccgccgggctgtccgccgaccccgagaccttcgccaagaaccgcgagctggaggtgatccactcccgctgggccatgctcggcgcgctcggctgcgtcttccccgagctgctctcccgcaacggcgtcaagttcggcgaggccgtctggttcaaggccggctcccagatcttcagcgagggcgggctggactaccttggcaaccccagcctgatccacgcgcagagcatcctcgccatctgggcctgccaggtcgtgctcatgggcgccgtcgagggctaccgtattgccggcggg

SEQ ID NO: 312943 - DNA, 316 bp, Zea mays
accagtgagttcaaatattcccactggacaaattccttcaagcccaagccagcctcaggcaccatggccgaaaatcactcaagtagatgtcagaaaatacatgattgtatttatcaaggtagacagggatcgtgatgggaaaatcactggtgaagaggcaaggaatctatttttaagttggaggcttccaagagatgtcttaaggaaggtgtgggatttgtccgaccaggataaggatgggatgctatctttcaaggaattttgtattgctgtgtacttaatggagagacatcgagagcaccgtcctcttcctgac

SEQ ID NO: 312944 - DNA, 285 bp, Zea mays
ggacctggcggacgcggggcggaccgtgggcaaaatccgtacggtacctcttgaaattatggttgatggtgataaggcgcatgtatatggtgaaacacttgaagaacttggtcgctacaaggctcaaacaaaactccctttcaacgcttttggaacaatggctatggcaagaggagaatttgatgacaattctgcttctagccaagtattttggctcctgaaagagagtgagctaacacccagcaatgcccatatattggaccggcggtaccagtatttggatat

SEQ ID NO: 312945 - DNA, 329 bp, Zea mays
gtacggtcggaatccgggtcgaccacgctaccgacacggtccgggacctgcgagcggcccaactcgatctcgcacctagggtttcgtctcgccgcactcgtcctccgagaagatgccgaagaacaagggtaagggaggcaagaaccggaagcgaggaaagaacgaggctgacgacgacaagcgcgagcacgtcttcaaggaagacgggcaggagtacgcgcaggtgacccggatgctcggcaacgggcggtgcgaggccatctgcgtcgatggcacgcgccgcctctgccatatccggggtaagatgcacaagaaggtctggatcgcgg

SEQ ID NO: 312946 - DNA, 327 bp, Zea mays
  unsure (1)..(327): unsure at all n locations
gccatggcctccctctcctctgccgccgtcaccgccccttccttcgccgcaccagcgccagcccgcgccgtggtcagaaggaggtccttcaccgtgcgcgcctctctccgcaaggccaccggcaccgccgccgtggcaatggctgccagcgccctgcttgccggcggtgccatggcccaggaggtgctgctgngcgcaggcgacggcgggttgttcttgacccagccgatttcagtgtagagggggagacactatcttattcaagaacaacgccggcttcccgcacaacgtcgtcttcgacgaagacgatgtgccgagcggcgtcga

SEQ ID NO: 312947 - DNA, 261 bp, Zea mays
  unsure (1)..(261): unsure at all n locations
cgacgtcagattaactagcttcttctagctctagctaggctcgtctgctgcaagaaggtaacagcgcaggcatggacgggaaggatgaggacgtccgcctgggcgccaacaagttctcggagcgccacccatcggcacggcggcgcagggcacggacgacagagactacaaggaacccccgccggcgccgctcttcaagcccgnggagctcaagtcctggtccttctaccgcgccggcatcccgagttcgtcgccaccttc

SEQ ID NO: 312948 - DNA, 411 bp, Zea mays
  unsure (1)..(411): unsure at all n locations
agttcatccagtgaccgtactatcaaggtttgggatctacagacaggtttctgcaagagcaccataatgtccgcgagcaaccccaactcgctagctttcatcgatggtgacaccatctgttcgggtcacagggatgggaatcttcggctgtgggatatccgcagtgggaaatgcaccacacagatagctgctcatctggatgtcacctcggtctgcgtgtcacggagcaggaattttgttcttacaagtgggagagataacgtgcacaacctttttgatgttagaacgctggagatttgtggaacattcagggccatgggcaacagagtggtgagcagctgnggcaaaccttctattagccctgacgagaactgcatcgctgctggttcttctgatggatctgtgtacata

SEQ ID NO: 312949 - DNA, 236 bp, Zea mays
ccgaatctaatatattggaatgaggttcttcaatacttgggattgcgacgatagtttagaaggaagcctctctcctgatatgtgccagttaactggtctgtggtactttgatgtgaagaacaatagcttgacgggtgcaataccagaaaccatacggaactgtacgagctttcaggtcttagatttgtcaaacaatcatcttactggagaaatcgcgttcataattggtttcctgc

SEQ ID NO: 312950 - DNA, 339 bp, Zea mays
cccacgcgtccggctgctactgctgctgcgtgcagggctgtgatggcgacgaagaggagcgtgggcaccctcggcgaggcggatctgaaggggaagaaggtgttcgtgcgcgccgacctcaacgtccctctcgacgacgcccagaagatcaccgacgacacccgcatccgcgcctccgtccccaccatcaagttcctcctcgagaagggcgccaaggtcatcctcgccagccacctgggtcgtccaaaaggtgtcaccccaaagtacagcttgaagcctcttgttccacgcttgtctgagctccttggagttgaagtcgtgatggccaatgattgcatt

SEQ ID NO: 312951 - DNA, 318 bp, Zea mays
  unsure (1)..(318): unsure at all n locations
caacggtccgcgaccgtgggtttctttctttcttttctgtgtatgtatgtaccatgtaatgtatagtatagatcgatttcattgcattaacgcatgtttggttcccaaccaaacatgccttaatgcaatgaaatcgatctatactatacattacatggtactgcagctgtcgggagcaggcaatggcgccggatctaagcgaactcgccgccgccgctccagcccgtggcgcctacctcgccggcgtcggtgtcgcggtcctcctcgctgacatgttnctcccagtagcccggtcgtcctgcgtgcgagataactcat

SEQ ID NO: 312952 - DNA, 322 bp, Zea mays
cagtacggccgaatccgggtcgaccacgaccgcacgagccgcgaccgtggcgacgtggtcaggacgcgtggggagacgacggcggccatggcgacctccttccaggggacgaccaccacgtgcaccgccagcgacaagacggtgtaccttgtggacaagctcaccgccgacaaccgcatctaccacaaggcctgcttccgctgccaccactgcagaggcaccctcaagctcgccaactacaactccttcgatggagtgctctactgcaggcctcacttcgaccagctgttcaagaggacagggagcttggacaagagcttcg

SEQ ID NO: 312953 - DNA, 323 bp, Zea mays
  unsure (1)..(323): unsure at all n locations
cggacgcgtggcgagacgcgtgggcggacgcgtgggcggacgcgtgggcggacgcgtgggtgctgctagtggacatattgggnaagcctttgagtaattcaccaaaatctaagagagtggactaaagcttgatgtgtacatttacgaaacattgttgagagcatgttgcaaatcaggaagaatgcaaagtgccttagcagttacacgagagatgagctttcagaagataccgaggaatacatttatatataatattttgattgatggttaggctcagagaggagatgtctgggaggcagcagatttgttgaaacaaatgaaag

SEQ ID NO: 312954 - DNA, 265 bp, Zea mays
  unsure (1)..(265): unsure at all n locations
cacacgcgtccgccttgcctccgatcgccaattcctccttcggatctcgcattcagcgcacggcaggtgtgaaggaagggggacgcggaggaagatggggctcgcgttcgggaagctcttcagccggctcttcgccaagaangagatgcggatcctcatggtcggcctcgacgccgccggtacnaccacgatcgtctacaagctcaagctcggcgagatcgtcaccaccatcgccaccatcggattcaatgttgacactgttgag

SEQ ID NO: 312955 - DNA, 297 bp, Zea mays
  unsure (1)..(297): unsure at all n locations
acaagcaaacgnacacgcgtccgcggacgctggggtgaacnngngcnacgcgtgggtgagtcagaagagctgctgcatcaaatcttggacagtttgcagcaacagttgaacagaatcatttgaagacagaaataatgtcaatatttgatgacttaacccaagatgatcaagattcagtgcgtttgttggctgttgaaggttgtgctgctcttggtaaattgttggagccacaagattgtgtagctcacattcttccagtcattgtcaatttctcccaggataaatcatggcgtgttc

SEQ ID NO: 312956 - DNA, 283 bp, Zea mays
  unsure (1)..(283): unsure at all n locations
cggacgctggncgtgggctggagaacagaaagatcccgacctatcgctggttcctgtacaacggcaggcgcatatatggaagcagcaggcatcatcgtcaacaccattgccgaggccgagccgcgcgtcctcgcggccatcgccgacgggcggtgcacgcgtggtgtcccggcacctccggtgtactcgatcgggccggtgatcccctccagcccgcccgccgagcagcaggcgcaggagtgcgtgcgctggctcgactcgcagcctccgagctccgtggtgt

SEQ ID NO: 312957 - DNA, 300 bp, Zea mays
  unsure (1)..(300): unsure at all n locations
aganccctatgcactggaatttggtataagaattgatgaacgtcttgctgcagttgaagctcgtgttctgccaccaccaagacttaaataccatgatagtggccgagagaaggatgttttgcccagagttgggcaatggaacatgatgaataaggggatctcaaaagggtatgtgagactgaactcggattggtctcccagtgttgtctgactaaacatgtttttaagatgagcaagcagtaccttgcaaatgttgcactgcaaataaatgttaaggttgggggaaggaatactgtactt

SEQ ID NO: 312958 - DNA, 318 bp, Zea mays
  unsure (1)..(318): unsure at all n locations
cagtacggtcggaatccgggtcgaccaacggcgggaccgggcggaccgtgggtgggcgcagagaatccccaagcaaacaaacagggtagatggaggggagacnagaggagagcagatgttgggtctgggacaccatggctccgatgaagctgtacggggcggtgatgtcgtggaacgtgacgaggtgcgcaacggcgctggaggaggctggctccgactacgagatcgtgcccatcaacttcgccaccgccgagcacaagagccgcgagcacgtcgtccgcaacacgtgtggatcagttccagctctgcaggatggtg

SEQ ID NO: 312959 - DNA, 150 bp, Zea mays
gcagtcaccactcccaagccagtacccacagtcctacgagcagtcgcacgcaagtgtcaagagacaaaacggtcgacatggctcgcacgcaatctgccgtagcggtcgccgtggtggccgcggtgctgctgctggcagcggcggcgacga

SEQ ID NO: 312960 - DNA, 195 bp, Zea mays
gtggtgtggggatcctgtcaacaccttatgctgtcaacagggtggctggcttggactggtgatactagcggtattgggtgcactggcttggtacactggcatacttctgcgccgttgcctggacagcaaggatgggctcgagacttaccctgacatcggacatgctgcctttggtactgctggccgtatcatcat

SEQ ID NO: 312961 - DNA, 184 bp, Zea mays
cccacgcgtccgctgctctcccccgcctcccggtccggcagcagagatcgagatccggaggccgcgagtaggagcgccaccaccagcgactgcggcaatggcgggcacggtgacggtcccggggtcgtcgaccccctccacgccgctgctcaaggacgagctcgacatcgtgctcccgacgatc

SEQ ID NO: 312962 - DNA, 198 bp, Zea mays
caaaacttgagcaattgtatattgacagtgccggcctaagtggtcccctaccgtcatcgttttctagactaacaagaatgaagacactgtgggcatcagataatgattttactggggaaataccagattatattgggagctggactaatttaacagaactgcggtttcaaggcaattcatttcagggtccacttccag

SEQ ID NO: 312963 - DNA, 309 bp, Zea mays
caacaatagcatcgccaaggtacgtagaacgtagccatggtgtcgtccggaactggaagcattgccaacaggtggcgcgagctccagggcgagaagtcgtggaagggcctcctggagccgctggacatggacctccgcaagtccatcatctcctacggcgagctcgtggcggccaccggcgacggcttcaacaacgagccgcactcgacgcacgttggcctctgcaagtacggccacgacgacctgctgaccaagtcgggagtggccgccgccagccactacaacgtgaccaagttcgtgtacgcgtgg

SEQ ID NO: 312964 - DNA, 311 bp, Zea mays
  unsure (1)..(311): unsure at all n locations
accacgcgtccgnccacgcgtccgcacacgcgtccgcggacgcgtggcaaagagcatatgggtttcagcaatgtcaatgactatccaccaagtgacaccctcgagctatcatccgatcatttgatagagaatgaacttttgccactaaagtatgtcaagtttcaaaatgttcgcagtctgactatatttattgaggacaaccaaagtggaagtgatgtctccagaattcacaagattgctctttatggaacaactgtggacacgacaaatatgaaggatctgaagaagatagaagagcactgagacgattt

SEQ ID NO: 312965 - DNA, 310 bp, Zea mays
atcaggatcatccatatgggctgctggttcacacaataaggatggcagtgaaggaaaggataatggggacgacctggaactgccagtatatgatttcgagacaatagcagcagccacagagggtttctcagctgagaacaagcttggtgaaggcggctttgggcctgtatacaacggtaagcttgaggatggacaagaagtagctgttaaaacactttcaagaacatcaagacaaggtcttgaggaattcaagaatgaggttttgttgatagctagactccagcatcggaatcttgttcgactagttgga

SEQ ID NO: 312966 - DNA, 293 bp, Zea mays
gcaccccagccagccgtccttctactacgtgtccctcacggggctcaccgtcggctccaccagggtcgcgctcccgagctcggccttcgcgatccaggacgacggcacgggcggcgtcatcgtcgactccggcacctccatcacgtacctggagctgcgcgcctaccgcgcgctgcgtgaaggcgttcgtggcgcacatgtcgctgcccacggtggacgcctccgagatcgggctggacctctgcttccagggcctcgtcgtcgctgtcgatcaggacgtgcaggtgcaggtg

SEQ ID NO: 312967 - DNA, 300 bp, Zea mays
gaagatatgggaagctcgacatcttggtgaacaatgcagctatttcaggaattgtagcagatgaggaaggcctgaaagctcttaacattgatgcagagacatggacatctggcagggcagctaatcttctgaaagaagtattccagaataccaatgatgaggcattcaactgtctgaataccaattactatggatgcaaacgggtaacagaagctcttcttccacttctgaagctatctacatcaggaggagcaaggattgtcaatgcctcctcacttgcgatcggagctgaagtgtgga

SEQ ID NO: 312968 - DNA, 312 bp, Zea mays
gtccctcaacgcgctgcgcacgctggacatctcgggtaatgccgtcaccggcgacctgccgatcggtatcagcaggatgtttaaccttcgggagcttaacctgcgaggcaaccgtctcactggtagcctcccggacgacattggggactgcccgctgctcaggtcagtggatcttgggtccaactcgctgtccggcaacttacctgagtccctgaggaggctctccacctgcacataccttgatttgagctcaaatgagttcactgggagtgtcccgacatggtttggagaaatgacaagcctggaaatgct

SEQ ID NO: 312969 - DNA, 311 bp, Zea mays
  unsure (1)..(311): unsure at all n locations
cggacgcgtggcggaagagcgtcaccgtcagcccggagctgatgcagagccggaaccgcatctacctccggggcaccgtcagcaaggacctcctcacgcacaagcaggtcgtccagctctccaggaagatcaaggacggcatctggcttcagcaccaaagatccaagctgaaggagaaactgggcaacgagccgtcatacaagcagctggcgcaatcgctgcggataccagctcctgagctgcgagcgaggatgcgcgagtcgtttcttgcgnaggagattctggcgatgagcaacacccgtctggtgata

SEQ ID NO: 312970 - DNA, 353 bp, Zea mays
cggtcggaatccggatcgaccacggtcgggacgctggcgacgttgctggactcgagagcgccaagcaagctctgcaggaggccgtcatattgacggtcaagttcccacagttcttcacgggcaagcggaggccttggagggcgtttcttttgtatggccctcctggaacaggaaagtcttacttggcaaaagccgtcgcaaccgaggctgattcaacatttttcagtatatcttcttcagatctggtttcaaagtggatgggtgaaagcgagaaattagtcgcaaatcttttccaaatggctcgtgaaaatgccccttccattatctttattgatgaaattgattctttatgc

SEQ ID NO: 312971 - DNA, 294 bp, Zea mays
gccacgcgtccgcccacgcgtccgcccacgcgtccgcggacgcgtggaaggcatcgtgctagcatgaacttcacttgtgctgagatgagggacagtgaacagagttcagaggcgaaaagtgcacctgaggaactggttcaacagtgttgagtgccggatgagagaggctaaatttggcatgtgaaatgcactcaacgatatgatgaaagttacaacaccatctcaggaatgcagcctcaagctcaacaagatggcctcagacacagttgacgatcactactccggtactgatga

SEQ ID NO: 312972 - DNA, 317 bp, Zea mays
gcctctacatttcttctctctctgctcctccgcctccgcctgatccatccaagacagggatcgccatgtcggactcggaggagcaccacttcgaatcgaaggccgacgctggggcgtccaagacctacccgcagcaggctggcaccgtccgtaagaacggcttcatcgtcatcaagaaccgtccctgcacagttgtggaggtttctacctccaagactggtaagcatggccacgccaaatgccactttgtcgccatagacatattcaatgggaaaacacttgaagatattgttccttcatcacacaactgtgacatt

SEQ ID NO: 312973 - DNA, 325 bp, Zea mays
  unsure (1)..(325): unsure at all n locations
cccacgcgtccggcaccacacctcttcttcttcttcctcctcctcctagcacagctagcgcctgctccccttcgcctgtgatcatgtcttgcagcagcggcaagtgcgactgtggctccagctgctcctgcggcagctcatgcaactgcatgtcccctaacgtggagaccgccgccgccagcagcatcaagaccacggtcctcgccgcgccgaccaccaaggccagcgccggcggcttcgaggcggccaccgagggcggcggctgcgactgcaacacctgcatctgcggcacnagctgcggctgctcctgctgcagctgcaactg

SEQ ID NO: 312974 - DNA, 184 bp, Zea mays
gcacgtcgcttcatgatctacgttcactctaagatgatgatagtcgacgacgaatacatcatcgttggatctgccaaatcaacagcgctcaatggatggggaggatcggaatgcatgggggacagcgtgcactgaaacaagcgcgcggcagcagtcgatctgagactgatagaatctacggact

SEQ ID NO: 312975 - DNA, 286 bp, Zea mays
  unsure (1)..(286): unsure at all n locations
ctttcatctgtgccctctgcgttcgagatcgatctcagctggcaccgtcccagttcgccatggcggaggaccggagccccaagcccatccactgcaaagcggcggtgtgccgagccgccggcgagccactcaccatcgatgagatcgtcgtcgacccgccgaaagcgtacgagatccgcatccgggtcatctgcactcactctgccaaccgatatcacttctgganagctaagtgcacggtgttcacagatataggcatagcgacgggtatgaacgtgggacactg

SEQ ID NO: 312976 - DNA, 321 bp, Zea mays
cccacgcgtccgcccacgcgtccgcggacgctggctatgcgcttatagcttgtcagccatggccaccgccgccgcgtctagcctcctcaagtcctccttcgcgggctcccggctcccggccgccacgcggaccacaccggcgtccctcgtggtggccaccggcccgcgcggcgccggcgcggggcccatctgcgcgtccatgtccatgtcctcctccaacccgccctacgacctgacgtccttccggttcagccccatcaaggagtccatcgtgtcccgcgagatgacccgtcgctacatgacggacatgattactacgcc

SEQ ID NO: 312977 - DNA, 162 bp, Zea mays
ctggattatctgacccaaaccgtcctattgccagtttcatgttcatgggacctacaggagttggcaagacagagttagcgaaagcccttgcttcctttatgttcaacactgaggaagctgttgtcaggattgacatgagcgagtacatggagaagcattcag

SEQ ID NO: 312978 - DNA, 289 bp, Zea mays
gttggcttcgcctccccctccggttcgtgttcgggttcgtgaggttctccggggttcggtttcgtgggtggacggatcgagatggcggcgtcggatgttgaggaccgctgcgtcgtcggcggcctcgcctgggccacggacgaccactccctccacgacgccttcagcacctacggcgaggtcctcgaggccaggatcatcctcgatcggtggacgcacaggtcccgcagcgtcgagcttcggcagcttctccactgaggaggcgctgctgtacgtcatcgatggcatg

SEQ ID NO: 312979 - DNA, 311 bp, Zea mays
cctccctttcaccttccctccctccctctccccgcgggccgccagaggcaatttcgccctcgattcgaccccgattcgtccgcccgcgaccgggattccctccgccaagcgcggatctgaacgctgcgctccgtgtcgccgctcgaatccgccatgaagggggccaaatccaagggcgccgccaaggccgatgccaagctggcggtgaagagcaagggggcggagaagcccgccaagggcaggaaagggaaggccggcaaggaccccaacaagcctaagagggctcccagcgctttcttcgtgttcatgga

SEQ ID NO: 312980 - DNA, 305 bp, Zea mays
ggcattaattgtacagctttattagctcctgcttctgcttctgcttcttcttcttagctggagactagagaaagaagaagacacagtgatcatcggcatagatagtaagtagaagaatagctagctgacccaacgaaatgacgatgagagatgagatcgtcttcttcgacgtggagacgacggctccgtcggcggccgggcccggtcggtggtggctgctggagttcggcgccatcctggtgtgccccaggaagctggtggaggtaggcagctacgacaccctcatccgcccgggcgacctctcc

SEQ ID NO: 312981 - DNA, 275 bp, Zea mays
cggacgcgtggcggacgcgtgggccgcagttcttcttcaccgtcgggctgggcgcggacccgtgccgcagccgcgtcaacggcacgtgccagggccccaacggcaccaggttcgccgcgtccatgaacaacgtgtccttcgccatgcccaggaccacctccctcctgcaggcgcactaccagcgccgctacagcgggtgctcgaggccaacttccccgccgtgccgcccacgcgtttcgtatacagggtcgcgctgatcaacaacactttcgtca

SEQ ID NO: 312982 - DNA, 263 bp, Zea mays
cccacgcgtccgactagttctagttctcgcctggttaactcctccaaacaccttggatcgcgcggcgacggcggaggccgccggcgaggagacggagaaggcggcggcggtggccatctccgggtggcgagtaagcagcggatcggaggcggtagtgaggcgggtggcgtgccgctggcctgctgctgcactgaagaagggagcgccccctatatacggaggggcccgagctcatcgccgcggcccctccctccctgcgcctg

SEQ ID NO: 312983 - DNA, 335 bp, Zea mays
tacctgcagtacggtcggaattccgggtcgaacaagcatccgggacgcgtgtgcggacgcgtgggcggacgcgtgggctgcaacactacacgtgcatcagctggtggaacatgatactgagaagaggaaatcattgactcaagctgcatttgataaatttgatgttgacagagatggctacatcacacctgatgaacttagaatgcatacaggaatgaagggttctattgatcccctcctggaggaggctgacattgacaaagatggcaagataagcctagatgaatttcgccggctcttgaagactgcaagcatgagcgcacgcaatgtacaaa

SEQ ID NO: 312984 - DNA, 294 bp, Zea mays
cccacgcgtccggatcagtccttgcttggtattgatcgatcatggccattttcagtataattgcattagccttggacttacgctcggagcaattgctggtgttctgtcgaagaatgagcttgttggtgcatctctcttcactctcgcaatcaatcacaaacagatgagcctgtactttgcaccagctttttttagccatcttctggggaagtgcctcaaacagaaatatcctattgtcgaagtaacaaaacttgctttcgtggtcttgggaacttttgctcttgtctggtggcc

SEQ ID NO: 312985 - DNA, 223 bp, Zea mays
ccgctccgggcaccgtcctccaggacggcgcctacgagtaccagaacctcttcgacgccaccgtcgactccttctacgtggcgatggccaaccacgggggctccggcgtcacccttgtggtgtcggagagcgggtggccatccgctggcggcgtcgcggcgtcacccgagaatgcggccatctacaaccagaacctgatcaaccacgttggccggggaacgcc

SEQ ID NO: 312986 - DNA, 325 bp, Zea mays
accacgcgtccgcacacgcgtccgcccacgcgtccgcggacgcgtggggaagtgtcgatgtgaaggaagcactgcgccttcaaaaggaaaacaactttgtcattcttgatgtcaggccaggtggatgagcctctttaaactctgcttctggcctgacatcaagaatgacaaagtttaaagaggctcatccacctggcgccatcaatgtacaaatatacagattaatcaaggaatggacagcgtgggatattgcgaggcgtgcagcgtttgcgttcttcggcatatttgctggaacagaagagaatcctgagttcatacagagtgt

SEQ ID NO: 312987 - DNA, 225 bp, Zea mays
cccacgcgtccgggcctttatatgctgcatgtgtgcttttgcaatgcgccgctgcttggtagttaccaaagcagctggccggcatggtggagaaggcgtcgatcgaggacgtgatgaaggtgctgatggcgtcgcggaagcaggacctgcaccagctgtggaccacgtgctcccacctcgtggccaagtccgggctgccgccggaggtgctcgcaaagcacctcc

SEQ ID NO: 312988 - DNA, 292 bp, Zea mays
tgaagactggaatagcaaagcttggttctcatcttgcggaatcagaagtacagatgctcattgaagctgtggacacaaacggtaggggggcactagactacggggaatttctggccgtctcgctccacctgcagaggatggcgaacgacgagcatctccggcgggccttcctgttcttcgacaaggacggcaacggtttcatcgagcccgaggagcttcgagaggctctggtggacgacggggcggccgacagcatggaggaagtggcgaacgacatactgcaagaggtcga

SEQ ID NO: 312989 - DNA, 294 bp, Zea mays
cgtgagcgccgaggcgattcggagcgcgttcggcgggccgaggaggagttccataggcaggtgaggcaggagtggaggagccggccgcggctcgctgccgtgggctcctgctgcctgctcggggccatctccggggacacgctgtacgtggccaacgccggcgattcccgcgccgtgctcggccgccgagtgcccggcggcggggcggccgtcgccgagcggctctccgccgagcacaacgcggcgtgcgaggaggtgcggcgcgagctcgccgcgctcaacgcctacgacgcg

SEQ ID NO: 312990 - DNA, 356 bp, Zea mays
gtacggtcggaattccgggtacaccacgcgtccgcgacgtggtcgatgatcaaagaactcaactcctatgtgaccttaaggagaacgtacagcgagcagccttggtaataagaggatcgaactattcgatacgggtaatgaccaggtggctgagggaactccagttcaaatggcatcagaaatgtcaaatcaagaactcattagcaccggaaggaaacaaatggaccaaactgatcaagctattgagcgctcgaaaatggttgtagcacaaactgttgaagttggagctcagactgctgcaactctgacacagcaaacggaacaaatgaagaggataggcaatgagctagattctg

SEQ ID NO: 312991 - DNA, 294 bp, Zea mays
cccacgcgtccggatccttgtaatggcgaaatcatatggtttgctcaagaaatatatagtgtcatttgttctttttttttggctcgctaattttggatctttatccgtgggcagtcttttgttgacgttggcgctgaagttgataccgtcgcaggaacctgtaaggatgtaactttgtatgcacatacttgtatattattggcgtaaatttagttgtacactatcagcttaaaaaagagagagggaggtaggacgggagagggtgagtcatgagaaaagaaaaaaggggcggcc

SEQ ID NO: 312992 - DNA, 300 bp, Zea mays
  unsure (1)..(300): unsure at all n locations
cggatcgtggacgagacgcgtgngctcgataaaataatctcttgttctagatcgcgagcgccaccctttttgtgtacaggtgtgtttttttgacaacagaaaacaattgatcaacgtgaacaaaattgtaatcaagtcgaccttcaagtctcgctacgtagcagtgcaataaaaagagcagccgcgatggcgagcagcaccatggccctctcctccacggccttcgccggcacagccgtgaacgtgccgtcgtcgtccgccatgcgcgaggcgcgcgtgacgatgcgcaagactgcggcg

SEQ ID NO: 312993 - DNA, 292 bp, Zea mays
ggtctagctatgactagtaagtagcataccattaccatcctccgcgcggctagctccggctcgctttcatccatacgattgcccggagctcaagccctgagctgagccgccagagcgcgcgcgatcatcgcttgagggaaaagcagagtggagtggcctatatgaaggtgcagtgcgacgtgtgcgcggccgaggcggccgatgtgttctgctgcgccgacgaggcggcgctgtgcgagcgtgcgtaccgcgcgtgcaccgcgccaacaagctcgccggcaatcaccgccgc

SEQ ID NO: 312994 - DNA, 266 bp, Zea mays
cggacgcgtggcggaggcgccaccctcttcgcggacgtgctctccgtgaaggagttccccaggaacctactcctgagctcgctgccgcccggcttcgacgtgatctgcacgcaccccatgttcgggccggagtcggcgcgcgacgggtgggacggcctgccgctggtgttcgagcgggtgcgcgtcggggactgccccgcgcgccgcgcccgcgccgacgcgttcctcggcgccttcgagcgcgaggggtgccggatggtggagat

SEQ ID NO: 312995 - DNA, 333 bp, Zea mays
  unsure (1)..(333): unsure at all n locations
cccacgcgtccgcccacgcgtccgcccacgcgtccgcccacgcgtccggcggtgagcccggccaccagcgccggaggccgtcgtcgtcttactagccgacgctcgacttgggcatgaattgctagccgcgcgggtgagagattgctaggtagccagctaggtacggtgtggggagttgaatcggaggtctgccgctcgaggcngcggcggcagaatgccggtaggatgaagaagctccactggctggtgcggttcctgttcgggccggtgccggtctacttctcggcgctggccatcctcatcgtgctcaccaacgcgcagtacttcgggctg

SEQ ID NO: 312996 - DNA, 330 bp, Zea mays
ccgaagaggtagagctcgggagtgtcaggtaccaaataacagaagctgagggtaccatcatgcagctgatcgataccaacagtaagttatccaagaaggccgaggagttcacgtctcccgatggccccgatgcggagaacagtgacttgaggagcaggcatcagcgtaagatcttggagcgtgcaaggaagatgtccgagaagatcgggaggctggaggtggaaatgcagaaggtccagcaggctctgctcagatacgaggaggagcagagtaccaggagtacctcaaaagccctgcagcggcggtccaaagtgcagctcgtggagtatc

SEQ ID NO: 312997 - DNA, 317 bp, Zea mays
cccacgcgtccgcccacgcgtccgcccacgcgtccgcccacgcgtccgggggccgcgcgatcgtcgacggccgctccgcccggaatgccgcagcggatcagccggcgccggtgcgcgtcgacgatgacaacgaggcggaggtgccggaggcggtatttgacagtggccgcccggctacggaggaggccttgttctcggaggatgaggaggatgaagaagatgacacaccgccggtggccccacctccccctccaccaccagtcatcgccgtgcctgtatctgagaagcccgaggcatcaaggcaagaacagagtgct

SEQ ID NO: 312998 - DNA, 315 bp, Zea mays
cccacgcgtccgcattctcagtcgccgccaatcccttcccgtgctccgcaaccgctgagtgagaagaagagatggccggcaagggcgatggcccggctatcggcatcgatctcggcacgacgtactcttgcgtcggcgtgtggcagcacgaccgcgtcgagatcattgccaacgaccagggtaaccgcaccacgccctcgtacgtcgccttcaccgactccgagcgcctcatcggagatgcggccaagaaccaggtcgccatgaacccctctgtccctgggtctggagactgctggaggagttatgacagtgctg

SEQ ID NO: 312999 - DNA, 315 bp, Zea mays
cccacgcgtccgactagttctaagatcgcgatctagaaccggacgcgtgggcatgccctcacttcattcatgtggctatgcggtcctattgctggcttagtggtccaaccgctggtatgcctgtacagcgataggtgcacagcaagatggggaagacgcaggccatttatcctgataggatgcatgctcatctgccttgccgtcattgttgttggcttctcgtccgacatcggagctgctctaggggacacaaaggacactgcagttctaccacggcctcgttggcatgctgcgatcgtgtacgttctgggtttt

SEQ ID NO: 313000 - DNA, 230 bp, Zea mays
gagacgcgtggcgtgacgcgtgggcggacgcgtgggcggacgcgtggggcttcaaaggcgcatgtaactggacaggcgactgtacagcgactcatgggggcactgctggttactacgggtccaatcaggcagcacatgcgtggggacaatctgcatcgccctacggatctgtacaggtgccaccatcctacgcatctgggtcaaacacatcctatggcgcagagcagcag

SEQ ID NO: 313001 - DNA, 320 bp, Zea mays
cccacgcgtccgctcgaggtctgcaagatgacgccgccgcccaaggtcagcccgcccaagcccttcaccatcgtcaaaggcgccctggaccagccgtcgggccccgtgctgcgccgcgaatacggcgaagacggagaggagatctccatctccgtcgccaggctcgccaacatcctgcccgccggcgccgactctgactcggacggtaccggcgagggcggtggtatgagcgcgtccatcagccagctcctcctccacgtcgacatctccaagcccgggataggacagtcgatgcagttcctttgcgggctgtacccgga

SEQ ID NO: 313002 - DNA, 260 bp, Zea mays
acgcacccgccacggtccgcgaccgtggcgacgctggttttttttttttttgttagctcaacaatgtgataatactcatcatacatcccttttcacatgaaccttaatctatcttattatttagaaaacatattgtctttccatttctaccgtagcgtacactacggtatgctgctagtgatgtttaggtaagcagctgacgatgaggacgtccacacatcatgggcccggcgcggccgtacgtgacgtcctgtttgttg

SEQ ID NO: 313003 - DNA, 240 bp, Zea mays
cggacgcgtggcgagacgcgtgggcaggactgcgagcaaggtgtagtgcacagggacatcaagccgagcaccgtcatgctggatgcctccttcaacgccaagctcggcgactttgggctcgcgaggctggtcgaccacgcccgtggagcgcacaccacggagctcgccgggacgatggggtacatggaccctgcatgcatcagcacaggcaggttcagcacccagtcggccatgtacagc

SEQ ID NO: 313004 - DNA, 194 bp, Zea mays
gccatttcgaaagatctcgctacttatatttcaatcaaccagcctatcttgcacaaatatgcaaatgaagacgtgtcgcttggatcatggttcattggtttggaagttaatcacattgatgaaaggaacatgtgctgtggaactccaccagattgtgagtggaaagggcaagctggtaatgtctgtgtagcgtc

SEQ ID NO: 313005 - DNA, 265 bp, Zea mays
accacgcgtccgcccacgcgtccgcggacgcgtggcacaaacagagatcccatcaaggttggatctgctgcaaaatgccatgaagttcataataaggcagcttggtgatgacgaccgccttgccattgtagcattcaacgacaaggtcatcaaagagaataccactggcattttagaaatatctggcagtggtcggatggctatcgaaaaaaaggtggatgggcttgtggctatgggtgacactgcttttaaaccgagcttggag

SEQ ID NO: 313006 - DNA, 381 bp, Zea mays
  unsure (1)..(381): unsure at all n locations
acgctgcagtacggtcggaatccgggatcgaccacgcgtccgggacctggcgaggatgacatgaaggttcgagcatcggaatataataatgtaaggagccagcttagatgcgatcaacaggaagcaaagtgggagcttagcggttcgtgatctttccaatctggtaaaaccggaggatatgatcacctcggaacatctcgtgacacttcttgcaattgttcccaagtactcccaaaaagactggttgtcaagctatgagaaaattgacacattcgtggtacctaggtcatctanaaagctctatgaagacaatgaatatgctctctacactgtaacactgtttgctaaagttgttgacaattttaaggtccgtgctcgcga

SEQ ID NO: 313007 - DNA, 304 bp, Zea mays
cggacgcgtggggcagcaatggcctcattggtcactctggttgttgcgctcctcttgtgcccgtcgtcgtcgactggcaatggcatccggcgccggccctgcgcagtgggggaagaagctggacccgcacttctacgaccagtcgtgccctcacgcgcacacatcgtggcgtccatcgtggggaaggcgcaccaccaggacccccgcatggccgcctccctcctccgcctccacttccacgactgcttcgtcaagggctgcgacgcttcgctgctgctggacagcagcgggtccatcgtgagcg

SEQ ID NO: 313008 - DNA, 296 bp, Zea mays
acacaacgaacacgcgtccgcggacggtgggcgacgcgtggcaacccaccagccaccacgcacagcagcagctagctagctagcaaccacctcgatcgcacagaggccggaagctcagccgcgaattcggcaagcaacaaggagaagtcttgggttcctcgccacctctcgatcggccaggcggatccaagaagagatggagaagaaggcaaccagattaaggactgaggcatggcatccaagggcgtcctcttcttggctctcaacctcctgttcttcacagtggccaacgcctg

SEQ ID NO: 313009 - DNA, 328 bp, Zea mays
cccacgcgtccggtcctctcctctgtctctctctctttgagcctcctttttcaacctaacctttgacgctgtagctcgagagcaagcatagtgcctagtgcctaccagattctctccctgagcggctgagctctgccgatccgcgataggctcgcgccatgcagatgctctgcgacgtctgcgccgccgcgccggccgccgtgatctgctgcgccgacgaggccgcgctctgctccgcctgcgaccgccgcgtccaccgcgccaacaagctcgcccacaagcagcgccgcagtcccctgcgccagccctctggcgacgaatccgacgc

SEQ ID NO: 313010 - DNA, 297 bp, Zea mays
accacgcgtccgggacgcgtggcaacatagcaaattgtgttttctaacgagtgcacctgctgccatctccaagggacgaaagtccgggcgttctcgtagtggtccaggctaaggtgcacggctcggaacgacgcgaagatcttgcagccctttgggatcacgtagcctagacaacagatcaacagaagataagagaagagaagagactgctgtaaacgaacgggttgggggaggctccaagaagaagaagaagaagacgacagttaacagtttgtgttgtagaagcaaacctttgaa

SEQ ID NO: 313011 - DNA, 289 bp, Zea mays
cccacgcgtccgtgaaaattcagggtgtcaaacccaaccccatcacctactgctcgctggttaacgggtacagcaaagccgggcttcttgataaggttgcgggggtcattcgacagaccgagaacactaatgttgtcttggacacaccattctttaactgtgtgataagcgcatatgccaagtctggggatatcaaaatcatggaggagatgctgcagcttatgaaggagaagaggtgcaagcctgacagaataacttatgccaccatgattcaggcatacactgcaca

SEQ ID NO: 313012 - DNA, 310 bp, Zea mays
  unsure (1)..(310): unsure at all n locations
atagaacacggtccgggacgtggacgcantacgcgagcggtcgccctttttttttttactttttatttgcaagtaactaaatgggctttgaaactagaaacaatgcaacatatatcgactaacagaataaagcacaccatagcagatctacaaaaactagctcgcttggagtctggggtccggccaatttgccggcaccttatgaatactacatgtttcttgctgcccgagagcgaaaactgaggggggagaaaaatagaaaggcctgtacaccaatcaggcagctgcggccattggtactgccctgtag

SEQ ID NO: 313013 - DNA, 306 bp, Zea mays
ccataaaattggaacgatacagagaagattagcatggcccctgcgcaaggatgacacgcacaaatcgagaaatggtccaaatttttgtgacaacttatttggttttatccactttaagtccatttaatgtttaagtggcagtgtttgcccaattatgatgtgctgtgtcttctttgatatgactgtatggtatatgcgtgatcttagactgtaagacagtggggttgtaatcatgtgatgtttatctgatgactgtggtttcgagtctgagactaggaattgcttagggcagaaccgtccaatttt

SEQ ID NO: 313014 - DNA, 303 bp, Zea mays
gcctttggctcttccgtggccaggatgttcccaagtttgtaatggacgaggtctatgacatggagctctacgagtggaccaaggtggacatctctgatgaggcccagaaggagcgtgtcaatggcccttcagcttgaagggtggctcagagcctatcacgagcaatgtagatgtgtgtctaccttggtcttgtaggattctaactgtccacctttcctgtccatgctatagtcgcagacgagagtggtttttttgttcttccctttatacagtcacacttgagtatctggtgctttcttgttt

SEQ ID NO: 313015 - DNA, 211 bp, Zea mays
aattccgggtcgaccacgcatctatatacgcgtccgcggacgctggctgtcagcggggtgcgctcgctcaacagccgcgcgtcgtcgacggcggaccggtaggctccctgcaacagcctcaagagcatgacgggccggctcagcggcggcgtcactatggccaacgccgtcaacatccccggcaagtgcggcgtctccttcggggtgccca

SEQ ID NO: 313016 - DNA, 206 bp, Zea mays
  unsure (1)..(206): unsure at all n locations
acgcataaatacacacgtccgcggacggtggcgagcgtcngagtacgcgtgggcggacgcgtgggtttccccatatcccagatccacttcgcgaacactccctcctatgcggccatgacgctctctgtggagaagacctcgtctggacgggagtacaaggtcaaggatctctcgcgagcggacttcggccgcctcgagattgagct

SEQ ID NO: 313017 - DNA, 305 bp, Zea mays
ggttggcaaagggctgtccaaggatgacaaggcccagaagcttgcgctgcagcactggctcgaagctattgacccgcgccaccggtacggacataacctccactactactacgactgctggctgcggtgcgagagcaaggagcccttcttctactggctggacgttggagaaggcaaggaaatcaatctcgagcggtgtccgcggttgaagcttctaagccagtgcatcaagtaccttggtccgaaagaaagagaagagtatgacgttgtgatcgaggatggcaagttcatgttcaagaaaagca

SEQ ID NO: 313018 - DNA, 237 bp, Zea mays
gcactgtactcaagcgtgaggtacaactcccatggtggggcctcattttcgcatgtggcatggcattcctcttcacacttcccatcagcatcatcaccgcgaccaccaaccagtcgcctggcctgaatgtgatcaccgagtatgccatgggtctgattatgccgggctctcctatcgccgtcgtctgcttcaaagtctatggctacatgagcatgtcgcaggccgttgccttcctct

SEQ ID NO: 313019 - DNA, 215 bp, Zea mays
ggcgacatcaagcccagcaacatcatgctggacgacgcgctcggcgccaagctcggcgacttcggcctggcccggcttggcgaccacggcgggcgctggcacaccaccaacgccgtgctgggcaccgcgggctacatcgacccggagttcgtcaacacgcggcacccgagcacccactccgacgtctacagcttcggtatcgtcctcctcgaggt

SEQ ID NO: 313020 - DNA, 154 bp, Zea mays
cccacgcgtccggaagcgtgggtatgtggcctccaactccaaggatgaccctgccaaggaggctgctagctttacctcccaggtcatcatcatgaaccaccctggccagattggcaatggctatgccccagttctggactgccacacctcacac

SEQ ID NO: 313021 - DNA, 334 bp, Zea mays
cagtacggtcggaatccgggtagaccacgcgtccgggacctggtcagatgtcataactgtaataaaagggaaagtggaagaaatagaacttccagtcacaaaagtagatgtcatcatctcagagtggatgggctatttcctcctgttcgagaatatgttgaacactgtcctatatgcacgtgataaatggcttgctgatggtggtgtggtcctgccagacaggacttctttgcgtcttactgcgattgaagacgcagaatataaggaagacaaaattgaattttggaataatgtatatggatttgatatgagctgcataaagaaacaggcgatg

SEQ ID NO: 313022 - DNA, 298 bp, Zea mays
  unsure (1)..(298): unsure at all n locations
accacgcgtcgacacgcgtccgcggacgctggtgcaaaagtgaaggaagttgtcgtggggatgactgacccaaatcctatcgtggcatacaaagggattgagaagctccaaggtgctgggataagtgtgagggtgggtgtggaggaagcgttatgccgcaaactaaacgaggcttatatccatcgtatgctcaccgggaaggcttttgcaactctgagagctacactctcaatgaatggaatcatcacgaaccagattgggaagggagctgatcagtcangtgggtactactcgcagc

SEQ ID NO: 313023 - DNA, 226 bp, Zea mays
cgacgggtcgcgttcgccgagattgggcgaccacctcctacgcccaaggacatgatcgacacccttccgttgcttacccagtgtttcgggccgagagcaggggacatgaagctggcaagcttggcaaactattttggtctagggaagcaaaggcacaggagcctggatgatgtgaaaatgaatattgacgttttcaagaactgtgccacagtcctgttcctggagg

SEQ ID NO: 313024 - DNA, 330 bp, Zea mays
cagtacggtccgaattccgggtcaccacgcgccgcacagcgagcgagggaccggggcggaagaacagagagaagacgtctctctcctctcggcgtccccgttccccaacctctcgtctgctgcctgcctgcctgcctgcctgcaaaaaggagtttgtcatggcgtctaagcgcatcctcaaggagctgaaggacctgcagaaggacccccccacatcatgcagtgcaggtcctgctggtgaggacatgtttcattggcaagcaacaattatgggaccactgacagtcctatgctgtggtgttcctagtgacatcatttccgcagattacc

SEQ ID NO: 313025 - DNA, 268 bp, Zea mays
  unsure (1)..(268): unsure at all n locations
ganagatctgatgcatcttctattgctgaagctgacggtgctcgttttgattatttctgcaacaaggtatatccacagatccaggacttggatgagggtgggctgctgctattcgtcagttcgtattttgagtacattcgaataagcaatttcttaaaatccaaggaagcgtccttttgtcgaatcggagaggctacgtctcagcaggatatatctcgtgcaaggctctggtttttccgaggcaagaanaagatcttgctttacagcg

SEQ ID NO: 313026 - DNA, 356 bp, Zea mays
  unsure (1)..(356): unsure at all n locations
tggatcccaagtttttgaaggaangggagcgcgtgatggtgggcttctcgggtccgttcgggttccacagggtcacgcctagggatctcatgtcctccttcatcggcaccatggtctgcgttgagggcatcgtcaccaaatgctcgttggttaggccaaaagttgttaagagtgtccacttctgccctgtgactggggactttctttcgcgtgaatacagggacatcacttcttttgtaggcttgcctactggctcggtttatccaacaagggatgacaatggtaacttgttggttaccgagtatggaatgtgtgaatacaaggatcaccagacattgtcgatgcaagaagtgcct

SEQ ID NO: 313027 - DNA, 304 bp, Zea mays
gggagccttatcagggatctgcaggagcccgccgagtccgtgctcctccggatggacatcatgggtgagcccaaggatgccaaggaaagggccacacatgcagttgaggcttttaagaactacatccaggaggacaaacttttcggttgggtgctggacgactgcggggattgctcagttgccgagggatgccttatggacacaaacaatgatcccatcgatgttgatgcacacatgtacagagcaaaactatacgacgagaatcagagagcagtaggcatggtccacattcgtcaaagcgtgc

SEQ ID NO: 313028 - DNA, 300 bp, Zea mays
cggaccgtggcgtcaacgtcgccaaggacgactccatcttccacaacgaggagggagccgacgaaggcgtcgccggcgccggtggtgtcgacggtgtcgaccttgaagccgggcacgctgcccttgaagtccttggtgaagtacctgcatcccttgtccccgtcggtgacgacgagcagcttgagcccgtcaaaccacagggacagcacgttctcacgcgcgaggtcgtgcccggcatgatcgtcaccgggatggaggtcgcagagatcgacggcgccccgaggatgggcccgacgttcg

SEQ ID NO: 313029 - DNA, 295 bp, Zea mays
cccacgcgtccgtttttttttttttttgcggaaaagctaaaacattttataatttggaacggagtatttgacttccgcgagcagatgttctccttcctgcgcgacgccggcgacgcgccgctggagaaacaccccaagctcaaggcccacgccgtcaccgtcttcgttatggcatgcgagtcggcgacgcagctgagaagcaccggcgacgtgaaggtgagggaggccaccctgaagcggctgggcgcgacgcacgccagggcgggcgtcgccgacgcgcatttcgaggtcgtca

SEQ ID NO: 313030 - DNA, 324 bp, Zea mays
cttctcctccgcgccgccacagccgggcgcgcctctcgatcgagatccaggagatatgcctcgttatgatgatcgccatgggaatacacgcttgtatgttggaagattggcccctcgcacccgttcccgcgacctagaatatcttttcagcaaatatggaaggttttcggttttttacccaaccatggaggtctgtggtggaagggtgcccttggtggaattggtggccattgttccgatatttgtggaggactttggtgaagggcgcccttggtgtaatcttattgactgttgtagatgaagttgcaagttgatgcatttgag

SEQ ID NO: 313031 - DNA, 289 bp, Zea mays
gctgctgtcgaacagcgcgcggagcgggcgcgccaagtaccggctgctccacacggtgcgcacccacaaagccgccaccgacgagtgcttcaactgcgtgtaccagcgcgaggacgaggtgggcaaggtgggcgtgtcgctggcgcgggagctcatggccgtggccggcgacgcgctcaagaccaacatcacgacgctgggccccctggtgctgcccctgagcgagcagctcaagttcctcaagtccctcatgatgcgccgcgtgttccgcgtcaacggcgtgcgccct

SEQ ID NO: 313032 - DNA, 316 bp, Zea mays
cccacgcgtccgcccacgcgtccgaccacgtctcggtggccatgacgttcactatctcgaactactgcccccacccgatatggccggagacgctcgccggggccggcacgtcgcagctttccacgacggggttcaagctggagcctgggcagacggcccagctcgcggcgccggcggggtggtcggggcggatatgggcgcggacagggtgcgtgttcgacgcggaaggcgcgggcgtgtgccagacggacgactgcggcgggcgggtggagtgccgcgggtccggcgccacgcgccggccacgctgttcgaggtc

SEQ ID NO: 313033 - DNA, 180 bp, Zea mays
tcgttcggcagcagcaacgaggtgctggatgggacgccgacgggagatggggcaccggggcaggggcagcggggagcgagcaccgtcagcatcacggtcgtcggcgcctccggcgacctcgccaagaagaagatcttcccggccctcttcgccttgttctacgagggctggctcccggag

SEQ ID NO: 313034 - DNA, 154 bp, Zea mays
cccacgcgtccgggaataacaagattcctgatctcaacctgcaggatggccctatggtgctctccccgccaagaaagttacgtagggtgacagcgcatgaagggatggaaggatgttcgtccactttatctgtcctctagttcttagatcgcga

SEQ ID NO: 313035 - DNA, 213 bp, Zea mays
gggctcggcgcggtcgaccccgtgcgcgagcgcggagaggaggcgcggcgacactgcatgtggctgcacgtggacgcggcgtacgcggcagcgcggccatctgccctgagttccagggcactctcgatggcgccgagctcgccgactcggtgagcatgaacccgcacaagtggttcctcaccaacgcggactgctgctgtctgtaggtggcaa

SEQ ID NO: 313036 - DNA, 216 bp, Zea mays
cggacgcgtgggccgctggctggcccgcctggctctccgccgtcgccggtgaggccatcgatggctggacccctcgccgcgccgactccttcgagaagatcgacaagatcggccagggcacgtacagcaatgtgtacaaggcgcgggactcgctcagcggcaagatcgtggcgctcaagaaagtgcgcttcgacaaccctggagccgagagcgtgc

SEQ ID NO: 313037 - DNA, 309 bp, Zea mays
cggacgcgtggcggacgcgtgggcggacgcgtgggcggacgcgtgggatgctcttaactatgtatgtagagtgcatcacattagtcggcctacatatgttgtgatcggtgtgctcatcagccatccgttattggaacttggaaggggtgttctgacatgacgttaacaatgtcctctgtttagccagaacggaggtgggcttgcggagtatgctgtggcatcagaaaatctgaccgtcaagaggcctcctgaggtatctgctgccgaagcgcagggctgcccatcgccgccggcactgcactccaggcg

SEQ ID NO: 313038 - DNA, 314 bp, Zea mays
ccacagcctccaaggctgacaaggccacctagagtattgttgttcttgttttatctatccctctgctgtgagaccgaccttctggccagggggagcatcgcggcggacagtagaggcgtgaccgatatgttggtggttacctcctccgtggggatgctccacggggttcatggccacaccacggaccttgggccagctgttcctcttcacacggtacttgtggtaggcgttgccagccttcagcatcggcttctcagtcctgccaccaccggcaacctgcccaatcatggcacggcagctgctggggacaattt

SEQ ID NO: 313039 - DNA, 313 bp, Zea mays
  unsure (1)..(313): unsure at all n locations
gaagaaacccaggacaaactggaggctgtcttaggcgactccttgacatgctgtgaaatagatcctgctggtgaagacatgttgtcttgcctccaatcctgggcctcgctgacgcctgctatcacggaacagatgtttaacacagaggagcaaccgatcagcacaaggggtggcaccatctccgtgacgatggacaactcacttagctctgtccacactcttattcagattcagtgcggtgaccataagggcctcctctatgatatcatgaggacagtcanagacggtaacattcaggtttcgtatggccgat

SEQ ID NO: 313040 - DNA, 318 bp, Zea mays
acgaggaaaaccaggaatcaatttccgatgctctgaagcagctgaatgaatttgaaaagaagcatcctaagcctgatgacaccatgctgaagaaggcacatgaagacatgcaaagcagacttgattacctgaggaaacaagctgaaggttatgacgataaggggcctgtaattgacattgttacatggaatgatggtgatgtgtggagggttgctgtcgatacccagacccttgagggtaacaatgatggtggaaaactagcagattttgttcctctgacgaactacaggcttgaacgcaaatatgcaattttcagca

SEQ ID NO: 313041 - DNA, 310 bp, Zea mays
gtgactaccacgatcaaggtgggcttgtcagtaactgccttcgcctccttaatggctgcgcggatgtcatcatatccggtgttcccattcttaacccagatcgtgtgccacccaagagcctcgaagcgggtgctcacgtcctctgtgaatgcaatctccgtgtctccgtcgatggaaatgtgttcagttcttccaatctcttgcaagcacaactgcacaagggaacaggaggaaaaaagagcgagaactcgcagctgacgcgcacacggcaagccccaatcggagccgcggaccggatcagaactaggtc

SEQ ID NO: 313042 - DNA, 295 bp, Zea mays
  unsure (1)..(295): unsure at all n locations
ggacgcggncgagacgcgtggggccgcaacccttcacgtatcgtctctctctcacacgagccacaccctgacatcccccatccccctcccagaaaagacccctcgaaaaacggcggcgctgcgacatggcggaggtcgaggctccagctactgcggtcgaggctccagctgctgcggtcgcgacgacgacccctgaggtggcggcgcccgaggccggagccgctacggaggcgaagggtccgcacaagcttcaccggcagtggaccttctggtacgacatccagacgaagaccaa

SEQ ID NO: 313043 - DNA, 220 bp, Zea mays
gtacggtccgaattccgggtcgaacaagcgtccgggacgtggggaaaaatttggtgaccagttgaagaaggctgttaaagatggggaaatggttaatgttaatcttgattggagggaggctgttccacatccagatgaccgtgttgagtatgagttatggacaaacagcaatgatgaatgcgggcctaaatgtgatatgctgatgaattttcttaaggaa

SEQ ID NO: 313044 - DNA, 291 bp, Zea mays
ggtgcggcggccggagctggtgctccagcgcccttcgcggctgcccaggggtggggcgaggctgacgcgcagggcagggcgagcgattgcgatggcgtcgctagggcggctcaaatccgccatcttcgatagggaggagaggaagatgcagtaccaatcgcacatccgcgggctcaatgcctatgatcgccataagaagttcatgaaggattatgttcagttttatggccacgagaaaaatgtggatagtagtttgcccatcaaaactgataaagatacgctgagagaagg

SEQ ID NO: 313045 - DNA, 300 bp, Zea mays
cctggggtaatgtcccagccgccgccaccgttcggagggcctccaggtgcgtcgtctcagccgccgccgccgttcggtgtcccccccagggtggtgtcccaggccccttccctgtttggaggccctcctgcgacggcatcgcaggcgtcttcgccttttgttggtcactctgttgctgcgtctcaggcggcaccattcggtgccccccctgttgcgggttcgcatcctccacccttcggtgggcctcctggagcggggcctcagccagcaccgccattgcggcagacattcgctggccag

SEQ ID NO: 313046 - DNA, 188 bp, Zea mays
accacaggacgacatgagtcgcgacctgcgacgacagagacgcgtggactgacgcgtgggcgcgtgcgaaccaagcagacgccagcagacgaagcgaagtcgtcgccggagcaagaggaagagcgatgagcaacatgtcgtagcaggcgtacgtcgatgaccacctgctgtgcgacatcgaaggccag

SEQ ID NO: 313047 - DNA, 183 bp, Zea mays
cccacgcgtccgggactggacgggcctgcgcgtcaccgtcgagctcactgtccagaaccgcctggaccgggtctccgacgtcaactcagacgccgcgctcgtcgtctctgcgatcgaggagcacgacatgaacgggcagaaggtcaagatcgtcaggaacagcgaaaacatcggcgtagacga

SEQ ID NO: 313048 - DNA, 225 bp, Zea mays
cttttagatcggttccatttgttctggttagtactgaattaggaaatcctacgggagtggtacatataaatgtggataaggcggatcaaccgttgcctcttactacagtgtttcataaacttatcccacttgagacgactccttacacattgtttcaaactattattggcaacggctatccgattgcgttgttggatgaagaaaaaatactactgattggtaaga

SEQ ID NO: 313049 - DNA, 308 bp, Zea mays
cccacgcgtccggcttttcgcgcggctgaactaccgcgaccgcgccagcatggcctcagcgtgccgggcttggcgagcgctgggctcgtcatcctgcctgtggagcacgctcgacctccgtgcacaccgctactaccgggaggtggcgtcatcgcttgcctcgcggtgcgggagccttcgtcggctacgcctgcgcggccacgaggcagcagaggccgtcccggccctccgcgcgcatggtctccgcgaggtggtggccgatggctgccgcggcctcacggatgctacgctcgctgtcctcgccgcgc

SEQ ID NO: 313050 - DNA, 307 bp, Zea mays
cccacgcgtccgcccacgcgtccgcccacgcgtccgcccacgcgtccgcggacgcgtggtgatgctgaccttctccgtgttcccgtcgcccaaggtgtccgacaccgtcgtggagccctacaacgcgacgctgtccgtgcaccagctggtggagaacgccgacgagtgcatggtccttgacaacgaggcgctctatgatatttgcttccgcaccctcaagctcaccaacccttcatttggcgacctgaaccatctgatctcggcgaccatgagcggcgtgacgtgctgcctgcggttcccgggcaag

SEQ ID NO: 313051 - DNA, 305 bp, Zea mays
cggacctggtcgagacgcgtgggcggacgcgtgggcgccgctcttcttcccctgcttgatctgggttcctcacttcctctccagactccatcacaggagcacgcgacgcgcgccacaggaaggaagggaaaaaacatggcggcggcgaacggggacgcgtgccgcagcgtcggcggggtgccgcgcccgacgaaccccatggtgacgccgctgctcaccgacctgtaccagttcaccatggcctacgcctactggaaggccggcaagcacctcgaccgcgcagtctttgatctctacttccggaa

SEQ ID NO: 313052 - DNA, 260 bp, Zea mays
atatattgtagaactataatcccattgccgcttcacacatctttgctgccttcgatacataaacagcacaaggtgtccaagaagcaggaggaggggctcgtcaccaacaagtacaagcccaaggagccgtacgtcgggaggtgcctgctcaacaccaggatcaccggcgaccaagcgcccggggagacgtggcacatggtcttcagcacagaaggcgaggtcccctacagagagggccagtccatcggcgtcatcgcgga

SEQ ID NO: 313053 - DNA, 294 bp, Zea mays
  unsure (1)..(294): unsure at all n locations
aaccgnccacgcgtccgggacgctggcgacggggncgagcacggggcacaggaagaggagagcctaaaaccctaaaccccagaatcggaaccggccgccggagcgcggaaccccaccccggccgccatggagatgggagggatgagcgacgctgagcggctgttcttcttcgagatggcctgcaagaactccgaggtcgcgtacgagcagaaccccaacgacgccgacaacctgacgcggtggggcggcgcgctgctggagctgtcgcaggtccgaaccagccccgacagcctc

SEQ ID NO: 313054 - DNA, 282 bp, Zea mays
atccaaaccagacaagcaaggaatcccccgatggctcatcgcgttctcctcctcctctctctcgcgtcggccgccgcggttgccgccgccgtcgacgcggaggacccgctgatccggcaggtggttcccggtggagatgacaacgatctggagctgaacgcggagtcccacttcctgagcttcgtgcagcggttcggcaagtcctacaaggacgccgacgagcacgcgtaccggctgtccgttttcaaggccaacctgcgccgcgcgcgccggcaccagctg

SEQ ID NO: 313055 - DNA, 315 bp, Zea mays
accacgcgtccgcccacgcgtccgcccacgcgtccgcggacgcgtggattttccctttgaaatacagagaagggggtgttctgaaacgagctggacacaccgaggcatctgttgaccttgccatgttggctggattacctcctgttgctgtcctttgtgaaattgtggatgatgcagatggttctatggctcgcctaccaaagttacgtgtctttgctgaaaaggagaacttaaagattatatctattgctgacttgattaggtataggaggaaaagagacaggctaattgaacgcgcttctgttgcacgcttgc

SEQ ID NO: 313056 - DNA, 302 bp, Zea mays
gctgtttcttgcagagtggtcatcgacaacgactcgtgtggcaacgcaactgtcatccgggttgatagggtcaataagcatggcattttactggaagcagttcaggtccttgtcgatctcaacctcgtcatcaccaaggcttacatttcttcagacggcaactggttcatgcatgtgttcaatgtgaccgatcaggacgggagtaagcttcataacagggaggtcattgaccatattcagaaatgcctggaatcagacggctaccttgttcctccggcgaacggttatgcgctgccggaaga

SEQ ID NO: 313057 - DNA, 300 bp, Zea mays
cggacgcgtggcgagacgcgtgggcggacgcgtgggcggacgcgtgggcagcagaagaagcttaacctacccatccttccagccactacaatcggttcgttcccacaaaccgttgagctcaggagggtccgccgtgagtacaaggcaaaaaagatctctgaggaggaatacgtcactgccatcaaggaggaaatcaacaaggtcgttaagctccaagaagagcttgacattgatgtgcttgtgcatggcgagcctgagagaaacgatatggttgagtacttcggtgagcagctctccggt

SEQ ID NO: 313058 - DNA, 320 bp, Zea mays
cccacgcgtccgcccacgcgtccgcccacgcgtccggagaaagtagggaaaagaagaggaagaaaccacgaagaaagatgatacaagctcagaagacgttttcttcttcacagcacaccaacatcactgcaaggaagtgtctaagaggtaaacactggacactcagttaccgtcctcttctggccaggaggtgctgttagctgcatgacaaacgcgaggttatcagcaatctggacgcagccaaggtaatggagagatttgatcagttgtgtgttagagagaggtactgacagatgaagagaggtcagatgtcttcagaa

SEQ ID NO: 313059 - DNA, 304 bp, Zea mays
cggacgcgtggcccgagcccaaaccaaagcctgaccctccacacatcccaccagcagctatcaactgcggaagtggctattaacaattattgtagtgtttaaataaaatgccatgttgcagcgtgcttttgtaggtgctgctacttgttgtatctatcctatcttttctttgtcattttttgtatgttatgctattatatgatcttagtgcagtttagcttgttccgtgtaaaacaaaaaaaagtaagaattaagaaagagataagagatgtaaaggagtggaaaaaaaaaaaaggggcggccg

SEQ ID NO: 313060 - DNA, 321 bp, Zea mays
cccacgcgtccgcccacgcgtccgcccacgcgtccgcccacgcgtccgcaactcgacaggggagttctcagggtaaagaggctgagagcgcgttggagatttggactataagagcgagcgagcgagctgggtgccttgctgccttgaggacgccgtcaagaaaccgcgtggaggggagggcgatgagatgagggatgctggccgcggtgatggactacttcagcacctgctggggcccgcggtctcgtgcggggcaccggggcaagggctccgacgccgccggccggcaggacggcctcctctggtacaaggacgccgggc

SEQ ID NO: 313061 - DNA, 309 bp, Zea mays
cggacgcgtggcggacgcgtggggccacaactccggccagaagctagctagccaagttattagctagtacatactagtgaccggccggacacgatcgatgggcaggccgccgtgctgcgacaaggcgggggtcaagaaggggccatggacgccggaggaggacatcgtcctggtgtcctacgtccaggagcacggccccggcaactggcgcgccgtgcctgtcagcacgggcctcatgcgctgcagcaagagctgccgcctccgctggaccaactacctccgccccggcatccggcgcggcaacttcac

SEQ ID NO: 313062 - DNA, 310 bp, Zea mays
  unsure (1)..(310): unsure at all n locations
gctgtcattgggatcatttaaaactggagccattctcttgggtggactttttgtgtatgacattttctgggtgttcttcactccagttatggtcagtgtggctaaatctttcgatgctccaataaagcttctgtttccaactgcagacgctgaacggccattctccatgcttggccttggtgacattgtaatacctggtatattcgttgnacntgncntgcgntttgatgtctcaagaggtaccaagaagcgttacttcaaaacgcaaggcaagtgcgacgaatataccaggtattacaatgtcacacaa

SEQ ID NO: 313063 - DNA, 294 bp, Zea mays
  unsure (1)..(294): unsure at all n locations
cggacgctggcggtacgcgtgtgatcttcctgggccagctctctcattcgaaccagtgtgaagctggactggtactgctgtgatgtctagcaccgcggctggtgtacgagtacatggccctgggcagcgtggattcgcacctcttctcgcgcacgtcgccgctgcttccgtgggccactcggatgatgatcgcgctgggctgcgcgcctgggctgtcgntcctctacgacgcggaccccgctccgttatctatcgcgacttcaagatctccaacatcctgctggacgcgcactt

SEQ ID NO: 313064 - DNA, 290 bp, Zea mays
  unsure (1)..(290): unsure at all n locations
ttcgatccggttcttccaacccaggggcagtgatggcgacgaagaggagcgtgggcaccctcggcgangcggatctgaaggggaagaaggtgttcgtgcgcgccgacctcaacgtcccgctcgacgatgcccagaagatcaccgacgacacccgcatccgcgcctccgtccccaccatcaagttcctcctcgagaagggcgccaaggtcatcctcgccagccacctgggtcgtccanaaggtgtcaccccaaagtacagcttgaagcctcttgttccacgcttgtctgag

SEQ ID NO: 313065 - DNA, 329 bp, Zea mays
tacgccgcagtacggtccgaatccgggtcaccacgcgccgggagcgcggaccgtggcggaccgtggtcctactggtggaacccagctgagtacctcagtgccggccgcgagcctccacgccaacaggtggatacaggacagccgtgaccagttcaccaaggagcgtctggacgccatcaacgacgagttcaagctgtaccgctgccacaccatcaagaactgcacgcacgcctgccccaaaggcctgaacccggcaaagcagatcgacacgatcaagaagctccagttgggtgccccaagtgcctgaagccgagcgtgtcttcccttga

SEQ ID NO: 313066 - DNA, 264 bp, Zea mays
catcatcgtccctatcatttaccgggtgatcccatccttgaggatactcgccatcgacgctatattgcattcttctatttaaacgccatcgcctttgtggcatcccttgtcatgatcatcatgctcctgaaccggaggatgagctacaagggcataaaacgatatgcgctgcagatggctatgatagttgatcttcttgctctaacagggtcttacattatggggagtagtagggggacgaagagctccatatacatatggctg

SEQ ID NO: 313067 - DNA, 296 bp, Zea mays
aaccttccaactgaaatacttacagtatgtgagaaattccgggcatattatcttggaactcacaatggcaggagattgacatggcaaacaaacatgggtacagctgatataaaagccacatttggaagaggccagaagcatgaactagatgtatccacttatcagatgtgtgttctcatgctgtgtaacaatgctgatggactgactacaaagacatgaactggtactgagatactgctcagactaagaatgctgagcactgctgtgcaaggaaatgtctcgtagactatgacagc

SEQ ID NO: 313068 - DNA, 296 bp, Zea mays
agataagacacgtccgcgacgtggcggcgcgacgcgtgggcggacgcgtggagttgcttgaactgaagcgcatatgaacctgcagggcaactaatatgaagtactgcagtggtgcatatgtaggctggaggcatggttcgctactgacatggacaatatatctctgaaaacttgggatcaggaacatgtgcttaccggcggacatggtcttatggtgaatggctacgaccctgtcatcagagctctcgctcaaggtctagatattcacctggacccacaggtcacaaagatcatac

SEQ ID NO: 313069 - DNA, 312 bp, Zea mays
gggttttgctgctctccgaccccgagctccgaagccgcagcatcaggcgcggcccccctcgcgtgtgaccgagatggcgctgccgaatcaggggaccgttgattaccccagcttcaagctcgtcatcgtcggcgatggtggaactggtaaaactacatttgtgaagaggcatctcactggagagtttgagaagaaatatgaaccaaccattggtgtggaagttcatccgttggatttcaccactaactgtggtaagatcaggttctactgctgggataccgcaggcaagagaagtttggtggcctcagggat

SEQ ID NO: 313070 - DNA, 321 bp, Zea mays
agttgggcgcagagaatccccaagcaaacaaacagggtagaggtagagggagaggagaggagaggagaggagaggagaggttgggtctgggacaccatggctccgatgaagctgtacggggcggtgatgtcgtggaacgtgacgaggtgcgcaacggcgctggaggaggctggctccgactacgagatcgtgcccatcaacttcgccaccgccgagcacaagagccccgagcacctcgtccgcaacccgtttggtcaggttccagctctgcaggatggtgacttgtacctcttcgaatcacgcgcaatctgcaagtacgct

SEQ ID NO: 313071 - DNA, 314 bp, Zea mays
gcaaaatattcaagagcacgagagggtccttagtgaatccatcgttgatgctgatctaccatcctttataaaaacgaaggtcgagaggatggaccaatcaatagcaagagccaaatcatgcactgtggattgcaacaatgttgacagaaagcttcgtcaaattcttcatatgacagaggatgaagctcattttcatatgaagcagagcgcatacctgtacaaccttggtgttcacaccatgcctaaaagtcatcattgtcttaatatgagattgacagtagagtacttcaaatccatgccattggatccaaatg

SEQ ID NO: 313072 - DNA, 294 bp, Zea mays
acggacgggagcgcggacgcgtggcggaccgtggcggaccgtggggtagaggcggtctcaaagctaggcgagctagcctccggtcacccgtcgatccacgcaaccatgtcgaggaggaagaccagggagcccaaggaggagaacgttacccttggacccactgtccgtgaaggagagtttgtctttggtgttgctcacatctttgcatccttcaatgacaccttcattcatgtcactgatttgtctgggagggaaactttggttcggatcactggtggcatgaaggtaaagctg

SEQ ID NO: 313073 - DNA, 291 bp, Zea mays
cagcttgcgcccgcaatggcactcgtctccgcctcctcgtcctccaccaccgccgtcacgggctccccaggaatgggcagcgggcgtcgtcctccttcctcggcggcaagacgctgctgagacaggccgaggcggcccggccgtcgttcgccgtgcgcgccgcggcggaccccaacaggccgatctggttccccggcagcacccctccgccgtggctcgacggcagccttcccggcgacttcggctttgatccctggggcctcggatctgacccggagagcctgcggtgga

SEQ ID NO: 313074 - DNA, 213 bp, Zea mays
cccacgcgtccgcttgctgcatgcgaaggagctctctagaaggctgaaggaagaacgagcaagtacgccagcttagactgtccataagctggcgaacttgctgcatgcgaaggagctctctagaaggctgaaggaagaaggagcaaacatcacagttaacagtgtccatcctggattgatcatgaccaatttgatgaggcactcctttgttct

SEQ ID NO: 313075 - DNA, 346 bp, Zea mays
acgctgcagtacggtcggaatccgggtcaccacgcgtccgggacctggttgatgaatgccatcacgcaactggtaaccacccatatactaggataatgaaggaattctatcatggatcagagcataagccaaatgtgttcggtatgacagcctctcctatcataagaaaaggggtctcctctgatttggattgcaaaaatcagctatctgagctggaaaatattttagattccaagatacactctgtggtggatagagaagagatagaactttgtgttccttctgcaaaagaagtgaatagatactatgagccaagaactgtttcttttgacgatttaagtgaaga

SEQ ID NO: 313076 - DNA, 308 bp, Zea mays
cgagccaccgagctacctgacgggcgagttcccgggcgactacggctgggacaccgcggggctgtcggcggacccggagacgttcgccaagaaccgggagctggaggtgatccactcccgctgggccatgctgggcgcgctcggctgcgtcttccccgagctgctcgcccgcaacggcgtcaagttcggcgaggccgtgtggttcaaggccggctcccagatcttcagcgagggcgggctggactacctcgggaacccgagcctcatccacgcgcagagcatccttgctatctgggcctgccaggtcg

SEQ ID NO: 313077 - DNA, 304 bp, Zea mays
aaagatatgaagaccagagggaagactttgacggagcggtacgagatggggaagctgctggggaaaggcgcgttcgggaaggtgcactatgcaagggacctcgagtccaaccagggtgttgctatcaagatcatggacaaggacagggtgctcaaggccgggctctcggagcaggtaaagcgtgagatcacgactatgcggctggtggaacacaaaaacatcgttcgtctccatgaggtcatggcgacacggaacaagatctacatcatcatggagtatgccaaagggggtgagctcttagaca

SEQ ID NO: 313078 - DNA, 339 bp, Zea mays
tacgccgcagtacggccgaatccgggtcaccccgcgccgggacctggcggacgcgtgggcggacgcgtgggcggacgcgtgggcggacgcgtggggtcgccggaggacaggctggcaacctcggcgaatccgtcaccatctctcgcgagaagaccaaggtcaccgtcacctctgacggacccttctccaagaggtacctgaagtacttgaccaagaagtacttgaagaagcacaacgtgcgggattggctacgcgtggttgctgccaacaaggaccgaaacgtctatgagctccgctacttcaacattgctgagaacgagggcgaggaagatgattaga

SEQ ID NO: 313079 - DNA, 269 bp, Zea mays
atcaactgtttgacaaaggtatctcatatttgcagttggtattgctgtctgatcatttctcactaaggtgctgtttggttcagaaattgtaacgtaaatggtaacagtaatgattcacactcaaatgacaacgcttgttgggcgcctttcccaagaggaattgattgataaattgcctacatttctgccagcattatttgatgcttttaacaaccaaagtccagatgtccgaaagactgttgtgttctgcttggtggatatgtacatca

SEQ ID NO: 313080 - DNA, 310 bp, Zea mays
cccacgcgtccgcccacgcgtccgcccacgcgtccgcccacgcgtccgcacacgcgtccgggaccgtggcacgcttggggcaacagacctcctggtgcctggcgttctcccaattggctgcttcccgttgtacctgacgctgtacaacaccagcagcaaagcagattacaacgcccggaccgggtgccttcggaggtacaaccgcctggccttccaccacaacagggagctgaagcagcagcttgacgagcttcagaagaagtaccccaagacgaagatcatgtatggagattacttcaaggctgcactg

SEQ ID NO: 313081 - DNA, 310 bp, Zea mays
cccacgcgtccgatctgtttaaaactgatcatactaaacacgcttgtcatgcaatgatatttaacaaccctgaggcgatggaggaagacgaatggatgagatcgctgagatcagggcccctcacttcgaggagtcgatgaagtatgctcggcgtagtgtcagtgatgctgatatccgcaagtatcaggcgtttgcccagacattgcagcagtcccgggggttcggcagtgagttccgcttctcggatcagccggcgacactggtgctgctgctgcagctgatccgtttgcttctgcgggtgctgcggctg

SEQ ID NO: 313082 - DNA, 313 bp, Zea mays
ctatcctggtcccaagtgcaggatagccgtcgcagacgtctcggcattggacgcgaggagggtccgaatgccgagacatcttccacggctatacacctcccaagtgcaggacatggctcagtacgagcaactagctcagctcagctacttgctaacagtagcgtacgcaggcgcgcacctacttgctagtatacgtacgtccacaaatactcataaaacgggctagcgtacaaagctaacatctggttgttcgtcccgacatggacgattagcctagctcgatcgccagctgctgccactctcgttcgattta

SEQ ID NO: 313083 - DNA, 114 bp, Zea mays
gtgacgcgggttcgccgcggtgctctgcgtcgtcttcgcccccaccgccgctgagcctggcatctcctatatcaaggcttatctcaacggcgtcgacacgcccaacatgttcgg

SEQ ID NO: 313084 - DNA, 328 bp, Zea mays
agtacggccgaatccgggtcgaccacggacgggacgggcggacgctggcggaccgtggcgctcctactcccacctcagcatccacacctagcgaccgtcgcggagtccacgccatgggcggcatggcggctcagatcccgatcaaggacgatgcggcggcgaacgaggcggcactggagctggtgcgcaaggacaagctgagggaggtgcgcgcgggccacgacggcacgtgggcggcgcacccggggctcatcccggcgatacgggaggtcttcgagggccacctcggcgggaggccgaaccagatcggcgacgcgcagggcacgag

SEQ ID NO: 313085 - DNA, 299 bp, Zea mays
ggacgtgggaacacggtccgtacggtaaagagagagaaggtgggagtggaatcgagaggggaaaaccaagcctgcgtttcagagacaactcaggcggcgcgatggcgatggcggcgctgcgacgcgaggggaggcgcctcctcctctcccccaccgtccccaacccgtcttcggcggccgcttccgctgcggtgacgcgatcctccgccatgtcgcaaccggagatggctccacttggtgcacgttctatttcaactcaagttgtgaggaaccggatgaagagtatcaaaaacatccag

SEQ ID NO: 313086 - DNA, 308 bp, Zea mays
ctcagacgaaaggcccaagtgggccacggccgcggggaaggaaaccaacaaagaatgatgtggtggaccttaggaccatcctcatccactgtgcacaggcggtggcagcagatgaccgcagaactgctaatgaattgttaaagcaaataagacaccattccaagccaaacggcgatggaacccagaggttagcacattgttttgcagatggtctcgaggctcgcttggcaggcacggggagtcagctttaccgcaagcttatagcgaaacgtacaactgcctcagacatgcttagagcctaccacctt

SEQ ID NO: 313087 - DNA, 314 bp, Zea mays
ggaccgtggcacttctgaaggccggaaaggctcaggcagcccttgagctgctgagtggcatgacaaatggtactccagatctgattacttataatacagtaatttccaatcttaccaaggccgggaaaatggaggaagctcttgacttgttgcgtgtgatggtctctaatggcctttgcccggacacgaccacatacagatctttggcctatggtgtctgtagagaagatggaaccgacaaggcggtcagaatgctccgcacggtgcaagatacgggcttgtcgcctgacactacattctacaatgatgttctt

SEQ ID NO: 313088 - DNA, 306 bp, Zea mays
ggacgtggctaggactacctcggcaacccgagcctggtccacgcgcagagcatactggccatctgggcgtgccaggtggtgctcatgggcgccgtcgaggggtaccgcgtcgccggcggcccgctcggagaggtggtcgacccgctgtaccctggcggcagcttcgacccgctcgggctcgccgacgacccggaggcgttcgccgagctcaaggtgaaggagattaagaacggccgcctcgctatgttctccatgttcggcttcttcgtgcaggctatcgtcaccggcaagggccccctcgagaac

SEQ ID NO: 313089 - DNA, 249 bp, Zea mays
ctcggcaacccgagcctgatccacgcgcagagcatcctcgccatctgggcctgccaggtcgtgctcatgggcgccatcgaggggtaccgcgtcgccggcggcccgctcggagaggtcgtcgacccgctctaccccggcggcagcatcgacccgctcggcctcgccgacgaccctgaggccttcgcggactcaaggtgaaggagctcaagaacggccgcctcgccatgttctccatgttcgggttcttcg

SEQ ID NO: 313090 - DNA, 303 bp, Zea mays
  unsure (1)..(303): unsure at all n locations
gcatgatccggcctctgtgcttcattacgggagcacggtctagctacctgatgagcgagaggangtgatcaaccatggttgttttgtccctctcgcagggcgcgtccggggtcgggctcggcaacttcctggagatggggccgctggacgtggacctgaagccgcgcaactcgacgtggctccacaaggccgacctcatctttgtggacaacccggtcggcacagggtacagctacgtggaggacgacagcctgttcgtgaccagcgactggcagcaggccgcggacatgacgacggtggtca

SEQ ID NO: 313091 - DNA, 309 bp, Zea mays
acggcagccacacgcactccaacaccacctcccaggtcgcgctcgtcggcgccgacgtctgccccatcgagagcctcgactacgagctgatcgagaacgacgtgttcaagcaggactggagggcgcggggacggggccacatcctgcgctacgtggcgctcaagtgggccctctgcttcctcgtcggtgccctcgcagccgccgccggcttcgtcgccaacctcggcgtcgagaatgtcgccggcgccaagttcgtcgtcacctccgacctcatgttggacggcagacacggctcggcgttcgcggtgt

SEQ ID NO: 313092 - DNA, 304 bp, Zea mays
cggacgctggtgttcatccacactaacgaacgaactgaggtcgacgacgactgatcgagcagcgacgataccggctgtgctgaacagcaggaagacgccgcagtggttgccgtgctggtggcggcggcgctgctggcgtcgtccgcttcggcggcgatcacctgcgggcaggtggggtcgtcgctggctccgtgcatcccgtacgcgacggggatggccagcgcgctccccgcgtcgtgctgcagcggcgtcaagagcctcaacagcgcagcgcggaccagcgcggaccgccagcagcgtgccg

SEQ ID NO: 313093 - DNA, 283 bp, Zea mays
ggctcgctcgcgtccgggacctgggtcgtgctgcgacgcgtgggcggacgcgtgggcggccacgtcggctgcctgcatgccatcctctacgcggctctgtactcgtcggttgacatctcatggggtttcgctcggttcgtcaacgtgagtgacgaccacggcgccacgccgctccacctcgccgccagcaggtgccgccccggctgcgtgcaggcgctgctggagaacggtgccatcgtctccgctttgaccggctcatacgggtgtcctggtagcacgtcgc

SEQ ID NO: 313094 - DNA, 233 bp, Zea mays
gtttgggcaggcggagacggacaccgacgaggtctacgcgcagatcatgctcatgccggagcccgagcaaaccgatgtgccggctgagaagccgagttctgcacctgctgcgtcgccgaggccagcagtcaggtccttctgcaagacgctcaccgcctcggacaccagcacacacggtggcttctctgtgctgcgccgacacgctgacgactgcctccctcccctggatatga

SEQ ID NO: 313095 - DNA, 192 bp, Zea mays
gacacgcgtccgcggacgctggcgcgccggagcgcatcagcgtcgtcccgggcagcagcgccgccgccttcaagcaagacgacgcacggtggaagctcagggccaagcactacaagacgctgcttccggcgctggggagcgacaagatcaggaacgtcatggacattaacaccgtgtacggaggattcgcag

SEQ ID NO: 313096 - DNA, 214 bp, Zea mays
cggacgcgtggcccttccatgagctgatcatagacagtgacgaagccaaggcatatataacagcatacaatgaagatcctgatcaatacagagctgatgcactaaagatggaagagtgggcacgttcccagaacggtagttccttagttgatttttcttccagagatggagaaatcgaggctattctgaaagatatatcagaaagggccagggt

SEQ ID NO: 313097 - DNA, 304 bp, Zea mays
gtttctctaatatgcactgttactccagcatcaagcaattcagaagagactcgtaacacattaaaatttgcccaccgtgcaaagcacattgagattcaagtgtcacaaaacaagattatggatgagaagtctttgataaagaagtaccagaatgaaatttgccaattaaaggaagagctagaccaactgaaaaggggtatactttctggcactccttcaaaagatgtcatagaagacaatgtcattctttggaaacagaagctagaagatggtaatgtcaagctccagtctagactggaacaag

SEQ ID NO: 313098 - DNA, 299 bp, Zea mays
ggaccgtggcagtggacgtgccgtgcgtctcgctgcggcgaggcccgcgtgacgatgcgcaagtcagcggctaaggcaaagccgtcggcgagctccggcagcccgtggtacggctccgacctcatgctctacctgggcccgctgtccggctcgcccccgagctacctgacgggcgagttcccgggcgactacggcttggacaccgcggggctgtcggcggactcggatacgttcgccaagaagcgggagctggaggtcagccactctcgctgggcgatgctgggcgcgtttggctgcgt

SEQ ID NO: 313099 - DNA, 299 bp, Zea mays
cccacgcgtccgcccacgcgtccgcccacgcgtccgcccacgcgtccgcggacgcggtgtgcagcccgtgcgctgtcctgttaccgtctgtggcgacatccacggccagttctatgacctcatcgagctcttccgcatcggcggcgacgctcccgacaccaactacctcttcatgggcgactacgtcgatcgtggctactattcagttgaaacagtttctctgttagtggctttgaaagtccgttacagagatagaattacaatacttagaggaaatcatgagagcagacaaatcactc

SEQ ID NO: 313100 - DNA, 296 bp, Zea mays
atcaaactcgctactggcctcgggcccgcccgtcgtgaggtccgagctcgatgcagccgatccggcggcggcaccgaggctttgcactcctctgtctctccgccgccctcctcgctgccgccactctgctccccggcgccgccgtcgccgaaggtgtcacgccctccgaggcgcgccggctccgcgacgaggtgaaagatatgttctatcatgcgtttgatggatacatgaagtatgctttcccactcgatgagctgcggcccttaagttgccaaggtgaagactcacttggtggg

SEQ ID NO: 313101 - DNA, 161 bp, Zea mays
caaagatctttgccaaagtcagaggatgggagactgagaatattgaggagattgctttgaagatctctcaacttcctttggcttcaggcaagcaaaagaggattgctgtgattactcaaggtgctgatccagtggttgttgctgaggatggaaaggtgaaa

SEQ ID NO: 313102 - DNA, 300 bp, Zea mays
aaaacaaatgattgcagcaggcctttagctttgtttctaggtatgaaccatcatcgccaaatgaccatatttggtgctgcttttttatacgatgaatctgttgagtctttcaagtggcttcttgaaacctttaagagtgccatgtgtgggaaacacccaaagacaattttgactgatggatcttcagctttgaaggaagccctgggtcttacttggcctggtactgttcaccggtcctgtgtgtggcaaatataccagagcactgttaagtcattggcacatatgtttagtgcttatgaa

SEQ ID NO: 313103 - DNA, 218 bp, Zea mays
cacacgcgtccggcgacgaggaagaggaggcgatcgatgagaacggcgagattatcaagaggaagaagaagaagatgggcctcaaggagaagctcaaggagaagctgccgggccacaaggacggcacaccacacggccgcaccgtccccggcgaccacgcccgtagagacgcatgcacaccaccaggaggaagcgcacaggccgcacgtcgtcccgac

SEQ ID NO: 313104 - DNA, 227 bp, Zea mays
cggacgcgtggcgtgacgcgtgggttggaggcctcttcaaggaggatgatcctgagttcaccacctcagacactgtctccagagttcactatcaaaccatcctcaaaagaaaccgttgagatccctgtcaccgagaactccacaattgtatgggaactccgggtgctgagttgggaagtgagctatggcgccgagttcacccccgacgcggagggtgggtacaccgt

SEQ ID NO: 313105 - DNA, 342 bp, Zea mays
  unsure (1)..(342): unsure at all n locations
cagtacggcggaatccgggtcgaccacgcgtcgggacctggcgatcgcggggctcaacccgctgtgcatccagctcctgacggagttccccatcaggagcaagctggacccggtagtgtacggcccggcggagtccgccatcaccaaggagatcctggagaagcacatgagcggcggcgcgccatgaccgtggagcaggcgcacgcggcgaacgtctgttcatcctggactaccacgacgtgttcctgccctacgtgcacagggtgcgcgagctgccggacacgacgctctacggctcncgcaacgtcttcttcctcacggacctgggcacgctgatgccgc

SEQ ID NO: 313106 - DNA, 312 bp, Zea mays
tcttctctctctgctcctccgcctccgcctgatccatccaagacagggatcgccatgtcggactcggaggagcaccacttcgaatcgaaggccgacgctggggcgtccaagacctacccgcagcaggctggcaccgtccgtaagaacggcttcatcgtcatcaagaaccgtccctgcacagttgtggaggtttctacctccaagactggtaagcatggccacgccaaatgccactttgtcgccatagacatattcaatgggaaaaagcttgaagatattgttccttcatcacacaactgtgacattccgcat

SEQ ID NO: 313107 - DNA, 273 bp, Zea mays
caaggagagtacgtggaggagcagccatggcttcatcggtggccgccgcggcgagcacattcctgggcacccgcctggcggacccggcgccacagaacgggcgcatcgtggcccggttcgggttcgggttgggcggcaaggcgaactgcgtccgaagaaggtggcgaagacatcgacctcctctgaccggccgctgtgagtcgccggcgccgtggcgcccgactacctggacggctcgttggtcggcgactacgggttcgaccgttcggtctc

SEQ ID NO: 313108 - DNA, 190 bp, Zea mays
aaagattcaggaagctctcaggtccctaaacgagtacaaaagatcaagggaactcgatggcgtgagctactacgattccttcaagctccaacgtgaggtgcatgacttcaatgcaaacgtgaaaaggctagagctagctggcctctgggacgagatagtggagatgctgcggaggcgtgagctgccggac

SEQ ID NO: 313109 - DNA, 269 bp, Zea mays
cggacgcgtggcggacgcgtgggcggacgcgtgggcggacgcgtgggcgtgtggagaacttgtatacgggaccccttactgatgtttatgcaactgctatcacaaactgtgatccggagggtcctcttatgctgtatgtttcaaagatgattccagcatctgacaagggcaggttctttgcctttggtcgtgtcttctcagggaaggttgctactggtatgaagttcggatcatgggtccaaactatgtccctggccagaagaaggacc

SEQ ID NO: 313110 - DNA, 264 bp, Zea mays
cccacgcgtccgttaaagcaagagcacttcatgatcttgggaaagataaagaagctgcacaagaatgtagaatgatattggatattgtggaagcagctgtacctgagggcttgccagcaggctttgggaaaggctgtaaattgaacgaaataatatgcaaggctgtagagttgctccctgagctgtggaaatcaggggggttttcacttgaaaccatttcttcatataggaggtcacttcttaataattggaatcttgatggag

SEQ ID NO: 313111 - DNA, 258 bp, Zea mays
ggacgctgggcgcaagatggcggaggcgtggcgcaccatcgaccagttcgtcgccgacacgatcgacaagcggcgggccgagaaggcgaggcacggcaacgggcaggtctcggcggacctgctctcgtcctacatcaacgacgacgaggacgaggaaggcggcgtggacgcgttcctgcgcgacacgaccatcaacctcatgctggccggccgcgacacgacgggctcggcgctgtcctggttcttctacctcctgag

SEQ ID NO: 313112 - DNA, 285 bp, Zea mays
cagtacggcggattccgggtcgacccggaccgacacaatacgtacaggtccgggacgcgtggcgacctgtgtgaggcttttgcaggcagagcacagattgtgcacattgatattgatcctgctgctattggcaagaacaagcagccacatgtgtccatctgtgcagatgttaagcttgctttgcagggcatgaatactcttctggaaggaagcacatcaaagaagagctttgacttcggctcatggcatgatgaattggatcagcaaaagcgggagtttcccctt

SEQ ID NO: 313113 - DNA, 313 bp, Zea mays
cccacgcgtccgcgagggtggactggactacctcgggaacccgagcctcatccacgcgcagagcatcctcgccatctgggcctgccaggtcgtgctcatgggcgccgtcgagggctaccgcatcgccggcggcccgctcggcgaggtcgtcgacccgctctatcccggcggcagcgtcgacccgctcggcctcgccgacgaccccgaggccttcgctgagctcaaggtgaaggagctcaagaacggccgcctcgccatgttctccatgttcggattcttcgtccaggccatcgtcaccgggaagggcccgctc

SEQ ID NO: 313114 - DNA, 169 bp, Zea mays
  unsure (1)..(169): unsure at all n locations
gtctcgcctcgcgtcgtctgcgctcgcggctcgtcacaggtctcggcgggataggggcggcggccggtccgtgtccgtgtccgtcgacggttggttcgggaatggcgcaggcggtggtgccggcgatgcagtgccgtgtcggagtgatgttggcgacgnggagggtgtg

SEQ ID NO: 313115 - DNA, 275 bp, Zea mays
ccacgcgtccgcgacgctgggctgcagttcaccagcaataagagtctctgatattgtaaacatactgaagaccgaatatccaacatacacttaccctcaaaaattcgttgaagcggaaggtagcaacacatacaacacggagaagcttcggaagctagggtggacctctaggcccatggaggacaccctccgagacagcatcgaatgctacagagctatgggcatcctgaactgagcttcccttcagctttgggctttggctgctgctgctgcta

SEQ ID NO: 313116 - DNA, 270 bp, Zea mays
atcataccaagggatcttgctttgctttgtcagaaggttgagaatcatgtagttggagctccttgtggagtaatggatcaaatggcatctgcgtgtggagaagctaacaaactccttgcgatggtttgccagcctgccgaagtgaaggaattggttagcatacctactcatatacggttctggggtctagattcagggatacggcatagtgttggcgggggagattatggatctgtgagggtaggcacttacatgggacgaaagatgatc

SEQ ID NO: 313117 - DNA, 259 bp, Zea mays
ggagggtgagatcaccggcccgctcctcgcgtcgggcgccggcgcgccggcgcggaggcggtgcccccgtggcgggagcaggtgacggctcgggggctggcggtcagcgccgtcctgggggtgctcttctgcctcattacgcacaagctcaacctcaccgtcgggatcatcccctcgctcaacgtcgccgcggggctgctcggctacttcctggtccgcacctggacggcggcgctcgagaggttcggcgtcgtctcca

SEQ ID NO: 313118 - DNA, 256 bp, Zea mays
cggacgcgtggcggacgcgtgggcggacgcgtgggcggttgctctagatccgttcatcctggtggtgctgtgaggtcgacagcggcgagcacattagaagatgctggacaagctgtgggacgacgtggtggccgggcctcgcccggagacgggcctcgagaagctccgcaaggccaccaccgcccgtccgctcgtcatcatcaaagacgcggacggcggcagttacattcggccacattcgttgccgtcgaccccg

SEQ ID NO: 313119 - DNA, 173 bp, Zea mays
ccattactgcatacgcaacacagtgcagcataaggagctgcgatctgatcgacatgtctgctcgcaccatgtctatcacctcccgcgcgctcatcgtcaagcctgctgcgggcacgagggacgtcggcggcgatggcggcatcaccattccaagaccgccgccaatcccaagc

SEQ ID NO: 313120 - DNA, 178 bp, Zea mays
gcatttatcatattctgacgtctatactagagaaagaaggccgcctctgggtggaaagaatttatggtggtatccgagacagcatttcgaagcggaccatccaaagtgatcttcatttcaaaaaactgcttaatgttattgccaagcttgttgctgtattgggaatactgcgaggtac

SEQ ID NO: 313121 - DNA, 189 bp, Zea mays
ggacgggcggacgcgtggctagctccctaactgcaccggccgccacaccactccgaccggaagttccacaacaatggccaccgtcctgggcagcccccgcgcgccggccttcttcttttcgtcgtcctccctccgcgccgcgccggcgcctaccgccgtggcgctgcctgcgtgcaaggtgggcatcat

SEQ ID NO: 313122 - DNA, 276 bp, Zea mays
gctggcggagaaggtggggttcctggtggacaagcaggcggcgctgccccggctgggcgtcccgctgtacgagtggtggtcggaggcgctgcacggcgtctcctacgtggggcccggcacccggttctcgccgctggtgcccggggccaccagcttcccgcagcccatcctcacggcggcgtcgttcaacgccacgctcttccgcgccatcggcgaggtggtgtcgaacgatgcgcgggcgatgcacaacgtggggctggcggggctcacgatctg

SEQ ID NO: 313123 - DNA, 268 bp, Zea mays
gaatcttgtactacgaggctcgacacgacggcaacaagcatacacgcagggagggggctatatgtgttatgtgtaataggaggaacgcgcaggcggcgtactaggcctgcttgtagtacacagccagatagatatgctccacctcagatatagccccctccctgcgtgtatgcttgttgccgtcggtgcgaatcttgtactacgaggctccgtcgaacctcgatggcttgcttctttatcagaacatgtttgaataaacgctatttgg

SEQ ID NO: 313124 - DNA, 271 bp, Zea mays
caagccaccatcgaccttcaagtctcgctacgtagcagtgcaataaaaaaagcagccgcaatggcgagcagcaccatggccctctcctccacggccttcgccggcaaggccgtgaacgtgccgtcgtcgtccgccttcggcgaggcccgcgtgacgatgcgcaagacggcggcgaaggccaagccagcgtctgcgtccgggagcccgtggtacggccccgaccgcgtgctgtacctgggcacactgtccggcgagctacgagctacctgac

SEQ ID NO: 313125 - DNA, 265 bp, Zea mays
cccacgcgtccggtcgcctccctttccccttccctccctccctctccccgcgggccgccagaggcaatttcgccctcgattcgaccccgattcgtccgcccgcgaccgggattccctccgccaagcgcggatctgaacgctgcgctccgtgtcgccgctcgaatccgccatgaagggggccaaatccaagggcgccgccaaggccgatgccaagctggcggtgaagagcaagggggcggagaagcccgccaagggcaggaaaggg

SEQ ID NO: 313126 - DNA, 305 bp, Zea mays
  unsure (1)..(305): unsure at all n locations
ggccggctcccagatcttcagcgagggtggactggactaactcgggaacccgagcctcatccacgcgcagagcatcctcgccatctgggcctgccaggtcgtgctcatgggcgccgtcgagggctaccgcatcgccggcggcccgctcggcgaggtcgtcgacccgctctatcccggcggcagcttcgacccgctcggcctcgccgacgaccccgaggccttcgctgagctcaaggtgaaggagctcaagaacggccgcctcgccatgttctccatgttcggattcttcgtccangccatcgtca

SEQ ID NO: 313127 - DNA, 260 bp, Zea mays
cggacgcgtgggcggacgcgtgggttccaagatgtcgaagcgaggacgtggaggttctgctgatcacaagttccggatgtcactgggtctaccagtggcagccactgtgaactgtgctgataacactggagccaagaacctttacatcatttctgtgaagggaatcaaggggcgccttaacaggcttccttctgcctgtgttggtgacatggttatggcaactgtgaagaagggaaagcctgaccttaggaagaaggtga

SEQ ID NO: 313128 - DNA, 319 bp, Zea mays
gtacggtcggattccggtcgaccatcgcgccccacgtgcgcgacggggcggcgtgacgcgtggcgagacgcgtggacgccactgtccagtagccgcgtcaagactgcttagctaaccgccatggcctccctcgccgccgtctccgtgaagcccgtggccatcaagggtctcgccggcagctccatctccggaaggaagctcgccgtcgccaggccgtcggctcgctccatccgcagccccgcgcagcgccgtggtggccaagtacggcgacaagagcgtctactttgacctcgacgacatcggcaacaccaccggacag

SEQ ID NO: 313129 - DNA, 344 bp, Zea mays
cagtacggtcggaattccgggcggacgcgtgggggacgcgtggggaacgtgaaaggttagaggaactggaaagacgtgaaagagaggctgcagaggctgagaaaaagcgtaaagaagaggaggaagctgtagcaagggcatcccaagaagcagctgagaaggaagctgctcttgcaaggaggaggcaagagaaggccatggctcttggagctgaacctgagaaaggaccaggtgttactcgggttctcataagattcccaactggagagcgcagagagcggagattctacagttctgcaaccgtcgcttccctctatgactatgtcgattctctagactgcatg

SEQ ID NO: 313130 - DNA, 300 bp, Zea mays
gcgacgagggtccagacagcaaggcggagggcgagaaggaagcggccgttgttgaccttaggccactgacgatggaagacctgaggcaggcaaagaaccaggttgcagcgagcttcgccgccgagggtgccgtgatgaacgagctcaggcagtggaacgacctgtacggcgaaggggggtccaggaagaaacagcagctgacctacttcttgtagaggtgaagcatttggcaggtggtggagaggaacagagctgggcagacggtggacccatacttgatgaaccgagcatggtttcttc

SEQ ID NO: 313131 - DNA, 300 bp, Zea mays
ctcatcggcacttccagacgcccgagctccactctggtaccgagtgttgtaatgatggatttggcctggtggcaagaaggtcgattgctgaagctcctgctgacatcaacgtcactacgaatagctcctttgtgctggcggcagataggacatatcgcagggaccctttgaatggcttcaggaaatacccgggcggctggactatcagtgaagtgcactatttcgcatccgtcggatatacagccattccgctgttcgccattgctctcgtgtcgttagagatcatattcctggatatgc

SEQ ID NO: 313132 - DNA, 302 bp, Zea mays
ctgctctccatacttcaccaattggaggccactctggcattcctgttacttatagtcgcctcaagaatctctttgcttggaaaaatatgaagaccacagtccaacaatttatacaaacttgccagatatgcttacaggcaaaaccagaccggtcagcataccccgggaaacttcaacccttaccagttccatctggggcctgggaaacgatcacaatggattttattgatgggctcccttcatcaggccatgccaactgtattctagtggttgtggataagtttaccaagtatgctcacttt

SEQ ID NO: 313133 - DNA, 277 bp, Zea mays
cccacgcgtccgcccacgcgtccgatgaagttacatgctactacggtttaatcattcttgagtacctatatattctaataaatcagtacgtttttaattattttgattttactggtacttagatagatgtatatacatgctctaacatgtttagatacatcatataacatgcacatgctgctacggtttaatcattcgtgaatacctatatattctattatatcagtatgccttttaattgttatgattttgatgtacttggacggctgcttatgca

SEQ ID NO: 313134 - DNA, 266 bp, Zea mays
caccatctttgacgagactgggtaccgccacacagctgccggcttactatcagctggagatgctagcaacctgaaggtgctgctccacgctagtgtgcacaagatagtgtttggctcgcgacaaggacgactgaaggcaagagccatcggagtcgaattcactgatgaggatgggagacaccaccaggcattcttgaacagcaacagagacagtgaagtaattgtatctgctggtgcgattggcaccccccagctgctgctgctca

SEQ ID NO: 313135 - DNA, 310 bp, Zea mays
cccacgcgtccacacacgcgtccgcggacgcgtgggggctggcaaggtgctgtacagaaccattcctcctacattgtcaagaagattgtgacattggaagatccaacagatgcttaccccaattttaacttcattggccgtctgcttgggccaaggggacactcgctaaagagagttgaagctactacaggttgccgtgttttcatcagagggaagggctccgtaaaagatcctgtgaaagaggaacagctcaagggaaggcctggctatgaacacttgggcgatccaacacatatcttgatcgaggctg

SEQ ID NO: 313136 - DNA, 314 bp, Zea mays
agccacgcgtccacccacgcgtccgcacacgcgtccgcggacgcgtggaccaaaacctgggaggagacctgatatcttccctaagttcagcccaatgaagacaccattaccgcatccattgccagctgatgatcctctggatgatgatgaagaggaagaggaagaacaagcaccacctcaggaggagccacaagaggacgatccagacacggaagaacctgaggaagatgacccagataagccaaccgagtaattttcgattggcttaacagtgatagattaggcaaatgggaaaaatgtgctacgtctttggt

SEQ ID NO: 313137 - DNA, 196 bp, Zea mays
tggagctcgccggtgcggtccacaacttactctccttcatccacaataatctcgacctatgcaaatgggttgctcttgccatcttcgccatgcaggcactctcacttctcctggctatgactttacgggccatgctatctgcccggaccatggactacgacagtgatgaagactttgtggttatacggcggccact

SEQ ID NO: 313138 - DNA, 306 bp, Zea mays
agtcacatgaccaggacacgaccgatttacacaaatgcatagcttttatagctgagaattattctgccactaacaaatctaaccagctcagcatcttggtccttggagcacttgggggaaggtttgatcacgagatgggaaacatcaatgtgcttcatctcttcccaagcatcaatatcgtcctcctatcagatgattgtctgatctttctgctctcgaaaatgcatacccacgagattcacgttgaaaagtcgatcgagggaccccactgtggattgatcccgattggcatgccgtcgactagca

SEQ ID NO: 313139 - DNA, 296 bp, Zea mays
caaaagcaaagcgaccgagagtgtgctttttgggctagcttcagttccatcatgcacatcgatatgctaaaagccgtgtcgattgtttcttttccggatcttgatttggcgctgttgcgtgttgggcgcagtggggtggggctctttccagctgggctactctggcaatgcggatctggagcctgggcggtgccgccggacggacggcaagaaatggcggtgctccagggacgcggtcgccgaccagaagtactgcgagcgacacatgaaccggggacgccatcgttcaagaaagc

SEQ ID NO: 313140 - DNA, 239 bp, Zea mays
cccacacgtccgcccacgcgtccgcccacgcgtccgcccacgcgtccgcaaaattccaaatgcttttctgatcagagagtcagattttccatgttataactctgccttgccagtgaagttagatcaggaagcctgtattcattctaagttctgttctgagtgtgtcgaatattcatgtgctgtggaaagacaaggcactacatcaatggttgtttctggtaaagaagatcgcgtggaca

SEQ ID NO: 313141 - DNA, 230 bp, Zea mays
cggacgcgtggcgagacgcgtgggcggacgcgtgggcggacgcgtgggcaaagatatgttaggaaagacgttctcctcaagtccaaaattggctgttgcagctaaacatggttacttcttgaggtggtctagcgaagaagagtggcaaacatgcactcaggccatggactttggatggatgcaaatggcaaagccagtgatgaatttgtatacagaagcaactgatggat

SEQ ID NO: 313142 - DNA, 300 bp, Zea mays
cgctctggagggcgttacttttcagcagctagtacggatgccaagcgctctgtacgcgtcgacgtcggatgtttttgaggccagcgcgtatcttgctctggaggatttccttcacgcaggcgttaaaggactgtggcaaactttctggggtcctgatgaagcgatgccgttctcggttgcctgtgtacacagcacgagctccagattttatcctgctgagaaggctataagcagtggaaggctcgatggtgtttgcgcgactgctgtgctgctgaagaatttgaagccttcacaaggaag

SEQ ID NO: 313143 - DNA, 263 bp, Zea mays
cccacgcgtccgatcatatgatggtgggagtcaaagcacttccagtggaaagggaattgctgatttaccttcatatgagtcttttgatcttaacaggagtgctgtgcttgacgaagaaactttttctatggagcctggaattgtattttttgaggacggatcatactctagaggtccagttgatatagcaattggtgaatatgatgaatctaaatacttcctttcaccaacatataagtttgagcaatgccttgttaaaggtt

SEQ ID NO: 313144 - DNA, 266 bp, Zea mays
tgctatgggattatggtcaaaggttaaaggatctggaaccagtttcaaaaaccctaatgccattggacaggccattgccaagaacttgccttcttctgatattattgaatccacatctgttgctggacctggttttgtgaatattgtcttatcaaaccgctgggttgcacagagaatacaagacatgctcgttaacggtatcaagacttgggcaccaattcttccagtaaagaggacagtgattgatttttcatcacctaatattg

SEQ ID NO: 313145 - DNA, 129 bp, Zea mays
cggacctggggttttgactggacatcgacgcactccttgggtggtcaggtatcatccattacactctgacatcctggctagcggaagtttggatcatgaagttcgtctatgggatgctaatacttcaga

SEQ ID NO: 313146 - DNA, 158 bp, Zea mays
gagcgtccaatcttctgttcgtggagtcaccggctggagttggatggtcttattcgaacacttcatcggactacagcactggagacgtgcggactgctcatgacatgtaccaatttttgttgggatggtatgcgaagtttcctgagtacagatcaaga

SEQ ID NO: 313147 - DNA, 239 bp, Zea mays
ctgtactcaggcaagcagtgagcatcctcttgccaaagctattttggactatgcattgcatttccatttctttggcaagcttccttcatcaaaagatggcattgagcaacgaaaagacaaggtattatcccagtggctgcttgaagctgaagacttctctgcagtacctggcaaaggagttcagtgctcgatcaatgggaagcatgttttggtcggaaaccgttctttgatgactgaaa

SEQ ID NO: 313148 - DNA, 278 bp, Zea mays
ggaccgtggtgacgggcgagttcccgggcgactacggctgggacaccgcggggctgtcggcggaccaggagacgttcgccaagaaccgggagctggaggtgatccactcccgctgggccatgctgggcgcgctcggctgcgtcttccccgagctgctcgcccgcaacggcgtcaagttcggcgaggccgtgtggttcaaagccggctcccagatcttcagcgagggcgggctggactacctcgggaacccgagcctcatccacgcgcagagcatcctt

SEQ ID NO: 313149 - DNA, 276 bp, Zea mays
cccacgcgtccgagaccttcgccaagaaccgcgagctggaggtgatccactgccgctgggccatgctcggcgcgctcgggtgcgtgttcccggagctgctcgcccgcaacggcgtcaagttcggcgaggcggtgtggttcaaggcgggctcccagatcttcagcgagggcgggctcgactacctcggcaacccgagcctggtccacgcgcagagcatcctggccatctgggcgtgccaggtggtgctcatgggcgccgtcgtagggtaccgcgtcg

SEQ ID NO: 313150 - DNA, 274 bp, Zea mays
cagagaataggaggtagacgtgtcctgctactgtcatttgtattgtggtcaatgatatgtggtttaattccacttgatcccaacagagtaaccattctggtcctttctcgcctattcgttggtgtagcacaaggtttcatatttcctgccattcacactgtcctggcacaatgggtgccgccgcaggagcgctctcgctcagtatctcttactacctcagggatgtatcttggtgcagcctgtggcatgcttttcttcccaagtctggtgaagc

SEQ ID NO: 313151 - DNA, 272 bp, Zea mays
attagagtggttgtcagcagaaaaaatcacaagccggacgcatcatagcgtctagtttcttgataaattccacatttccacttcaactttgttcatgctttgtatttgtattgcatgtgagtttgctgattctgaattgctcttctaaattattgctcatcagatgggtgggagaagtcctgggagtttggtgtgaccccatgggatttgggaaagccaacacctgtcattgaacatcttgctagatcaggaacactcccaaaagggagagc

SEQ ID NO: 313152 - DNA, 216 bp, Zea mays
cccacgcgtccgcccacgcgtccgcggacgcgtgggtgagcctgcctgtattctactccgtgtgtgttgagccatatatctgatgctcaaggattggttaatttgaacaagtggtgcaactgcgcgtgtacatggatttgctcttcctctatgtctctgtctctctgtctccggttactttccctgtttcactatgccatgcacatagacattgcc

SEQ ID NO: 313153 - DNA, 319 bp, Zea mays
gtcgtgaaggtccgggaccgtggcgaggtgcgttccgcaaattatttaaggataaacatgaggagaggagaactgagggacctgatacaaatgatgattatggtaagggaagtagtggtatcgaagaggaagataatccagagtttttgtcattccgtaagttgtttagagtgcacccagaagattctaagagtgggcacatagaaagcagtcaatctaacaatctttctgaggggagcccaggatctgaaagcttttttaagaggctattccgtgatagagaccgctcacttgaagattctgagatttttgggtcaaa

SEQ ID NO: 313154 - DNA, 306 bp, Zea mays
cggaccgtggttcggcggccatcaccaaccagtacacctgcctcgacggcttcgcgtaccagatcggcgggcgcgtgcggcgctacatcgagccgaccttccaccacgtgtcccgcatggtgagcaactcgctggccatggccaagaagctgcccggcgccggcgcctcagcggcgccagcgccgccgcggcagccgttcacggggtacgggcagatggtgaaggggttcccccggtgggtgcgtcccggggaccggcgcctgctgctggccccggcgtcggccgttgccgccgacgcggtggtgg

SEQ ID NO: 313155 - DNA, 123 bp, Zea mays
ggccggcaagtaccagatgaagaagctgtgcctggagccgacgtccttcaccgtcaaggcggagggcatcgccaagaacgccccgcccgagttccagaagaccaagctcatgacccgcctcac

SEQ ID NO: 313156 - DNA, 261 bp, Zea mays
cccacgcgtccgcccacgcgtccgcggaagcctcggcgcactggcaggcgcgcttccgccgcaccgatcgctggccggctcaggcgccacggcccgctcatgcacctgcgcctcggctcctaccacgcggtggtggcctcgtcggcggacaccgcccggctagtcctcaaggtccacgacctcgccttcgccgaccggccgcgcacggccgccggcgaggtcgcctcctacggctacctcggcatcgtgcacatcccgtac

SEQ ID NO: 313157 - DNA, 283 bp, Zea mays
gtacggtccgaatccgggtcaccacgcgaacggacaggtccgggacctgggagctggcggacgcgtgggataaaaacttgtctcagaaggatctacaatgcatagcaacttccgtcttacattgctgcactatctgtggcaccttatgacaaaaaatatggtgcatctcatcttgagacagagaatgagaaggagcgtaacatgaggatggccaaccttgttaacttctcgcttgattccaagcgtgaaaatagggaaatgccttcaagagcatctcttctat

SEQ ID NO: 313158 - DNA, 267 bp, Zea mays
gtctcacgctactatcgctatctagagctccggccgtcacagacacgagctagagctagagctgcagggaagaagaagaaggaggaggaggagaagatgagggcgtccgcgctggtctgcttcgtggcggtgtcggcgtgcatagcgtgcatcgcgcatggcggcaacttctaccaggacacggagatgacctgggggcaggggcgcggcaaggtggtggacggcgggcgcgggctggacctgagcctggacagggcctccgggtcc

SEQ ID NO: 313159 - DNA, 278 bp, Zea mays
cccacgcgtccgcccacgcgtccggactgtttataattgttgttgttcggggacttctttgccggacgaaaaagaccctggaaaagcagcattcaaaggcactctcaagagccatctctatggctccgataacccctcgctcaattggaagcagaggctggaggtttgcatcggagcagcaagggggttgcactaccttcacactggatctgcgaaggccatcatccatcgtgatgtcaagtccgcaaacatcttgctcgacgagaacctcctcgcca

SEQ ID NO: 313160 - DNA, 146 bp, Zea mays
aaccatcaagaccaaaagaactgtccaatttatggactaataccccactagattcaaatatagcatcaactatcagacaccctctaatatccctgaaagtaacctaagcaaaatccaacgtgccgtatgcataatgcacaacaaca

SEQ ID NO: 313161 - DNA, 269 bp, Zea mays
  unsure (1)..(269): unsure at all n locations
cgaacgaactgaggtcgacgacgactgatcgagcagcgacgatggcggctgtgctgaacagcaggaagacgccgcaggtggttgccgagctggaggcggaggcgctgctggcgacgtccgcatcggcggcgatcacctgcgggcaggaggggacgacgctggctccgtgcatcccgtacgcgacggggagggccagcgcgctccacgcgtcgtgctgcagcggcgtcaagagcctcnacagcgcggcgcggaccagcgcggaccgccag

SEQ ID NO: 313162 - DNA, 144 bp, Zea mays
ctcacgcgtccgctcacgcgtccgcggacgcgtggtatgaagcatacctgcgagccaataaaatgtttgtggactacaatgagcctccaacagagagaatatactcatcttatcttgagctgaaccttgatgaggtggagccta

SEQ ID NO: 313163 - DNA, 185 bp, Zea mays
  unsure (1)..(185): unsure at all n locations
ctcgtgaccaaagggtaatctgaaccatcgagccantgccgccaagcagacncgtctccacagtcngcgcgtacgtcttngngccacctnctcctctcatcccaatgaactgatagcactctagtccaggtatgtccaccatggcaattgaatgcgtcagcgccatcagctgctttcggagtatg

SEQ ID NO: 313164 - DNA, 196 bp, Zea mays
  unsure (1)..(196): unsure at all n locations
acgaccacgcgtcagngctgaactacgacctcaggaagctggcagtgnacctattccacttaccccgtctcagcttattcatggtcggctacgcgaagatgncgtcacgtggatcacagcagtaacgagccatctcagtccacgagctaacgcagcagatgtgagatgcaaaggacatgatgtgagccgctgaccc

SEQ ID NO: 313165 - DNA, 309 bp, Zea mays
ccgatccgtgggcgggagcgtgaggccgacgcatggtggcattttacgcggcgccgatgctcatctcacatcgatctagaagactcctgctcctcgacgtccgatacgatggccggcttctccgacctccacaccgccgacggcctcaagtccctcgaggctcagctcgctggcaaaacctatgtatctggtgactccattactaaggatgagattacggtcttcgccgcggtgccgtcgaagcctggcgctgaatttcgtaatgccgctcgatggtacgagaccgtctctacggctgtaagctcaaga

SEQ ID NO: 313166 - DNA, 259 bp, Zea mays
ggacgctggttcctctacaagacacatccagcgaatgtcgaagcctccgccgagcatcgatcatgtcggcctactgcgggaagtacgcggattagctcatcaagaatgctgcctacatcgggacccctggcaagggtatccttgctgctgatgattcgactggcaccattggcgagcgcctttccagcatcaatggcgagaacgttgatgagaatcgtcgggctctccgtgagctccggatctgctgccctggttgcct

SEQ ID NO: 313167 - DNA, 282 bp, Zea mays
cccacgcgtccgcccacgcgtccgcccacgcgtccgcggacgcgtggtgggtgagaggcgtaaagctcttcttcaggacattgccattgttacaggtgctgaatatcaatccaaagatcttggtctactagttgaggatacaacagtggagcagcttggcatagctcggaaagttacaatctcaagttcctcgacgaccattatagcagatgctgctagcaaagacgatatccaggccagaatcgcgcagctgaagagagagctttctcagacggactcgac

SEQ ID NO: 313168 - DNA, 308 bp, Zea mays
gaaaagggtttcaaaatgagtaaatcaattggtaatgtagtggacccagagaaaatcattgttggtggcaaaaaccatagggaagaacctggctatggagcagatgttctccgtctatgggtttctagtgttgattacactacagatgtgttgattggcccacaaatcttgcgccagatgtctgacatgtatagaaaactacgaggcacgatgcgatttcttttgtcgaatctccatgattggaagccggataattctgtgccgtacaatgatctgccaaaaatcgacaagtatgcacttttccattt

SEQ ID NO: 313169 - DNA, 301 bp, Zea mays
ggaacatggtccggctccaacttggcggcaaccggctcaccggcgcgatacctgacgaactaggcaatctgacaaggctcagcatgcttgacctttcgctcaacaagctctccagcgacatcccggcagagctctccaactgcgttcagctcgcccatctgaagctcgacgggaacagcctgacgggcaccgccctgcatggctcggcagcctcaggtcgctcggcgagctcgacctctcgtggaaccgttgactggaggcatcccgccgagctaggcaactgctcggacctgctgaagct

SEQ ID NO: 313170 - DNA, 305 bp, Zea mays
cacacgcgtccgcggacgcgtgggctagctgagagcctccagctcagtgtgctagctagctagagcaagagaagggctagtaacgaggagatcgatcgagatggctttcctcaacatggagcagcagacctgggccttcacctttggtatcctaggtaacatagtctcactgatggtgtttctttcgccgctgccgacgttctaccgcgtgtaccgcaacaagtcgacggaggggttccagtcgacgccgtacgtggtgaccctcttcagctgcatgctgtggatcttgtacgccctgctcaagc

SEQ ID NO: 313171 - DNA, 276 bp, Zea mays
ggaaggcgaccgccatgggggactccagcggctccgtgtcggtcgacgtcgaacggatcttcttcggcggcaaggagcatcgagtaagaacgaggcatggctctctttcggtttctgtgtatggagacgaggacaagcccgtgctcgtaatttatccggatgtagccttaaatcacatgtcgtgcttccaaggattgttcttctgtccggaggctgcgtccctgttgcttcacagtttctgcgtgtaccacatcacacctcaaggacacgagttgg

SEQ ID NO: 313172 - DNA, 272 bp, Zea mays
gccggtcgctaaccaaaagggcccagataattatctagagttcgaattcttctagtttgctgatggcacttgctttgggcgacactcgagctcgaggggctttggtatgtccggagggctcgcgcaccttatgagagcccagttcacgctctcgaagaaagggtgctgccccacgcgtcctgtttctggttcatcagcaaaggatgttgctaagcagctcaaggaacaacaaatggtgatgccaggacatcgtgagtcaaacttgcagaagg

SEQ ID NO: 313173 - DNA, 253 bp, Zea mays
ccgggtcgctcacgcgtccggggcgtggtttccccggcggctacggctgggacgccgcggggctgtccgcacacccggatactttcgccaaggaccgctagctggaggttatccgctgccgctgggccatgctgggcgcgcgcgggtgcgtgttcccggagctgctcgcccgcaactgcgtcaagttcggcgaggccgtgtggttcaaggcctggtcccagatcttcagcgagggcgggcttgactacctcgg

SEQ ID NO: 313174 - DNA, 167 bp, Zea mays
ggtcgttcaacgacgtcttcgacgccgacctggaggatgccatcaaggtgtaccagcgcaacttcggcctgggcatcacgggcgtgatggacgcgtccacggtggcgcagatgatggctccgctgtgcggcgtcgccgacatcatcaacggcacgtccaccatgggc

SEQ ID NO: 313175 - DNA, 291 bp, Zea mays
cggacgcgtggcgcacggcggcggcagccttcctccactcccatgccaccagcttcgggtacaagcagattcgcgaagaggataagagcaaattggttggcaacgtgttcagcagcgtggcttctagctacgacctcatgaacgatctcatgagtgtcggcctgcataggctgtggaaggacaggcttatttccaagctgaacccctttccggggatgaagcatctcgatgtggctggtggaacaggtgatgttgcttttcgtgtactggaaatagttaagagtgtgggtc

SEQ ID NO: 313176 - DNA, 290 bp, Zea mays
cggacgcgtgggcggacgcgtgggcggacgcgtgggcggacgcgtgggtggccatggcggacgtgctccaccggctggtgtacgtcaaggcccagcggctcaaccagaggtggaacgacgtgttcgacgagctcatccaggaacacgtgcagagcaggccctccggcgagagcgaggagagcgaggcggacttcatacacgttctgctctccatacagcaagagtacggcctcactacggacaatctcaaggccatcttggtggacatgttcgaggcaggtatagagaca

SEQ ID NO: 313177 - DNA, 293 bp, Zea mays
atttgaactagtttagtaacactgctcatccaaatgtgctgtattgattcattctacgctctcatcaggtgattagctggattgttacggtatttctgatgcttatcaacgggtatcttatactatctttctacattactgatgtccggggtgcattgcttcgctcaagcttgtgtgttgtgttggttgtttaccttgcattcatcgtctatcttattgtgcgaaatacttcgctgtattctcgcctttgctcatcaacgtcaaagagctcgtgagcatttcaatgtcgtcat

SEQ ID NO: 313178 - DNA, 187 bp, Zea mays
ggagatgccactggttctgcgcaacaaggcgccgaggtggcacgagcagctgcagtgctggtgcctcaactttcgcgggcgcgtcaccgtggcctcggtcaagaacttccagctgatagctcctgcaaagacgcagccgcagccgcagcctccggccccccgccgccggcgccgccgtcgtcgtcgt

SEQ ID NO: 313179 - DNA, 280 bp, Zea mays
cacacgcgtccgcggacggtgggggaggagaagggtggaaatggaggaccggcatgtggccgaggtcgctctcggcagagaaccccaagtggacgctctttggtgtattcgatggtcacgggggcaaaaatgcggcagagttcgctgcggagaacatgcccaagtttttggccgaggagttcaagaaggtgaacggcggaggagagatcgaaggagctgtcaacaggggttacctcaagacggacgaggaattcctcaagagggacgagagcgggggcgc

SEQ ID NO: 313180 - DNA, 273 bp, Zea mays
cggacgcgtggcggacgcgtgggcggacgcgtgggcggacgcgtgggcggacgcgtggggagagatccggaccttggcgcggacgccggagagaacggcatggggctctgggactcgctcctcaactggctccggagcttgtttttcaagcaagaaatggagctctccctcgttgggttgcagaatgctgggaagacgtcgctggtcaatgccgttgctacaggtggctacagtgaggacatgattccaacggtaggcttcaatatgcggaaa

SEQ ID NO: 313181 - DNA, 271 bp, Zea mays
cggacgcgtgggcagctatgcctgaatcctgaatgtatgccattttacctggttaatgtttggatgctccatttagtggttgaaataagtaactgatgttctgttatgcaccgcagaccaagatttcacggagcttgcgcaaaaagtccccagtggctgtctctttaccatagtttctgattcgtgccacagtggagggctacttgacaagaccaaggagcagattgggcacagcaccaagcagaagcagaagcagacccagacccagacc

SEQ ID NO: 313182 - DNA, 299 bp, Zea mays
cccacgcgtccgcgcgcgcgtccgcggtcgtcttttgtcgtttggggcctctggggtttgccccagtcggcagtcgcagcagcacctgtagcagccgtggacgccagcggagccggtagcaaggggaagaatggggcggccgggcgcaatgcaggcggccccaggaagaagtcggtgacgcggtccgtcaaggccgggctgcggttccccgtcggccggatcgggcgctacgtcgagaagggccggtacgcgcacgcgtgggcactggcgcccccgtgtacctcgccgccgtcctggag

SEQ ID NO: 313183 - DNA, 284 bp, Zea mays
cccacgcgtccgcctacactgatggagttacgcttttggcctacctgaaagctacaaggttggcatccggctacatcaccgtcccgtacaccgcgctggacgcgaacctgcgccgttcatggccgccttctcgtcgcagggccccaacaccgtcacgcctgagatcctcaagcctgatatcaccgcgccaggggtcagtatcctggcggcgttcaccggggaggcgggaccgaccgggctcgccttcgacgaccgccgtgtcctctttaacgccgagtccggca

SEQ ID NO: 313184 - DNA, 276 bp, Zea mays
cccacgcgtccgctagtaaagatctgacattggatcagtggaacagagtggcaaattctattgggtctacactcgagaataatccagacatagaggtcatgagaaagattctatctatcagttattttgatctaccacattatctgaaaacttgtcttctttatataagtatcttcccagaagattacatcataaatagaaagagtttgatagttagatggattaatgaaggatttgttcaagaagaatatgggaaaaatgcacatgatataggtg

SEQ ID NO: 313185 - DNA, 259 bp, Zea mays
gacgcgctgtccgagaccgccgagttcgcgcgccgctgggtgcccttctgcaagaagttcgccgtggagccgcgcgccccggagttctacttctcgcaaaagatcgactacctcaaggacaaggtgcagccgacgttcgtcaaggagcgccgcgccatgaagagggagtacgaggagttcaaggtgcgcatcaacgcgctagtggccaaggcgcagaagaagcccgaggaggggtgggtcatgcaggacggcacgccgt

SEQ ID NO: 313186 - DNA, 213 bp, Zea mays
tgcagatccggacattatccgtcttcctaggctctttcgctttctgcagaagccacttgcaaaattcatatcagaagtgagagcaccaaaaagtaaggaaggttatgcatccataggtggcggttctcctctacgacaaattactgatgcacaggctgaagcactgagggaggcattacatgggaaagatgccctgccaacgtgtatgttgga

SEQ ID NO: 313187 - DNA, 205 bp, Zea mays
gtgcaaattcttttgtggcaccatctctcaggacccttactgcgaaacttgcccttggatggcgaattcgcatgaccaatcaagcgaataaaggcatctttgtcctgttccaagacaaacttcacagttgtcccattcaacgaagcaatacgatcagagatccatgtccgagagaaaacaagtacggcgacagcaagcaactgcc

SEQ ID NO: 313188 - DNA, 276 bp, Zea mays
gtcttggatatgatgggggtgatggccatccttggtattcagctcaatgcaatttctgttgtaaaccttgttatgtcgataggaattgctgtcgagttctgtgttcatatcacgcatgcctttatgattggcactggggacaaagaaactcgtgcaaggcaggctctatccacgatgggtgcgtctgtattcagtggaatcaccttgaccaaacttgtgggagttattgtcctacgttttgcgaaatctgaagttttcgtggtttattacttccaa

SEQ ID NO: 313189 - DNA, 250 bp, Zea mays
gtacgtccgaattccgggtcaccacgcgaacgacacgcgtccgcgaccgtggcgaccgtggcttgagcgctgggcaccagatggaggagattcagagtgtatataacacgagaagtaataccggagaggaaataggagctgggaccagtttgaaaccaatgcagcattatttggggtaaagagtactttcaatgaggaaatttataccacaaagcttgagaaaggtcctcacatgagagagcttgaaaag

SEQ ID NO: 313190 - DNA, 299 bp, Zea mays
ggtggaccactgggcttctgatctgggccgtcaccctcgctgggatcctcggccgccgcgcctcctccttcgccgtcgtctgctccaagaagaagatcaagaccgacaagccctacgggattgggggtggcctgaccgtcgacgtcgacgccaacgggagaaagggcaagggcaagggcgtgtaccagttcgtcgacaagtacggcgcgaacgtcgacggatacagcccaatctacaacgaggatgactggtctcccaccggcgacgtctacgtcggtggaaccactgggcttctgatc

SEQ ID NO: 313191 - DNA, 213 bp, Zea mays
cccacgcgtccgcccacgcgtccggacgcgtgggtttttttttttttttgtgttttttttgtgtgttgttttctttatcaggaagttcctttatttaaaacgcgctgctaatgcaggctacgtgttacaaatttattattattcaaaaccacggccatgtggataccacgtcgatgcatttttttggccccatcaaacatgtaggggctgttg

SEQ ID NO: 313192 - DNA, 266 bp, Zea mays
  unsure (1)..(266): unsure at all n locations
atacgnacacgcgtccgcggacgcgtgggcgacgcgtggtgccacctgacgcgacacgacaagatccaagaactagctcgcgagcacggacagggcatgaacccagggatcgagactgaacagcagtccgagacgccatgaacgtggaggaggaggtcgggaggctcaacgaggagatccataggctcggccagcagcagcccgatggctcttacaaggtcgagtttggcgttctcttcaacgacgatcggtgtgcagatatcttt

SEQ ID NO: 313193 - DNA, 226 bp, Zea mays
tcgccgtctgccttctgcgcctccatttcggcctctgtcccttgcaagttcaatctcacctccaaccatgggtaaagagaagtcccacatcaacattgtggttattggccatgtcgactctggcaagtcgaccaccacaggacaccttatctacaagcttggaggcattgacaagcgtgtgatcgagaggtttgagaaggaggctgctgaaatgaataagcggtcc

SEQ ID NO: 313194 - DNA, 297 bp, Zea mays
ccattcccgagtctccagccaaccacatccagtccaccccatccccctcgaccccgacaaccccgagtcccgacccgatggcgcccaaggccgagaagaagccagcggagaagaagccggcggccgaggagaaggcggagaagacgaccgcaggcaagaagcccaagtccgagaagcgcctgcccgcctcgaagtcctccggcaaggagggcggcgagaagaaggggaagaagaaggccaagaagagcgtggagacctacaaaatctacatcttcaaggtcctaaagcaggtgcacc

SEQ ID NO: 313195 - DNA, 285 bp, Zea mays
caagaaaatatccttcttcaggtagggcatatgtatttatttcttcaccatatatgcttctactctaacatatttggatatgagactaagaaaacaatacctttgcaagaggtaacagatgttcgtaaagcaaagacggctgccattttttctaatgccattgaaattgttgctggtagtagaaggcacttctttggatctttcttgtcacgtgatgaagcctatcaaattatagtagatggctgggaacaacatgttagtaatgcaagattgctccttgaacgt

SEQ ID NO: 313196 - DNA, 279 bp, Zea mays
atcaccgccgcgacgacgatggcagcctcgttccaagccgcggccaccctgatgcagccggccaagatcggcggccgggcgccctttgcctcgctgccgtcccgctcgtcgtcgcaactctccttcaggtcgttcggcgtcgacgccggcgccgccaggatcacgtgctccctgcaggacgtcgccagcaggtgcgtcgactccgcgaactcgccggcttcgcgctcgccacctcggcgctcctcgtctcgggcgcgagcgcggagggcacgcccaaga

SEQ ID NO: 313197 - DNA, 280 bp, Zea mays
ccaagacctcctcagacccgagaagcgcactgcggccatggacgccaccggcactggagctggagggaaggcgaagaagggagcggccggtcgcaaggccggcgggccgaggaagaagtcggtgacgaggtccgtgaaggccgggctccagttccccgtcggccgcatcgggcgctacctcaagaagggccgctacgcgcacgcgtcggcagcggtgcccccgtctacctcgcggccgtcctggagtacctcgccgctgaggtcctggagctcgccggca

SEQ ID NO: 313198 - DNA, 277 bp, Zea mays
acccaatccaaaccagacaagcaaggaatcccccgatggctcatcgcgttctcctcctcctctctctcgcgtcggccgccgcggttgccgccgccgtcgacgcggaggacccgctgatccggcaggtggttcccggtggagatgacaacgatctggagctgaacgcggagtcccacttcctgagcttcgtgcagcggttcggcaagtcctacaaggacgccgacgagcacgcgtaccggatgtccgttttcaaggccaacctgcgccgcgcgcgccg

SEQ ID NO: 313199 - DNA, 287 bp, Zea mays
cgcaacgccggcacgctcctcgaggtgctcttcctcaacaacagcctcagcggctgcctcccccacgagctcggcctcctggagaaggccacggtcatcgacgccggcgctaaccgcctcacgggcaccatcccggcgtcgttcgcgtgcctgcgcaaggtggagcagctcaacctcgcgggcaacctcttgtacggcgaggtgcccgacgcgctctgccggctcgcgttcagcaacctcaagaacctcacgctctccgacaactacttcacgtcgctcgggtcctg

SEQ ID NO: 313200 - DNA, 283 bp, Zea mays
accacaatgcaggttggctatgtgactaccatctgtttttcttgtttcttgatcagatgcgtcatgatgtgcctcaattcatttgataaagaagcagatcttgatgtcctgaaccatccaatcctgaacttcctctattacctggtatgaatcctgacggtgtaaaatggtttaccttagatttttttgtaaccaagtggcatttagattttgaaatatcgacttgatcacttctaggaagccaactgtggaaatttgtttggttgtaattttaaaatctatg

SEQ ID NO: 313201 - DNA, 279 bp, Zea mays
cggacgctggcaagggtctaagaaaggagttctgatacttagcatgcaacatactcgtagctcacaaggttcatcccatctctcagtgatgttacaagagcaacatcagtgggaacttatagagagctttttgcctgttctcgacaactttgaaagagcgaaagtgcaaataaaggtggaaacagagggtgaggagaaaataaataatagctaccagagcatttataagcaattcatcgagattttgaattcattgggcgttgaagatgttgaaacggt

SEQ ID NO: 313202 - DNA, 282 bp, Zea mays
ctcaaggtgctgctactaagccacccaaagaaggacatcagggatacatcagaatatgaggttttcagaagggagagaaagaggcgatcattgaaggatcttgctgctgaagtccttggtgctaaaatacaacagaatgaacactgccccatcgaggatgcgagagctgcgatgctcatttacaacaagcacaagaaagcatgggagaagaacatgaaggaacagttcagattcaaaaagaagctcaagaagcgaggcaagaagaaaactactgagtccaat

SEQ ID NO: 313203 - DNA, 280 bp, Zea mays
ccaatccaaaccagacaagcaaggaatcccccgatggctcatcgcgttctcctcctcctctctctcgcgtcggccgccgcggttgccgccgccgtcgacgcggaggacccgctgatccggcaggtggttcccggtggagatgacaacgatctggagctgaacgcggagtcccacttcctgagcttcgtgcagcggttcggcaagtcctacaaggacgccgacgagcacgcgtaccggctgtccgttttcaaggccaacctgcgccgcgccgccggcacca

SEQ ID NO: 313204 - DNA, 271 bp, Zea mays
ggaagtcaagaggcagacgctgcttgagctggtggactacatcacctcggccaccggcaagttcccggagcacgtcgtgccggaggtcatcaggatggtgtctgcgaacctgttcagggtgccgccccctgccccgagagagaacaaggcactcgagttgttcgatatggaggaggaagagcccgtcatggacccggcgtggccgcacctgcagattgtgtatgagctgttcttgaggtttattcagtctcccgagacagacgcgaactag

SEQ ID NO: 313205 - DNA, 275 bp, Zea mays
cggacgcgtggcggacgcgtgggcgaaatttcacaacaccaaacccgcacggcgagaagcgcaaacgccacgaggagtagcgaggcgagggccgacaccggggacaagcgcggcgcggcggcggaggcagcaatggcggcgctgcagagttggcgcaaggcgtacggcgctcttaaggacaccaccaccgtcagcctcgccaatctcaactccgacttcaaggatctggatgtcgcgatcgtgagggccaccaaccacgtggagagcccgcccaa

SEQ ID NO: 313206 - DNA, 310 bp, Zea mays
tacgcctgagtacggtccggaatccgggtcaccacggccgggacctgggcaacacttagcagggaacagctgcaaactgtgcaacttaaagaagacattgcccgcgcagagactagaaatgcagagctgacgttgagatcaaccagaagatcattgccgtcggagagtccgacgaaatccccctagtgaagaacctgaagaggattcctcttgtcgcctctctggtgtccgagatcatcgccgcctacctcatgccccccatcgagtctggctcggttgatttcgccgaatttgagccccggctcgttta

SEQ ID NO: 313207 - DNA, 259 bp, Zea mays
cccacgcgtccgcccacgcgtccggtcgatcgagcacctcatcctgaggcactctcctgacgccaagcaaggcattatgggcgacgacggacagacggatctgctgcactcgtacgggctagggtatcccgagcccaacgtcgtcttcgcgctgtgcagaggcagccgctcctcgccagcactgcgcgtgtacacggcggaggacgtgtcgaacgagctggagcgggccaaggtggagtacctggagtcttcggtgcgc

SEQ ID NO: 313208 - DNA, 264 bp, Zea mays
cccacgcgtccgcccacgcgtccgcccacgcgtccgcggacgcgtggggggggctatacttgttggttcagtattccagataatattaggatacactggtcttatgtcactgtttctgaggttaataaatccagtagttgtggcaccaactattgctgcagtgggtttggcattttttagttatggtttccctcaggctggcagctgtgtagaaatcagcatgcccctcattctgttggttcttctgtgcactctgtacatgag

SEQ ID NO: 313209 - DNA, 259 bp, Zea mays
cccacgcgtccgcccacgcgtccgcccacgcgtccgcggacgcgtgggcagctgcgtcgtctcatggcaagagcaccccagcttacgcactttggaactggtgcattccgatctgagggtgcccctggtggggggttggctgtgactgagctcgctacatcttttgctgcatccaggtctctggtttgtctatcaggtttccgggaggttgacccagaatacctcccggcgatctaccctgtctgtgccaacctcacgt

SEQ ID NO: 313210 - DNA, 251 bp, Zea mays
cggacgcgtggcggcaccttcgcgaaggtgtaccacgcgcggcacgtcgacacgggggacaacgttgccataaaggtgctcgacaaggagaaggccgtgaagagcgggctcgtcacgcacatcaagcgcgagatcgctgtgctacgccgcgtgcgccacccgaacatcgtgcacctgttcgaggttatggccacaaagactaagatctacttcgtcatggagctcgtccgcggcggcgagctcttctcccg

SEQ ID NO: 313211 - DNA, 252 bp, Zea mays
cccacgcgtccgcccacgcgtccgcggacgcgtgggttcaagatcatctcttttgtcaaacagcagcttggtcctgaagcatgctaaaggcacttcgaagtcatttgatggcggaactaggtcactagataggggaaaaatccatggaagtggagctcatttactcaacagatctacagatgctgttagagataaggagactagtgatagttggaagggcgatatggatgagagaactaatgagagggcaga

SEQ ID NO: 313212 - DNA, 278 bp, Zea mays
cccacgcgtccgagcgacctgagccgcggcggcggcacgcacctccagcggtggcggccggtcggacgtccttgagcagcccgaccacctgctgcatggtgggccgcttctccggcgcggcggccgtgcagaggaaccccacctgcaggcactcgagcagctccctctccgcgcccgtccccgccgtctcgtcacgcagccgctcgtccacgaggttgaggcccttgcggttgcggaccacgccgcgcgcccagcttgtggtcgccgcgtcgccccac

SEQ ID NO: 313213 - DNA, 264 bp, Zea mays
  unsure (1)..(264): unsure at all n locations
cggacgctgngcgcgcgacccgcgcgtggtggcgctcctcgacgccgcctcgttcccggtgctcttcgacagctcgctcgtcgacaagacggacctcttcacgggaaccttcatgccgtccaccgagctcaccggcggctaccgcgtgctctcgtacctcgaccccgccgagcccaaccacgggccgctcaagacgctcctcttctacctcctgtcgcaccggcggcagcacgtgatccccaagttccgcgaggtgtacggcga

SEQ ID NO: 313214 - DNA, 275 bp, Zea mays
cacgtcggcgtggatgatggcgtggggccgcctggagtggaggtacgccagcgcagagcgactcgccgaggatcctgacgcggtccttccacaggaggcccttggagagcctgtccttgagcgtgccattggggaggtgctcgtacaccaggccgcacgactccgggcacacgccaatcagcctcacgatgtgtgggtgctccaatttgctcagcaccaccacctgaggatcagagcacccccagtgcgattatgactgggccataacctcctcc

SEQ ID NO: 313215 - DNA, 280 bp, Zea mays
cccacgcgtccgggcatctgcgctgaagagctgagctcgattgtcgaggggcatgatgtgaagaagctgaaatctcatggtggcgtgcagggcctcgcgtccaagctatccacttcggagtctgacggcctcaccacgtccgcggacaagctagcgacccggcgggatgtttttggcgtcaacaagtttgcggaggcggagtcccgtggcttcttggtcttcgtctgggaggcgttgcaggacatgacactcatgatccttgccgcgtgcgcgttctttt

SEQ ID NO: 313216 - DNA, 282 bp, Zea mays
cagtacggtcggaatccgggtcgacctccaccgaacgagcgggacctgcgacctggggctgaggagtgtttaaagcgggagaaggagcgagttggtcactatttgcatattaacagcgaacagaagttattggagaaagtgcaaaatgaattgcttgctcagtatgcaaccccgctgttagagaaggagcattctggatgttctgctttgcttcgcgatgacaaggttgaggatctttctaggatgtacagactcttctccaaaatctcccgtggtctggag

SEQ ID NO: 313217 - DNA, 268 bp, Zea mays
cagaaaggagggcatccctcctgaccagcagcggcatatcttcgccggcaagcagcttgaccgacggacgcacacttgctgactacaacatccacaaggactcaacactccacttggtgctgcaccttacgggatgcatgcagatcgttgtcaacaccttgactggcaagacaatcacccttgaggcggagtcctcagacaccactgacaatgtcaaggcatagatacaggacaatgaaggcatcccaccggacgagccacgtctcat

SEQ ID NO: 313218 - DNA, 267 bp, Zea mays
cccacgcgtccgctgccattctatggaaatttgtcaccgtgatcttaaacttgagaacaccctccttgatgggagtccaacacctcgtgtgaaaatttgcgactttggttactcaaaggtgttgtatacggatactgcgccggctctgttatgcgtcctaactttaccagcaactgacttctcttgtgtcgttgaatcagttacaaactttgctagtgtgcttttcagtctgctttgctgcattccaaaccaaaatcaacagttgga

SEQ ID NO: 313219 - DNA, 276 bp, Zea mays
ggaccacgccgtggcgacgttcggcgcgctggacatcatgttcaacaacgcgggactcagcgggccggcgtgctacagcgtccgggagagcggcaaggctgacttcgagcgcgtgctggccgtgaatctggtgggcccgttcctcggcaccaagcacgcggcgctggtgatggtgccctcgcaccgcggtggctgcatcatagggacgtcgagcgtggcggcggcagtgactggcgtgtcgtcgtacgcgtatcgtgcgcgaacgcgcatggtgac

SEQ ID NO: 313220 - DNA, 282 bp, Zea mays
tgtctcgtgagacgcgtgggctggtcggggaagacgctgtgggaggtcggggtccgggatctgctgatcctggaggtgacggacgcgcgtgggcgggcggatgcacaagcacaacttcggcggcatcaacgtggagatcggggccaactgggtggagggcctcggcggcgaccagctcaaccccatctggcccctcgtcaactccacgctcaagctcaggaacttctactccgacttcgacagcgtcgtcggcaacgtctacaaggagaacggcggtgggct

SEQ ID NO: 313221 - DNA, 274 bp, Zea mays
gccgagagcacagggaacagacagacatggtcacgggatccatgaagcacctcgtgcaggtggagccggcaagggaggcggcggcggagggcggggcgccatcggcggggcccacgtaccgatgcgcggccggtggcaacgccgcgtcgccgcccgccgtgccggggctcgagtgctgctgggacatattccgcttgtccgtggagaagtgccccgacaacaagatgctgggccgccgcgaaattgtccacggaaaggctggcagctacacatg

SEQ ID NO: 313222 - DNA, 270 bp, Zea mays
aaaggtttgatgagaatgatggagagccaagggatcagccctgatatctatacttacagtgtgctcatgagtggctacgcgaaaggaggcatgattgatgaagcccatgatctacttcgtgaagctaagaaaattcatccgaagctaaacagggttgcttatcacatacttatccgtggatactgcaagatggaggacttcgagaaggccaatgagtgcctaaaggagatgaagaaagatgggttgcagccaaatgtggatgagtatgac

SEQ ID NO: 313223 - DNA, 275 bp, Zea mays
acgggacgcgtggtaattgacccaaacaccaggcatcacatgtccagggaaaagactgagactatattgaatacttttagtgaagcaattctttgtagagaaagaagttacttccacattagtgatggactctttgtatacaagtctgaaggcacttgaatatcggatgaagagcaagaaatgcaaaacaagattagcagatttggaagaactacctgtggctatggtccatgttgacatggacatgtttggcttggctgatgatgttatagctt

SEQ ID NO: 313224 - DNA, 262 bp, Zea mays
tagatggtgggcgctcgcgtcaccggagctctccagaaccgaaccccaactgcccaagggcgtgcgatctacacccctcggcggcttcgtcaacgacgccgagatacattcaaatacattctgaatatagcattctgctgcagaacactttgaggaatggctgtagaggatgtccagccccttgtgtgtgacaatggcactggaatggtcaaggcgggtttcgctggtgacgacgcaccgagagctgtctttcctagcattg

SEQ ID NO: 313225 - DNA, 240 bp, Zea mays
cagacgctgggtcgcaccacgcgtcgccaccacgcgtccgcggagacatagtacctgggcgtgcatgcctcaggacctgcaagttctgcgagcacacagatgtggcctgggatcagtggcagcgcaaggtagtggacagcatgctcggctggaccttacgctggaccggacgtccggctccgagttccagtccaagagctagtacctgttcggcaaggtcggcgtgcagatcaagctggt

SEQ ID NO: 313226 - DNA, 260 bp, Zea mays
cccacgcgtccgtccatgtgtccggtgagagcaccttcatcatgatcaagcctgacggcgtccagaggggtctcgtaagcatcatgtgttcctagttcgtttctgttcattcgattcgatttggtgatgtccacgcgctttgtgattcgattttgtactagtttgtgttcactccatcctgcttggtttttttcagattggtgagatcatcagccgttttgagaagaagggcttctacctcaagggtaatctagcgtcca

SEQ ID NO: 313227 - DNA, 259 bp, Zea mays
gattcctgtggatggttttcctgtggacaaagagattgatgttcctgttgattttgtggcacctacaaggccagggaggtacatatcttactggaggttggcttccccttctggtcagaaatttggtcagcgagtttgggttcatatccaggtggaagacccttcttttgttaatgacaataacaggaatgctgctattaacctgaactatagctctctggaggcagattcaggttaatagcaggttctagatcgcgag

SEQ ID NO: 313228 - DNA, 269 bp, Zea mays
aaacgaatcatggacctgtatctgttgcagtgtatggtgaccatgacaagcctgcccttgttacttaccccgatattgctttaaactatatgtcctgcttccaaggactattgttctgtcccgaagccgcttcgctgctgcttcataatttttgcatttaccgtctgttgacgatttggcagatcaggttgcggatgtcctcgatttctttggattaggctctgttatgtgcttcggtgtcactgcaggtgcctacattctaactctgt

SEQ ID NO: 313229 - DNA, 264 bp, Zea mays
ccgaccgctggatgagccgccagctcgacgccgccgagtggggcaccgtcgcctgggccaggcagaactacatgcactacaactactgcgacgacggctggcgcttcccgcatgcttccccgccgagtgctcccgcaactgattcattggtttgtttgttatccccgatccgttcgcgcggtcgccgtcgaggcactgagcagacagtacactgacacccgacgatttcttgcttcctgttcctcatctaattaatcatcaatg

SEQ ID NO: 313230 - DNA, 270 bp, Zea mays
gaggtcttggagtccttcaccttgacctcatggtgcttccactgtccgtgcacagtgtcatacttgaacatgtaggtcatgtaatcggtgctgatgaaggggtcgttcacggcgacgagctcgacgtcgtcgctctgcagggccaccctggccaccagccttccgatcctgccaaacccattgatcccgatcttgatcttggccatgagggtgagaggctgctagacccttctctttggtgagaaggaggttgctgtgtttggctgcagg

SEQ ID NO: 313231 - DNA, 277 bp, Zea mays
cccacgcgtccgcccacgcgtccgcccacgcgtccgcccacgcgtccgcggacgcgtgggcctacgacgtgcgggtgaaagcacaacatcatcggcatcgccatcgccacgtctccggacgcccacagcgcgggaggttctccgacgcacctgagctcgcgcgacccgacggtgtgcacgtggtacacggcgtggccgtcctcggctctctcgaagcagcagagcatccgccacccggtacgacccggacgggcggtaagggtaaagcgcggagatg

SEQ ID NO: 313232 - DNA, 260 bp, Zea mays
cccacgcgtccgcttaacccatgggagagaaatgaaaatcacacgctctgcctcaattccgccaaggacattggatgcactgttgtcaacattggcacacaggatttggtggagggaaggcctcatttagttcttggattgatatcacaaatcataaagattcaacttttagctgatcttaacctcaagaagacaccacagctggtggagctatttgatgacagcaaggatatagacgaggttttgactttgtcgccaga

SEQ ID NO: 313233 - DNA, 267 bp, Zea mays
cggacgcgtggcggacgcgtgggcggacgcgtgggagctgctcctcattggagacagcggtgttggcaagagttgcctcctgttgcggttctctgatggttccttcactacaagctttattaccacaattggtattgactttaagatacgaacgatagaattggatggcaagcgtataaagctacagatttgggatacggcgggccaagaacgcttccggactattaccaccgcgtactaccgaggagctatgggcatcttgctggt

SEQ ID NO: 313234 - DNA, 290 bp, Zea mays
gaaccgtgtcattcaagagcccggataatattgacaatggttatcgccatcgtgacactcttggacgatattttcgattctttcgcgaccccacaagaatgtgaaatactcactaattgcatcgaaagctgggatcccaaaggggctcaagaccttccaggttgcatgaaatttgctctagagaagatattggatagctaccagaccattacaaatatgctccaccgagaggacaagtatcgaatgacgtatctaagacactttacagaagatctagtgagaatcttcaa

SEQ ID NO: 313235 - DNA, 293 bp, Zea mays
gcacgagatgccggacccgtcccccttcaaggtgacgcacgggcgggacatatgggagctggccgcccacgacgccggcttcagaaggctcttcgacgctggcatggtcgcggacagcggcttcatcatgaacgtcgtggtcagggagtgcggcgccgtcttccaggggatcagctccctcgtcgacgtcggcggcgggttcggtggcgccacacaggccatcgcgaaagcgttcccgcacctggagtgcagcgtgctagatctcccgaacgtcgtcgccggcgctcctgctg

SEQ ID NO: 313236 - DNA, 307 bp, Zea mays
gtacggccggatccgggtcaccacgcgacgccacggtccgggacgcgtgggcggaccgtgggccaattgtcacttgctctccctccaacaagctaattaaggccggtcgtcatccctcttatagctcgttttattatccatggcggaggagaagcaccaccaccaccacctgttccaccataagaaggacgaggagcaggaggagcagctcgccggcggcgggtacggcgagtccgccgagtacacggaggccacggtgacggaggtggtgtccacgggcgagaacgagtacgacgagtacaaggag

SEQ ID NO: 313237 - DNA, 292 bp, Zea mays
ggaatcggcaagctggtgttcagcggcggcgtggcggagatgtacagcctggaggagctgctgcgcgcgtcggccgagacgctggggcgtggcgaggtaggcagcacgtacaaggcggtcatggagacggggttcatcgtgacggtgaagcggatgcgcgacccgtcggcgggcggggtgggggccgccgagttcgggcggcgcgccgaggagctggggcgggtgcggcactccaacgcagtggcgctgcgggcctacttccaggccagagaggagcggctgctggtgtacg

SEQ ID NO: 313238 - DNA, 301 bp, Zea mays
gcgtcggtgtctgggcggtacccttggaagttgagcaaaaatttgtcccggagacttctccaggagtcgatggacaatgggggcaaccaggtgtaccaggtgagggctggtccttcgagggcaatgatgaatgacttggccattgtggcgtcgtcccctccggatgatgcaacggcgacttgatagctcatgatgtactgtgcagggtcagtgctgccgttgtacttgggataggtacctgccctgaagttggcgggccatggtgttacttgcagatgaggtgccaggggacttcgctcgt

SEQ ID NO: 313239 - DNA, 300 bp, Zea mays
cccagcagctgtaccccttatccagcgaatacttgaagcaacaggtgatgtagttacggatcaatattatgagagactatcacctttggtgccactgaaatcaccacttgggtctttctctaacatcaaggcaggagattgtttagtaacattctcaagacgtggaatttataaacacaagaaaagaattgaaaggaagggaaaacatctttgctctgtggtctatggttcatagccaccagaaactcgaacaaaacaggcgacaatgttcaatgatgacaccagtgaccttaatgtgct

SEQ ID NO: 313240 - DNA, 297 bp, Zea mays
  unsure (1)..(297): unsure at all n locations
cacaaagttgggtttctttttgcaccaatcgtatgcatttggcttgtctgcataagtgcgattggcctctacaatatcatccgttgggatccccatgtttatcgagccctctcgccatactacatgtatcaattcctcaggaagactcaaactggtggctggatgtcactgggtggaatccttctttgtgtaacaggctctgaagctatgtatgcagatcttggacatttttcgcaatcatcaatccagattgcatttatatccgtggtttatcctgcnattgtattggcttatatg

SEQ ID NO: 313241 - DNA, 311 bp, Zea mays
cagaagcaccagcagcacgttgcatctgtggtccaaaggttagctcgtgaaaaggataagtggttgagctccagtccggatgcaatgaaaatcaacatggaattcttgcagcgctgcatattcccacgatgtgtttttagtatgcaagatgcagtgtattgtgctacatttgtccaaacactacactcccttgggactcccttctttaacacagtcaatcatatcgatgttcttgtctgtaaaaccctacagccaatgatatgctgttgcacagaatttgaagctggcaggcttggaagatttttcatgat

SEQ ID NO: 313242 - DNA, 310 bp, Zea mays
cctcagggcacatttttactgttggaagccctgtgtatggacagcttggcaatccaaataatgatggaaggtatcctcgcctggtcgaagagcagcttgggggtagcggtgttgtggaggttgcttgtgggtcttatcatgtcgcggttttgacaaatgctggtgaagtttacacatggggtaagggtacaaatggaagattaggcatggtgatattgcggatcgtaaagtgcctacactcgttgaggcattgaaggataggtctgtacaacgtgttgcttgtggatcaagctttacagcagccatctgt

SEQ ID NO: 313243 - DNA, 305 bp, Zea mays
ggaggacaaggccgcggaccgcctccaccgacgttgtggttcgcgctcaagcggtcgctgcactgccgctccgagctgtcggaggtccacgtgccgcgcgccaacaaggcctccggtccagtcgtcgcgagcggtggccacctgtcgtcgatcgtcaccaagcgcgcctccgcgcggtcggggtgctcgcgctccatcgccaacctgcgggacgtcatccacgggagcaagcgccacccggggcagccgcccagctgcagcccgcggtccatcggcagcagcgagttcctcaactccatcgcgca

SEQ ID NO: 313244 - DNA, 298 bp, Zea mays
ggcaacaccgatgtgaggagcattgacctgaatgaaattgtcaggtttgaaaaacactatgtggtggtttatgaggatgagacttgtaagccacctgtagggcatggtcttaacaaagcagcagaaatatccttgctgctgaatctgaaggatcatccggagcccagtatccttgttgaagtgctaaggtgtcgtgcaagaaagcaaggttctaggtttctttcattcaatccagtgaatggaaaatggaaatttgaggttgatcattttagtagatttgggcttgtgcgagaggacg

SEQ ID NO: 313245 - DNA, 297 bp, Zea mays
tgaggcatcacggcgaaccaagggttttacctcctgggcctggacaacacgtcgccgacgttcgcgtccgccatccagaactcggtcccggccatcaccttcgccatggccgcggcgctgcggatcgagaaggtccggctggaccgccgcgacggcgtagccaaggtggcgggcacgctggcgtgcgtggcgggggcatccgtcatcacgctctacaagggccccaccatcttcggtcccggcggcggcggcggcctcgagctggcgtcaaccagcaaggcggtggccggcgacaag

SEQ ID NO: 313246 - DNA, 218 bp, Zea mays
gatcaggatcagcgcagttgcagccgaacagctgctacagccatggcaggctgagccccttctgcgagcgcatccagttcgtccagtcgtcatcgtagtcgagctccacatgcacaggtttatacatccagaggctcaagttgggtaatcgacagcaggtgcacaaaccacatgacatgtgagaagaagatgttctcctcctacgagaaaaaccaaga

SEQ ID NO: 313247 - DNA, 108 bp, Zea mays
gtggggttacacgcgggatcaacatgcgtatcgtaaagtgttatttctgttcggggcccatctatcctggacacggcatgatgttcgtccgcaacgattgcaaggtgt

SEQ ID NO: 313248 - DNA, 154 bp, Zea mays
gtacaattaactagcttcttctagctctagctaggctcgtctgctgcaagaaggtaacagcgcatgcatagacgggaatgaggaagacgtctgcatgggcgccaacaagtgctcgtagcgcagctcatcggcacgcggcgagggcacgccgaca

SEQ ID NO: 313249 - DNA, 100 bp, Zea mays
ggtatggaaatgcaaatgtctggaaaacctttacagatctattggattacttccccttgactgcattggtcgagtcagagatattttgcttgcatggtgg

SEQ ID NO: 313250 - DNA, 238 bp, Zea mays
acccagctcttccgctcctctcacagccgccagacccgcctgctgagccccatggcccgccgccgcccccagcaatccccggctcctgcgagtggcactgctgctcctgctcctggtagccgctggccggcgcgcagaggagcgtccgtggccactgaaatgcgctgccagtgcttgcagaccctgcagggattttcaccccaagaacatccaagagtgtgaacgtgaagtcccccgg

SEQ ID NO: 313251 - DNA, 159 bp, Zea mays
aggccacaggagtcccctactggctgcagaggacgagtcaggaagcatgccgtagatctggggcatggcagccaggttccagagcagcaggcatgtgcattatgggtgccaggtggccagtgagggcccgaggaccacgcataggagtcccccgggggc

SEQ ID NO: 313252 - DNA, 161 bp, Zea mays
  unsure (1)..(161): unsure at all n locations
ccgcagggcagngttctgtcctcagccgcagtccctgatttggagttgtatgagaactcacgcctcccagatagaactacttgagacaagctctacgcaggaacctctcaacgcttcggaggccttttgcccaatagactgcatggtacaagtggtgtttc

SEQ ID NO: 313253 - DNA, 258 bp, Zea mays
caccaactggtgatggaaggttacaagtggcacttcaatgagacggtgctcactgacacaactactgctaccgctgtgggaatgtggcagccatcttggagctggacgagcatctccagaaagatttcatcatctttgaggctgctccccaagagacacggggcatccctcgaatgaagccgtggccgactacttcctggtgaccccgccggcccctgccccctcaaacccttctgggcctcgcaccactgtgatctg

SEQ ID NO: 313254 - DNA, 212 bp, Zea mays
aggaaagattatgaaaggaacaggctctttaaaaaagaagacaaaaagccagaattgtgtcattggggtgtctctttctgttttactgtctactaccataagaactatctcaaataactggagcatcaagggatgttagggtgtccatctgaagaaaaaatagctttttttttcttagttcggggaaacaggtgggggaaaagccccgggtg

SEQ ID NO: 313255 - DNA, 195 bp, Zea mays
ggtacggccaccaccaccggccaggaagcaagctcaaaccctaaccgccggcgatggcccgctacgaccgcgcgatcaccgtcttctcccccgacggccacctcttccaggtcgagtacgccctggaggccgtccgcaagggcaacgccgccgtcgggttccgcggaacggacaccgtcgtcctcggtgtggaga

SEQ ID NO: 313256 - DNA, 205 bp, Zea mays
cagtcttcccgcgtccgccgattcctcctccttggtcgccgcgtccttgaaaaatggccacacccttcctagcacatgagaagatctggttccacaagttcaaatatgacgacgcagaaaggagattctacgagcagatgaacgggcctgtggcaggtgcctcccgccaggagaacggcgccacgtgatcctccgtgacattgcg

SEQ ID NO: 313257 - DNA, 161 bp, Zea mays
ctagtacacagatcaggcagtggtaatactaaaggtcatcatacacatcttgatcatagggcatgtgcggaagtttactgggccatcacagacttttgttctagtgattgaatgtataaggagtcatagcatgccctacggcagatctggattctaataca

SEQ ID NO: 313258 - DNA, 198 bp, Zea mays
acggtccccaccttctgtgtctggcgtctctcactgagcgtgaccgtcctcaggcgcatccgcgctgtggcctgcgccagcctcgctcctcttcctggctgatcgtcccaccgcgtacacgtgccgccgcctgttttgctgctgcttttgagctgagaattgtttttatgacttttaaatagctagaaggggttcaaa

SEQ ID NO: 313259 - DNA, 170 bp, Zea mays
ggcctggggcactggttccggctgtgtctggtggtctggctgccaagaaggcgggcaggccttcactgcagcactgagcctcaaatccgctctggagcatgaggctggatgcagtggtggtgaggccgccccgctccatcccgaggcagccagggtttgttttgcgctct

SEQ ID NO: 313260 - DNA, 146 bp, Zea mays
tgtactattttaaaatcccttgaaatgatgatatcaggagtaaaattgcttgtagtgtttctgaagttctgtctggtaggcacgttacaaatgcctaataggcagttgagctagagcaaggctacttgttatggccataaatgcct

SEQ ID NO: 313261 - DNA, 136 bp, Zea mays
gcaattcggctagtccctcggaggcgttcagctgcttcaagatgaagcgcaacatctgtcaccgagtccactggctgccatgcagatgacaccttcgtactttctatgagaagcgtatgtcgaacagaagttgctg

SEQ ID NO: 313262 - DNA, 158 bp, Zea mays
cggaattcgtgtgagcaggcggagaagaagatcgcgtacgacaagaagctgtgcagcctgctcggtgagtacaccaagggacggttgtcgtaagcagctccaggacatccgccggggtgcgaaagggcgactcggtggtgagcagcgtgaagaacacg

SEQ ID NO: 313263 - DNA, 151 bp, Zea mays
agagaggaccgtccaaaccgacacgcggaggtatcctcgtggtgtccggagagagagtaccaagacagaccgatgtatagctactatccccttgccgatgcccacctcactgtaagagctactggacctcgttcatgtttcatgtaactat

SEQ ID NO: 313264 - DNA, 149 bp, Zea mays
tgcagcgaatgggcgccccaccaccgagggtgaggtaatcgggctacttatcgcagcgctctttgctggatctgaccaggctggagcgtacatgcttcgcttcaagcagtgtgctgcagaagccgtagaggcgcctaaggatatcatga

SEQ ID NO: 313265 - DNA, 157 bp, Zea mays
tccgagcatcactaccacttctcgtgccagttcaccactgacttgatcgtcagtgaaccatgccgacttcttaggtcacggaaacaaggacaccgtcggccagtacgagtgacacatggcgttcacaatgctggttctgtaccgcgttgtctcacgc

SEQ ID NO: 313266 - DNA, 145 bp, Zea mays
caggaacaccccagctgcccaggacccagggctctggaagctagcatagttgtcctcctgcccagtgcgtctctgtggaagggagccccaggtcctcaagggctagtggggaccaccaggcaagatgggctcctgggtgagccag

SEQ ID NO: 313267 - DNA, 138 bp, Zea mays
ccctgaaggctgggcaggtggtgacgatctcggctacaggagctggggccacccacagccgtttgcgatccacctggggctgcgggaacagcctgcgtagtggctctcatcaactccactggtgactaagtggccatg

SEQ ID NO: 313268 - DNA, 139 bp, Zea mays
ccaagacacatcctaagacctggcactgtgttaatttacatgagtatctgggtgaatgtaatggacgcacgtggggggtggtgtgaatgcccaccgaaggtgtaagtggggtgcagatttgtacagtagcagaaagtta

SEQ ID NO: 313269 - DNA, 168 bp, Zea mays
ccaacgcctgcggcaactgcacgaccccaacgcccccggtcgagccaccgccgccgcctcctgctgctaccccacccccttcgtccagcggcaagtgcccgtcaagttcggcgtgagcgcgatgtgctcggcctcgtcaaaggcgaggctggcaaggtgcctgcagag

SEQ ID NO: 313270 - DNA, 132 bp, Zea mays
gtgcctttctcaagaaagaataattcaatttcaggccactccatgtccaaaagaaccaaataaagagatgattaatgatggcgcttcctggacaatcattaggcagagtatacattttatgagggaatgggc

SEQ ID NO: 313271 - DNA, 167 bp, Zea mays
gcctggcccggtcccttccagggcaactcccagggatgtggtgacatgcagggttcaagtgttcttggttccaggcacctcccggctcacggggagcatgccgaggagaccaggcaggacctcccgaggctgcgccccggccggcccatgcgttttgtgatccaaag

SEQ ID NO: 313272 - DNA, 160 bp, Zea mays
accgcgcggaagttgctggctgactgggcttgcgaggaaaccgcctcggagctgcagccgaaggcaatggaatcactgaagatcggcgagggaggatcatgggtggctttttctcaagtatattttcaagtctgtttggaactcgggaaatgagattttt

SEQ ID NO: 313273 - DNA, 265 bp, Zea mays
ctcgaaattcaactcgagatgaaagttacaattatatttattctagataatcctagaaatagaaaaaacacacaatataccaacattatggaacacttaaattcacccatcttaatactagaaatcttttacatacagagattaaatctaactctgagaatagaaccatgattaaaaacatgataaaggagggaaaaattattccatcagaaataactataaaactattacaggagacaatgataaaaaatgaaaatgacaaatt

SEQ ID NO: 313274 - DNA, 175 bp, Zea mays
cgcggcgggatatgaacgcgcaccagccttgatgaagcccaggcccggcagccatcgcggtggaaggacgcatgcaatgtgtgaagttcttgctctacgtcctcctgctggccttttgcgcctgtgcactgggactgattaccgtgggtgtcgtggcacaacctgtcctgagtca

SEQ ID NO: 313275 - DNA, 258 bp, Zea mays
gtaattgataagatgctggaactggcacagtcaaacatgaaagaaatggaaaaacatattagcagtcttcaagaggaggtaaagggtcatcaagataaggccactgaccatcagcaaatagaagaatcgctgagaaacacaatctcagaactcaaggtggtacaagaggcactggagctgtcaaagtcacaagtggcagatttggaacagaagcttgcctcccaggatgctgatatcagtaaactaactgaagagttg

SEQ ID NO: 313276 - DNA, 205 bp, Zea mays
gcgcgactcaaagcttcttccaggtcctaccggcgatgctggagctccacaccattacgtcgacacaatgatggagtgtatctcgatctacatcggacaagtcggtatcgaggtcggtaacgagtgctgggaggtctaatggttcgagcatggcattcaggctgttggtgcagatgccaggtgataagaccattgggggttgtga

SEQ ID NO: 313277 - DNA, 181 bp, Zea mays
tgcatctcttaaatctggtgcgtcatcgagcttaccgaggatagctgtagctggtgccaagcccacattctctgctcaagccaaagcggatgaagaaggaaaacatacattttcctttactgagactcagaaatgggcaacagatgatgtgctttgggcacagagaatgaagcgtcaagct

SEQ ID NO: 313278 - DNA, 313 bp, Zea mays
ctgtagcagttgctataaattatcccaaacatgtatgagaataatagggttgctgattctgcttttggagcagcaatgaacgctggcttcctggcgatgaagatctactggcggaaaacttcttgtgttccaatcagtgttgccatcacttgggattggatctttatctgctagtgaagccgaaggagaggcatacattacaactggtgacaaggaagcccatagacttttgcagcctgttgacaatacactctcgacaatggcactagaatttgctgaatatcacgtctgtgtggacgtattcctcacaaca

SEQ ID NO: 313279 - DNA, 315 bp, Zea mays
gtcagaaccagcacaggactgaacacatccctggttgtaggtatataatgcagccctccaagctcggcaggcatcccctgcctggaagtgaccacagtgactgctgccttatattcctacattccaggccagaaccagcacaggactgaacacatccctggttgtaatgtccatttccatcttcccctaatccctatccacatcaaggcacatcagacttcgcagagacccactttattcagttctgtacatatggggacatcggtccaagcccaacccaccttagcatgtatcactctgtggagaataaagcac

SEQ ID NO: 313280 - DNA, 293 bp, Zea mays
ggcaggaggaagacctgggcgctcttaaccagccccaacgcccttgtatgcatgtctttatctctgtctcctccttttctgattcttctcccagacaggtgaagaaacaagaaaactaagaaatccgagcggttggagggggagtctgtgtggatgggatggggacgccgggggaagggctgggccgctgctcccatgccctgatccggggagtcccagagagcctggcgtcggcggaaagtgcggcggctggccttcacgctctggatactggcatagctcaaagggagcac

SEQ ID NO: 313281 - DNA, 296 bp, Zea mays
ctcgagccgcgcaatcctacacgggatacgagctcaccagcatgcatgccattcgggcaagacataatccatatgtgcaagccaggagcaggatagatcagctcaagaggctagggcatagcgtggataaggtcgaattcatcttgatggatgggactttcatgtccttaccagctgaatatcgtgattatttcatcagaaatcttcatgatgctttatcgggtcacacttctgcaaatgttgaggaggctatttgttattcggaacatagtgctgtcaaatgtattggtatgacg

SEQ ID NO: 313282 - DNA, 278 bp, Zea mays
gccaaggagttttcggtggctcagctgggtaaccggggatcaccatggtgggctcattggtggggaagaagatcgtgtctgtaacggggaacgccaagaagctggaggaggtcgttcagattctaggcgataagtttccatgcactttggtggcacagagaattgacctgccggagtaccagggggagccggatgagatttccatgcagtgatgtcaggaggcagttcgccaggtacaggggcccgtgctggttgaggacattgtctgtgcatcaatg

SEQ ID NO: 313283 - DNA, 296 bp, Zea mays
caggaaaccacagggcccttgtcgcgccttctctttcgcttatttaggagccctgaactccctcagagtctatccagtcatgccctcttgtatgttgatgccacttcttggaagaagatgagggcaatgagttagggctccttttccccttccctcccaccagattgctctggcacctttcatttcttcctccaggctttactcccctttttatgcgccagcgatacactgggaccacgccttaccccggacaggatgaatggatcaaaggagtgaggatgctagagaacatcctt

SEQ ID NO: 313284 - DNA, 275 bp, Zea mays
atggactgaaaatatcatactagtaaggtgttactagtagaacacgatgcaggagaatcgtgctagaaaagatgtctacaacagtgagtactaccacttccgcgcgcctgagtgcagctgcgctggatgtcccccgaggccatcctggagggtgacttctctgaccacggtctgatgtctgggccttcggtgtgctgatgtgggaagtgtatacacatggagagatgccccatggtgggcaggcagatgatgaagtactggcagatctgcaggct

SEQ ID NO: 313285 - DNA, 275 bp, Zea mays
  unsure (1)..(275): unsure at all n locations
acgcanagataggcgtcttcatactcgcctacctccacagctcaaaactttccaccttctcccaattccctccgtcggccgccgctccatcccgtacgtcgaccaccatgagggagtgcatttcgatccacatcggccaggccggtatccagatcggaaacgcgtactgggagctgtactgccttgaacatggcattcaggctgacggtcagatgcccggtgacaagaccattgggggaggtgatgatgctttcaacaccttcttcagtgcgact

SEQ ID NO: 313286 - DNA, 155 bp, Zea mays
gccaccaatgggccccggggccagcgacctgacagttacaggactgaagtctttctccagcccctccctctgcagcctgaacaccctgctagcaggaacctcacgcctaccacatgcctcgagcacaggcaaccttggcctcctctgcagaagtg

SEQ ID NO: 313287 - DNA, 288 bp, Zea mays
ggcggctgcggcggacacggaggcgaaggaggaggagcagcagcagcaggcggcgccgaaggagcggcatcccactcagtgcttgcaaccatggctaggggattgaagaagcacttgaagaggctcaatgcgcccaagcattggatgctcgacaagcttggcggagcttttgctcccaagccatcttctggacctcacaagtccagggagtgccttcctctgatcctcatcatcaggaacaggctcaagtatgctctgaactcacgtgaggtcatttctatcctgatg

SEQ ID NO: 313288 - DNA, 276 bp, Zea mays
cgcagagacaggcgtcttcgtactcgcctatctccgcgactcaaagctttccccaattcccccccttctcccatttctcaccaccgccgccgctccccccgttcaacaacaccatgagggagtgcatctcgatccacatcggccaggctggtatccaggtcggaaccgcgtgctgggagctctactgcctcgagcatggcattcaggctgatggccagatgcccggtgacaagaccattgggggaagtgctgatgctttcaacaccttcttcagtg

SEQ ID NO: 313289 - DNA, 275 bp, Zea mays
ccaggcgcaggggatccgttcccacccatctcgcccagccccgaagagcagctccagccttcggagtgccacaccttctctgaccccacctgccccggagcccctgcggtgctgcactttcctctggtcagcgactccttccgggagtactcggcccctggtgtccggcggacacccgaggaggcggcagctggggatgtgaacctgtcttcatcggactctccctagcactacacgaaggtgacctacagccaggaggacgtggacaagctgct

SEQ ID NO: 313290 - DNA, 148 bp, Zea mays
cggctcgagcctgcagcaagatggatgtgggcagcaaagaggtcctgatggagagcccgacggttctggagatgagcattggggcgccggaagcccagcaacgcctggccctgagtgagcacctggttaccactgccaccgtctccat

SEQ ID NO: 313291 - DNA, 264 bp, Zea mays
gctcggcattcaaagtcatagaagagtattgtattgttgcaccagatacagaaatattctgtgagggtgagcctattaagagggaggatgaggaaagactcgatgaagttggctatgatgatgttggtggagttagaaagcagatggcccaaatcagagaactggttgaacttcccctgcgtcacccccagcttttcaatcatgtgtgaagccaccaaagggaatattgctgtatgggcctcctggctctggcaagacccgtgt

SEQ ID NO: 313292 - DNA, 112 bp, Zea mays
agtggaacttcggcggcttcccagtttggttgaagtatgtaccgggcatcagcttcatgacagacaacgaacctttcaagacggccatgcagggtttcactgagaaaattgt

SEQ ID NO: 313293 - DNA, 172 bp, Zea mays
ccagatcttgtcatggttcgctatgtgatccgagtacgagttcagtgacgttttagatctgaaactgcagtgacaatggcgaagatgagggagatcctgcacatccagggagggcaatgtggcaaccagattggcgccaagttctgggaggtggtgtgcgatgaacatggca

SEQ ID NO: 313294 - DNA, 299 bp, Zea mays
  unsure (1)..(299): unsure at all n locations
caagcacaagcgcactctagcaatggcttctgaggttgtccgccctagcgacgccgagctactaaaggcacaagccgacatatggcggctcagcctctcctacctcacgcccctgtcactgaggtgcgccgtggagcttggcatccccacggcgatctaccgccatggcggggctgcctcagccgctgagctggtcacggcgctgtctctcncctccactaagctgccgttcatccgacgcctgctacggctcctcgccgcgtcgggcgtgttcaccgtcgacaagcagagcacggagg

SEQ ID NO: 313295 - DNA, 281 bp, Zea mays
gatcctgtcgggcagcaggccggggacgcgcggtacgtgttcgaggcgaagacgatccagaggatggagctcctggtcctcagcacgctcaagtggaggatgcaagcggtcacccccttgtcgtacgtcgactacttcctccaccggctccgaggcggcgccgcgccgagcagacgcgccgtcctccgatccgcggagctcatcctgtgcatcgccagaggtgagcaacgaccaggaagttctcagttctcacttctcacccggcggggttttttttttta

SEQ ID NO: 313296 - DNA, 282 bp, Zea mays
ggcttaaatttgatgggacccaataggccaccctagtctggttatcttttcaccttgtttacccttgaatttttgggtagtctttgctattgctatatatggttttgggtgttgagataattattacacttgatcattctttattattgttctacttctgctcatgataagaccactatgttaattggaacatcgaacttaacttgagaaacacgtgccaccataggggtggaatgggacgtccttggctgactaactaggaaagctagtggaggactactg

SEQ ID NO: 313297 - DNA, 274 bp, Zea mays
attattttagccaccagaacacagaatgttcttggggagaagggtcgtcggatcagagagctgactgcagttgtccagaagcggtttggcttccctgaaggcagcgtagagctgtatgcagaaaaagtggccacaagaggtctgtgatgcattgcccacgcagagtctctacgctacaaactcttaggagggcttgaagttcgaagggcctgctatggtgtgcttcggttcattatggaaagtgggcgcagaggctgtgatgctgtggtctctg

SEQ ID NO: 313298 - DNA, 272 bp, Zea mays
gtgccagaactgcgcgtagtccgcgccgatcgactgagaagcccggtttgcgctctcagaatgactgaatgggaaacagccaaacccgcagtggatgataacccggacatcaagctctttgggaaatggagcactgatgatctgcagatcaacgatatttctctacaagattacatcgctgtgaaggagacatatgccaagtacctgcaccacagtgcaggacagtatgctgccaagcgtgttcgcaaagtacaatggtccatcgtggagcg

SEQ ID NO: 313299 - DNA, 135 bp, Zea mays
gggatgtgatgtgtatctcttcttcgcttgcaaagagtagctaagcaaacgaagaagggatgtgatgtgtatctcttaggctagactgcttcagctagttttctgtgactgctacatgaatccatggattactga

SEQ ID NO: 313300 - DNA, 285 bp, Zea mays
accgcttccgcaaccacgtataaaaacaccgcacgcgccgccgccgccgtcctattcctcggagaggagaagccgccgtcgcagcaatcacagcagcccggagaacggccaggtccgacaagatgcagatcttcgtgaagacgctgacagggaagaccatcaccctcgaggtcgagagcagcgacaccatcgacaatgtcaaggccaagatccaggacaaggaagggatcccgccggaccagcagcggctgatctttgccgggaagcagctggaggatggccgca

SEQ ID NO: 313301 - DNA, 284 bp, Zea mays
cagaaaaaatagctacatgatgagttcctctgaccatcactttagccaggcagttggatctgcctcccctagcatggctcgaagtcgaatcacaaagtacagtacagtgacttataccaagtagtcatgatcccagaatacagttcaccactgtctctgtgatttacatccaactcctgccctccaaatctaagattcccatttacgatgcagagcaggctataggagactgtggagtaaggaagaaccacagtgacagtaacacacggtaacatcaccgtgga

SEQ ID NO: 313302 - DNA, 294 bp, Zea mays
atttaccagtgatgatgagagagatggaatggtcggggtaccaggggtctcaggaaatattttccaggagatagatgggaggcagttcgacagcccaatactggggagtagaaagcagaaaggtggatttggcaaaggcaaaggaaaagctaactttgcaactgaaagagagaggagggagcagtttaatgtgaagtatggggctttaaggtcactgttcccaaaccctactaagaatgacagggcctctatagttggagatgccattgaatacatcaatgagcttaatagaac

SEQ ID NO: 313303 - DNA, 229 bp, Zea mays
cggctcgagatggatcatcaccggtacctctgggcggacggcatcgatgtggatatccctactggcttcgcaggatggttcttctgcatcactctcaggaagcttgtctgggttatccttcagcctctcttctatgcgtttagacccctgttcatcaaccccaagccaattacccatctggaagtcatcaacaatgtgatccaggtcacttttgacgtcctcgtctatt

SEQ ID NO: 313304 - DNA, 276 bp, Zea mays
tatcaacagctgttgtagagccatacaacagctgttgacacctgtggggaaggataaatggtgaaaccaagcttagacttcttgccataatcaactgacaggcgctccaacagcagtgaaccaagtccagagccagtaccaacttgaacaggctgatctcacagatcatatcatcacttaccacctccctgaggtttgatggggctatcaatgtggatgttatttagttccagaccaaccttgttcctaacccacgtattcatttcatgctttcct

SEQ ID NO: 313305 - DNA, 241 bp, Zea mays
agcggtctgtgtgagggagatgcccatgcagagcggccacagggcatgttgccatcctcagcccttcctggcaagcaagcgggggaggaagagaggagaggcggtctctgtacaaaacaaagtatttttattcatttgtatttattaaatgaaaaaaaaaaaggaattctctggtgcccctcttctaaggtggcctttaaatgctgttaaataaaattgtgaaccggtcctcaaaaataag

SEQ ID NO: 313306 - DNA, 288 bp, Zea mays
accggccctgtgttcctctgatgcttcaccgggtgtcagagttgagaccttggagtccctaataagagcagaagcctgtaggagaagtagctttagaacactagaggaggaacacatgcttggcccaattggtgtgaaactgaagccagccaatttgctaatgcagcttatcacttgtggatctatatctgttaaagaacaccgaggctttgggttcatcccaacgtacaggcctcggtttacacaagttgagttcccttcgtcagtgttctccactcctgtggcatt

SEQ ID NO: 313307 - DNA, 285 bp, Zea mays
gagaagcttatggaacacatcaaacttttctccacatgtctcaatattcctaagcttattcgagcttgtgatgaacagcagcactggaaagaacttacctacctgtacatacagtatgatgaatttgacaatgctgccaccactattatgaaccactctccagatgcatgggatcatatgcagttcaaggatgtttgcgttaaagttgcgaatgtggagcattcttaaggcgggtcacttctatttgcaggagcatcctgatctcatcaatgatatgctgaatgt

SEQ ID NO: 313308 - DNA, 283 bp, Zea mays
aaaacaaagctagaacacgctcttaagcaacacctcacaaggtacacagggaatatttggttttaatgactggcaaactcaaatggctaccctttcaaaagcagaagcccaagagatggatcaaaatccagaacaggggctggggatttagctcagtggtagagcgcttacctaggaagcgcaaggccctgggttcagtccccagctccgaaaaaaaaaaaaaaaaaaaaaaaaaaaaaaaaaaaagaaaaaaaaaagaagaaaaaaaaaagggggggggccc

SEQ ID NO: 313309 - DNA, 284 bp, Zea mays
gacctggaagcccaagtatgatcttgtacaggacgtcaaaaatcttcttctggaagtcagaaagaccatctgcaccagcagcagcctcctcagcacttctccttttccttctcaacatcatacttgggcttccaggagaagatttttgacgtcctgtacaagattgctgatattccgttcttggcaccctacaagaccaagattcttgatgttatcgagaagggagagaaacagcccaacatcactattagacttttggtctccgttgtcatcgtgttcgttac

SEQ ID NO: 313310 - DNA, 228 bp, Zea mays
agcgccagccagactggatcgatcacagtcacctccctcatgtactcctttgtcgtcatcaccagctcgtgatagatgacccaggagtacatgagggaggtgactgtgatcgatccaaaatggcttgttgagctggcgccaaggttttacaagggtgctgaccccaccaagatgagcaaaaggaaaaggacggagaagatcgagcctctatatgatagataccacgag

SEQ ID NO: 313311 - DNA, 286 bp, Zea mays
gtacagcagccgccgtcatcgcacgttcatcgctgcatggaggagttcgcgctgctacgccgtcgtttctccggcaagacctcctctgatcgtgatttgttcccgcgcttcgaggaatcgacgatcaagcttcgacgatcaagtgatctagctcttcgagttccacgaagttgaagaccctaagcatctgtttggtgaaggttgtccacattacaaccactgttcaagagaagacgaatcgtggaaggagacttccaggagttccaggactacgacgagttctagg

SEQ ID NO: 313312 - DNA, 296 bp, Zea mays
aatatattctgtgagataactaaatggaagaccaggaaaaggactttggttttgtgtttgcttgtgtaataaagcatgtccttcgtatgtcacagtttggagcaacggaagtcttttagtgatggctaatgggtctgggcagcatcccttcatgaatttttttttaatccaatatccgttgatttgattgtgattagagaaccttggacattttgctgctaaagaatcttttttcccctgtagcccttcctgaccctacttgcactgctgtggatttttttaagagcatcaaagac

SEQ ID NO: 313313 - DNA, 103 bp, Zea mays
agcacttctgaagaaacatgctattcgaatgactaaatatgattatagactctcaaataagttggatactgacctgcaaaaactacgttgcagagtcaattat

SEQ ID NO: 313314 - DNA, 288 bp, Zea mays
atgggctgcagattctgtgctactggaacaatgggcttcaaaagcaatctgtcttctggagaaattgtagagcagctggtccatgcatctcgctattctcagatccgaaatgttgttttcatgggaatgggggagccgatgaacaactataatgctttggttgaagcaatcggagtgtttactggatctccttttcagctttcacctaagagaattactgtatctactgtcggaatcattcatggaatcaacaaattcaatggtgaccttccaaaggtgaatttagca

SEQ ID NO: 313315 - DNA, 181 bp, Zea mays
gtttcacgagagcccgggagctgctgccctgcggccccgtctgtagctttcagcctctgggtctgagtcatggccgggtgggcggcacagccttctccactggccggagtcagtgccaggtccttgccctttgtggaaagtcacaggtcacacgagacgccccgtgtcctgcctgtctgga

SEQ ID NO: 313316 - DNA, 186 bp, Zea mays
atagagagaaggtgttatatgcaccgggtcgccttaccggccccgctgcggattggtgggatgcatactgcgctgctcacactgctgtcaacacaattacctgggcagaattctccactcaattcagaaattaccatattcctgctggacttatgaagattaaaaggaaggagtttctaaccatca

SEQ ID NO: 313317 - DNA, 276 bp, Zea mays
agggaacaaaggtctggcctccagaaaatgaaggctgtaaaacattgttttgtggtgatcctattggcaaaggcagagaagttgtttgtggttgcgtttatcctggatcagtggaatgtgttcggtttcatgtagcagaatggagacttaagttgaaacatgaacttggtgcagctttctatgcatggggattcaatcgtatgggtgaggagattgcactttcttggacagatgaagaggaggcaagtatcaaggccgcagcacaacatagtgctg

SEQ ID NO: 313318 - DNA, 142 bp, Zea mays
ctttaccattcctccccaaaacacatcctgcgatcctcgaagcctccgccgagcatcgatcatgtcggcctactgcggcaagtacgcggatgagctcatcaagaatgctgcctacatcggcacccctggcaagggtatcctt

SEQ ID NO: 313319 - DNA, 270 bp, Zea mays
caacgtatgaccttctacacgcggaccatctctttctgagctttgagaacagatggtccgcgtgcagaaggtcataaagagatgcaaactggctgcagttttcgccgaggtcgaccgtgtactgaggccacagggcaagcacatcgtgagggacaccgcggacacgataaatgagctggagagcatggccaagtccgtgcagtgggaggtgcggatgacctacaccaagggcagcgagggcctgctctgcgtcgagaagtcgatgtggcg

SEQ ID NO: 313320 - DNA, 273 bp, Zea mays
gtgattctctgggaggtaatcactcataagcattgttaacttatggttccggtaaggtatatgttgtccatcagaagataacaatccttatgagtgattctctgggagggaatgcgaagaccttgatgtttgtgaatgtttcaccagcagagtctaacttggaggagacttacaactcgctcctgtatgcttcacgcgttcgatgcattgttaatgatacgagcaagcatgttgctccaaaagaaatcatgagattgaagaagttgatcgcct

SEQ ID NO: 313321 - DNA, 280 bp, Zea mays
cgcagggctgggcgggagagactgttctgtaccttgggtaactgtgttgctgaaagactacctcgttcgggtcgtgatgtgtcaccgcggcaactgcctggaggcggggatcggcgcagggtggaagcggctccccattttataccaaaggtgctacatctatgtgatgggtggggtggggagggaatcactggtgctatagaaattgagatgcccccccaggccagcaaatgttcctttttgttcaaagtctatctttattccttgatatttgtctttc

SEQ ID NO: 313322 - DNA, 147 bp, Zea mays
gcaatgttcatactgctgccctgcacctgctgtgtaaccaggcctgtgtttgttctggctgatagtgatgtaccctaagacttgtaacgtcatgttcgttcttgtgaactatagcgagtgaataaatttggttaatgttggatgttc

SEQ ID NO: 313323 - DNA, 241 bp, Zea mays
atcgagcgaatgagcgtcaatgacattgtaactctaggtgcaaaaccattgttcttactagattactatgcaacgagcaagcttgatgttgatcttgcagagaaggttatcaaggggattagggatggctgcgaacaatcagattgtgctctcctaggaggggaggtaagatgtttttggaattgaattactaggactcgacaattcaaccatgcagtattacccttgtaagtttagtagt

SEQ ID NO: 313324 - DNA, 225 bp, Zea mays
ctcgtctccgacacgctctacctcaccgtctcctacatcgaccgcttcctctctgccaaagttctcaacaggcagaagctgcagctcctcggcgtctccgccatgctcatcgcatccaagtatgaggagatcagcccgcccaacgtggaggatttctgctacatcaccgataacacctacaccaagcaggaggtagttaagatggagagtgatatactgaatgtc

SEQ ID NO: 313325 - DNA, 288 bp, Zea mays
gcgagcgaagaacgcgggcagcgagcgagatgcagcaccgaggcttcctcgtcctcaccctcctcgctctgctggcgctcacctccgacggtcgccaacaagaaagataaggtgaagaagggcggcccggggaccgagtgcgctgactgggcctgggggcatgcacccccagcagcaaggattgcggcgtcggtttccgcaagggcacctgcggggcccagacccagcgcatccggtgcagggtgccctgcaactggaagaaggagtttggaaccgcctgcaagtaca

SEQ ID NO: 313326 - DNA, 252 bp, Zea mays
tgtgaggcagtatttatcccggcaggatgtccccacctagcttctgttcaaatgtccaaggctcgactccatattcttccttaagctaggtgaggcagtatttatcccggcaggatgtccccaccaggttagaaatttgaagtcttgcataaaggttgcactagattttgtttctccggaaaatgtccgagagtgcatcaggttaacagagggtttccgtctgctgccgaagtggcataaggtgattgaaga

SEQ ID NO: 313327 - DNA, 203 bp, Zea mays
acggaaccttatatcgttgctcataattttctcttgtcacatgctgctgctgtgtcaagataccgtaacaagtatcaggctgctcagaaaggaaaggttggaatagttctggacttcaattggtatgaagctctcacaaactcaaccgaagaccaagcagcggctcaaagagcaagggatttccatgttggttggtttgctga

SEQ ID NO: 313328 - DNA, 240 bp, Zea mays
tagccaaaccaagcaagcagggaatccccacaaggcagcagatggaagcgaaaggtggcggtggcccgcgcgctgccaggtcgacggctgcaacgttgacctcaccgacgtcaagcccgcctactactgccgccacaaggtgtgcaaaatgcactccaaggagccccgcgtcctcgtcaacggcctcgagcagcgcttctgccagcagtgcagcaggttccaccagctggctgaattcga

SEQ ID NO: 313329 - DNA, 248 bp, Zea mays
tattcaaggaaatgaaggcaaccggtgtgaacccaaacctggtcatgtgcaatacaaggttgtatgtcatgggccacgcattgcaaccttgggtggtgaagagcatccacagggagatgattgacaagcaggtgcagcacaacaaggtgacctactgttgtctcctgcatgcatacaccagggcacactacgatgaggatgccatggctgtgtaccggctgatgaaggatgaagcaatggacgtgatg

SEQ ID NO: 313330 - DNA, 225 bp, Zea mays
gatatgtacaaggaatgaatgaggttttggcacctctctattatgttttcaagaatgaccctgaccaaagtcaagctgctttagcagagccagatgccttcttctgttttgtcgagctgcttagcgggttccgagacaacttttgcaagcaacttgacaacagcgtggttggcatacgctccacaattactacactgtcacagcttctgagaagacacgaggagg

SEQ ID NO: 313331 - DNA, 259 bp, Zea mays
ggaagacgttactttgaagtggatgttggctaaggaaccggatgggatgtaggagtctgtatggccgatgctgcgatgggtcctgggatgaagcaagagcctcagtctggattctggactttcggatgtgcagaaagataagctatgtagcgcttacttctcccccaacttcccttcatctgcatgagcagtccctgcctgtgggaatttttctggactatgaagccggagttgtatccttttataacgggaatactgg

SEQ ID NO: 313332 - DNA, 277 bp, Zea mays
attcttgccacatatgcaagaggcagaaccctgggcatgttgaatatttctcgaactatgaggacattgagttgcattttagagaagatcatttcctatgtgaagatgaagcatgtttggaaaagaagtttgttgtcttcctgagtaaagcgcactgaagaagcataatgctatggagcatggtgggcggatgtctcgttctctgaggaatgttgcacttgagacacctaccaacttaatatatcgcagaaatgagcaagaacaacggcgtggcagg

SEQ ID NO: 313333 - DNA, 276 bp, Zea mays
gactagttctagagcacagcctctctacattcagtgggcacatatcacgtctgcgcaagattgtagaaatggtatcaaaagattctctagttctaattgatgagattggcagcggcactgatccagctgaaggtgtagctctttcaaccagcattttgaagtatcttgcaagtagagtgaatttagccattgtgacaactcattatgctgatctaagtcggctccagtcagttgataaccgattcgagaatgctgcaatggaattttgtgtagaaa

SEQ ID NO: 313334 - DNA, 269 bp, Zea mays
cagggatgaaggcctccctgtctaaaatccctccttcatcccccgctggtggcagaatctgttaccagaggacagagcctttggctcttctaatcagagcgcaagctgggagcacaggcactgcaggagagaatgcccagtgaccagtcactgaccctgtgcagaacctcctggaagcgagctttgctgcgagagcgggtagctagcctgagagggaccctctaagtgacctcaaaggtgattgtgccaggctctgcgcctgccccaca

SEQ ID NO: 313335 - DNA, 276 bp, Zea mays
tctggatgggtgtggagcaacttcatgccatgaaacttcgagtggtggaaatttattgaggtttggaattacaatgcaggggaggggttcaaaagtatgggatgttgttcttgacacttccaccatggagatcagttgtggttgtagaaagtttgaaaggatgggtcttctttgttcgcatgccctcaaagtcttcaccctgcagaatgttgacacaattccagaaaagtatgttttgaaacgctggacaaaagatgccaggagaagcatgtatac

SEQ ID NO: 313336 - DNA, 289 bp, Zea mays
aacctctcctatgttgatctttcaagcaattttttgcacggctcactgcctatgggcattggtgatttgagcgcgttgacattgctgaaccttcgtcagaacaactttactggcgaaatcccaagaacaatcaccaaacttaagaatctgttatacattgacttatcaagcaacaatttcaatggtagcatacctgatggcctccctgatgatctggtcgaatttaatgtttcctacaactacctgtctggctctgttccaagtaatttactgaaattcccagattcat

SEQ ID NO: 313337 - DNA, 277 bp, Zea mays
ggctgagaaaacaggtgtgctgtgtgatacagttgtacaatgaagcagcatcctgaaacatgggagtggagtctggcttggattatttgtcctaacaacatatcttcaatcttatacttatgccctcccttggtgtaggctgagacagaggagttggctacacaagtggagtctcttgcagcagagaacacgtcccttagatctgaaatcggccggctaacagagagctcagagaagctcagactggagaattcagctctaatggtgaagctgaagg

SEQ ID NO: 313338 - DNA, 277 bp, Zea mays
caggagtgtccacaaaggtgatatgctctagcaggggatgtggcatctgacccaacgtagctatgatttcactggtgtgacctcatggtttgctgccaagtgtgaccttatccttcttctgtttgaccctcacaagcttgatataagtgatgagttcaaacgtgtcatttcatctttacgtgggcatgatgacaaaatacgcgtagtgttgaacaaggccgaccaagttgacacacaacagcttatgagagtgtatggtgcattgatgtggtctctt

SEQ ID NO: 313339 - DNA, 272 bp, Zea mays
gaagttctcattcaatacaagaactagtgcatttaattctagacacaattcaaaagatcaaagcctctccaagtcccaaattcattccaaccacctagtgacttgagagagtgtgtgttcgtgttcatttgcgctcttgttgcttggatggctttcttgcttcctcattttgttcccaagtgaattgtaattaaagcaagattaaggagacccgatctttgtgaccacctcaacggggattaggttctttggaaccgaacctcggaggtgag

SEQ ID NO: 313340 - DNA, 302 bp, Zea mays
caagccaccagcgctcgtcacctccaatcaacaaattcccaatccgccgcttcccatcccgcgttcgccgctccatttgatcgaattcccgatggcgcccaaggccgagaagaagcccgcggagaagaagccgacggaggagaaggccgagaagaagcccagggcggagaagcgcgtgccgggcaaggagggcggcgagaagaaggggaagaagaaggccaagaagagcgtcgagacgtacaagatctacatcttcaaggtgctcaagcaggtgcacccggacattggtatctcgtccaagg

SEQ ID NO: 313341 - DNA, 296 bp, Zea mays
ctgaaggactccaagacccttctctttggtgagaaggaggttgctgtgtttggctgcaggaaccctgaggagatcccatggggttcggttggcgctgaatatgttgttgagtctactggtgttttcactgaccaggagaaggctgcagctcacttgaagggtggtgccaagaaggttgtcatttctgctcctagcaaggatgcccccatgttcgttgttggtgtcaacgagaaggagtacaagtctgacatcaacattgtctctaatgctagctgcacaaccaactgccttgctcc

SEQ ID NO: 313342 - DNA, 291 bp, Zea mays
gaaagctgaaggtttcagttgtagcagttccaaaaacaatcgacaatgatatacttttgatggataaaacatttggttttgatacagctgttgaagaagcccaacgagccattaattccgcatatatagaggcacgtagtgcttaccatggtattggcttggtcaaattaatgggaagaagcagcgggtttattgcaatgcacgcttccctttcaagtgggcaggtcgatgtctgcttaatacctgaggtaatataaatgtagcttttactatgtttaaaactgccatatg

SEQ ID NO: 313343 - DNA, 284 bp, Zea mays
gtcgacaccttgcttcactgctcctctaattccagcgagaatggatcacgttcaaagccatgccctcctcgcccaggggaaaagggtgaaatgcatgtggtgcctgtaccattgcctttagtatctggtctaagcagtgttagaatcaacattcctcctgatctacgaccacctgaagcaagacagaatatactttctgcagtgcaagaactaggaaagcgctacccccaaggacatgggtattcaagaacctgaactagttgacttggtacataaacttgaag

SEQ ID NO: 313344 - DNA, 276 bp, Zea mays
gagcttgcaagatttgttgagcatgtggataaggacaatgatggtattattacttttgaggagtggagagattttactttgctttatcctcatgaagcaaccatggaaaacatatatcatcactgggaaagagtctgccttgtagatatcggtgagcaggctgctataccagaagggataaacaaacatgtaagtgcgagcaaatatctgattgcaggaggcatcgctggtagcgcatctcgcactgcaactgcacctcttgatcgcctcaaagta

SEQ ID NO: 313345 - DNA, 194 bp, Zea mays
gccggagctcgacaaggacgaccgacgacgcacgcggagatccggcgtactgcaaattttgaaaactgaactgtaagatggcatcagcagagctttcccgtgaggaaaatgtgtacatggcgaactcgctgagcaggcggagaggtacgaggagatggttgagttcatggagaaggtagccaagactgttgact

SEQ ID NO: 313346 - DNA, 281 bp, Zea mays
ggccagtgcgcattacaaagacaggcatgtacaacttgttcttcatatcctgtgatccaaaactgagaggccttactatgagtggcaagactatctggaagaatcctggtgggtatctaccgggacgaatggcgcctttgatgaaattttatgttctcatgtcgctggcgtatctgttggtaatgattgtttggtttagccagtacgtaaggttctggagggatatattgccaatacagaattggatcactctaatcattgacactggtctgtttgagatg

SEQ ID NO: 313347 - DNA, 271 bp, Zea mays
gagctatttgatgatgtcattcttatagccgaagtcaaatcgtataccaaggtccacgtgaatatgcagttgacttttttggtgctatgggattcaggtgtccagaaagaaaaaacgtggctgattttttgcaagaagttttgtccaagaaagatcaacagcagtattggtgccactatgattatccataccaatttgtttactgtatcaaaatttgctgaagccttcaaaacatttatattggtaagagattgcatcaggattcaatgtt

SEQ ID NO: 313348 - DNA, 282 bp, Zea mays
ggatggttcaaaccacccaataaacaagagaaagaagcagaatgccttgagagatgttaggaaagctttactaagtcgaggtgttactggatacatgcagatgcagttcatcccacatgcaagagttccagtccttcaatatgtgagcgagcaatttggcatctcctgtgatatatcaattggcaactttgctggtcgaattaagtccaaaatcttctactgggtcaatactgtagatgagcggtttggtgatatggttttgactgatcaggaatgggcaaa

SEQ ID NO: 313349 - DNA, 265 bp, Zea mays
gtaggattccggtcctattgtgttggccttcgggaccgggagggaggcgagtgggcaggagagagaagggggggcgtttaaaattggggatcggagagaacggcggaggaggcggggcctcgagctgagctggcacgtccggggacggggaaggaagacaactggaattgggaggcgggtggtgctcggatgctcgcctgcgctgttgtttgttgcttgacttgcttgtttttcccggggatacaagcatttgctcgtttgttcc

SEQ ID NO: 313350 - DNA, 255 bp, Zea mays
atctggtttctgcttattactatggtacttgagctccagtggcataatattgtacctcttaactagacctccttagaccaacaaggacatcacagcacaaatacatctctgctagtatagcaggtgatatggttactgcttctgcttactcgcatgagttgccacgatatggtcttgaagttggtctgaccaactatgcagctgcctactgcactggccttctgttggctcgagtgtgctcaagaccgtggttta

SEQ ID NO: 313351 - DNA, 109 bp, Zea mays
gaaaacactgagaatccgaaattcgactggcttaaaggacgcgtgaacggtttgagagctgagagatgccaatatgggatctgctggagttttatgtccgagatgaaga

SEQ ID NO: 313352 - DNA, 143 bp, Zea mays
gtcaaagatgaatccatgtttcttacttggaaaccccgaacaaacaccactagcacgaggcgctcgcgttggcgtcgctcaccgacgacgagaagaaacttggcgactgccatttcgacctctggaagcagtcctacatggcc

SEQ ID NO: 313353 - DNA, 299 bp, Zea mays
tatattcaaaaattgagaagttggagcaggagctacgtgaagttgctgccctcgaggtttctctctactctgtggtgccagagcacggttgttcatcacataagttgcatacaccagctcgccgtctatctagggtttacattcatgcatcaaaattttggtcctcagataagaaagcttcagttgcaagaaattcagtttctgggcttgtgcttgttgcaaagtcttgtggcaatgatgtttcaaggttgacattttggctatcgaacacagttgtcctgagagaaatcatcgcacaa

SEQ ID NO: 313354 - DNA, 284 bp, Zea mays
gtcttatttcgttgatacataacatcatttcccacactccaccccatgaatttgagatagacttatatctgagctttggaaagtgctggaatgtcaaattccaaaccaaatagactacgttattaagtaattaccaattcctccaaaatgaatagatccaaacgtcccgttagttcatttgatgtctatgcatacagcagcaaggtctacttgggtttatagttgtgtaggtaacttaattggttatagtgaatcaggtattggtctcaaggtgttttccgttt

SEQ ID NO: 313355 - DNA, 274 bp, Zea mays
ctcctccaccgcacctccaagaatccacctccacgactgagttgacggctcggcggcgccatggcagttcaccggctccaaccttccccctccggcctacagtgctccaccgcccggtcgccagtgctcctccatgggccacggctgacgggtgcacgcaccggcaggagaggtggatttggtggacctagattcgatgtgcagagagcgacttggaggtggctgacatcttcaagcactacaacatgcagttacaactactgttggccataca

SEQ ID NO: 313356 - DNA, 296 bp, Zea mays
cgcatgcagcgtagtaggtcggaataggctcgagtcgagccgagtatggaaggctttcaaacactctcccgcttctatggggcttctgatatagtgtttcattgctctctggtttgttggtggactcactggatttcatatgtacctcattagcaccaaccagaccacgtacgagaatttccgatacagatcagacagcaggcctaacatctatagccaaggatgtctgaataactttctacaagtcttctgcagcaagacaaagccttctaaacacaagttccgggcctacgcgc

SEQ ID NO: 313357 - DNA, 298 bp, Zea mays
gttcattgtgctagaagttcctgatgatgttctaatcgacagatgtgttggaagacggctggatcctgtgactggcaagatttaccatttaaaaaactaccccccggagaatgaggagatttctgcccgacttattacacgttctgatgacacatttgagaaggttaaatcacgtcttgatacgtacaagcaaaattctgaagctattcttcctacatactctgatttgcttaataagattgatggaaactgcccagccgaagttgtttttcaggcgatagatttcctgttacagaag

SEQ ID NO: 313358 - DNA, 288 bp, Zea mays
gtccttcagctccttgaggatgcgcttagacgcccccacatcatgcagtgcaggtcctgctggtgaggacatgtttcattggcaagcaacaattatgggaccacctgacagtccctatgctggtggtgttttcttagtgaacattcatttcccgccagattaccccttcaaacctccaaaggtttctttcaagacaaaggtcttccatcctaatatcaacagcaatggaagtatatgccttgacattctcaaagagcagtggagccctgactttgacaattctaaggt

SEQ ID NO: 313359 - DNA, 281 bp, Zea mays
agctagggacctaaagaacaaggatcttgtgggaaagtcggacccttttgcattgatatacatacgtccattgcatgataaaacaaagaaaagcaaaacaattaacaatgatttgaatcccatctggaatgagcactatgaatttgtggttgaggacatatctacgcagcacttgactgtaaaaatttatgatgatgaaggactccaatcatcagagatcattgggtgtgctcgagtagacttagctgatatacagccaggaaaagtgaaggatttatggt

SEQ ID NO: 313360 - DNA, 282 bp, Zea mays
cactagactctttttccccttcattggacatactaacaccccttaaaccaatggctgttggcaagtcatattcctcaactgttgcactagagggcaagatatttgttcttggtggtggtgacggtgcttgctggtttgatacagttgactgttatgaccgaagccgtgatgattggtccacatgcccatcgttgacttgtgacaaggggagccttgctggggttaatgtcaacgggagaatctatgcatttggtggtggagatggaaccaagtgtttctctg

SEQ ID NO: 313361 - DNA, 294 bp, Zea mays
ggagccagacaatggtggccttgtccccaagtccatggagccagacaatggtggccttgtggacaatggagccagctggtctcaactactggaaactcttccccttcctaatataaaatggatatgccccactgcaccttcaagacccgtgtcagtgtttggcgggttcccctccacagcatggtttgatgttgctgatctttctgaggatgctcctgatgacattgagggaatcgatgcctcagcagcacatgttgcgaatttgttgtcaactgaacctgctgacatcaaact

SEQ ID NO: 313362 - DNA, 179 bp, Zea mays
cttttgcaacagtaatttattgtcatagggaaaatttttagcatttgttcatgctataaagtcagttttcacttaaatttaattatattaaatattagcttatcatgttgaacattggtccagagttctataatgacaaaaagaaataagatagaacaagggggggtaaaatattatta

SEQ ID NO: 313363 - DNA, 290 bp, Zea mays
acggaagacagctttgaccatatctatgctttcaaggctgcaatagagaaggagtctcctggtagtgtagtggagatacaaacagagaaggttggggaaaagatcagattctgcaaaatgtttgttgcattcaaggcttgtattgatggttttttgcaagggtgcaggccctatttaggcattgactcaactgtgctcacaggtaggtggaaaggccaacttgcttctgcagttgcaatagatggccacaattggatgtttcctgtggcacttgggctgtttgaatctga

SEQ ID NO: 313364 - DNA, 214 bp, Zea mays
acacgatccaactcctgagcactttcacctcgtcccctacaagccaatcgaagccgagatacggccatggactccaccggcaccggagcaagggcgtaaggggaagaagggagcggtcgagcagaaggtcggcgggccaaggaagaagtcggtgtcgaagtccgtaaatgccgggctccagttccccatcggccgcatcgggcgctacttaaag

SEQ ID NO: 313365 - DNA, 297 bp, Zea mays
agcaagcagatcgaggtaggactgaaagagtgtttgcagtgggggatcgggtgttcctcaaattacagccctactgtcagtcttctatcactgaacgggtcaaccagaagttgtcattcaggttcttcggtccatacactatcatacggcaaattaatccagttgcttatgaactgcagttaccagccggcagttcagttcatcccatattccatgtctcgcagctgaaagccgtggtcggtccacataccccggtgagcccctctctgcctgactcagttcataatctgcagatac

SEQ ID NO: 313366 - DNA, 176 bp, Zea mays
accggccaaaggctaaggccaaggccaaggccaaggatcaaaccaaggcccaggctgcagccccagcttcagttccagctcaggctcccaaacgtacccaggcccctacaaaggcgtcagagtagatatctgtgccaacatgaggacagaaggactggtgcgaccccccacccccg

SEQ ID NO: 313367 - DNA, 170 bp, Zea mays
agcttgggttggctgagtttcccgaagatagccgattcactaatgttgaatcagctcttgttgcattaggttgcaaggagtgtcttctcccagcagattgtgaaaaatccattgacctaaatccccttcaagacgtcattagtaactgtaatgtgctgttgactgagaaa

SEQ ID NO: 313368 - DNA, 252 bp, Zea mays
gctgaaattgctcacaacgtgtccaccaagaagcgcaaggagatcgtggagcgtgctgcacagctcgacattgtggtcaccaacaagcttgctaggctccgcagccaggaggacgagtagtctggtttcttgtcttaacgacgaactggatgttgccattcctttctgtagggaactactttgcttgtgtcttgttagtactgaaaggaatggcaacattggttatggttctgacaagtcgaccaggcacta

SEQ ID NO: 313369 - DNA, 283 bp, Zea mays
gggtgctacaaccacaattgccgcggattcgtgcagacgacgaacaagattgcaattggggcggctatcaccccggagtcggtgtacaatggcaggcagttcgacatcactctcatgctatggaaggacccaaagcacgggcactggtggctggagctgggcccgggcctcgtagtcgggtactggccgtcgcacctcttcagccacctggctcgccacgccaacatggtgcagttcggcggcgaggtcgtcaacacccggccgtcggggtcgcataccgcga

SEQ ID NO: 313370 - DNA, 202 bp, Zea mays
atgccgtaacgcccggctcctgcaggcgctcggcgtccgctcattcctgaccccgcagtgggcgcgatggcagaggctgtactgagggtcgctcgacggcagctgagccagcgcggcgggtctggatcccccatcctcctgcggcagatgttcgagcctgtgagctgcaccttcacgtacctgctgggtgacagagagtccc

SEQ ID NO: 313371 - DNA, 172 bp, Zea mays
attcgctccgtcgccgccaagatgatgtgcggggcgccctccgcgacgcagccggccaccgccgagacccagcacatcgccgaccaggcgaggtcccagcttgaagagaaagatcacaagaagttccctgtgtttaaggccgtgtcattcaagagccaggtggtcgcgggga

SEQ ID NO: 313372 - DNA, 124 bp, Zea mays
cggctcgagatggatcatcaccggtacctcggtgcggacggcatctatgtgtatatccctactgatttcgagggctggtgcttcttcaccactctcaggaagcttgtctgggttatccttcagc

SEQ ID NO: 313373 - DNA, 301 bp, Zea mays
attttgcatttccttcttccactagacattgtcccacgcataccactgactccacttgcatccttcagagaagaaactcaagctgttctggatcggttatcttctcaggcgccaaacaactctcctgctgggaggtctcttgttatacctgaatattatgaaactttattgagaagcacactatctattgccagttatgaggcctgttctttcatgggatgtaccagctccatcctggggacattgacttctttcattgacctatccccttacagaccttgtgggacttatcatttcttga

SEQ ID NO: 313374 - DNA, 299 bp, Zea mays
cacccatttcagaccttgcgttccatatatatgtatgcttagtaggtgatcatcgataggttgccgaggccagctagctcttgcgttgattaggaaggaaaacgtagctagccagccaggttgatatttagagttgagagggtacagaaatacatacagaggccagtccagaccatagcgctagctggctgagacggccgagaggaacgaagacgatctcgatcctgagctctgggcatgatgaagctcttgttccagtgtccctgctgctcctgcttctgcttcatgaagacggccag

SEQ ID NO: 313375 - DNA, 288 bp, Zea mays
cctcaggattatctcaaaaacccaaccttttgaggcgactgctacaagaacccagatggcagccctatcttaaataattatctgagctggaactggaataatcaactcagagagaagtacagaacaaaatctgacataattctcaaggaaaggatgagttggaatggaaagggcgcctcacctgggcatgaggccgtcaggctggataccgtgctcgaggcagtagagctcccagcaagaattccctacctggatgcctgcctgcccgatatggatgctgatgatctc

SEQ ID NO: 313376 - DNA, 283 bp, Zea mays
caccaacaatctgactgggaatatcatggaggcatttaaagagtgcaagaaccttacggaacttaacctgcaaggaaaccatcttcatggtgagataccacattacttgtctgagctaccactagtaacagtggaattggcccaaaacaacttcacaggaaagctgccagagaaattgtgggaatcatcaactattctggagatcacactcagctacaatcagcttactggccctatacctgaaagcatcggtagactcaccagtttgcagaggctacagatc

SEQ ID NO: 313377 - DNA, 297 bp, Zea mays
accagtacctcgccgccgtcatcaaggcgcgcaacttgagctcgtcggcaacgcaagtgcgacgcgccggcgcacgacgacctgctgtctcggttcatgcgcaagggctcctattcggacgagtcgctgcagcacgtggcgctcaacttcatcctcgccggccgcgacacctcctccgtggcgctctcctggttcttctggctcgtgtccacgcacccggacgtggagcgccagatcgtactcgagctgtgcgccgcgctcgccgcgtcccgcgactcccacgacccggcattgtgg

SEQ ID NO: 313378 - DNA, 298 bp, Zea mays
ttagatgtaaaggagttgatctccatgcttgccgatagtcaaggagactgttcaataatcagtagctacaagctggatacagccgactctgtttgcccttcgagggttcgtgctatgttggcttctagggcttgccgaatgtctactatgataggcgatccactaacaaaagctgagatgaagaagatacttaaaaacatggctggattgaggtccccttggaactgcccacacgggaggccaacaatgcggcacctagctgacctgcgtactatgaaggcgaaagatatcgcgttta

SEQ ID NO: 313379 - DNA, 284 bp, Zea mays
  unsure (1)..(284): unsure at all n locations
atctcctcgcatttcttcccatccgatccccccttcgcaaccaaaaccccaactaaaaccgcatcgatagcaaccaaaaacgngaanagncccgcggcgaagatgccggcggaggaggtgcccgcggccgagaaggcgcccgctcgggaagaagccgaacggnnagaggcgggtccccgctgacaagtccgctgccaaggaaggcggcgagggcaagaggggcaagaagattggcaagaagagcgtggagacctacaagatctacatctgcaaggtgctgaagc

SEQ ID NO: 313380 - DNA, 169 bp, Zea mays
ccgatgctcaaggtatcagtggctccattcacacgagacatctcgtgtgtatgtttgatgtactcgtacgcagtcgacgctggcagatgtacgtagtgcagtcccatgaatggtgtcggcgacgaggaacttgatcagtgctggtggagcggacaaagcgagcagtcgc

SEQ ID NO: 313381 - DNA, 247 bp, Zea mays
gggagcaccaagatgtacctagatctcagaaccagatactggtggagaggaacgtagggagagctagcacaatatgtaggcacggtgtgacacttgccagtgacactaaggccgagcatcagaagcctgcaggtctactgcagccccttctagtgcccaaatggaagtgcgaagaaataggcatggattttgtaactggactgcctcggacccaaaaagggaacgactctatctaggtgataataga

SEQ ID NO: 313382 - DNA, 286 bp, Zea mays
agagagaagacgtctctctcctctcggcgtccccgttcccaatcttcatctgttgcctgcctgcctgcctgccgtgcaaacgaggatttgtcatagcgtctaagcgcatcctcaaggagctgaaggacctgcagaaagacccccccacatcatgcagtgcaggtcctgctggtgaggacatgtttcattggcaagcaacaattatgggaccacctgacagtccctatgctggtggtgttttcttagtgaacattcatttcccgacagattaccccttcaaacctcc

SEQ ID NO: 313383 - DNA, 268 bp, Zea mays
tcttatacggttatggagcttatggataggatttggacaaaagctggtgttctgagaggttaagcctcctctctcgaggttgcgttcttgcatttgcagatgttaggggtggaggggatttatcatggcatatggcaggaaccaaagctaataaaatgcattcaattcaagattttgctgcatgcggcaggcatctcataaagcaaggctttgttcaccaaaatcgcctttgtgctataggctgtagtgctggtggtctgttggtggg

SEQ ID NO: 313384 - DNA, 290 bp, Zea mays
gcttctttgggtccaagcgcgtggccggcgccatcccagcgccctatgtgcacatcgagcgacagttcttcagtgaggtgtgcagcctgggacagcaggagcgggtccagcttcaggactactggcggaagggctggacgttccacgccaaaggtcagttcaccgggacctggaggcccagattgcgatcgtgacggcgaaccaggccctgcagcagcagcttcaccaggaccaagagcagctctacctgaggtcaggtgtggtgtcctctgccaccttcgagcagccga

SEQ ID NO: 313385 - DNA, 138 bp, Zea mays
agaacgagcaaaaagaacgaggaggagaagcggcgcgtcctggacaagcggaccccggctcaagcggccttcgagaaaatgcaggagaagcggcaaatggaaaggatcctaaagacggcatccaaaacccacaagcag

SEQ ID NO: 313386 - DNA, 289 bp, Zea mays
caacagtttcattagatattggagacaaacaaataatgatattattgtcgcaaaaaatcgactgatagtcaaacaacaacgattagtcggaaggagtcggagggctgctaccgctcacaatctctaacttatccaattatctcacgtcggtgctcatgtaccgctgcctcgtcaaagaagatgatcgtgatacagccatcttcaccttcgagtccgtcgaatagggctccgagggcactaatgttgtgattcagattaacctagcttttaattagctttcggccaagat

SEQ ID NO: 313387 - DNA, 289 bp, Zea mays
  unsure (1)..(289): unsure at all n locations
aaccattcgaaagcttctagaattctttttagaactttgagatctagtttgtctgctctaacaaacacccccgcatcgtctgcataaagagaacaacgaaacttagccccattgggtaatacctggcccagtagcccctcatgagctgccctttcaatcattcgttgtaggggatccattgcaaggatgaagagaaaaggcgatagtgggtcaccctgacgcacccctctcatgtgcttgatttctttggtttgctngccattaatgatgattttggatgaagatgatc

SEQ ID NO: 313388 - DNA, 127 bp, Zea mays
acagaagacgccgcagtggcgcgcggaccccgagggcgccaagacgctgtgcaacgcgtgcggggtccgttacaagtccgggctgctgctcccggagtaccgtccggcttgcagctccaccttcgtg

SEQ ID NO: 313389 - DNA, 302 bp, Zea mays
cgcttccagccgccgccgcgtccgcctcgccaagcgcagcagccgccgcagcacatcgctctcttgatctcagccatggcggaggtggagcagcaacaggacacgccgaagctcttcaaccgctggaccttcgatgatgtccaggtgaacgacatctcgctgaacgactacctcgctgtgaacgcgacgaagcacgcgatgtacctgccgcacaccgacgggcgctactccaagaagcggttccgcaaggcgcagtgcccgatcgttgagcgccttacaaactccctcatgatgcacgggcg

SEQ ID NO: 313390 - DNA, 289 bp, Zea mays
gtcccaaccagcaccatgcccatgatattggggtactgtgacatccgcgggctggcccacgccatccgcctgctcctggagtacacagactcaagctatgaggaaaagaagtacacgatgggggacgctcctgattatgacagaagccagtggctgtatgaaaaattcaagctggtgcctggactttcccaatctgccctacttgattgatgaggctcacaagatgaatcagagcatacgacatcttgtggctacattgctcgcaagcacaacctgtgaggggagacag

SEQ ID NO: 313391 - DNA, 275 bp, Zea mays
gccgctccattgttggatgaagcacggtccattgtctcgaggagcggctacacaaggccccgtggcgatcacaaaaaaggagcctatatccatgtactagacttattcagtttcacatcacgatgtggagtgaaactgaataattctagtacatggattactgtttccattgtcgtcatcatcggctaacattgtcataatgtcagtttgggtaatgttagattaagtaattattgtgttcaaaaaaaaaaaaaaaaaaaaaaaaaaaggggggg

SEQ ID NO: 313392 - DNA, 292 bp, Zea mays
agtttacaagacatcaaacaacatgatcttatttgagtttcgtcttgttggtgtgaacactacagggcggttcagaagcaggcttcgtgtgccctgatccagctcttttttaattatacagcaccatgcccagcaggctcagaacatgacttctcaccaactgagcatgtactgagttgattaagtattttaaaaataaaatgtgaatgatagttctatgtggttggttataccatgtcaaaccaaaaaagctgaacagtctgtcatcacagtattggtccaactcttagca

SEQ ID NO: 313393 - DNA, 270 bp, Zea mays
gtaagtttagccttagctacttccttgtaaacgcgtgtgtcggctagaccactcggatacttcaaacagaaccccaactctatcagattcgtgagcgtctgctttttatcttgttcttgcttgttctcgattgcttgcaggttcaaggctgttcttggcatggcaagagcagcaacaataggagccggtgtaactatcgctaaggcgcgcacccttgtggttgttgtagtcggatagcacaacgttgacctccaccccaaatcgtagtta

SEQ ID NO: 313394 - DNA, 296 bp, Zea mays
ccgagtctccagccaaccacatccagtccaccccatccccctcgaccccgacaaccccgagtcccgacccgatggcgcccaaggccgagaagaagccagcggagaagaagccggcggccgaggagaaggcggagaagacgaccgcaggcaagaagcccaagtccgagaagcgcctgcccgcctcgaagtcctccggcaaggagggcggcgagaagaaggggaagaagaaggccaagaagagcgtggagacctacaaaatctacatcttcaaggtcctaaagcaggtgcaccccgac

SEQ ID NO: 313395 - DNA, 304 bp, Zea mays
aaatgccgtcatatggggatccatcttgagtgcctgcagagtccacaaaaacattgacctagcccgacatgccgcggagcatcttctcaagttagcccctgaggaggatgccgtctatgtccagttgtacaacatatacatagactctagacagtgggcagatgcaaaaagagtaaggatgttgatggaagaacggggagttaagaagacggcaggttacagctcgatcactgtggctgggcaggttcacaagttcgtcgccaatgaccaatcgcatccttggacgttagagatcatggcgatg

SEQ ID NO: 313396 - DNA, 301 bp, Zea mays
cctaaattagtctttgttcttcctgttgtgctcctcgccttggcgctgcaggcgatcctccggccaccgccgccaaagctctgtggctccccaggtggccctcctctgacatctcccaggatcaagctcagggacggaaggtaccttgcgtacaaagaggatggagtacagagagacaaggccaggtacaagatcatcacagtgcacgcatttgatagcaccaaggacttcccctcgcctgtttctaaggagctcgtggaaggactgggaatttacctccttgcttatgacagagctggat

SEQ ID NO: 313397 - DNA, 304 bp, Zea mays
ctccaacaaagagcttggatgacatgcatctgattgcttggtagacagacagatttgaacttgtggctttcttatcaaactgatgatcacagtctcagggacgagtttgccaaatatgggcaagtacttgaagctaggattatcattgaccgtgaatctgggaggtctagaggttttggctttgtaacttacacgtcttctgaggaggcttcagctgccattactgccttggatggaaagactctcgatggacggagcatacgtgttaatcatgctaacgagaagacaggtggctttcgtggcg

SEQ ID NO: 313398 - DNA, 294 bp, Zea mays
cttgcatttatgtcactttaccttttccacttgtataaatcactggcttgagtattaggtggtggtatagtttttgtttcagtcgtcaaatgtgattttgagaactgtggattgacacacgtatgtatccacatttctcatctttcctttgaccctacacccatagtcccatattcatcccttctgcataagaactttctatagccatttttttattttgatttttttgttttaattttttgtattgtggaaatgacggaccatattcccgtagcgattttttagcatttctaa

SEQ ID NO: 313399 - DNA, 295 bp, Zea mays
gagaaagacccgttcgaggcggcggcgatgtcggggcgcggcaagggcggcaagggtctgggcaagggtggagccaagcgccaccggaaggtgctccgcgacaacatccagggcatcaccaagccggcgatccggaggctggctcggaggggcggcgtgaagcgcatctcggggctcatctacgaggagacccgcggcgtgctcaagatcttcctcgagaacgtcatccgcgacgccgtcacctacaccgagcacgcgcgccgcaagaccgtcaccgccatggacgtcgtctacg

SEQ ID NO: 313400 - DNA, 285 bp, Zea mays
gcgctgcacagggctgccgcccgaggacacctgcttgccgtccagttgctggtcacccagggggccgaggtggatacgcgggacaccctgggcctcacacccctgcatcacgcctctcgggaaggccacgtggaggttgccggctgcctgctggacaggggtgcccaggtggatgctaccggctggctccgctagacccccctacacctggctgcagagcgagggcctgcggcgtaccgtggggcttctgctgagccgaggggccagccccaccctgcggacgca

SEQ ID NO: 313401 - DNA, 286 bp, Zea mays
aggttttgctgctctccgaccccgagctccgaaggccgcagcatcaggcgcggcccccctcgcgtgtgaccgagatggcgctgccgaatcaggggaccgttgattaccccagcttcaagctcgtcatcgccggcgatggtggacctggtaaaactacatttgtgaagaggcatctcactggagagtttgagaagaaatatgaaccaaccattggtgtggaagttcatccgttggatttcaccactaactgtggtaagatcaggttctactgctgggataccgcagg

SEQ ID NO: 313402 - DNA, 271 bp, Zea mays
atggagctcactgggagggacgccaatttctcggtcccaactgaggcaagtgattttgagtcctggaggaatctgccgagcacagactttgagctcgagacgccagcaaccgcggctcctgcaaagagcagttcacatggacaccacaagaagttgctgaacggttctggccttaacctctcgacacaaccatccaatcacagttctggggatggcatggagatcacagccacctgtaacaagcgcaggaaggattcctcaccgaccgcaa

SEQ ID NO: 313403 - DNA, 122 bp, Zea mays
cgaattgtatctcatgtagatctgtctgaggttgaaacttaaatggagcagtagtatctgtgctattggtacccctgttactgaattgatgtgatgctgagtttaattttgttttcatatct

SEQ ID NO: 313404 - DNA, 315 bp, Zea mays
ctattatcttcctcagaacggttcaataaagctttacaaggaaatcgtatgccctcttgatggttttgagttgcttttgttctcgatggtgggacctgatgcaaaatctttcccactgtgccctttttgctataattgtcctccatttgaaggcatcgacaaactctttggtgctctcaagctcgatgacaccggcaaggttgggaaaggggccggcataacatgcttcctttgtcctcacccgacatgcaagcaatctatgatcactcagggagtttgtgcttgtcctgagtgtagtggtaccctgattcttga

SEQ ID NO: 313405 - DNA, 173 bp, Zea mays
attcttttgaattaaaaagaaatctctcttctaggctggtgcttttcgactataatttggagattgttccaatgtccgtgcaatcatctgaacatgttactacttattgtaccttgtcgtgcaaagttttgctaagatctcaaaaaaaaaaaaaaaaagggcggccgccgact

SEQ ID NO: 313406 - DNA, 120 bp, Zea mays
gcacggatcaatgtccagaatcctgaagcctaaaggaggttagaagctacatgtatgacggtaacccagcactcagggatggccttctctgtcttgatcccccggcatgtgactaaacac

SEQ ID NO: 313407 - DNA, 250 bp, Zea mays
tctcactgtacaagctgccggaaggcaagggcaggatgacacaactcctttcggaggcgagagattctcaggcagccaagatggaggaaaccgccgacccgcaatgtctggaccttcaggtcggagatgcacgttttgagttcgaggcgaagacgatccagagaatggagctccttgttctaaccaccctcaactggaggatgcaggccgtgacacctttctcctatgtggattgcttcctaaacaggct

SEQ ID NO: 313408 - DNA, 254 bp, Zea mays
gatgcacgcaggcaagtttgatttggaggatcaatagtagctagctagagctactagagacatacatggcggatcctctggtgcgagcgcgacccaaaaggaagaaggtcttagcggactacttggtgcgactccgatggattcctggcctcttcgaggcccttccaatatctgcgctgatctacctgagcgtcttcctggtgaacacgtggtccgccatgaaatccgagaagcgtcgacagaaggaacaccag

SEQ ID NO: 313409 - DNA, 275 bp, Zea mays
cgcttctcttccccctcttatcaagtcctcctcgggttagggttccttagggttttgtggaggggcgatggcggcggctgatgtggagtaccgttgcttcgtcggcggacttgcctgggccaccagcaacgagtcgctggagaatgccttacgcctgcctacggcgagatcctcgactccagcgtcatcaccgactgggagacggggaggtcacgcggcttcggcttcattacgctgctctccgagaactccatgcgcgacgctatcgagaccat

SEQ ID NO: 313410 - DNA, 280 bp, Zea mays
aatatgggttccttcagtagtaaaccagccaaacgacagtgagccttctgggtttagaacatccagacgaggttattcttcaatgtcaccagaagaaagaaatggtagcttaaggcaaggtgatgttgtggatgatcttgagctcagtattatacaaactgacatgagtaactatggaacttataatgcagaaatgcttctggaagatttgaagacagcaaaactgtgccctggttgtggaccctgaagattttcttgaaggattattacattaggtgat

SEQ ID NO: 313411 - DNA, 245 bp, Zea mays
gtctggatggttccaagattatcaagacggtatctaaaacacttccccacaatctcagctgagtagacaacatcctccaagatgaagttgtggggaagcgtgtcagatacgctttggatggttccaagattatcaagattttattggacccaaaggagaggaacaacactgaatacaagctggagacactcagctgggtctaccgcaggctgtgtgggaaagatatggtctttgagtaccctatg

SEQ ID NO: 313412 - DNA, 273 bp, Zea mays
ggctcgagtcggctcgaggtcgtcgttgagatgtttgagaaaatgtttacgaatacagaaattgtgttgttctaagacttttctgtagcgaccttgagaaatttcccttaagggcttgttcggttatttttactccatatggattggaggggattgatacggattggagaggattttgacttactgaggattgaaccccgctcaatccccctcaatccatatggattggggtagaaccaaacaagccctaagtgtcaacttcgtccatcgaga

SEQ ID NO: 313413 - DNA, 286 bp, Zea mays
agacattctaccagactcctcgcaagctcacggggaagtacgccagcgagggctacttcttccagaacatccgagagagccggttccgcaccgatgaccccgaccaggcgcacctctttttcgtccccatatcgccccacaagatgcgcggcaagggtacttcatatgagaatatgacggtgatagttaaggactacgtagaaggtttgataaacaagtatccttactggaacaggacactaggagcagatcacttcttcgtcacctgccatgatgtgggtgtgag

SEQ ID NO: 313414 - DNA, 300 bp, Zea mays
cttgctgcttgtttaggctgaagaacctgttgaggtttaccatgataacgaattcaaaaacaggagatggcacttccaatcctacaacttcacagtgtccatcgtctgggctcctttcctcatcaaatctggtatttttgagaatgaggatggcgtgtctacctctgaaatacagctccaccttgatatactcgatgctaactggacaagtcagtatgagagctttgactatattattatttctggcggacaatggtttctgaggacagcggtctactgggagaacggtgcagtggttgg

SEQ ID NO: 313415 - DNA, 280 bp, Zea mays
acaaagcacatgcccacacctgaacagtggaccaatgtgttcaaccctgcattttcatattatgcgtactactgctatgctaacttattcaccctaaacaagctgcgtgagtcaaagggaatgaccactatcaaattccgtccacatgctggagaggctggagatgttgatcacttggcagcgacatttcttctctgtcacaacatatcacatggaattaatctaaggaagtctcctgtgcttcagtacttgtactatcttggtcagattggtctggcga

SEQ ID NO: 313416 - DNA, 326 bp, Zea mays
atcgacgagtcggctcggtaggcaagaccataaccttggaagccgagagctctgacaccattgacaatgtgaaggccaagatccaggacaaggagggcattcccccagaccagcagcgtctgatctttgcgggcaagcagctggaggatggccgcactctcgcggactacaacatccagaaggagagcacccttcaccttgttctccgcctcagaggtggtatgcagatctttgtaaagaccctgactggaaaaaccataaccctggaggttgagagctcggacaccatcgacaatgtgaaggcgaagatccaggacaaggagggc

SEQ ID NO: 313417 - DNA, 164 bp, Zea mays
ctcgattccgctgctctctccctcttcctctcccccgcggcggaccataaaccctaggcctcgccgtcgtcggaggcgccgccgcgatgtcgcactttggaaggacgggtccgccggacatccgcgacaccttctcgctgctcgtcctcaacatcagcttccga

SEQ ID NO: 313418 - DNA, 266 bp, Zea mays
attcaatctttcatagacagggtggccgaccgtcttccgagttggaaagctgatcttatgactagagccggtaggaagattatggttcagcatgtgctctccagtatgatcatatatttggctatggccattgattttcctcaatgggctttggaggcaattgataaaattagaaagggttttctttggaaaggccgcaaggaagtcaggggaggacattgtctggttgcttggggaagggtgtgcagacccctccatttgggagg

SEQ ID NO: 313419 - DNA, 288 bp, Zea mays
cgacctcacccgtcacgcggcgggcgacttctccttcgccgtcgtgcaggccaacgacgtgttggaggaccagagtcaggtggagacggccgccgctgccaccttcgtcggcgtctacgacggccacgggggcgccgaggcgtcccgcttcatctctaaccacctttctgcgcacatcgtccgtcttgcacaggaacatggaacaatgtctgaggatgttgttcgaaaggtcctttctgctacagaggaaggcttcctgtcgcttgtgcgcaggacacatttgataaa

SEQ ID NO: 313420 - DNA, 273 bp, Zea mays
  unsure (1)..(273): unsure at all n locations
tgacagaaggtatgcttttttatctgtctagaactacacccacatagtatggattatatttatagagttaggaataattctcttgcagcattggctgatgatgggaagtttctacttgctgcacgcaagtgtcgtaagcccacctgcacagactacctaatttctcttgataaggttgatatgtcaaagggaagcagcacctatattggcaagctaaggtcagcntttgagatatgatgtcggaatactttaaagctactatttttgctagct

SEQ ID NO: 313421 - DNA, 268 bp, Zea mays
gcaagttcaatctcacctccaaccatgggtaaagagaagtcccacatcaacattgtggttattggccacgttgactctggcaagtcgaccaccacaggacacctgatctacaagcttggaggcattgacaagcgtgtgatcgagaggtttgagaaggaggctgctgaaatgaacaagcggtccttcaagtacgcatgggtgctcgacaagctcaaggctgagcgtgagataggtatcaccattgatatcgctctgtggaagtttgaga

SEQ ID NO: 313422 - DNA, 301 bp, Zea mays
gtacggtcagggttcagggtcttctacgggttcctctcgctgttcatcagtgtggccctgccatttctctccagccttgccgggctgctgggcgggctcaccctgcctgtgaccttcgcctacccgtgctttatgtggatctgcgtcaagaagcccgagaggttcagcttcagctggtacctcaactggggccttggtctgctcggcacagcgttcagtctggcgttctcgctgggtggcgtctggagcatagttaacaatgggatgaagctcaagttcttcaagcctaactaggtacata

SEQ ID NO: 313423 - DNA, 227 bp, Zea mays
gtacactgtcaactagtggcttgctgttggactgtacttctctgagtgaggtgctgtgaagacgcctggaaggacacaagggcagaatagtgaaggccgacgctgacttccagaagcaatgagtgggagacatcttcctggcagacactgagcattacagttgtgaagagtaaatagacactagtagcttctagagctcttccgaattctcatcacatacaatatct

SEQ ID NO: 313424 - DNA, 298 bp, Zea mays
catcggcattacctacaaaagagtcgactctaggccaggctagagcacagacatctaaggcattgctcgcccagggccagtcctcagaacaagctgctaagggatctacactggatctggtcacctcaaaggacactgtcggaagtgccacaactgaccagtgtgcttcagtagcagctacagaacactcagctcaccagaccacgtcaggggaggaggcttcaggagacactgagtcattcggaacttctccatcctcaaatgctcagctagcagagcacaggagcttcacctctgc

SEQ ID NO: 313425 - DNA, 276 bp, Zea mays
tgaatctctgaccttgcatgagatggctagtggcggtgatcctggtgcagttgttgaaaagatgtcaatgctcctcaaaaggattaaggattttgtgcagacagaagaccctgagatgggtgcccaagcaagtacagcaaccatttctattaacgacaattcagcatgtcctgttattcccgatgatttccgttgcccaatatcactggatttaatgaaagatccagttattgttgccactgggcagacttatgagcgggggtacatagagatgtg

SEQ ID NO: 313426 - DNA, 278 bp, Zea mays
gtcataactgtaataaaagggaaagtggaagaaatagaacttccagtcccaaaagtagatgtcatcatctcagagtggatgggctatttcctcctgttcgagaatatgttgaacactgtcctatatgcacgtgataaatggcttgtaagcgatcctttataaaatcatcagtacaattttcagattctgttcttcactattgatgttacctgtttgattcattgtgtttattctctttttagcatttttttacaaaatacaatttgattgtctatgaa

SEQ ID NO: 313427 - DNA, 282 bp, Zea mays
atcagagagttcatacgggagagagaccttacgtatgtaaagaatgtggcaaatcttttactaagtgttcaactcttcaaacacatcaaaaaattcatactggagcgaaaccttacaaatgtagggaatgcaacaaatcctttacccaggactcacatcttagaacacatcagagagttcatactggagagagaccttacatatgtaaggaatgtggcaaatcttttactaggtgttcatatcttagagcacatcagaaaaatcatactggaagagaacgta

SEQ ID NO: 313428 - DNA, 213 bp, Zea mays
caccgctgctataaaaccctccgcctccaccggcggctcgccaaactccgtttcgaattctagggttttgctgctctccgaccccgagctccgaaggccgcagcatcaggcgcggcccccctcgcgtgtgaccgagatggcgctgccgaatcaggggaccgttgattaccccagcttcaagctcgtcatcgtcggagatggtggaactggaaa

SEQ ID NO: 313429 - DNA, 240 bp, Zea mays
ctgatgctgttatctgtaatcgatgacgaagatgagagatatcgtggttgtgaaccactgcgtttgtgcatgcccaagctgttctggtaccttcgactgcccccctgtatctagtctgattactagtgctagtgctacaagtgtatcagatccaattgaaggaaaggatgctactgctaatttctggcgccatatgcggtgcccaagatgcctagataatactgttgagtccaaattttc

SEQ ID NO: 313430 - DNA, 166 bp, Zea mays
gtgcttcccatcacaagcgatgtccccgaaggctgtgtgatcatcagagagcacatccccatcacgaacctgttcacgtgcgtatggttcaatgaggttgatcgcttcaactccagggaccagatcagtttcagcacggtccgggacaaaatcagggctagagttg

SEQ ID NO: 313431 - DNA, 259 bp, Zea mays
ctctgcagctgttccgtaggattccggctctctgtggatggcaggtcatgtgaagacatcaatgagtgcagcaccagcccctgtagccaggagtgtgccaacgtctacggctcctaccagtgttactgccggcgaggctaccagctcagcgatgtggatggagtcacctgtgcagacatcgatcgatcgcgcctgcccaacggaggccacatctgctctcaccgtgcatcaacatccctggaagcttacagtgcagctg

SEQ ID NO: 313432 - DNA, 99 bp, Zea mays
gcgccgagcgatgggcatctctagggacaaatggcacaagcgcagcaagatcgagggtaagagactaccctaccacaagaagcggaagtatgagctggg

SEQ ID NO: 313433 - DNA, 285 bp, Zea mays
cgcttatcatccgcgcctctacatttcttctctctctgctcctccgcctccgcctccgcctgatccatccaagacagggatcgccatgtcggactcggaggagcaccacttcgaatcgaaggccgacgctggggcgtccaagacctacccgcagcaggctggcaccgtccgtaagaacggcttcatcgtcatcaagaaccgtccctgcaggttgtggaggtttctacctccaagactggtaagcatggccacgccaaatgccactttgtcgccatagacatattc

SEQ ID NO: 313434 - DNA, 280 bp, Zea mays
cggaggactctgtttttggtttggttgcagagtgaactggaacgtagcggctctgtttttgtttggttgcagagggagacgcgtgagctgctgcgcacggatgggactatgggagggcgagctatgggagcgggctgggaacggagcggctccgtcccattgattttttggagtgggatggttccagatgtgaggagaatattctctaattgaagtcacttcgttctagttactttgtaaccaaacaataacaaaactgggacagaacggctccgtttta

SEQ ID NO: 313435 - DNA, 283 bp, Zea mays
gtccaacctaacttttgtgcatcgccatttgagagctgtttgaacaatcagctatggacctttttggagtctgacaaaaaccggataagcatgagccgacagccccaatatgttgtgcagggaaggtttcagaggatcaatcaacatccagatgcaagtgttcattctttttctattggagtgacagaagttattaatagcaatttacggatagagctgagtgctgatgacatagaatacatgtatcagaggtatatttgttggccacggccctactaatttg

SEQ ID NO: 313436 - DNA, 212 bp, Zea mays
  unsure (1)..(212): unsure at all n locations
gcaagggcaagttcgggcacgagttcctcgagttcgagttccgccccgacggcaagctccgctacgccaacaactccaactacaagaacgacaccatgatccgcaaggagngtctcgtctcgacctccgtcctccgcgaggccaggaggacggagggcgagacgaagacctccgtcctccgcgaggccaggaggatcatccaggagtccgac

SEQ ID NO: 313437 - DNA, 283 bp, Zea mays
ggccatcttcaatggatgcacaacgaaggcaattgagcatgctgctgacaaccctgctgttgtggaagcaattggagtgcctatagtcagaggaccgtggtatgatgcttctcttgaggtgggccatcgacggcggtctgtgtcatgcacattccctgtatctgggccacatgggtcaggatttctccagattaaggcaacccgagatggagaggatggtctgctttcgtttctgcggcatcacgactggaagatcctattgctggaggctcatcttgaagca

SEQ ID NO: 313438 - DNA, 281 bp, Zea mays
ggaacaacgtacctcgagcagttgtatcacgttgccagaaatatgtgatctctaagatcaaagatattgacactgtgtgccggctgaggaaaatctgtgtaaaggaaaatcttgatgttgagctagcagctttggatttgatagctctgaattcagatggctcgctacgagatgcagaaactatgttagatcaattgagcttgttagggaaaaagataactccttcacttgtcaatgatttggttggtgttgtctcggaagagaaattgcttgatcttctg

SEQ ID NO: 313439 - DNA, 277 bp, Zea mays
atacgaagggattggaggggattgagagcctccaatccctccgtgacccccttgtcacgtaatgaaccctcatagcctctaacatccaccacctcgtggtccatactagggctttttcggttattcctgtccatgtggattagatgagattgtgaaaaaatatgaaggattttaacttgtttgagatttaaacccacccaatcccattcaatccacatggattgagagaaaagcgaacaaaccctaaatagaagaaaaacaaattactattggatta

SEQ ID NO: 313440 - DNA, 287 bp, Zea mays
attcctcccatctcacaagaactcctcagacccgagaagcgcaatgcggacatggacgacaccggcactggagctggagggaaggcgaagaagggagcggccggtcgcaaggtcggcgggccgaggaagaagtcggtgacgaggtccgtgaaggccgagctaccgttccccgtcggccgcatcgggcgctacctcaagaagggccgctacgcgcaggcgtacggcagcggtgcacacgtctaactcgcggacgtcctggagatactcgccgctgaagtcctggagct

SEQ ID NO: 313441 - DNA, 291 bp, Zea mays
tgtaaacaaacgattcctcgtatctctcgtcttcctctccaagcattcccttcttccttcttccccactcagggcttattcggttattcccaatacacatagattggattggatgagattagaaaaaattaagaagaagtttgacttgtttgggattcaaacccatctaatccctctcaatccacctctaaccgaacagggcctcagaggggtccgatcctcgtccctgttccactctggatcctgcaacctcctacccctacgacactcgtcttcgtcgccagcgcgcca

SEQ ID NO: 313442 - DNA, 273 bp, Zea mays
cggcagatagcgcgatcacgcggtcacccgaaagggaatcgggttaagatttcccgagccgggacgtggcggcagacggagacgtttcattagccacttagccgttcccacgacacaatcagcaccaccggtgtcctcgctgccaaggcgcccgcccgctcgtgtgacgagtggcgttcgtccaccgcccattccgcgctcagctctgagggcctcccgcccgccgcggcatcatctccggctcctctcgtcgccacgggtgtcacgaaatga

SEQ ID NO: 313443 - DNA, 243 bp, Zea mays
ggcaatgttcctcacactaggcttgcggagtacaaggggcatcaaaattgggttaaggtctcaagtgactatctcttgttccctgggggtgggactcagttcaagaatggtgccctccactatattgatactattcagcaggtatattataatcatcccagcatctcatattagtcactccttagacttgtacttgtctgcctcacacttttgagcatcagtgattgatttattgttatacta

SEQ ID NO: 313444 - DNA, 283 bp, Zea mays
gagcacggcacggtccggtgggtgctgggctccgtctccatgctggccaacgtcgtcggcttcgcgctgtggctgctcctgcagcggaagttcacccgcaagtacccggccgtgtactcggccacggcgttcatgtcgctattcagcttcgtccaggccggggcgctggccctgtcgatccagaggaccagccttgccgtgtgggccctcagggggaccgtggagatcgccacggtggtgtactgtggtgtagtggcgtctggcattgggtacctcctgctca

SEQ ID NO: 313445 - DNA, 285 bp, Zea mays
gtgtacgccacgggtttgcttgacgatcagttccagcagctccagctgctccaggaccccagcgcccctgacttcgtctccgaggtcgtcacgctcttctgtcaggacggcgagcggatcatcgaagagctggccaaactgctggagaagcccaacgtggattttgacagggttgacgcctttgtgcatcagctcaagggaagcagtgcaaagtgattaccttgcccatactttttcttgaattgaatgtgtaatgctagtaggaatgtacatgttttgtttcca

SEQ ID NO: 313446 - DNA, 310 bp, Zea mays
  unsure (1)..(310): unsure at all n locations
tagaactagtccgcgatggcccctagatcggatcacgccgagcgagcagcgccgccgcntcaccggtaggcacacgcaaggcaccactatacagactaccatgngagtaccacctcatatccacggtacactccgcgatgctgacacattctacacttccattgcggccagccgcgcaccccgcctgaggctgccgtcgaacctggcgcttccctcacccatgaccgtcttctccctcatcctactcacctacttcgcggtcgtctccggcctcgtctacgacgtcatcgttgagccccccggcatcggc

SEQ ID NO: 313447 - DNA, 260 bp, Zea mays
gttggttggcttgcgatctcctttgcaaaagactcttcatttctgtatatgggacgcttgcttgaaggattcggtgtcggtatcatttcctatgtggtaccggtatacatagcagagatatctccacaaaacatgagaggggctcttggctctgtgaaccaggtttgcctatacttgcaagcatctcatctatttgtgagttatctgtaacccttggtatcatgtttgcctatttgctcggcttgtttgttccttggagg

SEQ ID NO: 313448 - DNA, 266 bp, Zea mays
cgccaaaactgcgaggtcgatgagttttacttccatttgcatccgaacagaattcacgtaatagaagctctatcccgccattgcaccatgaatggcactatgtgcgagcagggtgcaatggcgggatacagctttacagtcggaatggttaatggcaggcatgcatatataccatttcatagggtaacatctacaaggaacaaggtgaggataactgacacgatgtcggcgatgctgctgtgttcaccaaaccaaccgagtttcct

SEQ ID NO: 313449 - DNA, 304 bp, Zea mays
gtgaagagcaagggggcggagaagcccgccaagggaggaaagggaaggccggcaaggaccccaacaagcctaagagggctcccagcgctttcttcgtgttcatggaggaatttcgcaaggagttcaaggagaagaaccctaagaacaagtctgtcgctgcggtggggaaagctgctggcgacaggtggaaatccctgagcgagtcggacaaggctccctatgtagccaaggctaacaagctcaagctcgagtacaacaaggccatcgctgcctacaacaagggcgagagcactgcagctaagaa

SEQ ID NO: 313450 - DNA, 306 bp, Zea mays
gccaaaaatttggactgagaattggccaggatggttccagacttttggtgaaagtaatccccacagaccacctgaagatgttgcattcgctgttgcacgttttttcgagaaaggtggcagtgttcaaaattactatgtgtatcatggtggcacaaattttggtcgcactactggggggccattcattacaactagctacgactatgatgcaccaattgatgaatatggacttcggagatttccgaagtgggcacatctgagggaacttcacaaatctataagattgtgtgagcacaccctgcttta

SEQ ID NO: 313451 - DNA, 265 bp, Zea mays
caaagatgcagcagatgcttcctctaagtgtaatctttcctccggcctactcaatttatgccatggttctttggagatgatatatttttaaccgcgaagatccacagctttatcagtctctgtcaaacgcaataagcgatattaccagacatcaaccttttcgagagatttgcttccgcaatacacatcggctgtataatcatctggcttcagatgttggagattcagagtttgcagcaatgcttgaaactcatagtactgacag

SEQ ID NO: 313452 - DNA, 269 bp, Zea mays
gcaggatgatggatcttggggtgtcagccaatctgactcatcggtcagcaaggatgttctcctatccacgttggcatgtgttcttgcgttgaagagatggaatgttggcagagagaacatttggagaggactgcatttcatcgggaggaatttctctgttgctatggaccagcagttcacttctcctataggtttcaacatcacctttcctggtttgcttaacctcggcattgatatggggttagaattacctgtagacaaactgatgt

SEQ ID NO: 313453 - DNA, 285 bp, Zea mays
tcgaatatgcctatagcatcagacataattatggaaaagaaggaaaacggacagattacactccatattcatgccaaaatatcatatctgcaacacctggtgttggagatcaccatggatgcccgtttcgacattttgggtacaatttcacccttagttttctatagatgggtactatgcgcttattatttagataggtgctctgaactttctgttagcaatatcagtttgcatttctgatccttacttcactagattactcctgaactttgagggggaagtaag

SEQ ID NO: 313454 - DNA, 280 bp, Zea mays
atcaaatcgaagattggattttggaagaagttcaacctcatattccttttctttctccttcgcaagcttattttgcccttctattccttcacccttttctgtatcattcttcccatgacaatgttcattcctgaagccgagctccctgcatgggtcgtgtgctacattccggcaaccatgtccttgctgaacatcctcccagcccccaaatcgttcccgttcattgtcccctatctcctgtttgagaataccatgtcagtaaccaaattcaacgccatgg

SEQ ID NO: 313455 - DNA, 159 bp, Zea mays
gaaaatgaatcttctgaggttcatattggtcgaatgctgcaaatccttagggaattttcagacgacccagtcctcagttcatacgtcattgatgatatttgggatgacatgaaggcgatgagagattgcaggtgtatgatttctgtgcttcttgatgaa

SEQ ID NO: 313456 - DNA, 203 bp, Zea mays
ctcgtgtggccgtcgtctcccgttcggaacgccaagccccccctccggcgaaatggcccccaagcgaggtggcagggcgccggtgccggccaagaagaagacggataaagtgacgaaccctctattcgagaagaggccgaagcagttcggcatcggcggcgcgttgccgcccaagaaggacctgcaccggttcgtcaagtggc

SEQ ID NO: 313457 - DNA, 270 bp, Zea mays
  unsure (1)..(270): unsure at all n locations
ctgggatggtgggcggcatgctgctccacctgcgctcactccgccgcttcgagcagagcggcggctggatccgcgctttgctggaggaggccgtgaacgagcgcatgcacctcatgaccttcatggaggtggcgaacganggtggtacgagcgcgcgctcgttatcaccgtccagggcgtcttcttcaacgcatacttcctcggctacctcttgtccccgaagttcgcgcaccgcgtcgtcggctacctggaggaggaggccatccactc

SEQ ID NO: 313458 - DNA, 266 bp, Zea mays
gccgccagcgtcgacgaggaggaggagtgctttgagtccatcgacaagctgatttctcaggggataaatgcaggagacgtgaggaagctgcaggatgcagggatttacacttgcaatggcctaatgatgcataccaagaagaaccttacaggaatcaaaggtttgtctgaagcaaaagttgataagatctgcgaggcagcagaaaaacttctgaaccagggcttcatgacaggaaatgatctccttctcaagcggaagtctgttgt

SEQ ID NO: 313459 - DNA, 263 bp, Zea mays
gggatatgaactcattgaatgcgataaaatatttgtccctgtgcataaagatgtacattggtgtttagcaattataaacgtgaaggaaaatttctttcagtatcttgattcccttggtggcatggatcataatgtaccaaaagtactggctcgatatatttcagaggaagtgaaggacaaaagtaacagagtaatcaacaccagtttgtggcatgaagagctagttgatattcctttacagcggaatgggtgggactgcggta

SEQ ID NO: 313460 - DNA, 264 bp, Zea mays
gagcacccgaggagactccgtgcgaccgaagccagagccagcggaaccgaacgggggtgtgctggagggggacgccgcgctgctggccgagatgcgtgggaggattgacgaggagatccgcaagcttgatgagaaaattgctgatgcggaggagaacttgggtgagagcgaagtccgtgaagcacatcttgccaaatctttgtactttataagggtcggtgagaaggaaaaggccctggaacagcttaaagtcactgaaggaaa

SEQ ID NO: 313461 - DNA, 259 bp, Zea mays
gagttctagatcgcgagcagccgctcggatctagaacctagtggtcactgggcaagagactgtaaagcaggtgactggaaaaacaaatgctaacgttgtggagaaaggggccatatagaaagaaattgccagaacagtcctaggagtctcaggcgagagagaagttactcacggtccccatctccccgccgtggacggggccgcagtcgaagctatggcaggagcaggagccggagtcggagctatagtcgatcaagat

SEQ ID NO: 313462 - DNA, 203 bp, Zea mays
catatgtctactctgtttgtgcacttctttatggggcattcactggatttcatcctccaatatattttgagacgagcgcaatgataattacatttgtgctatttgggaagtatcttgaagtgctcgcgaaacgaaagacatcagatgctatcaagaagcttgtagagcttgctcctgctacagctattctacttctgaaggac

SEQ ID NO: 313463 - DNA, 318 bp, Zea mays
  unsure (1)..(318): unsure at all n locations
aaatcttccgttctcaaaccaacctaggcaattcgccgcagcctctcaccctcgcgagtcccgacctcccgcagccgccgcacagatggcacccaaggcggagaagaagccggcggccaagaagcccgcggaggaggagcccgcgacagagaaggtggagaaggctccggcggggaagaagcccaaggccgagaagcgcctcccggcgggcaagtccaaggacggcggcgagggcaagaaggggaaaaagaaggcgaagaagtccgtggacacctacaagatctacatcttcaangtgctgaagcaggtgcaccccga

SEQ ID NO: 313464 - DNA, 312 bp, Zea mays
  unsure (1)..(312): unsure at all n locations
tagggttttgctgctctccgaccccgagctccgatagccgcagcatcaggcgcggcccccctcgcgtgtgaccgagatggcgctgccgaatcaggggaccgttgattaccccagcttcaagctcgtcatcgtcggcgatggtggaactggtaaaactacatttgtgaagaggcatctcactggagagtttgagaagaaatatgaaccaaccattggtgtggaagttcatccgttggatttcaccactaactgtggtaagatcaggttctactgctgggataccgcanggcaagagaagtttggtggcctcag

SEQ ID NO: 313465 - DNA, 252 bp, Zea mays
ggaagacgcagctaacaactttgcccgtggccactacactggtaattcaccatgtgtatgtgaatatgtaataggagtgggtattatgcttctgtgactgtggatatgttcaattctaattatgtggaatgcagttgggaaggagattgtcgatctatgcctggaccgtgtgcgcaagcttgcagacaactgcactgggctgcagggattcttggtgttcaatgctgttggtggtgggactggcctctggac

SEQ ID NO: 313466 - DNA, 264 bp, Zea mays
gacacttcgagggctttatcctgttgatgcagtgagtactgtggggagaatatgtgcagaagctgagactgtgtataatcagccgcttcaattcaagaaagtaatgtggcatgtaggtgacccaatgcccccacgaggaatctgtggcatcagcagcggttggttctgcaatcaaagtaaaagctgctgccattgttgtgttcacattctcagggagagctgcgaggttagttgccaagtataggccaacaatgccaattttag

SEQ ID NO: 313467 - DNA, 263 bp, Zea mays
cccacgcgtccgcccacgcgtccgcggacgcgtggccgcgccgccgtcaccgactcaccgtcgtctctcgctcactcgctcgcgctctccatccgtgagaactgccacgcgaacatctcgtgtcgatccagtcgactagcgccccgcgttcgaactaacctgcttcgtgccgtctcagagatcggagcgctcggttcggataggggcgactaggaggtgaaggcgggcgcgtcaccatggcggacgaggagcacccggagagg

SEQ ID NO: 313468 - DNA, 256 bp, Zea mays
cacccttagcgagctcatctatccattggctagttgggattgtgtatatgctccaaataagcatatttgtcagccttcttcgaggggttctgcgcaatggagttctttattttctgcgggaccctgctgatccaaattacaatccatttaaggatttgattgacgaccctgtgcataagcatgcccgacgagttcttttgtcagttgcagtgtatggaagtttgattgtgatgttggtcttcttacctgtaaaact

SEQ ID NO: 313469 - DNA, 248 bp, Zea mays
ctctcgtcgccgtcctctcccgttcgcaacgccacgctccccaccgccgaaatggccccgaagcgaggtggcagggcaccggtgccggccaagaagaagacggataaagtgacgaaccctctgttcgagaaaaggccgaagcagttcggcatcggcggcgcgttgcctcccaagaaggacctgcaccgattcgtcaagtggcccaaggtcgtgcgcatccagcgccagcgtcgcatcctcaagcagcg

SEQ ID NO: 313470 - DNA, 169 bp, Zea mays
tccgcttcaagtctcgctacgtagcattgcaatataaaaagcagtcgcaatggctagcagcaccatggctctctcctccacggccttcgccggcaaggccgtgaacgtgccgtcgtcgttcgtcttcggcgaggttcgcgtgacgatgcgcaagacgtctgggaatggt

SEQ ID NO: 313471 - DNA, 280 bp, Zea mays
atggagccgtcgaggatgacgctctaccgcttcggcaacacctccagcagctcgctctggtacgagctcgcctactgcgaggccaagggccggatcaagagaggggaccgcgtctggcagatcgcctttgggtcgggcttcaagtgcaacagcgccgtctggaaggcgctacggacggtggacgacgccggccgccgggacaccaacccctgggccgacgacatccacgacctgcccgtgcacgtgcccaaggtgtcgcccttcgcttcttccgaccagg

SEQ ID NO: 313472 - DNA, 263 bp, Zea mays
gtcaaaagtcctgtgcagcatgttgcgtttagcccaaaggactccaatatgttcgccagtgcccaggacaaaacagtaaagatatgggattggcattctggtaactgcaagtctacattgtctgggcattcagatttggtgttatgtctggattacttcagtcagggtgatcagctatacttgatcactggttcacgagacaaaactgccaagatatgggattgcaagacgaggagttgtgttcggacattggaagggcatac

SEQ ID NO: 313473 - DNA, 259 bp, Zea mays
cggacgcgtggcggacgcgtgggcggacgcgtgggggtaccattgtttcggcgaattgctcattgatattaccagttcacacttccaggttgctgaaagagcgctcttcgtatggaacaatgataacattatcagcttgattgcacaaaaccgccaagtgatcatgcctcttgtcgttccagcgctagagcagaacattcagaatcactggaaccaggcggtcctgaatctgaccgtgaatgtcaagaaaatgttatct

SEQ ID NO: 313474 - DNA, 257 bp, Zea mays
agagaaggacatacgcgtcaactacctcttcaccaggatagtgaagctcatagtcgtggagctctactgcacgcacacagcggcctgcatcttctattacctggctacgacgcttcccgaatccatggaagggcacacgtggatcgggagcttgcagctgggggactacaggttcacacatttcagggagatcgatctcgccaagcgctacataacgtcgttgtacttcgccatcgtcaccatggcaaccgttggct

SEQ ID NO: 313475 - DNA, 251 bp, Zea mays
gctgcctccgcctctcgagtctcgtccacccgtcatcctcctagctcctctactcgccagtcgccatgggcaagattaagatcggaatcaacggcttcggaaggatcggcaggctcgtggccagggtcgccctccagagcgaggatgtcgagctcgtcgccgtcaacgaccccttcatcaccacggactacatgacctacatgttcaagtacgacaccgtccacggccactggaagcacagcgacatcaca

SEQ ID NO: 313476 - DNA, 263 bp, Zea mays
atcagcgataaggatagatgcccacaatgcaaaggtgatggtctctccagaacccttgcactcattgcaaggatgctgcatttgctgaatcattccaggtcccaactgcagcatccttgcaatgagtgcaagggttctggagagaccatcagcgataaggctagatgcccacaatgcaaaggtgataaagttgtaccggagaagaaagttcttgaagtggtagttgagaaaggtatgcagaacgggcagaagatcacattccc

SEQ ID NO: 313477 - DNA, 264 bp, Zea mays
gactagttctagatcgcgagcggctgttccagtgcagctacccgaggccgatccatggcatcctgggcaagtcctccatgctcgtcgtcctgggcgaggaccacaagcgcctcaggaacctcgccctcgccctcgtcacctccaccaagctcaagcccagctacctaggcgacatcgagaagatcgcgctgcacgtcgtcggcgcatggcgacggcacggcggcgtcagggtcgtcgcattctgcgaggaggcaagaaagttcg

SEQ ID NO: 313478 - DNA, 263 bp, Zea mays
cccgtatcgatgagagggagagacatatgcaaattgaagtcgagaggaagacacttgcgcttggagaaagagactatgattcaattataagtcagaaacgaacagaagtatatagtttggaacagaaaataaaagtgcttctgcgggagaaagatataataaatagaaatgctgatgaaagagtaaaactgggtttgaagaaggatgcattggaaagcagcaaggacaagctcaatgagatagttaatgagcataaggataaa

SEQ ID NO: 313479 - DNA, 273 bp, Zea mays
attcgtccaaactcgtgagcactttctcctcgtccccgacaagccactcgaagccgagatacggccatggactccaccggcaccggagcagcggggaagggaaagaagggagcggccgggcgcaaggtcggcgggccaaggaagaagtcggtgtcgaggtccgtgaaggctgggctccagttccccgtcggccgcatcgggcgctacttgaagaagggccgctacgcgcagcttgtcggcaccggcgcccccgtctacctcgccgctgtcctc

SEQ ID NO: 313480 - DNA, 265 bp, Zea mays
ccaacatatctcctcgcattttccttgcaaccgattgcctatccccctcccaaccaaagaccgatggcgcccaaggccgagaagaagcccgcggcgaagaagccggcggaggaggagcccgcggccgagaagacgaccgccgggaagaagcccaaggcggagaagcgggtccccgcgggcaagtctgccggcaaggagggctgcgaggtcaagcgtcgcaagatgaatggcaagactaccgtggacacgtacaagatctacatct

SEQ ID NO: 313481 - DNA, 238 bp, Zea mays
cccacgcgtccgcccacgcgtccgcccacgcgtccgcggacgcgtgggcacgggccgcttcaccatcatctccaaggagcagggcgtgccgctggtggccttcacgttcaaggccaaggacgaaaccccgctggccttcaagctgtcggcggagctgcggcggttcggctggatcgtgccggcgtacacgatgccggccaatctggagcacattgccgtgctccgggtcgtggtccgg

SEQ ID NO: 313482 - DNA, 262 bp, Zea mays
  unsure (1)..(262): unsure at all n locations
cgcaactgagcaacttgcttgctacactggcccaacagttggggggctactgaatgctacatttggaaatgcaacggaaatgattatatcaatatacgcactgaaaaatgggatgattcgggtcgtccagcagtcactactaggctcaatattgtcaaatatgctgctggttcttgggtgtgctttctttgctggtggtcttgtccattctgacagggaccaggtcttcaacaaggcatcagctgttgtanactcaggacta

SEQ ID NO: 313483 - DNA, 260 bp, Zea mays
agtagacttcagtgtgtttttgaagctcacacccaagcagaaggacattgttcacaagttggaaatgcatgataggttcaaaagaagtgcagtagggagtgcactgtacatccatccttgtctttcaggactttcagaggttaatgctgagaacagggctcacaccttgagagatgattcagttgatagtctgatggattccatcaatgtgagagacggcgtgaaggccaactttttcatgaatatcctgtcacttgcta

SEQ ID NO: 313484 - DNA, 274 bp, Zea mays
acccacgcgtccgcggacggtgggctctctcaaactgcccctcaacattctcatcaacaacgccggagtgatgacaaggcactgcacacgttccagcgacggtctggagctgcattttgcaacaaatcacatcggtcattttcttctaacaaacctcgtactggagaacatgaagagcacgtgcagggacacaggcaccgagggacggatcgtcaatgtgacatctgcagggcatgtgatgacctatcctgaagggatacgcttcgaaacaatc

SEQ ID NO: 313485 - DNA, 274 bp, Zea mays
cccacgcgtccgcccacgcgtccggaagaagaggaagatgaagttgttaggatgaggaacactcctgatttctttaataagatagttgatagcatatgtcctaccgtatttggtcatcaagaaattaagagggccgtgcttcttatgcttttgggtggtgttcataagataacacatgaagggatcaaccttagaggtgacatcaatgtctgtattgttggtgacccaagctgtgcaaagtctcagttcctagaatatactgctggtattgttc

SEQ ID NO: 313486 - DNA, 263 bp, Zea mays
cacaggctgcactgggggaatcaaagaaagcgagtgaaaggtggataaccaagccatcaccaactttcacaggctgcactgggggaatcaaagaaagcgagtgagaatgccattttgtctgttaatattgatgataagaaactagtgcttggaaccttatcagttgagaagcatcctcagatctcttgtgatcttgtatttgataaggattttgagctaccacacaattcaaaaacacgtagcgttttcttccgtggctacaa

SEQ ID NO: 313487 - DNA, 263 bp, Zea mays
ggggccaacatgccttcgagagcagaactcactgcccgtaagagcgactgcgaaccgcggatgatcggagagcccaccggagagtgctacgacgtcatactgtattttgggatcatagacatacttcaggattacgatatcagcaagaggcttgagcacgcgtacaagtctttccagcacgacccaacctctatgtccgcggtggacccgaggcagtattccaggcggtttaaagaattcgtgtacagagtgtttcaagaaga

SEQ ID NO: 313488 - DNA, 280 bp, Zea mays
ggcggccccagcgcggcctccccgagcgctccgtcaacatcctccgctcatggctcttcgagcacttcctccacccgtacccgagcgacgccgataagcacctgttggcgaggcagaccgggctgtccaggaaccaggtctccaactggttcatcaacgcccgtgtccggctatggaagcccatgatcgaagagatgtatcagcaggagtgcagagagctcgacggctcctcggccggcggagggggccccgagtccgtcaacgacccctccggcgccga

SEQ ID NO: 313489 - DNA, 277 bp, Zea mays
aacaaatagtcggtttactatcttctataatccaagagcaagcccttgtgaatttgtcatacccatggctaagtatgtgaaagctgtgtaccatacccgtatatctgtgggcatgcgtttccggatgctttttgagacggaggaatctagtgtaaggcgttatatggggacaattacaggaataagtgatcttgatcctgttcgctggccaaactcgcactggcgctcagtaaaggttggatgggacgagtcaactgctggagagaagcagccaagg

SEQ ID NO: 313490 - DNA, 285 bp, Zea mays
ctggttttctacaaaggccgggcgcccaatggacagaagtcagactggatcatgcacgagtatcgcctggagaccaacaacaatggaattccacatgaggaaggatgggttgtatgcagggtgttcaggaagcgactcgcgactgtccaaagaatggtcggggactcgccttactggttcaatgaccacgcggggttcatggcgccggagctcggctcaccgaggcaggcggcgcaccaccagcagaacgtcatgatgtaccacaggcaacagagcagctacagc

SEQ ID NO: 313491 - DNA, 284 bp, Zea mays
gggaaaccatgtcaccacgcactttgtttaacaacaacacaacaatttaaagatgttcggatagaggattttgtggatgactactactcagtggagaagttcgtgaaggtgtactcaagggtagtagagccaattggtgacaaatctttttggccaagagtgtcatttgcaaaggaggtgggtgcaccaattggaatgtggggcgatggtcgtcaaagaaaaaacaagattaaagggtgcgtagaaggaggaagtggtaagaaaccaatgaaaatgaagatgtc

SEQ ID NO: 313492 - DNA, 163 bp, Zea mays
cggacgctgggcaggacgcgtgggcggacgcgtgggcggacgcgtgggcggcgctcaagcccaggcggacagcagcggcacggacacgggtctagtccagccaatcgtctacaggccctctaagactacttgccggctctgctaggcgctgggaaaagaaggt

SEQ ID NO: 313493 - DNA, 269 bp, Zea mays
catacataaaggagcaaagaactgaggagcttggcgactgctaaagatgttgcggaccgaagaagagcatgagggtcttgcagatctccgacggctccgccatcgcgccattgaccggcgggacgacggacatgccgaggtcgcgcaggacggcgaggtggcgcgcggtgaaggggttgtcccacatgaaggtgttcatggccggcgcgacgtaaacgggcttgctgtagtcccaggcgcgcacgacgcaggtaaggaggttgtcgcac

SEQ ID NO: 313494 - DNA, 277 bp, Zea mays
gaggaaaataaccaagttgacccagatgcacctaggcggccaccccgtccacatgtatttttgcaatcatacaatagcacaccaaggatgactcccccagactcacctccaaggcgttttgcatcggtatcaccgccaaggcgacattcaatctctgttacatcgatgaatatgtttaatgacaggtcctcaggcttttctggtcagcatagctctccatttgacgctccaagtcaaacaggacgaacaagagttgatggaaaggagttctttcgtc

SEQ ID NO: 313495 - DNA, 235 bp, Zea mays
cccacgcgtccgcccacgcgtccgcccacgcgtccgcggacgcgtgggcactcccatattgcactatggcttggttgagcactgctcaattagcacaatctagtgttggggaaaagctaaatatggtttatgaggtcggggagctgtttgagctgggaattcagctgtcttatctgctcatacttattggactgcttggagctggtacattttttgttatccgtcaggttcttgt

SEQ ID NO: 313496 - DNA, 238 bp, Zea mays
cggacgctgggcggacgcgtgggcggacgcgtgggcggacgcgtgggagctgaagaaggtgctagaggtatacgaggcacgactgaccaagtggaagtaccttgctagagacttcctcagcctcgccgacctgaaccatgtgtctgtcactctctgcctgttcgctacgccctacgcatctgtgctcgacgcctacccgcatgtgaaggcctggtggtctggtctgatggagaggccg

SEQ ID NO: 313497 - DNA, 234 bp, Zea mays
gttatatttgcacttgcccaatcaggtctatgtgctgcatttaatcgaacaacaaacaaacgcatatgctacttgaatataagtcctgatgaagttattaggagcttgttttacaacaagaacaacgagtcccttatcaccgtttcagtttatgaatcagattgtttcagttcattaaagtgcagaacaactcctatagagtacatcagaagaggtcaactgaaggatggattt

SEQ ID NO: 313498 - DNA, 233 bp, Zea mays
ctttgagaatacaactggaccgagtttgctacaacaccttactggccatatatgtgaagacagggaaatatgatgaaattgctactgtatgtgaagaaatggagaaattgggcattgagaaggacactgttacttacaattccttgattaatggatacggaaagcaaggacgcttggacatggtcgctttccttgttcaagatatgcgggcgcaaggcgtactcgctagtgtg

SEQ ID NO: 313499 - DNA, 291 bp, Zea mays
catccttgttggaatctgttagtagtattctactattgattagataactttctgtcctagaggtgtttcaatgtccctcctttttcaggttgagagtggtgatctaatagcttatggacttatcccagaatttattggacgcttccctatccttgtgagcctggccgctctaaatgaggaccagcttgttcaggttctgattgagccaaagaatgccctgggcaaacaattcaagaaattgtttagcatgaataatgttaagcttcactttacagatggtgcacttagaat

SEQ ID NO: 313500 - DNA, 295 bp, Zea mays
ggccaccgctgctataaaaccctccgcctccaccggcggctcgccaaactcagtttcgaattctagggttttgctgctctccgaccccgagctccgaatgccgcagcatcaggcgcgccccccctcgcgtgtgaccgagatggcgctgccgaatcaggggaccgttgattaccccagcttcaagctcgtcatcgtcggcgatggtggaactggtaaaactacatttgtgaagaggcatctcactggagagtttgagaagaaatatgaaccaaccattggtgtggaagttcatccg

SEQ ID NO: 313501 - DNA, 221 bp, Zea mays
cccacgcgtccgcccacgcgtccgcccacgcgtccgagaaattgatgaacttataaaactttcactaaacaaacctgtacgtcttgaagctgatccttctctgaagcggcctgcaacattgactgaagaggttgttaggatacgacgagcacgtgagtcaaatcaagaagcggtcctccttgggccctgtttgagaactttcaaccgaagtgtaatcattt

SEQ ID NO: 313502 - DNA, 227 bp, Zea mays
ggtgcatttgcaaagactgcggtacaccactggagagggtcaagatcttattgcagacaagaactgaaggtttccagtccctcgggatcctccagtccttgaggaagctgtggcaatacgagggaattcgaggcttctacaaagggaacggtgcaagcgtgcttcggattgttccatatgcagcattgcattacatgacatatgagcagtataggtgctggatattg

SEQ ID NO: 313503 - DNA, 253 bp, Zea mays
ctctcctctgcgcccacggctgtgcgggccgccgccaatacatactgccagctgctatcctcgcagagcgacaacaatgtgaagctcatcgtcctggaccgcctgcacgagctatgctcctctcacagggaggtgatggtggatatggtcatggatgtgctgcgcgcgctcgctagccccaatgtggatgtcaggagaaaggttctggatttagtcctggatctactcaccctgagaaatgttgaggaggtgg

SEQ ID NO: 313504 - DNA, 275 bp, Zea mays
cccacgcgtccgcaaaataccaagagtttcatatacagaaggctaaagtgccttgtcattgatgaagccgatcgcatacttgagcaaaactttgaggaagacatgaaacaaatatttaaacgccttccccagaataggcagactgttcttttttctgctacacaaactccagaggttgaaaaatttgctaaactgtcatttgagaaaaatgaagaaagtaaaaaaaaacctgtttatgttggagttgatgatgataagtcaaaggctactgttga

SEQ ID NO: 313505 - DNA, 286 bp, Zea mays
  unsure (1)..(286): unsure at all n locations
gggttttgctgctctccgaccccgagctccgatagccgcagcatcaggcgcggaccccctcgcgtgtgaccgagatggcgctgccgaatcaggggaccgttgattaccccagcttcaagctcgtcatcgtcggcgatggtggaactggtaaaactacatttgtgaagaggcatctcactggagagtttgagaagaaatatgaaccaaccattggtgtggaagttcatccgttggatttcaccactaactgtggtaagatcaggttctactgctgngataccgcagg

SEQ ID NO: 313506 - DNA, 259 bp, Zea mays
ggagggcggacgcgggttgagtttcaggtgccttccccactggagccgactagggatagctatttcgtgaggtactgcaagcagaacgcggatggaacatgggccgtcgtcgacgtctcgctggacaccagctcagtcctcaagtgccggcgccggccgtcgggatgcctgatccaggaaatgcccaatggctactcaaaggtgacctgggtggaacacgtcgaggtggatgacaggtcggtaaacggcatctacaaac

SEQ ID NO: 313507 - DNA, 253 bp, Zea mays
cccacgcgtccgcccacgcgtcagccacgcgtccgcccacgcgtccgcatcgtgtctcctggcgcggacctgtccatctacttcccgtacaccgagtcgcacaagaggctgacctcccttcacccggagattgaggagctcctgtacagccaaaccgagaacacggagcacaagttcgttctgaacgacaggaacaagccaatcatcttctccatggctcgtctcgaccgtgtgaagaacttgactgggctgg

SEQ ID NO: 313508 - DNA, 269 bp, Zea mays
cacacgcgtccgcacacacgtacgcacacgcgtccgcggacggtgggcgacgcgtgggaaaatcatccagctcaaagatatagtagatgcatctctggatcaaagtgcaaagaatggagttgatgtaggcatttgcttgacatatgaaaatcagtccgctctgaataaagtagacactcgatggaaaacaggaagagatgtctggtggcaggatgttgtgcctgatttcccaactagatgcgatgtggaatgggttgatgcagaggatc

SEQ ID NO: 313509 - DNA, 264 bp, Zea mays
agcagtcgccgacactcaccagcaagttctcacgcagaaaattccagcatctctttcgcgccccaattgatcgattcgtgatggcgcccaaggccgagaagaagcccgtggagaagaatccggcggaggacaaggccgagaagaagccaagggcggagaagcgcgtgacgagcaaggagggcggcgacaagaacggaaagaagaaggcgaagaagagcgtcgagacgtacaagatctacatcttcaaggtgctcaagcaggtgc

SEQ ID NO: 313510 - DNA, 271 bp, Zea mays
gcaggacgtgagggctaaggaagcaaatctttacactgaaatcgctgagggtatccatgcttatgggataacaagccatcggcatgtgcctgagattgagcaaggacttacagatgctgctgaatcaaaagttactatcagctttactccacatttgatgtgtatgaaacgtgggatgcaatctactgtgtatgttgaattggcatctggagtgactcccagggatttgtatgaacacctaaagtctacttacgagaatgaagaatttgtc

SEQ ID NO: 313511 - DNA, 266 bp, Zea mays
  unsure (1)..(266): unsure at all n locations
cgcgcactngggcaaccggtggtccaagatcgcgtcgcacctgccgggacgcacggacaacgagatcaagaaccactggaacacgcacatcaagaagaagctgaggaagatgggcatcgaccctgccacccacaagcccctccacccacagccagcagctcctcctccgactcagcaggagcaggacacgggcgggtcgcccgaggaggagggggagaaggccgacgcggtcatgatggcagcagctacgccgattatcgggcacg

SEQ ID NO: 313512 - DNA, 276 bp, Zea mays
cggacgcgtggcgacttcctgcagtcctgcgctgcgcccctcctttccgcctccacgctgccgacgtccaccacacagccgcgtgcaccgccgcgacggagcccgcttcccctacggcgcctaccacgtgtactgctcccccgggaacgcggcgcgcgcggagcagcccaccacctactgcgacgcctacagcaacccgcacgcgcaggagatcctgcagctgctgccgcaccccgtgtggggagagttcggctacccgacggccaggggacaggg

SEQ ID NO: 313513 - DNA, 270 bp, Zea mays
cccacgcgtccgcggatctgagacgagacgagttaccatctcatcccaactccggaacgaacaagttaccatctcatcacaactccgtctcaccgaggtccgcaagaacggaacctgcccctggctcaggcctgatgggaagacccaggtgacagtcgagtaccgcaatgagggtggtgccatggtccccatccgtgtccacaccgtcctcatctccacccagcacgacgagacagtgaccaatgatgagatcgctgctgacctgaagga

SEQ ID NO: 313514 - DNA, 276 bp, Zea mays
cccacgcgtccgcccacgcgtccgagaagagatcccgcgccgtcctcttctccacctccacctccacccatggcggcctccaccttcagcggcgacgagacggcgcccttcttcggcttcctcggcgccgccgccgcgctcgtcttctcctgcatgggcgccgcctacgggacggccaagagcggcgtcggcgtcgcctccatgggcgtcatgcgccccgagctcgtcatgaagtccatcgtccccgtcgtcatggcgggagtactcggcatctac

SEQ ID NO: 313515 - DNA, 274 bp, Zea mays
cccacgcgtccgcggacgcgtgggccagtaggctctttaagaaaattgaattgaacgaatctattagatatgcctcatggtacccctgttgagacctggcttaatgacctactttgtttggatcttgcaaactccattccaaatatcagcaggctacctcacccaaaagaatgtgatctgtattatgtcaaccgggacacacttttctcatatcacaaggagagcgagatatttttacagcggatgatggcactttatgttgcttcccactaca

SEQ ID NO: 313516 - DNA, 275 bp, Zea mays
cccacgcgtccgtcttggcttgcttttgctgcccagaaggttgttgaggttgatgctcttgctaaggcattggctggtcaaaaggatgaggcttacttcgcagcaaatgctgctgctcaggcctcgaggaaatcctcaccccgtgtgaccaatgaagaagtccagaaggctgctgctgctctcaagggctctgaccaccgccgtgggaccaacgttagtgctagattggatgcccagcagaagaagcttaacctccccatccttcccaccactac

SEQ ID NO: 313517 - DNA, 258 bp, Zea mays
agcggagaacgaccccacggtgacgacatgcttgctctgctggactgttactctgagtaagactgctgcttctgctgagcagccgaagagggcccctaagctcaatgaaaggatcctctcttctctgtccaggaggtccgtagctgctcatccatggcatgatcttgagatcggtcctgatgctcctgctgttttcaatgttgttgttgagatcacaaagggaagcaaagttaaatatgagcttgacaagaaaactgg

SEQ ID NO: 313518 - DNA, 260 bp, Zea mays
cggagttcctcaaggctgagatcagagcttcttctggggttgaccagtacacaccgccggcattgctgggaagtgccaccacttggcaccggcctcggagcgtggaggagtactataagctggtagattctgagttgtttgaccaaagtaaaacaaaggtggttgtggggaacacagcttcaggcgtttacagagaaacagaggtgtatgataggtacatcgacctcagatgcatcccggagctgaattcggttagtaag

SEQ ID NO: 313519 - DNA, 261 bp, Zea mays
attttgaatagcagagaggccagagaatttgccagtggggcactagctggtgctatgtcaaaggctattcttgcacctctatagactatcaggacaagaatgattgtaggagtaggacctaggcacatttttggtagtttggtggatatcatccaacaaaacgggtggcaagggctttgggcagggaatacaatcaacatgctccgcatcattccaacccaagcagtcgaactcggaacatttgaatgcgtcaagaggagc

SEQ ID NO: 313520 - DNA, 258 bp, Zea mays
gagttcttccaggacattgtcatagtgccttttatcgatagctatgacctcgttgtgttgaagaccgttgccattgccgagtatggggtgcgcgtcgtccctgcaaagtacgtaatgaaatgcgacgacgacacattcgtgaggatcgattcggtactggatcaagtgaagaatgttggaaacgataaaagcgtttacgtagggagtataaactacttccatcgaccactaagatctggcaagtgggcagtaacgtac

SEQ ID NO: 313521 - DNA, 256 bp, Zea mays
ccgaatcaggggaccgttgattaccccagcttcaagctcgtcatcgtcggcgatggtggaactggtaaaactacatttgtgaagaggcatctcactggagagtttgagaagaaatatgaaccaaccattggtgtggaagttcatccgttggatttcaccactaactgtggtaagatcaggttctactgctgggataccgcagggcaagagaagtttggtggcctcagggatggatactatatccatggccagtgtg

SEQ ID NO: 313522 - DNA, 261 bp, Zea mays
gtcacaatgtcggcacaacctgcacagccggtatatggcggggagcttccagaagggctacagaagatttccaacatcatagcagtttcaagctgcaagggaggggtagggaaatcaactgttgctgtaaatcttgcctatacactagctggaatgggcgcccgggttggaatcttcgatgccgacgtctttggcccaagcttaccgactatggtttctcctgaaaaccggttgctagtgatgacttacctttagaaccca

SEQ ID NO: 313523 - DNA, 187 bp, Zea mays
gcagctagcgcgctcctcgagcccagcagagaaaggccggcctacccactctctctctctctctctccagtctccaccggcagcactaatcgtaatagccatgggctccaccgccggcgacgtggccgcagtggtgaacgaggaggcgtgcatgtacgcgatgcaactggcgtcgtcgtccatcctg

SEQ ID NO: 313524 - DNA, 201 bp, Zea mays
ggatgggtcttgatgttggccctgatgccacgaaaaccttcaacgaagcattggacaccaccaagactgttatttggaacactcccatggggccgttccaaataacagtcttggtggtgtccaatgggagtgtttgagttcgagaagttaacagctggaactgaggcgattgccaagaagctagctgagcttacaaccacg

SEQ ID NO: 313525 - DNA, 272 bp, Zea mays
cagacgcgtccgcccacgcgtccgcccacgcgtccgcccacgcgtccgtggactcaagatgagtatctggcatgatgttgtaagcgcatcaaccagcagcagcaaggacgatagtattctttctctagctcccccaggtcagactaatcagcacgcaccattggtggactgcattaggacacggtggccacgagctgtttgtagctgggttggagatgttccaagcattgtctgacacagtggatgtcgtgtgcgcactagtcgctctagct

SEQ ID NO: 313526 - DNA, 271 bp, Zea mays
cggacgcgtgggcggacgcgtgggcggacgcgtgggcgcttctccacgccgccgccgccccgtgcgcgtcaccatggacggcaccttcgacatgatgcactacggccactgcaacgcgctgcgccaggcgcgcgcgctcggggacgagctcgtcgtcggcgtcatcagcgacgacgagatcaaggccaacaagggaccccccgtcacgccgctccacgagagaatggtaatggtccgtgctgtgaaatgggtggatgatatcattccagat

SEQ ID NO: 313527 - DNA, 271 bp, Zea mays
aggagatattgttctactgggtagcagacatccttgtctagaggcacaagatggtgttaactttatacccaatgattgcactctggtgagagggaaaagttggtttcagatcatcactggaccaaacatgggaggaaaatccacatttataagacaggttggtgtaaatgtattgatggcacaagttggttcctttgtaccttgtgatcaagcaagtattagtgtgagggattgtatttttgctcgtgttggcgctggtgattgccaactt

SEQ ID NO: 313528 - DNA, 274 bp, Zea mays
cccacgcgtccgtgaaaagatagaagagctgctccattcagatccttcgattgagattttcctgtggcaggaaagtgctctggtgcttgccaggcttttggtccctcatagattcgagaaaatgggaatgcatgagatgagggttctggttgctgaaaggtcgacgatgaacatatacatcaagggagaagacttggaagtggagcagaattgcattggcattttgctggaagggttcttgaagatcgagaacctgactctcatcacgccccca

SEQ ID NO: 313529 - DNA, 258 bp, Zea mays
cacacgcgtccgcggacgcgtgggcgacgtgggagagccacccaccttccaaggcaggggccatggacgaacccgtagagcgcttgaaggacacggttccacaagttcaagaccgaggtctatgacaagaagccggagctgttcgagcctctcaaggccggccaggcccccaagtacatggtgttcgcctgctccgactcccgcgtgtgcccgtcggtgaccctgggcctgcagcccggcgaggcattcaccgtccgc

SEQ ID NO: 313530 - DNA, 262 bp, Zea mays
cggacggtgggacggacgcgtgggaggtaattggttctgagaaggataaggacagaatacctggcattgacatcacgcttaagacgggtgacacatggatgttcgctggccatcaagttcttgtactggaaactcctggacatacaacaggtgtttgatggaaaatttcttatgactcatcttatattcgttcttgccttcaaagttaactcctgcactgcacatgaaggcttttcgttaacttttcatgtatttttattag

SEQ ID NO: 313531 - DNA, 261 bp, Zea mays
cccacgcgtccgcccacgcgtccgcggacgcgtgggctggattgaggatttcacaagaagtaatgctcctggcttgacaccatatgccccgctagtagcaggatctgttgcacgctcgttagcatgtattgcttgttctccaattgagctcgcaaggacgcgtatgcaggcatataaagagtttcgtcctggcgtaaacctcctggaatgtggaaaaccttggttggtgttctcccaccacttccaagttcgagtcagaat

SEQ ID NO: 313532 - DNA, 184 bp, Zea mays
cccacgcgtccgggatactggacgggtaccgccggcgtacgacgccactgccgtgcggcggctgcggaaagccggcgctattgtgttggggaagacgaacctcgacgaattcggaatggggagcaccaccgagggctccgcgtttcaggtgacaacgaacccgtgggatgattcacgtgtgcct

SEQ ID NO: 313533 - DNA, 272 bp, Zea mays
cggacgctgggcgagacgcgtgggcggacgcgtgggcggacgcgtgggcggacgcgtgggcggacgcgtagcggcgccgcgtcgccgccgaacaacagcatcggatccatggagggctgggacaaggggaccaagagcacggtgggcgagatcccgctgctgtcgacgcgcgcgggtccgcgggacggcgaggcgtggcggcagaggctcaaggaggagtaccgcgcgctcatcgcctacacgtcggtgaacaaggccaaggacaacgactg

SEQ ID NO: 313534 - DNA, 266 bp, Zea mays
gagacaaccgctgcgtaaacgaatccatcgccatggcgtctcgtctcgttgcggcggcggcctcctcctcctccctctcctcagcgtcccccctcgctcgcctaatctctcgccgcggccttgccggtgccgcagacggccatgggtctgcgaaggtgcccttgtggaaagatccgttgagcccgagcaagtggaaggaagagcactttgttctagcaagcctctcaatgtggggggttattttttatggtggttacaagcttttt

SEQ ID NO: 313535 - DNA, 258 bp, Zea mays
cggacgcgtggcggacgcgtgggcggacgcgtgggcggacgcgtgggcagcggaaaacttgacatcttataggctcagggcaatgagtatgtctttgttgcaaactcagacaacttgggtgctatagtcgacatcaagatcctaaaccatctgatcaataaccagaacgagtactgcatggaggttactccaaagacgctggctgacgttaagggtggcactctcatctcttacgaaggaagagttcagcttttggag

SEQ ID NO: 313536 - DNA, 183 bp, Zea mays
agcagccttggctccagctcattgggatgggcaccatttcgttccggctctgctgatgcagaaccaggaagatgccgccgcacagatggcaagaagtggcggtgctctagagatgctgtcggggagcaaaaatactgtgagcgacacataaaacgtggttgccaccgttcaagaaagcatgtg

SEQ ID NO: 313537 - DNA, 111 bp, Zea mays
gggctggcttctgctccccctcttatcaagtcctcctcgggttagggctccttatggctttgtggacgggcgatgtcggcggctgatgtgcagtaccgttggttcttcggc

SEQ ID NO: 313538 - DNA, 272 bp, Zea mays
atgatactggacatgttccgccatttttttaaaactgcctccaccaagcattcagaacaagtcacccactgtatggaaattataatgatgtttgtaattcaggagagcgatgatgtccatgctgaactggcatcattccttcttcagaaccttacaaaagaagcacaagaaactctcccggcatcttttggacttgcagagagggtactaggcctatgcagggacaagctcaaaccagtgtttcatgagttacttaaggccactctcttgga

SEQ ID NO: 313539 - DNA, 269 bp, Zea mays
aatctgcgaggctactgccggctccccacagcgaactactcgtatatgatttcgttgagctgggcagcttggaatgctaccttcatggagatgaacaagaggagcagccattgaactggaacgcgcggatgaaaatcgcgcttggctcggctcgaggcctggcatatctgcaccacgattgctcgcccgggatcgtgcatagggacatcaaagccagtaacatcctgctggatagaagcttggagcctcgtgtctccgattttggcctc

SEQ ID NO: 313540 - DNA, 217 bp, Zea mays
cccacgcgtccgcccacgcgtccgatgccgaatcaactgagagctgtcaaaggctaggacctgctggacttgcattacattatgcaaacattatcattcagatatacagtattgtttctcgatcagggtatgtgccatcaaattcaagagatgcactgtaccagggattgccaccaaggatcaagtcagcactaccaaataaattgagaacgacctc

SEQ ID NO: 313541 - DNA, 288 bp, Zea mays
gttgcaatcactcaagaaaattctctgttggataacactgccagaatagagggatggttagctcggtttcctatgtttgactgggttggtggtaggacttcagaaatgtcagctgttggtttacttccagctgcattgcagggtattgatatcaaggaaatgctagttggtgcagctttaatggatgaggaaacccggaacactgtggtatcacattattaataacacggacaacttgcagtgatggcatgattatctatatgtgtcatgtcaacatgtttatctttt

SEQ ID NO: 313542 - DNA, 246 bp, Zea mays
ccgtcatcgatctcgtttcaaatccatccatcctcgtttcctccgtcccgcagcatctcaaccccatggccaagatcaagatcgggatcaatgggttcggcaggatcggaaggctggtggccagggtggccctgcagagtgacgatgtcgagctcgtcgccgtgaacgacgccttcatcagcagcggctacatgacctagatgttcaagtacgacactgtgcacggacaatggagacaccatgaag

SEQ ID NO: 313543 - DNA, 312 bp, Zea mays
cacaaatgcaggagtgggtccaaggtgcaattgctaagattagtaacaattctgagggtgctgccactgcaacacagaatccaatgagcacgaggacatcatttatgcccatcagcattaatacgggcactttccctggcacacctgctgtgagacttattggggattgccattttcttcatagattatgtcaattactgctattttgtctgcttttccgaagaaggcaatcaccaaggttacttgccagttcgcaaaaaaatcaagattctgccatgcagaaaatacaacacatgatgaatgctaagacag

SEQ ID NO: 313544 - DNA, 294 bp, Zea mays
cccacgcgtccggtgccatcctcgtcgtatccggtgccgacgggcccatgccgcagaccaaagagcacatcctcctcgccaagcaagtcggtgttcccaagatcgttgtcttcctcaacaagaaggacatggtcgacgacgaggagctgctcgagctcgtcgagctcgaggtccgcgagctgctcagcaactacgagtacgacggcgacgacgtaccaatcgtcgctggctccgcctcaaggcgctcgaggctctcatggtcaacctgcactgaagcgcggcgacgatgagtgg

SEQ ID NO: 313545 - DNA, 299 bp, Zea mays
atagacccagcacggcggtattccgaggctgagatatggcaggaaatacaatctaaacctatgctatgttgaacaaggccctcgagtgctgccagctaaaggatatagtagcctcaaaaccggagaagcttgatgcactagtcgccgacatgggggagaactggagcgtagggcagaagcagcttctgtgcttcggccgagtcatactgaaacgcagccggatcctcttcatggacgaggcaacggcttcggtcgattctcaaacagacgcggctatccaaaagatcatccgcgaggag

SEQ ID NO: 313546 - DNA, 181 bp, Zea mays
cccacgcgtccggaccttgttcttctttgtacatctactccagatgatctgtttggaggtgctgctcagtggggtgcacaaaagcttttggatttgatattacagctgcttgtagtgggtttttagtcggcttaatcacagctactcgctttatcaaaggcggaggttttcagaatgtctt

SEQ ID NO: 313547 - DNA, 182 bp, Zea mays
agaattctactgttagatgaagctacaagtgcgctggacgccgagtctgaaaggatcgtgcaggaagctcttgacagggtcatgtcgaataggacgactgtcatagtcgcacaccgtctgagcaccgttagaaacgctgacaccattgccgtcattcatcaaggaacactagttgaaaaggg

SEQ ID NO: 313548 - DNA, 259 bp, Zea mays
gagggaggagggtgacgatggcgacggccaagaggctcgatcgcgtcgctgcgagcggcgccgagggtgcggcacgtgctgaagctcagcgtgatggacacgctccaggattactacatggtggggcggtacgacgacgcggcggacgcgttcgtgccggcggacccgagcgcggggacgacgtgcgcggctggcggcggctggactacggccacgtgtacgcgtccaagaccttcttcgacgcgcgcgggagccggcg

SEQ ID NO: 313549 - DNA, 261 bp, Zea mays
ctacgatccaacagttctagagcaagagagaggaagacacaccgcagagttagcaggctaataacttgcaggagcagcaggaatggcggcgacgcgtcgcctctcctgctttctcctcgctggtgctttctggcagggagtcgccgctgccaccgccttcggacgaagcgcgctgctgccggcttcggggctttgccaccgcgtgtgatttctccataggatttgacgtggtctacgctcgatgctcctaccggtttcaag

SEQ ID NO: 313550 - DNA, 188 bp, Zea mays
cgagttggagcacctcatcatactgacagctagccggtgcttgctgggaagggaggtgcgagaaaagctgttcgacgatgtttctgctctctcatgaccttgacaacgggatgcagccaatcagtgtcctcttcccgtacctcccaatccctgcgcataagcaccgtgacagggcacgggcacgtttg

SEQ ID NO: 313551 - DNA, 276 bp, Zea mays
tgaagctatatctaagatgcacaatatgagcgctgctgacttcacatcagcgcgtacattgattgacgagtatgacctgtatggtctagtggcatactccaagcatcatatacactcagaagttcctgacatttatcgtttagctgcaagacactcaaggggcgtttgtacatgtagctcacttcgaacaatttggagttactctgacagaggctgctatgaatggttagcatataatcgcgacaataaatggaacccctgctgaaattaatcagg

SEQ ID NO: 313552 - DNA, 264 bp, Zea mays
cccacgcgtccgcccacgcgtccgcccacgcgtccgcacaaacaagattagcagtctttcagagtatgctgaaccacttacgtcttaccttaaaggcttaggcgatgctgaaaaggtaattttggtcgctcatgatcttggcggtgcctgtatatcctacgcaatggagatgttcccatccagagttgccaaggcggttttcctttgtgcagcgatgctggcaaacgggaacagtgccctcgacatgttccaaaagcagatgga

SEQ ID NO: 313553 - DNA, 283 bp, Zea mays
gtcagtaactaggactaggttgggctcgagagaaggaacgggaagaacgaggccgacgagaactgggaaggcatggcgatggggttagaggacggcgagtacggcgccttcatggagaaattcaagatgctgccttcgcaatctcagcatcagcagcagctcccgcttcacggcctcaccttcgctatcaaagacatcttcgacatcagcggccgtgtcactgggttcggcaacccggactgggcgaggacgcatgcccccgccggcgccactcccccgtcgt

SEQ ID NO: 313554 - DNA, 277 bp, Zea mays
cccacgcgtccgcgctgcctttcttctactgttcaccccgcgtgcgctcgctcactcgctctctcccctctggctctgagtggcgctagtgggcgaccgccgccgcgtccctccgtcaggtgcccaggtgtagcctcgtcagcccctccgtcaggtcttcgtcggccccctcgccgacgagcacccaccagccaggcatgagagcgcgcttctagaataatgtctgtgcttacctgcgtgattgaaagcatgggctcatcctgtagcagatcccatt

SEQ ID NO: 313555 - DNA, 275 bp, Zea mays
ctgaggaggccctcgctacccagccattagcaaattcccttatgctgtccaagacttatcttacgctatgtctgtagccttttgttattacaagtactcaagttttgagtttttgagatgtggctatgacaatgtgatgaagaaccctaaaccatcgtattagagtgaaacttgtttctatatagagttccaagtttcttgaacctcaaaaaaaaaaaaaaaaaaaaaaaaaaaaaaaaaaaaaaaggaaaaaagaaaaaaaaaaaaagggcggc

SEQ ID NO: 313556 - DNA, 284 bp, Zea mays
gctgctgggaggagaggggaagcggcggcggggcgccatggaggcggagaagaaggcgccggcggtgtcagtcgtgggcgcgtgggcgatgaacgtcgtcagctccgtcagcctcatcatggccaacaagcagctcatgtcctcctccggctacgccttcgccttcgccaccacgctgaccgggttccacttcacggtcacggcgctcgtcgggtggatctccaacgccaccggctactccgtctccaagcacgtcccgctctgggagctcgtctggttctctc

SEQ ID NO: 313557 - DNA, 278 bp, Zea mays
cccacgcgtccggccttgggctcctggggcatcgccttcacccctcacatcctcaccgtcaaggccggcgaggatgttgcttcaaaaataatgacattctcacaacaaggccctcgcacagtctgcatcctttccgcgaatggtgcaattagtaatgttacacttcggcagccagccacatctggtggactagttacttatgaggggcgctttgagataatctcgctatctggttctttcctgcttgcggaggatggtgatactcgcagcaggactgg

SEQ ID NO: 313558 - DNA, 283 bp, Zea mays
cggacgcgtgggcgagaaggccctcgctgctttcatgtcgaaggacgaagctgccgagcgcacccttggcgatatcattctccagaagatcagggagaaggacgccgaggtcgcaactggtgaaggacgacctcgtgtagaattggacaacagcattattgaactttataaagaagttgggaagttcttaagccggtacacgagtgggcatattccgcaagccttcaagcgcataccatcgccggagtgctgcgcagatgttgtgcagctaacggagccagag

SEQ ID NO: 313559 - DNA, 287 bp, Zea mays
cggacgcgtggggaaaaaattggcaaccgtctggcaggatggaaaggaaatcttctaagccgagctggcagtctcacgctcgtgtcttctgttctgtcctccatgcccacctaccacttatcggtttttcccctcgcggcttgggcacgcaaacgcattgacaggatccggcgctcctttctttgaaaagggaacgccgactcaaatggtggtcactgcctcgtcgcatggccactagtttgcaagcccaaagccctcggtggcttgggggttctcaaccttgacaa

SEQ ID NO: 313560 - DNA, 285 bp, Zea mays
cccacgcgtccgcccacgcgtccgaaactgacaatgtacagaggatcaagattgccaactgtatgttccaatagattccctaccatttcaggcttctggaggcattgtctaatcagttcctcccacagttcatcatcatgctgttccgtaacaaattcaacagcctcctgcatgtcttccagtttgtttataattgtcgacagagcttccttagcattgcccattcgaccaaggacaaaaacttgctcccttacaagttctttttgtgcaaagatttcatatgcc

SEQ ID NO: 313561 - DNA, 277 bp, Zea mays
ctcacttcactgccacagtggcacctccgtctaggaaccgtcgcagtccatgggcacggcggcgtcttccacgcgcttccggcacctgcgcgccgccttgatggccagcagggtgtcgcagacgatccacgggaagctccagaaccgcttctccccgcggcggtccgggtggtaggtcacgtggtaccacgccgacgccaccctcgacgcgtcgtcctccttgcacgccctgagccaccccctcacctccgcgtgcagcgcgtcgacggcggcgatg

SEQ ID NO: 313562 - DNA, 275 bp, Zea mays
tggatcccaggtccaacatatagatggaatccggattgctggacttcctattgatctatatacgacattcaataattagaaccagaatgaaagctttatccatgttggagcatttggttgagcctgaccatcgtcgagttgtggaattaaacttccgcatttgtttggtttatgaactagtttccaagatcggagatgcaatttcatactgtgcaaaagcaatttcgctatgcaagtcacgcatacagaacctgaaaagttccaaggatgctttg

SEQ ID NO: 313563 - DNA, 269 bp, Zea mays
cccacgcgtccgcgaagaacatcgcaaagttagttaggaaaagggataaacttaacatgagccagaacaggggatgttattgtagcactagcactttggctggatctccaacttccagcccaaatgaagacagggtctcctccgggatctctctttcctggcaggatgtctataacattgctgttaagtggagacaaatttctgaaccttgtgatccagttgtttgggtcaataagctaagtgaagagttcaattctggatttggttct

SEQ ID NO: 313564 - DNA, 285 bp, Zea mays
cccacgcgtccgcagtagatacggaggaagagcaccctcttggacatcatcatcaactggatcgtgatcagacacagcgtgctaaggtactcaacatcccatttgctagccttttccttcctcttttgcttgattgtgttgctgagtaccttagcacgctgtgtctgatcacgatccagtagatacggaggaagagcaccctcttggacatcatcaagcaatagaggaatgacaaggctggcacatgggatgttccgctgacaaaggtcagacctgttgctgaag

SEQ ID NO: 313565 - DNA, 282 bp, Zea mays
ggctggtggattcacatggcaatcatacaatgaggatataaactccttgggtgacgaatcatttgcaacagttgggttactggaacagataaatgtgacaagggataacacagactacttatggtatacaacatacgttgatattgctcaggatgagcagtttctcagcaatgggaagaatcctatgctaactgttatgtcaactggtcatgctttgcatattttcgttaatggacactaccagggctgtgtatggaatgtagagttccaaaaggacatata

SEQ ID NO: 313566 - DNA, 283 bp, Zea mays
ggacgcgtggcgggtgtgctggatgtgagggattatccaatgtttgatgaggatggggatggtatgatagaccaggaggaaggtgcagaagaagaacttcaaattgagctaaatgaggatgaaccagcattcttgcaggggcagagcagattttcaatagacatgtcacctgtaaagatctttaagaatcctgagggttcattgagccgagcagcagccctacagactgctctcataaaggaacgtcgtgagttttgagaacaggagcagagagccatgttag

SEQ ID NO: 313567 - DNA, 267 bp, Zea mays
cggacgcgtggcgagacgcgtgggcggacgcgtgggcggacgcgtgggcggacgcgtggggcactaacagcacacgcagtacattgcttgctctacgaactttttgcaggtcccgaccgcgggccgagcagtcacttgtccgatgggctactccgcagccgcacgacatcgacgcgctggagcagatggtcgaccccgcgctgcgagggctgtacccgtccaaatccctctccggcccacccgcttcgccgatgccatcgctctatg

SEQ ID NO: 313568 - DNA, 246 bp, Zea mays
ctccctcgcggcgctcccgaggctggcccacccctaccgccgccacgtctcggcgtccgctgcggcggcgcccaatcggcgcctccgttgagggggagtacgactacgacctcttcaccatcggcgccgggagcggcggcgtccgcgcgtacggcttcgcctccgcgctctacggctcgcgcgtcgccatctgcgagatgcccttcgcaacgttcgcttcggacgagctcggtggcctcggcggca

SEQ ID NO: 313569 - DNA, 301 bp, Zea mays
tacgctgcagtacggtccgaattccgggtcaccaccgtccgggacctggcgctcaagtccaaggcggacggggagaccgtgtaccgggtgagcttcgagtggagccgagtcgcagggcatcccgggcgccgtcctggtcaggaacctgcagcacgccgagttcttcctcaagacgctcaccctcgagggcgtccccggcaagggcaccgtcgtcttcgtcgccaactcgtgggtctacccgcacaagctctactcgcaggaacgcatcttcttcgccaacgacacctatctgccgagcaaa

SEQ ID NO: 313570 - DNA, 270 bp, Zea mays
ctcatcgcggcgcccggccgtggggcgatgtcttccgcgcgccggccttctccaagccgccgtcgctcggggaggcgatcgcccggatgcgccgcaacaccgcctacttccgcgccaactacgcgctggccgtgctcgccgtcgtggcggcctcgctgctctggcaccccggcacgctcttcgtgctcctcttcctctgcgccgcctggttcttcctctacttcgcgcggcccgcgcagggcgggcagccgctcatggtcctggggatgg

SEQ ID NO: 313571 - DNA, 267 bp, Zea mays
cccacgcgtccggacggtattgagtcaaggtgcagaaataataccgtggaggaaaatctctcattatggaaagagatggttaatggaactgaaaggggcatgcagtgctgtgtacggggtaaacttgacatgcaggatcctaacaagtcactcagggatcctgtttactaccgctgtaatactgatccacaccatcgtgttggttcgaagtacaaggtctatccaacatatgactttgcgtgcccatttgtcgatgcattggagggg

SEQ ID NO: 313572 - DNA, 275 bp, Zea mays
caacgacgtgacggcgcgcgggcacaacatcttctgggaggaccccaggtacacgccggcgtgggtggagaacctcacgggcccggagctgcgcgccgcggtggcaggccgcgtccagagcctgctgtcgcggtacaagggcgacttcgtgcactgggacgtgagcaacgagatgctgcacttcggcttctacgaggaccggctgggcggcaacgcacggccgacttcttcagcacggccaggcgcgccgacccgctggccacgctcttcctcaa

SEQ ID NO: 313573 - DNA, 247 bp, Zea mays
gcggaaggtgtcaagtaattctgaggagagcatccacttttgcaagttcccttccacaactggcgagggaaatggtggttgtgcatccagacaatgacttccttgaagacatcactggcaaactaaaggagtatgtcatggaggaaatcaatgttaagaatgtcactccatgtaatgaccccttgatgtatgcttctctgcgagccgagcctaatttcagcgtgctaggaaaaagacttggaaaaga

SEQ ID NO: 313574 - DNA, 273 bp, Zea mays
ctcgagaaggaatatgaggaggctgagaaggcgcgcaagcgacgaattgccatgggtggtggtggtgagagtgatgatgaggcagcagatgacgaggatgaggaggaggcgctgccctttgcctgcttcatttgtcgggagccattcgttgatccagtggtcaccaaatgcaagcactacttttgtgaacattgcgctttgaagcaccactcgaagaacaagaagtgctacgtctgcaacaaaccgacgctgggcatcttcaacgctgcacag

SEQ ID NO: 313575 - DNA, 264 bp, Zea mays
ctgttaaaacctggttggtctcagacagtagtttcactaaaagtggacaccacatcactttcttatgtaggttaacataggaccaggacacagagatgacctggggcgatggccgcggcaaggtagtggacggcgggcgcgggctggacctgacgctggaccgcacgtccggctccgggttccagtccaagagcgagtacctgttcggcaagatcgacatgcagatcaagctggtgccaggcaactccgtggcacggtcaccac

SEQ ID NO: 313576 - DNA, 271 bp, Zea mays
gaaatcatcgcacaaacatttggtacttcacaacactcaagtccagttaaggttttcagctcaaatggcaatgcaaacaagcctgacaggagtttcactccatcgcaatggaaaagtaactacaatggcaagtatgtgaaacccaatatcatgcagctgccagatgattggcaggaaactagcacattgctggatgcattggagaagattgaatcttggatcttttctcggattgttgagtctgtgtggtggcaggcaatgacaccccaca

SEQ ID NO: 313577 - DNA, 255 bp, Zea mays
ccgacacgcatcgactcccgccgccgccgcttccgcttccgctccgtcgctcgcctcacgcctccggcgccacctccaccatggccccgaagaaggagaaggccccgccgccatcgtccaagccggccaagcccggaggcgggaagcagaagaagaagaagtggagcaagggtaagcagaaggagaaggtcaacaacgctgtgctcttcgaccaggccacctacgataagctgctctccgaggtgcccaagtaca

SEQ ID NO: 313578 - DNA, 269 bp, Zea mays
cccacgcgtccgcccacgcgtccgcccacgcgtccgcggacgcgtgggtgagatctgtgtatgtgtcgattcactagcttatatgtgtgtgatatatctctgccttgaattggcagtgaatgtgatctgctcgaaagtggtaatgtgtgtatttgccttcttggcactatcattaaattcatgatggtggacaaatggacattttgctttccttgtaagtgcatgttttgttccttgccattttgctaacagtctttgtagtggtttcc

SEQ ID NO: 313579 - DNA, 267 bp, Zea mays
cccacgcgtccgaggagaggttgggtctgggacaccatggctccgatgaagctgtacggggcggtgatgtcgtggaacgtgacgaggtgcgcaacggcgctggaggaggctggctccgactacgagatcgtgcccatcaacttcgccaccgccgagcacaagagccccgagcacctcgtccgcaacccgtttggtcaggttccagctctgcaggatggtgacttgtacctcttcgaatcacgagcaatctgcaagtacgctgctcgc

SEQ ID NO: 313580 - DNA, 279 bp, Zea mays
  unsure (1)..(279): unsure at all n locations
ggttgatgttgtttgtggacctgatgcatatagggatttgcctaggttgcgtcaggaagtcgattacggccacaatggcatgaacacacttctatcactcgaggaaacttatgctgatatcaccccagtaaggatctctgacaattcaattacggcatttgtgtcaatcatgagaggttgcaataatatgtgctcattctgcatagttcccttcactagaggtagggaaaggtctcgcccagtgtcttctattgtccgtngagttggtgagctatggaa

SEQ ID NO: 313581 - DNA, 270 bp, Zea mays
atttcgcttcggcgactggacgggttcacaattggaatggcatccagcaagagatcacgggcagggtgcagcggaaagttctttatgagatcagttctgctgttcgaatatttgggagtgccaatgatactgaagtgcgtgctactctgtgggtacaagaatatggtcgtgagcgatatgtgggactggccaaaaaccagacttctgatcagcaatggacacatttgaaaggaaagttcctccttcatgctccctttaccaaagctgtta

SEQ ID NO: 313582 - DNA, 263 bp, Zea mays
cggacgctgggcggacgcgtgggcggacgcgtgggcggacgcgtgggttcgccacaacattaaccgggcttcattttgtgacatactaccttgaagactatcttatttcgttggttaggcctgagtcagccatcccacttacccctagcagatctagttaaatttgtgatattttcgaacttgtcaattgttgggatgaatgtgagcttgatgtggaactctgttggcttttatcagatagcaaagctgtgcatgatacctgc

SEQ ID NO: 313583 - DNA, 99 bp, Zea mays
cagctcccggctcctctctctcatcggcacacccaagctcgcgcccaccttccacgtcgaggtccgagtcgtgctttgatggcgaccgacgtggctgag

SEQ ID NO: 313584 - DNA, 265 bp, Zea mays
ctaaggcttcatgtactggtgatggaattcatagggaaaagaggctgggctgctcctcgtctcaaggacgctgctttgtcagatgacaagttgcatgaaagttactttgagataattacaacaatgcggactctttaccaaacgtgcaaactggtccatggtgatttgagtgaatacaatattctatattttgagggtcacttgtatattattgatgtttcacaatccgtcgatcttgatcacccttcagctttggattttctga

SEQ ID NO: 313585 - DNA, 279 bp, Zea mays
  unsure (1)..(279): unsure at all n locations
atctacttccctcccacgtacaaatactctttcaactcagaccggtacgccggcgagggcaggcaccctaaggagaagcggaggacgccagcatggtgcgaccgcatcctctggcacggcaacggcctgagccagctgtgctacgtccgcggcgagtcccgcttctccgaccaccggccggtgtatggcatcttcctggcggaggtcggcgtcgtgcgccacgagaggaggaacaacgccgggtaattcggatctaaggtcgaggtggangagctgttg

SEQ ID NO: 313586 - DNA, 277 bp, Zea mays
cccacgcgtccgcgagatgttcctcgagaacggtggcaagctcccaggaccgccggaaccgtcggcgcatccgcattcgacgccgccgcggccacggcaccatcacagcatgtctatggatgggtccacgtctttgtttggttccgccgccgccgggacgcctgggaggtcgggcgctgatgccaagaaggctatttccgacgctaagctcgccagactcgcgcttgttgaccccaaacgtgccaagaggattttgggcaaccgccagtccactgct

SEQ ID NO: 313587 - DNA, 272 bp, Zea mays
atcgcgcacacaagatgacggtcgtcgccaccgacgcgtcctacaccaagcccttcaccacctcggtgctcatgctcgcgccgggccagaccaccgacgtcctcgtcaccatggaccagccgcccacccgctactacgtcgccgcgcgcgcctacgtctccggccagaacgtgtccttcgacaacaccaccaccacggccgtcctcgagtacgactgcggctgcgcctccgacttcggccccaagatacagccggcgttccccgcggcgctc

SEQ ID NO: 313588 - DNA, 268 bp, Zea mays
cggacgcgtgggcggacgcgtggggaaatttggaaggtaatgctggagcagttcaaggccgaggccctgcggatgcaggccctgtagatgcaggcttatgatgtctactccgagaggacgatggaggtcttgctggaagcatcagagaagctgaagatacaggcagacaaagcacagaaggacctgagcgtggtagctaccgaaattggtcaggagggacaggaatatctgatgatggcagctcggaactccccagactcgatcaagg

SEQ ID NO: 313589 - DNA, 267 bp, Zea mays
cccacgcgtccgcccacgcgtccgcccacgcgtccgcccacgcgtccgcttgagctagagcaagtttcgtcactctagaagctaaatattgaaacagaaagagttaaaaatgactaaaagaatatcttttaccattttagttacttttagctctttatgtttggatttttagctcacaaagtggctaaattagttcatgggattcaaataggcctttaatttgttgcattgacagtgaagcatgtgattttatgtaagaggtactga

SEQ ID NO: 313590 - DNA, 259 bp, Zea mays
acaagtttcgcttctcgtcgcgacgactgggcgagaccgccgccgccgccgccgcctgagttctttagaaatggctgatggtgaggacatccagcctcttgtctgcgacaatggcactggaatggtcaaggctggttttgctggcgacgatgcaccaagggctgttttccctagtattgttggccgtcctcgccacactggtgttatggtagggatgggacagaaggatgcgtatgttggcgacgaggcacagtccaag

SEQ ID NO: 313591 - DNA, 233 bp, Zea mays
gacgaggagctggtcgattactacctgaggaacaaggtggcgtccaacaagatcgaccttgacgtcataaaagacgtcgatctgtacaaaattgagccctgggatctccaagagaagtgcaagatcgggacggaggagcagaacgagtggtacttcttcagccacaaggaccagaagtaaccgacgggcaccggaccaaccgggggaccacgccggattctggaaagcgacgg

SEQ ID NO: 313592 - DNA, 169 bp, Zea mays
ctaccatcaatgtgtggcagccgaagatcgagcaggccaatgagttcagcctggcccagctctggattctgggtggctccttcggccatgacctcaacagcatcgaatcaggatggcaggttatcccagacctgtatggggacaacaacactaggctcttcacctactg

SEQ ID NO: 313593 - DNA, 311 bp, Zea mays
tccgtcgcatcccatcccactaccacccatctcgtcgtccgtcgattcgatccggttcttccaacccatgggcagtgatggcgacgaagagtagcgtgtgcaccctcggcgaggcggatcttaatgggaagaaggtgttcgtgcgcgccgacctcaacgtcccgctcgacgatgcccagaagatcaccgacgacacccgcatccgcgcctccgtccccagcatcaagttcctcctcgacaagggcggcaatgtcatcctcagcagccacctgggtcgtccaaaaggtgtcacccaaagtacagcttggagc

SEQ ID NO: 313594 - DNA, 259 bp, Zea mays
ggacgtggcgagacgcgtgtggatctgccacctcgccgtctcgcacgttccttagcccaactccccagcgcctctccgcgccgcgatccagatccaggttgttcagcatgggtctggtgaaggaaggcgtcgacatggaggagggaaccctagagatcggcatggagtacaggactgtatctggtgtggccgggcctctggttatcttggataaagtaaagggcccaaagtaccaagaaactgtacacatccgacttgg

SEQ ID NO: 313595 - DNA, 268 bp, Zea mays
agcgccgagcctgccgagcgctgaaccgccgagcgccgcctgcgtgacggcatcacgagcatcaacaacaccgcctgcggtggcaacaacgccgcgtcggctatggcgccgccaccggccaaacctgcactgcacgagccgccgcagctgcccaggagcgcactgcagcgaacaagacttcagagaagcggcagagagttccttccgcatacaaccgtttcatcaaagatgagatccagcgcatcaaggccagcaatcccgacatcac

SEQ ID NO: 313596 - DNA, 255 bp, Zea mays
cttgcttgccgccgccgtggccgatcttcgctgcctgccagccatggaagacttttgtgcggtgtgcgcagatacgctggagtgggtggcctatgggtcgtgcgggcacccgacgtgtgctccacatgcatcgtccgcctccgtttcgtgatgggcgacaacaagtgttgcatctgcaagaccgtctgccccttcgtctttgtcactaaggccatgggtaaatacactagagtgatcactgatttctctgtgtta

SEQ ID NO: 313597 - DNA, 285 bp, Zea mays
gcaaagcttgagcgctgggcggactgtgtgcgggactacgaggtgcttcgcaaggatcttcctggtgacactgaggttgcagagtccttgttccatgcccaagttgcattaaagacagcccgtggagaggtggtatctaatatgaagtttggaggggtagttgaagaaattatcagcttagagcaactccaagatgttatccgttcacctggtgagtttctcctctacatgcacctagcctgttgtaggcatttcacctccttcttggttcttgttgtgctaaga

SEQ ID NO: 313598 - DNA, 269 bp, Zea mays
tgggatccttactttaaggattgcatcggggccattgacggcacacatgttcgagcctctgttcctaaggaaatggaggctacattccgtggtaggaagagtcaccctactcaaaatgtaatggcagcagtagattttgatctaaggttcacttttgtaatggccggatgggaggggacagcccatgatgccctcattttaagagatgctttagaacgagaaaatggtcttcgtgtccctgaaggcaaattctacctagttgatgcggg

SEQ ID NO: 313599 - DNA, 281 bp, Zea mays
cccacgcgtccgcccacgcgtccgcccacgcgtccgcccacgcgtccgatttgtaaatgtggatagtgaaattgatttagagaatattgtcagagctgcaagagctactggaaagaaagtgcctgttttacttagaataaatccagatgtggatccacaggtacatccatatgttgccacgggaaataaaacatccaaattcgggatccgcaatgagaaattgcaatggtttttgaactctatcaagtcatactcgaatgaaatcaaactcgttggtgttc

SEQ ID NO: 313600 - DNA, 260 bp, Zea mays
agacgctgtgcgggcaggcgtacggcgcgcacaagcacggcatgctgggggtgtacctgcagcggtcgacggtgctgctgatggccaccgccgtgccgctggccgtggtgtacgccttctcggcgcgcatcctggtgctcctgggcgagtcggagcgcatctccagggccgccgccgtgttcgtgtacgggctcatcccgcagatcttcgcgtactggccaacttccccatccagaagttcctgcaggcgcagagcatcg

SEQ ID NO: 313601 - DNA, 282 bp, Zea mays
cttgggatttgcagatatggaaccctagatgaagctttggatctatgcgagaaaatgataaaacacaactgtttacctgatatccatacctacaccattcttctcagtggtttttgcaggaaaggtaagattttgcctgcgttagtcatcttgcagatgatgttggagaaaggagtagtccctgatactgttgcgtatacctgcttgctgaatgggttgatcaatgaaggccaagtgaaagctgcttcttacgttttccatgagatcatatgcaaggaaggc

SEQ ID NO: 313602 - DNA, 253 bp, Zea mays
cccacgcgtccgcccacgcgtccggttggttgatggtttgttcatgcaggaagttgaggaatgtttaattaaagtagagcagtcacctcgcgaaagcatatcaaatgctcttcgcccagcaactgaagctctggtcaagaaagagctgctgggccatgctgattcaaatgttagacttgctgtggcatcatgcatatctgagatcacacggatcacggcgcttgatgctccatatgatgatggtgcaatgagg

SEQ ID NO: 313603 - DNA, 268 bp, Zea mays
cggacgcgtggcggacgcgtgggcggacgcgtgggcgcaggtgctcgaggtggagatcgaggacatgggcgcgcgcctcaacgcgtatacctcccgcgagcagaccaccttttttgccgacgtgcaggcgcgccacgttccggcggcactcgacgtcctcagcgacatcctacagcacccgcgattccccgaaagggctatccagcgggagcgcggcgtcatcctccgtgagatggaggaagtgcaaggtatgatggaagaggtgata

SEQ ID NO: 313604 - DNA, 278 bp, Zea mays
ctagtatgttccaccatcagcaggagctcctacaggcagaagctgcggcggcagatcgggagagcagcatgtccaacaacctcacctcctccgcgcccggcggccccaacgcggcgccagctgctgctgcggccaccggcaataataacaagcgaaagcgcagcctcccaggcaaccccgaccccgaggcggaggtcgtggctctgtctccggcgacgctgatggcgacgaaccgcttcttgtgcgagatctgcgggaaagggttccagcgggaccag

SEQ ID NO: 313605 - DNA, 278 bp, Zea mays
cccacgcgtccgaggagatccatgcacatgttttaaggtgtggtattgaatatgaaggttatttgcccaatgcccttatcgacttgtatgtaaaatgtggccagacaggctatgcttgggcacagttctgtgcacatggtgcaaaggatgttgtgtcgtggaatatcatgattgcaggttttgttgctcatggtcatggggataccgctttatcgttcttcaatcaaatggtgaaaataggagaatgcccagatgaagttacatttgttgctctgcta

SEQ ID NO: 313606 - DNA, 220 bp, Zea mays
cacaagcgaggcatctcgtggaggagcgagagggaacacatcttcgggaagcaggtgttcccgaggaatttccagaaaggagctctgatcggaggaggcacgcttgatccaagaatacctctgagtgagcaagaagacctgatcgtgtggatgcggaccgcggctctgccgacgttccggaagctgtacggcaggatcgaggcggacctccgcgccggcg

SEQ ID NO: 313607 - DNA, 212 bp, Zea mays
cagtgctgacaagcgacgcaaaccgaggaagcagagggtgggctttgatgatgttcagggcatagatgaagccaaggaagagcttgttgagatagtgagctgtctgcatggttcactgaattataagaagcttggagcaaaattgcccaggggtgttctgcttgttggccctcctggaactgggaagactctgctagcaagggcagttgcag

SEQ ID NO: 313608 - DNA, 256 bp, Zea mays
ttcgtgttctccgaaatgttgtcaagggagattcatatttttctggcttggcaatctccagtatcgaatcatggtagcaacgtgatggctatgtgaaatcagtggctgacctgattgagaaagaggtatctgccttttccagtcctgaagaggtagtgatattcttcagtgcacatagtgtgccacttagctatgtgcaggatgctggagatccttacagagatcagatggatgattgtatttctttgatcgtggg

SEQ ID NO: 313609 - DNA, 264 bp, Zea mays
cggacgcgtggcggacgcgtgggcggacgcgtgggaaactacatgtcagccggtcagatatctgttagacttagcagcagaattgatgatatgatcaatagcctgcatcgagaaattaaatgtcataaattcagctgctaagtcaaactacatgtcagccggtcagatatctgttcctattgtttttagaggaccaaatggagctgctgctggagttggtgctcaacactcacagtgttatgcagtttggtttgcacatgttcc

SEQ ID NO: 313610 - DNA, 253 bp, Zea mays
cggacgcgtggtgagttccagttccttaaacttatttgacattgctaccgactgcaatacattaatgatggaatgaagggaggcaaacagatttgagtaactgtatttgttggcatctctttcaatcatattaagtggcatgttaccaacaaagttagagttaagttattatcctcacctgagcaatcaaggcactccattccactgtgttggacttagcttcgagactctcctggataggcttcagcctctc

SEQ ID NO: 313611 - DNA, 263 bp, Zea mays
agctgctgctgtacctgggtatctgcgtcgtctggtgccctctggtgtacctctatatggatgtcgtcgtctaataaacatctgtggtttgtgtgtcatgaatcgtggttgtggcttcgttggtttaatggacctgttgtgtcctctgtgtgttgtacccaaaactcttctgcagcagtatggctcgaatccttatgaagtttgatgtttgaacttaaacgaacgcaggggtttgtgtaaaaggtcagtcgctctaaaggcta

SEQ ID NO: 313612 - DNA, 238 bp, Zea mays
caaaatgactcctcatgataagcaagtcatgatgttttcagcaacgctcagcaaggagatccgtcctgtatgcaagaaatttatgcaagatccgatggaaatatatgttgatgatgaggcaaagttgaccctccatggtcttgtacagcactataatataacttaagcgaaggctagagaagaaaccgggatactggaaatgaatcctctttggaaagcttcttggaatttcaaccca

SEQ ID NO: 313613 - DNA, 257 bp, Zea mays
gttggcggcggtgccagcgatgatcctcatagcagagtcgatgctcttgcagttcaagtccggcaacttctcttgagctattgcacgcacttgatccactgttacctttcccaccttctgccgttgtggctcttttgaacctttttcgacacctgcagccttgagtagcaggactgaagctggaggcgtccgtgctggtgctcagccaacgcaaaccctcgcctttctgctgcttcctgcggagcagagcagcagcg

SEQ ID NO: 313614 - DNA, 276 bp, Zea mays
ctccactaggatccccagggtgcagcaactgctccaggacttcttcaacggcaaggagctgtgcaagaacatcaaccccgatgaggctgtcgcctatggtgctgctgtccaggctgccatcctgagcggtgagggcaatgagaaggtgcaggacctgcttctgctggacgtcacccctctgtccctgggtctggagactgctggaggagttatgacagtgctgatcccgaggaacaccaccatccccaccaagaaggagcaggtattctccaccta

SEQ ID NO: 313615 - DNA, 262 bp, Zea mays
tgcagatgttgtcgacagatatgcatagaagagaacagaggagaactaatccgggcacagagtaaggccttgttcgtttgagtcggatcacacccggaatcgttccagctaatcaaagtttatataaattagagaaaaaatccggttaggaatcgttccgacccatcaatccagcacaaacgaacagagcctaaagaattctccactctcttgacttgacgaggctatgtaactagatgccatcagaggagaactgaagact

SEQ ID NO: 313616 - DNA, 161 bp, Zea mays
cccacgcgtccgcccacacagaaaaccctagccgccgccaccgaagcggcctcccaggtaagcaagagcgtccaccccggcgccgccatgaagcgcaatccccgcgtcacgaactctcgacggaaatgacgctaagggcacgtcacggcaccgtcctccgt

SEQ ID NO: 313617 - DNA, 258 bp, Zea mays
cccacgcgtccgcccacgcgtccgcggacgcgtggtgcggagccgaagaaatgactcgaatgtaaatcactctgacaacaaaaggctgtttacgcttgacattgagcgtatagtccggggcgaggactcccggactacactgatgataaagaatatcccaaacaagtacacatcaaagatgcttctggcagctattgatgaaagtcaccggggaacttatgattttatctacctgccaattgactttaagacatttca

SEQ ID NO: 313618 - DNA, 267 bp, Zea mays
cccaccgtccgggagattgtcgtgccggaggacgaccacggcctgtttgccatcgacattcttgatccttcctggtttgtagaacttctccatctgtctatggtgtatcacttccatgatatgattgatatgctcataaactgtggatatgagaaagggaccacactatttggatatggttatgattttcgccaaagcaacaggatagacaaagcgatggctggtttgagagcaaaacttgagacagctcataagacctctggaggg

SEQ ID NO: 313619 - DNA, 181 bp, Zea mays
gtatattcagggattattcaacctagcaaaggacccttcagcagatgttcggaaactggtttgttcagcctgggttcagctcattgaagttcgcccatctattttggagtcacatcttaaaaatgttactgaattgattctgcaagctaataaagatccagatgatgaagtcgctctggaa

SEQ ID NO: 313620 - DNA, 292 bp, Zea mays
agcacactccacaggtatttgtcatcgactatggccttgcgaagaagtatcgagatctccaaactcataagcacataccatacagggaaaacaaaaatctcacaggaacagcacgatatgccagtgtaaatacccatcttggagttggtgagtttgtggcttgtaaatacagatgtgctactgtatcatcagtatctgagcattaaatgaatctataggacaaagggcacagggaagacaaatattttcaacaaattaaaaaactctttaaaaacctgtaacgctatacttg

SEQ ID NO: 313621 - DNA, 173 bp, Zea mays
gagccagcaacattgtggctcttgctgggcgtttgccgcagtggcgtctatcgaaggtgtgcacaagataaagacaggtcgtctcgtgtcactgtcggagcaagagattgtggattgcgaccgtggggggaataaccatggctgccatggtggtcactcaagttctgccatgg

SEQ ID NO: 313622 - DNA, 255 bp, Zea mays
ggcagccttgcgagtggctaaggaggtgcttgggatgcaggaggagtggaggaaggaggcaattagggagatgaacagaactgggcgattctcgcgctcattggccaattcggctactgactggccgtgcctgttgctggatgttctgtcacgtgcggcagaggaggaattcttccagccaaagctgatcctgaacaatgtggatgtgttgaggaaggcaatttgtgaggatgagacgatggtgcctgcagcgat

SEQ ID NO: 313623 - DNA, 250 bp, Zea mays
cggacgctggcgcaggagcaggtcaaccgccccatcactagaagcttcggcgctcaactcgtcaagaaagcgcaggcgaaggccgcaatcaagaatgccgcaatcctgcctgcgaggcatgcgccgaggcaggagaggaaggctcctgtcaagcagcacccgccgccggaggatatcatagtactcagctccgattctgaacagagcagggcgcagtccgagagcagcgctagctccgtccgctccagga

SEQ ID NO: 313624 - DNA, 268 bp, Zea mays
gacaccatggctccgatgaagctgtacggggcggtgatgtcgtggaacgtgacgaggtgcgcaacggcgctggaggaggctggctccgactacgagatcgtgcccatcaacttcgccaccgccgagcacaagagccccgagcacctcgtccgcaacccgtttggtcaggttccagctctgcaggatggtgacttgtacctcttcgaatcacgcgcaatctgcaagtacgctgctcgcaaaaacaagccagagctgttgagggaaggaa

SEQ ID NO: 313625 - DNA, 270 bp, Zea mays
cgcaagtccaccggacgcaaggccccgcgcaagcagctcgccaccaaggcggcgaggaagtctgcgccgacgaccggcggcgtgaagaagccccacaggtacaggcccgggacggtggctctgcgcgagatccgcaagtaccagaagagcacggagctgctgatccggaagttgcccttccagcgcctggtccgtgagatcgctcaggacttcaagacggatctgcggttccagagccacgccgtcctggccctccaggaagccgccgag

SEQ ID NO: 313626 - DNA, 274 bp, Zea mays
ggaagaaggaggcccagaacccgccccagatgtcagcattcgaccttctatcgacggtggcagggaagctgcttgatgagggggtgggctcgctggggaacatgagcgctggtgccccagctttgactgcatgcgcgaaggatgtccgtgtgaagaaggagcagtgtgacgaggaaatgaagcagttcaagcatgaggtgacagatcaggatagctgcaatgagagtgcaattctcccgcacattgtgttccagcgggcggtgaataatgctcg

SEQ ID NO: 313627 - DNA, 274 bp, Zea mays
ggcggaaatgaagagaaggctcgggtggttcagaccatactgttcgttgctggcataaacaccctgttccagacgttattcgggacgcgccttccggtcgtgatgggcggctcgtacgtcttcgtcgggccgaccatctcgatcgtcttggctggacggtacagcaacgaagcagaccctcacgagggcgctctcctcgttgcgtcgacgattcagatcatacttgggttcagtggcctctggcgcaacgttgtcaaattactgagtccgctgg

SEQ ID NO: 313628 - DNA, 262 bp, Zea mays
gcctttccatttttttgaggcatacagaaagtttctagtggttgacatagttgcagaggatgacgatgatcttcgtctttggaagggatggatcgagtctcgtttgagacaacttactttaaagattgagcgggatactaaaggaattttgcagtgccatccgtacccatgcgagtattcagatcccacaatagagtgtgcacattgtgccttctacatgggcttatcaaggaaagaggggttgaaaaaacgtggtcaacag

SEQ ID NO: 313629 - DNA, 250 bp, Zea mays
gctgtagtttgtattagggcggatcaaagaaagttttacctggccggtggagcttccttggtcatcctggcgcaccttgcgccagctgacggaatcagctccatctctggccgatccccatatccactaagatcccttccccagtcccaagccttgctgcgatcaccgctgcgcagtcctaggcgcccacgacatatcaccttttaacttatatacagtaagatcacgagtttgttgaatttgatatatg

SEQ ID NO: 313630 - DNA, 266 bp, Zea mays
acaagttcctgctgaaggtgatcgtgaactcgggcatcggcgaggagacgtacggcccgcgcaacatgatcgagggcggggaggcccggccggaccgcctccgcgagggcatggaggagatggacgagaccttccacgccgtcctcgacgagctcttcgcccagtcggcggcgcccggcggcgtcggcatccgccccgccgacgtcgacgtgctcgtcgtcaacgtgtccatgttctcgccggcgccgtccctgtcggcgcgcgtc

SEQ ID NO: 313631 - DNA, 112 bp, Zea mays
cacacgcgtccgcggatcgtgggcagtacgtgtgttgggttctcctccccctcaggttcgtgttcgggctcgtgaggttctaccgggttcgatttcgtgggtgggcggatcc

SEQ ID NO: 313632 - DNA, 260 bp, Zea mays
cgtgcgttatcctttgagcagtttgggcgctgagcaagtccatctccgcgctaggtgcggcgacggcgagcagcagcagcttctggggcaaccggctcgccacctactccgcgccgcagcctggggtaaggtttatggtcaagatatgcccaattgaaatgagacttaagagatgggagcgaaagaagtgtaaaccaaacagtcttcctgtgctgcacaagatgcatgttaggatcggggacacggtacaggttattgca

SEQ ID NO: 313633 - DNA, 255 bp, Zea mays
atcagatggggacttcggtgcaggtgacgcctctcagcggggcgtacggggagggccccctgtgctacctactcgccgtcgatggtttccgcttcctcctcgactgcggatggaccgacctctgcgatacctcgcaacttcaacccctcgcaaaggttgcaccaactgtagatgctgttcttttgtcacatcctgacatgatgcatctaggagctttgccttacgctatgaaacaccttgggctgtctgcaccag

SEQ ID NO: 313634 - DNA, 250 bp, Zea mays
gagatacacaaggaactacccggcctaaagaagtagagtctttgaaaggctcaagagtgaaatgtgtggcatgtgggccatggcacacagctgccattgtggaagtgatcagtgatttcaagagcaattcaccaagaagcaagctgttcacatggggcgatgcagatcgggggaagctgggtcatgctgacaaaaagatgaagcttataccaacatgtgttgattcactcacagactatgattttattca

SEQ ID NO: 313635 - DNA, 278 bp, Zea mays
gtgcattattaaatcgcttgatgattgagctgagcaaacttgattgtgatgtacttgtgggacacaatatttcagggttcgacttggatgtgcttctacaccgttgctcagacatgcaaagtgccaagcagcatgtggtccaagattggtcggctcaggcgatcattaatgcccaggcttaccagaggaagcacactctatggttctggagcaagtccaggaattatgtcctgtgttgctggccgtcgtctctgtgacacctatttatgctctcgtga

SEQ ID NO: 313636 - DNA, 262 bp, Zea mays
gctaccgacaagaacaacaccgtccgcggacggtgggcgagctggtgatgatttgattgcgcttttgacagaaaggaaaaatggaggacaatctgttggaccttttttccatcagctaagagatcctctgaggctttatctgagcatttcatcaaagaaggtctgactagccttgttgagtacaatgaaaagaagatgtttgaagttaaacttaaagagataaagtcaacactgaccactatgatcaatgatgaggctgcaa

SEQ ID NO: 313637 - DNA, 265 bp, Zea mays
agcttgttcaggcgaacccagctatttttactggatctgaggttcgtgtagaaaatgcagagtttcctctagcacacatcgcaatagctttcaaaggttcatcatggactgaccctagctccattccccttatggtgatccaaagcatattgggatcctggaacaggagcattggggttgggaactgctcagggtcttctttagctcgtggtatcagcaatgctaatttagctgagagcctgatggcgttcaatactaactatcg

SEQ ID NO: 313638 - DNA, 259 bp, Zea mays
cacgccgccgccgccagagggcctgcccccgctgccgagcccgacgacaagatgggcgaggagtggtccctcgccgccttctccggatggatgcagctcggcgacacgcacgccatgctcggccgcatggacgactccatcgcctgctacggcaaggggctccagatccagatggccgcgctcggcgaccgcgatccccgcgtcgccgagacctgcaggtacctggcggaacgcacgtgcaagctctgcagttcgacga

SEQ ID NO: 313639 - DNA, 261 bp, Zea mays
cccacgcgtccgcatcaccatgtcttttgcgccaagggattcacatgaggcacaggtacagtttgcattagagcggggggtaccagccatgattggagtgatggggactgagagaatcccatatccggctagagcatttgacatggcacactgctcgagatgtttgatcccatggaataagcttgatggtgtctatctaattgaagtagacagggttcttaggcctgggggctactggatcctctctgggcctccaatcca

SEQ ID NO: 313640 - DNA, 258 bp, Zea mays
tgacattgtttctgagaaaccgatggtgcagaacaatcttaaccaaggggtggcagaaaagttgactagggatagaaatgacattgttcctgagaaacaggtggtgcagagcaatcttaaccaatgtaataatgaagatatcccgctttctggaacagaaattgagatggagtcttacgaacaagaatcatctgaaagcagtgatgaagagtggtccacacttagcacaccacgaaaaacaaaattacaaggcaacga

SEQ ID NO: 313641 - DNA, 254 bp, Zea mays
cccacgcgtccgattggcttgtcagtggcacgcattatgctagaactagcgaggagtggctaaaacgtatggacaagagcatcacttcagtaaggctgatcttcgaggaaacttatgggaaggaatcgactaccaaatggatagcttattggcggacgttcttcatctcggtagctgaactttttggatacaacaatggagatgaatggatggttgcccattacttgttccgaaagaagtagaggctactgctt

SEQ ID NO: 313642 - DNA, 256 bp, Zea mays
ctgcgagtgttatccataaggtctatgcattctgggctccgaaaataattgggggattaaatgcacctacgccagttggtgaactggggatgagtcaaatgactcaggcaataaatttaattgatgtctcgtacgagcagattgacagggacatgctcatgagtggattcatcgaacccattcctgatctttcacctgttataccatccgtggaagaaataccttccattgatccagaagtatctccatatgaaac

SEQ ID NO: 313643 - DNA, 257 bp, Zea mays
gttgcaagaaacattttgaaaaatccgaaactccttcctggaggtggtgatacagtcagctctgtagcaccacctccaggaaggagttcgttcagttcgaaggcgtggaaaagtggccctatgaagctgctgctttagcatttgaggcaattccaaggactttggcccaaacttgcggtttgaatgttattaggataatgacacaacttcagggaaagcatgctaatggtgaaaatgcgtgggttggcattgatgga

SEQ ID NO: 313644 - DNA, 258 bp, Zea mays
cacacagaagcggcggcggcggacaaacgcaggcgaaggcgagggtgtgagggaaggagcaccagccatggtgcacgtcaacttctaccgcaactatggtaagacgttcaagaaaccaaggcgtccttatgagaaggagcgtcttgatgctgaactgaagctggtcggtgagtatgggctgaggtgcaagcgtgagctttggagggtccagtatgcactgagcaggatccgtaatgctgcaaggcacttgctcaccct

SEQ ID NO: 313645 - DNA, 268 bp, Zea mays
gcagggcctcttgaggactcctgaaactgttgcgaaatttcagagtgttcctgtgcaagctgggcaaacacccccactcttgcagtactttggcacattgctaactcgagggaagctcaatgcctttgagtctcttgagctatctcgacttgttgtcaatcagaacaaaaagaaccttctggaaaactggttggctgaagacaaactggagtgcagtgaagaactaggagatcttgtcaagactgtggacaatgatcttgcactgaaa

SEQ ID NO: 313646 - DNA, 257 bp, Zea mays
acaaggaggccgtccgctcctacttcaactccacggggttcgatcggtggcgcaagatctacgggtcggcgacggatggcgtgaaccgcgtgcagcttgacatccgcgatgtccacgcgcagacggtggctgctgcgctggccatgctccgcgactccccgctggagctgtcgggcgccaccgtgtgcgacgccggctgcgggacggggtcgctggccatcccgctcgcggcggcgggcgccgacgtcctggcctcc

SEQ ID NO: 313647 - DNA, 276 bp, Zea mays
ctaatggaactagaagatgaagatcttgcttcacaaatgttaaaacaccaggaacgagcaattgacttttggcaaaagcattgggacaaaccaattcctctaaagctgaaacgccttgcacgtgaccatgagagatttctctgggcactgagtatagtacagtctcgttctgtcaacttgaagttgagaatgggagccttcatccaagatgcaaatgtgctagctccttatgctgatatgttgaaccactcacccaatgctaattgcttcctgcat

SEQ ID NO: 313648 - DNA, 259 bp, Zea mays
ctcacgcgtccgcggacggtgggcgagcgtggcgagacgcgtgggaagctcctgtcctgcaacagcaggcagacgtagtcggtgtcggatcgcgctggagaccagacctccgcggagtcctggggcacggggcgtgcggtgtcccgtatcccccgcgttcctggcggtggtacccaccgcgccggccagggagccttcggcaacatgtgccgtggcggacgcatgtttgcgcccaccaagatctggcgccgctggcacc

SEQ ID NO: 313649 - DNA, 267 bp, Zea mays
  unsure (1)..(267): unsure at all n locations
ctcgagctctactccatcccctcgatctcgaagcgcacagcagcagtcaggcggccatggacgcgagcgcaccgngagccggcgggaaggcgaagaagggcgcggccgggcgcaaggccggcgggccgaggaagaagtcggtgacgaggtccgtcaaggccgggctgcagtttcccgtcggccgcatcgggcggtacctgaagaagggccggtacgcgcagcagtcggcacgggcgcccccgtctacctggccgccgtcctcgagta

SEQ ID NO: 313650 - DNA, 264 bp, Zea mays
aagagaaaagagacctgatccatcagttcttggggttgaggtttggggaaggaagttttcaaacccaatcggtcttgctgctggctttgataaaaatgctgaggcagttgaaggtctcttaggcctgggatttggctttgtggaagttggctctgtgacacctcttcctcaagagggaaatcccaagcctcgaattttcagattaaaggagcatggtgctgtaatcaaccgatgcggattcaacagtgaaggaattgtagttgt

SEQ ID NO: 313651 - DNA, 258 bp, Zea mays
cagatccaaatactaacagtgtgcatttgtagtcaatattttatatggttgtctgcatgcattctaggatgatgcactgaagtactatgtcaatactggttataatgctgtaggtatatgttggtgggcttgaccccaatgttagtgaagatgaactgaggaaagcatttgcaaaatatggtgatcttgcctctgtcaaaattccttttgggaagcaatgtgggtttgttcaatttgtaaacagagttgatgctgaag

SEQ ID NO: 313652 - DNA, 255 bp, Zea mays
aacaagcttattagaattttgaagtatgggtcattgctctttgcgttgtcaagtgattcagctaatgcctttgaggatgacacgtccagatttaggccaatcgaagaggcagtacggagtaatggctcaagcatctcttttgttgggctaggatggcgccttagcaatgaacataaggggaaatgcttcaaaatcttctcagcaacagaaacattagctgaatcacttgacaacgccaagagccatgacccatac

SEQ ID NO: 313653 - DNA, 259 bp, Zea mays
acgacttctgccacaaccatccggagtggatagcggacgggagcagtggggatgttggagcaaactcctactatctgtatagggaggacttcagattgctgaaggaaatgggtatggacgcctacaggttctccatctcttggcccagaatattgccaaaggggacactcgagggaggcattaaccataaaggcatcgagtactacaaaaagctgatcaacttgttgaaagagaacggcatagaaccatatgtgacact

SEQ ID NO: 313654 - DNA, 264 bp, Zea mays
cggctcagtccgccgcgtcttcgatttccttgaggaatgggggcttatcaactacggtgctttgccatcggggtcaaagcaagctcaaagagaagagggaagaggctgcacaacagtcctcgttgccttttggggcaattgcacccaggaagctctgtaccggttgccgcaccgtgtgtgggcttgcttactacgcctgcgacaaggcagatataagtctttgtgctagatgctatgtaaataataactaccggccgggcctgt

SEQ ID NO: 313655 - DNA, 263 bp, Zea mays
ggacgcgtggcggacgcgtgggcggacgcgtgggcggacgcgtgggttaaatctgagcaacaatgaacatgaaaggctcaattcctcgttctctccagaaatttccaaagggttcattttcagggaatgctggactgtgtgggctacctctagttgaatgctcacatccttcaccagcacactcacctgaatcatctccaccgcctcaatctccacctttgacacatcatgataagaaactaggcacgggtttcatagttgca

SEQ ID NO: 313656 - DNA, 281 bp, Zea mays
attgatggtcaaggagctatttggtggggctggttccacaaccacacattgaattatactagaccacatcttgtggagttgatgtattctaccaatgtcgtcatatctaatctaaccttcaagaactcgccgttttggaatatccaccctgtgtactgcaggttggttttctagatagccacttgctttctgttcaaacataaaaaaaaattcattcacaatacaaatatattatctggagtgcttttgctacataaacagccaagtgcttgtccggcatg

SEQ ID NO: 313657 - DNA, 259 bp, Zea mays
cggacgcgtggcgagacgcgtggggtactggtggcacgacaagtatcgaccaagaaagagtaagtacttcaatcgggtgcacactggatatgaatggaataaatacaaccagactcattatgaccatgataacccaccaccgaaaattgtccaaggctacaagttcaatatattttaccctgatcttgtggacaaatcgaaagcaccaacgtacagtatagagaaagatggaagcgccggagagacttgcttcataaga

SEQ ID NO: 313658 - DNA, 262 bp, Zea mays
gtgacctgaagatatgcgaagagtttttgaaggaaaggagagaatatatggttttacttgaactctataaaagcaatgaaatgcaccgtgatgctctccaactactcaatcaattagttgaagaatcaaaatctgaaatggagaatacatattttaataaaaaatttaactctcaaatgatacttgaatatctcagggtattatttctatgtccttttgctcgcatttagctcaaatgatcctcaaatatcttacatgcctt

SEQ ID NO: 313659 - DNA, 257 bp, Zea mays
gaaacgtgaggggatgtctgatattaatgagctgtacagtgagaaggaaaggctgagggatcttcggcactgggtctcatataggggacagacattatcacgtactgtgagaggaatgatgtactattatgaagctctcaagatgctgacctttttggattctgcctctgaacatgatttaaagactggatcaagggagttagctactatgggttcctcaagaattggatcctcaaggcatgacggagttgctggtg

SEQ ID NO: 313660 - DNA, 258 bp, Zea mays
ctcatcggctgcggttccttcggcgacgtctataaagggtttgacaaggaactgaataaagaggttgctataaaagtcattgatttggaagaagctgaggatgacattgaagacatccaaaaggagatatctgttttgtcacaatgccggtgcccatatattaccgattattacggctcttatcttcaccagactaaattgtggatagtaatggaatacatggctggtggttctgttgctgatcttcttcaagctggt

SEQ ID NO: 313661 - DNA, 259 bp, Zea mays
atcacagcagtgggatttgatatggactacactctggcacagtacaagcctgaaaccttcgagtcccttgcttactatggtacaatagagaagcttgtgaaggatctccgctaccctgaagagctgttgacttgggaatttgattggaaatatatggtcagaggactagttctcgataagaagagaggaaatatcttgaagatggatcgacacaagtatgtaaaagttgcataccatggttttaaggaactatcgaaag

SEQ ID NO: 313662 - DNA, 275 bp, Zea mays
cagacgcgtagcgcgacctcacggaggcggccgacctcttcaacccgcagctggtgcagatgctctccgaactcaacgacgacatcggcgccgacgtcttcatcgccgccaacaccaaccgggtcagcttcgacttcatgttcaacccgcaagactacgggttcgtgacgtccaaagtggcatgctgcgggcatggcccctacaacgggatcgggctatgcacgccggcgtccgacgtgtgcccaatcgggacgtgtacgcgtactgtgacgcgt

SEQ ID NO: 313663 - DNA, 268 bp, Zea mays
gaacgctgctgtggccacaatcaagaccaagcgcaccatccagttcgtggactggtgcccgactggcttcaagtgcggaatcaactaccagcctcccagcgtcgtccccggcggtgacctggccaaggtgcagcgtgccgtgtgcatgatctccaactccaccagtgttgtggaggtcttctcccgcattgaccacaagttcgacctcatgtacgccaagcgcgccttcgtgcactggtacgtcggtgagggtatggaggagggcgag

SEQ ID NO: 313664 - DNA, 267 bp, Zea mays
atgcaagacactttacataggccagaagcagaagggcgtgttccagcactcaagcttccttgcagggggagccacatctgctgcaggaagactggttgtggaggatggaattctcaaggctgtgtggcctcatagcgggcattaccggccgacggagcagaacttccaggagttcatgaacttcctcaaggagaggaatgtagatcttaacaacgtggtgttgagcccatcagaaggtgaagaagatggcgacttcagcctggcgag

SEQ ID NO: 313665 - DNA, 259 bp, Zea mays
gggacctgggcaacgagagaagtgacaactcaggttctctttacgggttgcttcttggcaagaacaacttggtggttgatgacaacaaggtaaatcttagagtggctgctggcacgttaaagaaatttggagcaaaggtggagtgcgtggagagtggaaaagatgccctcgccctcctacaggtcccatataagtttcatctttgtctcatggacattcagatgcccgaaatggatgggtttgaggctaccaagcaaat

SEQ ID NO: 313666 - DNA, 270 bp, Zea mays
accgagtgccgatcgcgcggttggggaggatttggtccgcaacgagaggaagaggatattggagcttgtccagaggcgagggatgcagcgcgggtcatacccgaagtttgatgttgcactgaaggaccagaaggtggttgataaattcaacatgccatctaattgcgatgtatcacagcttatcgttgatcttgtaacacatattggacttgaggcagaacaacatggtggtggctcagacgttttaatgcgtgcatgggaaagtccagc

SEQ ID NO: 313667 - DNA, 275 bp, Zea mays
atggacttgagcaacaactacttgcacgattcaattccttaccagctgccatcaaaccttacctatctgaacctggcgaaaaacaacttctctggtaatcttccgtactccatatccaacctagtctcgcttgagtacctcaacctcagccacaactcgttgtttcaggaaatcggagaactgtttggaagcctcagttcactctcggaactagacatatctttcaacaacctcacggggaatcttccttcctcaatgggctttctgtcaaaact

SEQ ID NO: 313668 - DNA, 275 bp, Zea mays
  unsure (1)..(275): unsure at all n locations
gcacaccaaggagagtacgtggaggagcagccatggcttcatcggtggccgccgcggcgagcacattcctgggcacccgcctggcggacccggcgccacagaacgggcgcatcgtggcccggttcgggttcgggttgggcggcaaggcgaagctngctccgaagaaggtggcgaagacatcgacctcctctgaccggccgctgtggttccccggcgccgtggcgccgactacctggacggctcgctggtcggcgactacgggttcgacccgttcg

SEQ ID NO: 313669 - DNA, 276 bp, Zea mays
ctccagttagatcctgatgatcttagtgaacaattgaagcggcaaggtgcttcgataccacttgttagaccaggaaaaagtacagctgcttatattaaaacagttcttagtcgcatatctgtcttgggatctgcatttctggctgtgctagctgctggaccatctttagttgaacagacaagtcacttgacagcattccgtggatttgctgggacttcagtgcttatccttgttggatgtgcaacagacacagctcgaaaagttcaagcagaaata

SEQ ID NO: 313670 - DNA, 266 bp, Zea mays
ggccgggctgcagttccccgtcggccggatcgggcgctacctcaagcagggccggtacgcgcagccgtgggcaccggcgcccccgtctatctcgccgccgtgcttgagtacctcgccgccgaggtgctggagctggccggcaacgcggcgaaggacaacaagaagacgcgcatcgtcccgcgccacgtgctcctggcgatccgcaacgacgttgagctcggcaagctgctggctggcgtcaccatcgcgcacggcggtgtcctccc

SEQ ID NO: 313671 - DNA, 269 bp, Zea mays
aatttggggtcacaagggttcacatggaagaagatgctggcaagctgcttcattctgaatccagcagctactctcaggttgacctaaacagggctggcgtacctttgctcgaaattgtctcagagccagacatgagaacagggatagaagctgctgagtatggtgctgaactgcaaaggattgttaggtacctgggagtgagtaatggtaatatgcaagaaggttcccttcgttgtgatgtgaacgtttctgttcgaccagttggacaa

SEQ ID NO: 313672 - DNA, 258 bp, Zea mays
gtcagtttgtatggctcgacagcctcgacttcaagtgttagcagctagcagaaacaaaatatcaactttgaagggatttccacattttccttctctagagcatttgcgtgttgaggagaatccactacttgagatgccacacttggaagctgcttctatcctacttataggtcctactttgaagaagttcaatgaccgagatctgaaccccaacgaggctgaggtagctaagcaatatcctgctcatacagctatttg

SEQ ID NO: 313673 - DNA, 266 bp, Zea mays
cttcaagaaagctccaagatcaaccagtcattgtttgcgttgtccaatgtcatttcagctctaaataagaatgagcatcggataccatatagacagagtaaactgactcggttacttagagattctctaggaggcggtagccgcactgtgatgatagcttgcctgaatcctgcagaataccaggagtcggccaacacagtaagtctggcggctcgttcatgccatattgagaatttcaccagttcaagcaaacaagaaactcccaa

SEQ ID NO: 313674 - DNA, 286 bp, Zea mays
aaagagagtggctcttgcgctctgcagtccagttcttgaatccagagctgcgattcgtgctcgcctgacgccgatgggccggagcctgagcccgctgctacggcaggagctggacaacctggacaaggacgctgacagccgccgcgccgccatgaaggcgctcaagtcgtacgccagacacctggactccaagtccatcccgcacttcctcgccgaggtctccgacaccaccgctgccggcgccggcgccggcatcggcatgcccaccggcggcgagttcacatct

SEQ ID NO: 313675 - DNA, 279 bp, Zea mays
cggacgctggttgttaatggacgcaagcaaagtgtcttgtgcaatatgatctagatcagcagagctgtgtttttttcctagattctgccaacctttctattgattatcacattgctatttttctaatgttcataacattttctgatgtgcagattagtaattatgctggaatgttcttcattcttctttttgcctccattttcgcaactggtatattggagctcagatggagtggtgttggcattgaagattggtggagaaatgagcagttttgggtta

SEQ ID NO: 313676 - DNA, 276 bp, Zea mays
  unsure (1)..(276): unsure at all n locations
cggacggtggncgtgacgcgtgggcggacgcgtgggcggacgcgtgggttcgtcgcgccttggcaaccctcctctcttactcctccgagtagcaggtgcgcgcagaccagggactgggaggaggtccagatgctactatgctgctgtacttttccccaacaaatccagacctctgctccgcgctcgccgtttcacccaagctgcttgccgcggacttgctcagctccggcgagcaggggaggagcaaaaagagcaagctccaccgcgtcagggcgc

SEQ ID NO: 313677 - DNA, 264 bp, Zea mays
cgagatccattccccggtcaagacggtggtggtggtggtgatggagaaccgcagcttcgaccacatcctcggctggctccgccgcacccgccccgacatcgacggcctcacgggccgcgagtcgaaccgcctcaacgcctccgaccccgcatccccggagatcttcgtcaccgacgaggccggctacgtagactccgaccccggcaacggcttcgaggacatccgggagcagatcttcggctctgcgacacctccgcggtgccg

SEQ ID NO: 313678 - DNA, 278 bp, Zea mays
cacgcctagtttctctgtcgattcctattcgtcgtctcttcagggctggtgctcactgctgcgccgttctgttaaggttcgtcaagtggcccaaggtcgtgcgtatccagcgccaggccgcatcctcaagcagcgcctcaaggtaccaccggcgctcaaccagttcacccgcaccctcgacaagaacctcgctacgaacctgtttaagatgcttctcaagtaccggcctgaagacaaggctgccaagaaggagaggcttctgaagagggcccaagctg

SEQ ID NO: 313679 - DNA, 262 bp, Zea mays
aggcaatcgtacgtgaacaagtgaatcatccagtttggggagcatatgctcagcgacttctaaatcctgaagcaagactttggaggaatcccagtaatggtggtcatgatgacaaggcacatcctcctattcatccaaccaaattttcagaaggtgaaagaaactggagtccagaccacactagattgtatgagtttgttgtccgacatttccttgcatgttgctctcaaccggctgttggagctgaaacaactgtggaaat

SEQ ID NO: 313680 - DNA, 256 bp, Zea mays
atcgcatattagaaaggcaatgcaggtcttgtttccttcgtcttccccatgaagaaaccgtactagctgtagctgctgaacgtttgagtccccctgctgccacccttatctccatttgtgtcatcatgaccttgacgaactccgcgaggccgacgtcgatggcgatggtcagatcaactacgaggagttcgtcaaggtcatgatggccaagtgagtaaagcctgcggtaacggtatactaccccgcgggaattgaa

SEQ ID NO: 313681 - DNA, 279 bp, Zea mays
ctactactcgctgatgcagagcaagggcgtgatcccgctggacaacgcgctgttccggccgctgccgccgtcgatggagatggtggacccgaacacgctgctccggtacacgaacgtgttcgacgcgatgctggacgcggtgcgagtggccgtgcggaacctgaacgcgacgggcggcgcgggcgtgccgatcctggtgacggagacggggtggccgtcgtacggggaccggcgcgcggaccgtacgcgggcagggacaacgcggacgcgtacaactcg

SEQ ID NO: 313682 - DNA, 279 bp, Zea mays
cagacgcgtccgcccacgcgtccgtctttagcagcacttctttcagcaaaaggttcctctcatagcaattcacattcacggatgatattccttggcatcaacttttatgggaatgattttctactgtctggaggtagtggtggcggtgctatcaccggaagagattttgttcatttacttgagaagtacaagccatctttgcagtgggatgaaaaaagtttggagcacttctttatctattcagatgaaggcgcgaagcatgctgtattttatccaaca

SEQ ID NO: 313683 - DNA, 277 bp, Zea mays
cagcacgctggcgacccacgcgtccgcccacgcgtccgcccacgcgtccggcaagctcgtgaaggtcaaggctacgtacaagctctcggacgccgccaagaaggcatcccccaagaccaaggctaagccggcaaaggccgccgctgccaagaccaccgcccccaagccggccaaggccgccgccgccaagtcaaagaaggcagcggctgccaagccaaagaaggccgctgctgctgggaccaagcgcaaagtgcccgagaagaaggtcgtggcgaac

SEQ ID NO: 313684 - DNA, 277 bp, Zea mays
gttgttttgcagatgagctcatcaagaatgctgcctacatcggcacccctggcaagggtatccttgctgctgatgagtcaactggcaccattggcaagcgcctttccagcatcaatgtcgagaacgtggaggagaaccggcgggctctccgtgagctcctgttctgctgccctggtgccctccagtacatcagcggtgtgatcctcttcgaggagaccctctaccagaagaccaaggatggcaagccttttgtcgatgtcctcaaggagggaggcgt

SEQ ID NO: 313685 - DNA, 268 bp, Zea mays
cggacgcgtggtcaggtttcgggaggatcagcgagctcgtggcagggtccccctccagagcgaggatgtccagctcgtcaccgcatgagacatgccagtgagcagcagtttcgccggttctttctttatgaagtggatgcaattagaaaggcgtgtgccagcttggaagagggctaccttcctccagttacattcattgtggtgcaaaagcgccatcacacacggttttgtcctaaagatcatcattcacacaaacagacagatcgac

SEQ ID NO: 313686 - DNA, 262 bp, Zea mays
ggaccgtggcggacgcgtgggggctttcacaaagtatgctctcaaatatgaaaatgatgctggcaagacggaaattcagatgcagcttgagaagatgaagaaatatgcttctgttatccgtgtcattgctcatacccagattaggaagatgaagggtttgaaacagaagaaggctcacctgatggagattcaggtcaatggtggtaccattgctgacaaggtggactacggctacaaattttttgagaaagaggtccctgtt

SEQ ID NO: 313687 - DNA, 265 bp, Zea mays
cccacgcgtccgcccacgcgtccggtgtaattcatgcggaagttgaagtttgtgatagtgattttcactctccagtaatccttgtagttgagcttcacatgccagtggattcttatcgggcaccatcaggtttggttcggtagaaaactgcaagaagttcaaggagttggttgaggagattgctgagtcacttacagagaacgaggacaaggaaggtcaagatggctcttccacggccggattgctggagaagctcactgtgagc

SEQ ID NO: 313688 - DNA, 127 bp, Zea mays
atcccgtccgctcttcgtctacaatggcaattatctccccctgcagtcttggacgcagggaatacttgaaaccccggctcccgatggatctcctctctgctgcgtacggtgctacctctgacgatga

SEQ ID NO: 313689 - DNA, 273 bp, Zea mays
gtgtattttaatgacctactaattggagggttaattgagttgaggaaaatggaagattctggcatacttgatgagaatatcgatgttctgttcaatgaggaatccccatattctgctccattaccccccttacttggagaagatgatgaatcaggaagtgggaagattgatgagctggcaaccattgtcaaaaaaatgagagagtcgatcactcctaaggatagattctataagatgagaagatttagcaactgctttcttggtagtgaagct

SEQ ID NO: 313690 - DNA, 262 bp, Zea mays
atctgcaagtttagggttaaagccgctgtacatgcaagagaaacttgacaagggagtgcagttcctggccctgaacagctacccacagttctcacatcgaggtgacaaggtcggactggctcctcattccgactatggcttcctcacaatcctgatgcagagctccccggggctggaagtgatgccccatgaccgtgacacctggacgcccgtccccgcgatccccggggccctccatgtccatgttggggaccacctagaa

SEQ ID NO: 313691 - DNA, 257 bp, Zea mays
agggtctgggaaagggcggcgcgaagcactcggaaggtgctccgcgacaacatccagggcatcaccaagccggcgatccggaggctggctaggaggggtggcgtgaagcgcatctcggggctcatctacgaggagacccgcggcgtgctcaagatctttctcgagaacgtcatccgcgacgccgtcacctacaccgagcacgcgcgccgcaagaccgtgaccgccatggacgtcgtctacgcgctcaagcgccaggg

SEQ ID NO: 313692 - DNA, 298 bp, Zea mays
cactggttgaatcattgagagacagggctgttaggcacatagcttgtggttcaaacttcacttcagctatctgtcaacataagtgggtttctggagctgagcagtcgcaatgtgcctcatgtcggcaaccatttgggttcaccaggaagaggcataattgccataattgtggtcttgtccattgtaatgcgtgcacctcacataaggtcctgagagcagcattggctcctaatcctgcaaaaccataccgtgtttgtgattcatgttttatgaaattgaacagtgcagcatactcaag

SEQ ID NO: 313693 - DNA, 286 bp, Zea mays
cagataagcttcaacttgaagctcaaagtattcctaacactacccatccagatgttcctgttgggggtgaggaaagctctgtcctcaggaaagaggcagtcagaggagcttcaattttgcaatcaaagatcatcttcagctggggaaggaacttgatttgtttgactttgatgcagcagccgaggtcagtggttcgaagttctactacttaaagaatgaagctgttttgttggagatggccctagtaaactgggctatttcagaggtctccaagaagggtttcaca

SEQ ID NO: 313694 - DNA, 275 bp, Zea mays
gcagagaccatgaacatgcatgtgccagctgccagggtttacagttgttttgattctctctgtcttctgtttccacagcggatgttgccggccttcgccgcgtgctgcacggacctggtggagaggtgggaaggcctggtcgcggatgggcagcagccgtgcgaggtggacgtgtggcctgagatgcagaacctgacgggggacgtcatctctcgcggcgcgttcggcagcagctacctcgaaggcaggaggatcttccagctccatggggagca

SEQ ID NO: 313695 - DNA, 272 bp, Zea mays
gtacttttgggatgtgcttctggatgcagacctagaaagtgatattcttggttggcagtacatatctgggagtttgcctgatggacatgagctcagtcgtcttgataatccagaggttcagtgtcaaaagtacgatccggacggtgaatatgtaagaacttggattcctgaacttgctagaatgccaacagaatggatccatagtccatgggctgcgccaaactctatattacaagttgctggagttgagctgggctttaactacccaaagc

SEQ ID NO: 313696 - DNA, 253 bp, Zea mays
gaatcttgcaaggacttcaacaacaggattcgtactttacacaacgggttgacgcaactggtatgccaggtctaggtcccctccaaaaagtatgtgcggcaatgcgggtacttgcatatgggttaccttctgatgcagtagacgagtacattcaaattggcgagtccacagctagggaatgccttcagcatttttgtcgaggaatcattgcatactttagtgggtggtatctacgaactcctaatgaagcgga

SEQ ID NO: 313697 - DNA, 243 bp, Zea mays
ggcagagttcaagaagggaaagtacttgtactacatgagaggaggtgaccattgcaagagcatgaaccagttcgtctggagcttcttgtgtggactcggcgaagcaagttcctcaaccggacgttcgtgatggatctgaacatctgtttgtccggggcacacacggtcgacggcaaggatttggattggagagatttccggtactatttcgatttcgagcacttgaaggagagtgttccggta

SEQ ID NO: 313698 - DNA, 282 bp, Zea mays
tggtcctgtgacgcgccctccctgcatgacgacttctatctcaacctcgtcgactggtcctcgcagaacgtgctcgctgcctgcctcgtgcacctgcgtctacctctggtccgcgtccaatagcaaggtcaccaagctctgcgatttggggcctagggacagcgtatgcgcagtgcattggtcacgggaaggctcttatctttccattggcaccggccttggagatgtccagatttgggatagttctcgctgtaagcgattagaaatatgggatgtcccaaa

SEQ ID NO: 313699 - DNA, 284 bp, Zea mays
cttcctcgagttctcctcaaccatattcagagtcacagcggcttaactctcggcgatgtctggccgcggctatggcgggaatggtcggggcaagggcggcgccaagcgccaccgcaaggtgctgtcgtgacaacatccagggcatcaccaagccggcgatccgcaggttggcgaggatgggcggcgtcaagcgcatctccgggctcatctacgaggagacccgcggcgtgctcaagatctgcctcgagaacgtcatccgcgacgccgtcacctacaccgagcac

SEQ ID NO: 313700 - DNA, 130 bp, Zea mays
tccacgcgtccgcggacgcgtgggcgggccgtgggagtttgataagaacagttttgaacagttctgcgataatcatgctaatgtaaggttgcagtaccatttcaatcgtcatttgtgtaagcttgagcaa

SEQ ID NO: 313701 - DNA, 272 bp, Zea mays
cggacgcgtgggagtcagctccaggggttcgagtactgcatcgactccaaccctccctggggcgaggcgatcatactgggcttccagcactacatactggcgcttggcacggcggtgatgatcccgacggtgttggttcccatgatgggcggcgacgatgtgagctatcctgtgccatgccgccttccgcttcttgaccacagcaccggctccgtgccggcagcatcggtccgtgtggtgatgtgatgttttgggtccttgttgttcgcttg

SEQ ID NO: 313702 - DNA, 245 bp, Zea mays
cgcgacgctccctctctccgtgctcaagcgggcgcaggcggactggtggactaccacggctccgggatgagcatcatggagatgagccaccgcgggaaggagttcgacgccgccatcaagaaggccgagtccgacctgcgcgcgctcctcgcggtgcccgacacccacgccgtgctcttcctccagggcggcgccaccacgcagttcgccgccgtcccgctcaacctctgcacggggccctccga

SEQ ID NO: 313703 - DNA, 295 bp, Zea mays
cttttggagagctagtacttgtgttccataagatggctataatgattctttcactcactgagagtgcctcgagatgtgaaaggaattggagttgctttgaagggattcataccaagaagagaaataggttaacttgtgaaagagttgaaaatcttgtctttgtgtgattcaattcacttcatacaaagaaaaaagctaaggccaacaataacaacaaagtagatcccctgctggcaactgatgctgcttctgctcaagggtggattattgaaggtggagatgaagaaagctctga

SEQ ID NO: 313704 - DNA, 260 bp, Zea mays
actacatcctgggcgacaacccgcggggcaccagctacatggtcggctacggcgccacattcccgcggcaggtgcaccaccgcggcgcctccatcgtgtcggtcaggacggacccgtccttcgtcagctgtcaggaggggtactccgcctggtaccctcggcaggccggcatccctatcgtcctggatggcgccatcgtcggtgggcccgtctagtacgacgacttcgccgacgagcggaacaactacgagcagactgag

SEQ ID NO: 313705 - DNA, 263 bp, Zea mays
aggtgataaacgagtatctggtggagtaccctgaggttccgcagtgggcgccttggtgcatggagcagccgaagagtgttgactgggatgcactgatcaatagcatcttcagtgaggctgagaatgtgccggagattaactggtgcgagcctggggagtcctcagcgatggaggtccttcttgggagtaaggatgggttcttgacgaagaggattaagaactatgacactggccggaatgatcctacaaagccacatgcattg

SEQ ID NO: 313706 - DNA, 215 bp, Zea mays
agggttatagcttatgagaaacttctctagtatgtcaagcatcctgacagaataactgaaaagaagaatcttgtcacactgatcccgaccataatgacagaagcctttctagttattctgtcaggatgcttgacatactagagaagtttctcataaggaagggttattgcttttcacgcttcgatggaacaactccgatgaatgcacgccaatca

SEQ ID NO: 313707 - DNA, 265 bp, Zea mays
acgcagagcgttcaggatacacatggctgccacctttgccttcatccctctcctgctactggtctgcgtccagagcgcggctcctgttcatcggttcacaaggagcgagttccctgaagatttcgtcttcggatccgctacatcggcttatcagtatgagggtgctgttggtgaggatggtaggagcccaagcatctgggacaccttcactcacgcagggagaataccggacaaaagcaatggtgatgtagccgccgacgggtac

SEQ ID NO: 313708 - DNA, 317 bp, Zea mays
cgacaagatggcgtgcacagacaatgcgatgagagccttgttcctccaggacctcatctgcatcgtgcatggagagaaggaagagtcaaagggcatcggcgtgcggcggcacagggaagcagacaatcctcatacccaagggcgacttccttgtcggacaactcaacttcacaggcccttgcaagggcgacgtgaccatccaggaggatggcaatcagctggcgaccacggacctaagccagtacaaggaacatggtagatggatcgagattctacgcgtggataaccaggtcatcaccggcaagggaaaccttgac

SEQ ID NO: 313709 - DNA, 244 bp, Zea mays
attaacggcgcctgattccgaatggttttatttccgcgcgtgtaattaacgtgtggcaggaatacagcctcacgtgaccatctatcacttcgaccttccccaggctctccaggatgaatacaacggcctgctcagtccgagaatcatcgaagacttcaccgcgtacgcagacgtgtgcttccggagcttcggcgacacggtgaagcactggatcacggtgaacgagcccaacatcgagcccatc

SEQ ID NO: 313710 - DNA, 133 bp, Zea mays
  unsure (1)..(133): unsure at all n locations
aanatgcccggcgaacgacagaaaccgtccctgctacagagcaggagttgccgcagccccaggctgagacagggtctggaacagaatctgacagtgatgaatcagtaccagagcttgaagatcaggattccac

SEQ ID NO: 313711 - DNA, 111 bp, Zea mays
gcttggcagaaacggaacggaatgccagatcctagctgccttgttggtttgaaggatttccatctttttacaagatgagaagttacagttcatctgccctgttcagatgaa

SEQ ID NO: 313712 - DNA, 296 bp, Zea mays
cggtcgaagcagatgggaagagatccatggtgttgttaacaagacccaagctttctcaaatgtgtttgtgggatgctcactgatagatatgtacatgcggtgtgggaaagttgatgaagctcgaagagtcttcgacgccatgccagagcacaacttagtaacatggaaagtatgattacaggatttacacaaaatggccgcagtgaagaggctttgaaatacatgttcctaatgcaacaagaaggttatgttgttgatgaatttgtgctttcgacagttttgtcgtcatgtggaga

SEQ ID NO: 313713 - DNA, 229 bp, Zea mays
aagttgcagttgtagcgttggtgttattagtaataccgccgaatgtgacatgcagaatatccataagcatgttagttcgacatcatcatctgttgtagaccgtatgatgcatattgcattatttgatttgcagactaggaattgcagtctgaggatcatttagaagggcaagttcaggaggatatgacgatttgagaactttgtagatattcattgactagcaatgagc

SEQ ID NO: 313714 - DNA, 285 bp, Zea mays
  unsure (1)..(285): unsure at all n locations
cccaaaattcacctggcacagtcacttcacaagttgtctaccgcctgtccaggaagggttccaccaatgacgagcacttgnctgaatgcagaagcgctccagtatctccaagggtaccttcatgcagccagtgtgacactgctttaaactgcatttttctaatgggctaaacccagatggtttcctaggaaatcacaggcttctgagcacagctgcattaatacagaggaagttctccttttgaacttgtcacgaattccatcttgtaaaggatattaaatgttg

SEQ ID NO: 313715 - DNA, 280 bp, Zea mays
agctccacaaactctcccccaattgggaaggacccttcaatgtgacgggaatatgccgacccaggtgtgtccgccttgccacaactgaaggagtgtctcttcccaatccctggaacatagagcatctccataagttctacccatagaagcaaaactgggggattgagtttttcttcctttgtaactgggttgcgcatatgtgtatgtcaatccggtgaggtccgccctcgtaaacctggcctcttggtctacacccatgtatatcaagttataaggaaga

SEQ ID NO: 313716 - DNA, 282 bp, Zea mays
attataagatcatcgcctcactggtttatagtatacagaccttttctgtatttcatccgatataatcctacaggtgctgtgtcattcataggtgatatatactaaccctgaatagtatacaaaagaaaccatgcatagcaacgactactttgctacgaagaatgactcctttcctgcatctttcatagttctgttaaatatgtttgtacatcgcgtctttttcaaaactagttcttaagaacagactcgatgcaagtgtttctgttctgggaggtattggag

SEQ ID NO: 313717 - DNA, 294 bp, Zea mays
cggctcgagccaatggctctaagcaagatgaagcatttgatcttccatctgatgattcgactgacaatgattttgaccccaatatgcctgaagagcatgtggctagtaaggaagaaggatcttctgaagaggaagaggatgatgacggaggatcagactctgacgtctctgacttcttaacctgttctgatgatttggaacctttgatagataaaaagaaggttgatgacctgggattaccttctgaagattcagaggatgatgactatgatccagcaggtcctgattcggata

SEQ ID NO: 313718 - DNA, 280 bp, Zea mays
tagactcctctcccagactgtgaccttagaccatacctctcaccccccaatgcctcgactcacccaaaatcacacagaagaccctagatctataatttgtcttcaggtagtaaattcccaataggtctgctggagtgggcgctgaaggctccatgctgctcagacctgagccctctaggcagcagggtcccacttacaccctccctatcctgttcctcataggtggcacagaggggattcctcagcccttggcagggttttcacagcactcgcctgtaag

SEQ ID NO: 313719 - DNA, 270 bp, Zea mays
cacaagggtggcttcaaggcaagcgtgccaaatctagaggacgtggttgtaatggagggagtgagccacttcatcaaccaggagaaacccaacgaggtctctgatcacatctgcgagttctttagcaagttctgatacgtattggaaaaatctcaaggagccgttatatgattctgagctactcgtgtttttatgtcaaaaaaatgcggttgcgagtgtcaccatacaaatatacgatctaaataaaattcgtctgtctcacctttttac

SEQ ID NO: 313720 - DNA, 278 bp, Zea mays
cccaaatctacgccatctccaaggacctcgccgcctacatctccatcaaccagccgatcctgcacaggttcgcgaacgaggacgtctcgctgggggcgtggctgatcgggctcgaggtcgagcacgtcgacgaccggagcatgtgctgcgcgacgcctccagactgcgagtggaaccagcgagccgggaacgtgtgcgtggcgtccttcgactggtcgtgcagcggcgtctgtaagtcggtggaccggatgcgccacatccacaaggcgtgcggcgaa

SEQ ID NO: 313721 - DNA, 276 bp, Zea mays
  unsure (1)..(276): unsure at all n locations
ctaggatgtagccattgggggatctttgtggcttcagcaaattctcttgttaaaccggagtgaaaacttcaggggaagggtggggagtcagccaagtgcctcagtgtgccctgttgaaacgtaggtttttccacgcaatgtacgggcgcggtcctangcagaggtttcttttcctctggatgtttgttcctcctgtacaagaggtgtctttccttggtttggtggggctgcggcacttttagacctcccgatctctttgtgagtcctttattataa

SEQ ID NO: 313722 - DNA, 237 bp, Zea mays
cgaagatgctttgcgacgtttgattgaagttgttatgccagagaattagtactcctttcattcttttttatttgttgtgttttagttcaaaaatgaagtagcgagcgacaaatattcgagaacagagttagtaggcagatttagagggttgttgattgatgcatccgtgggggtgcttctgcttggttgattgacagaaacaaaaaggaaagagagcagcaagggatggttgggtgc

SEQ ID NO: 313723 - DNA, 303 bp, Zea mays
agcatttgttgcgattggagcaaccatggtaggaagcatcacgttcttgaaaaaagagggtgactacgtccgcaaaggagatgagtttgggtatttctcctttggagggagtacagtgatatgcgtcttcgagaaggacgccatccaatttgacgctgatctcgtggcaaacagcgaaaggtcactggagacccttgtttctgttggtatgaccctgggcatctcgacaaggaacaaggagatgcaagtcccggatctgcagaaagtttcgctcggatgacagacagagctgtaaactgtgtg

SEQ ID NO: 313724 - DNA, 151 bp, Zea mays
cggagagccctggaagcagccccttcccaaggacgatgacacggttgtggtggaaatctctcaccttgggcaggtcaccatgctagcaaatgagccgtgcaggtccaagagcgtcaacgaccagtcgtcactgtcgccggcgcacgacagt

SEQ ID NO: 313725 - DNA, 278 bp, Zea mays
gtggatgaaccggcattagaatatctcgctgccttcgcagatgagtttttggttcatggtgttgatgtggagggcaaaaggttagggattgatgaggaacttgtggaactattggggcatcattcaccaatcccagtaacttatgctgggggtgtgtcaacaatggatgacctagagaggataaagaaggcaggcaaaagtcgagtagatgtaactgttgggaatgctctagatatatttggaggagatttaccctacaaagatgttgtcctttggca

SEQ ID NO: 313726 - DNA, 298 bp, Zea mays
tggaaccctgaggggacatttgtttccatgggtgtgtattccgatggttcatatggtgttccttccggacttatttactcattcccagtaacatgcagtggtggtgaatggaaaatcgttcaaggtatgatcgttgtagtgttgaaagtaaagacttgacacagctatttggtgcctttgttcgttgtagtttttgtcatagatagctagatgttgcagtttcttcggtagctcttggtgtctgaaattctgcatgtgcagttataattggcctaaatgatttcaataagatcttgcc

SEQ ID NO: 313727 - DNA, 292 bp, Zea mays
ccgtgacaacaacagggtgggcttcgccgaggctgcccgcctctagttcccaaggcgtccgcgcgccacacagaaacagaggagagtcccagagcaggaggcccctggcccagcggcccctcccacacacacgcagctacacgcacgcccactgtcctgggcgccctggaagccggcggcccaagcccgacttgctgttttgttctgtggttttcccctccctgggttcacccatgctgcctgcctgtctgtctctccatctgtttggtgggctccagagcacagatctgtt

SEQ ID NO: 313728 - DNA, 294 bp, Zea mays
ccttccaccgcgtcatctccgagttcatgtgccagggcggcgacttcacccgcggcaacggcaccggcggcgatccatctacggcgagaagttcgccgacgagaagttcgtgcgcagacaccgcccccggtgtgctctccatggccaacgccgggcccaacaccaacggctcccagttcttcatctgcaccgtcgcgactccttggctcgacggcaagcacgtcgtcttcggccaggtcgtcgagggcatggacgtcgtcaaggccatcgagaaggtgggcaccgctacggctc

SEQ ID NO: 313729 - DNA, 171 bp, Zea mays
atgatgcattgttttcatcgatgttgattttattgtaagatggaatgttgtaccaaacctgaacagatcactttgttgtgattcagtgtgcggctatggcctatggatttgtacttgttggactcaaaaaaaaaaaaaaaaataaaaaaaattgtaatacgataaaaatta

SEQ ID NO: 313730 - DNA, 131 bp, Zea mays
  unsure (1)..(131): unsure at all n locations
ttncagaagaccttcgtatcccctctcagtcgcacggggctgtcccgtgcatgggttggctgtggggatgccaggtgggcctggcaggactccagatgaggacaagagggacaaggtatggagttggagcc

SEQ ID NO: 313731 - DNA, 292 bp, Zea mays
tgctaactcagtgggtggcatccggtaaggcctcttggaaataggtgtcgttcccggttgcaactcgatgtcgaattcaatatcccggtccggtggcattcctagtgattcatcaggaaaaacatctgcatactcgcagaccattggaatcttcttcaaaggtaactctaccatagcaaaagcacatgatcgagtagaatcttggctaggcagaaataaggtgaaactcccacagattggggatttaatttcaacgatgtggctggctacatctagcaccacttggtgtcgg

SEQ ID NO: 313732 - DNA, 193 bp, Zea mays
tgtgatgtttggctagacttggtcttgtgagatacttggtgatgttagtgatgatccagacttatatctgttttgtgatgatccaaacttatatttgtgagtgttggtgatgttagttatacttggtcttgtgagatacttaatgagacttatgtgctgtgaaacctgatttatgtggtgatatttgtgatat

SEQ ID NO: 313733 - DNA, 191 bp, Zea mays
ccggatttggattggggtctatgcttggcatcgcgtcgtatcgaaactcagctgctgtttcgctgagtaatgtacatttccctggtaatggtacttgtggactcagatgcttttaaaaaaaaaagtattaaagattatgcacatgcaaaagcagacacgtaccggccagacctccaggttcaaggcatttg

SEQ ID NO: 313734 - DNA, 121 bp, Zea mays
ccgaaagcgaataaggaagctcctgcccctgctaaagctgatgcgtgatctaaggatttaaaggcctagtaggtagtgttgaaaggtgtccatagctacaattagtagtagatctgtacgt

SEQ ID NO: 313735 - DNA, 256 bp, Zea mays
tagccatcaagcaacatactaaagtagaatccattagcagcaatagagcaacatatggagaccaagatattttccctccttagtgtccttgctctttctacatgtgttgctaacgcgacaattttccctcaatgctcataagctcctatagcttcccttcttgctccataccttccatcaattatagcttcagtatgtgacaactcagctcttcaaccatgtaggcttcgacaatcaatcgcagcaagcaacatac

SEQ ID NO: 313736 - DNA, 233 bp, Zea mays
ctcgagccgcagaaacgcagcaagcgaagctatctagcaacgacttaacaacaatggctaccaccatattagccctcgttgcgcatcttgccctttttgtgagcgcaacaaatgcgttcattattccacaatgctcacttgctcctagtgccattataccacagttcctccgaccagatacttcaatgggcttcggacacatagctgtgcatgcctacgggctacaacaaacg

SEQ ID NO: 313737 - DNA, 259 bp, Zea mays
tgctgagagtaggcagcaactaccattcagtcagctagctgctgcctacccccagcaattgttgcagttgtaacaaggtgcattcaaacaacatgctttgacaaacccaacagcgtactaccatcaacccatcattggtggtgccctcttttagattgcttatgagttatacttcaaagtagaagtatattggatgatgtatgtggcttcccagatataagatagtacatttctaaagttcaatgatagcatattggtg

SEQ ID NO: 313738 - DNA, 283 bp, Zea mays
tcgccattgttgctctattgttgctacaatggcgaccaagatatattccctccttatgctccttgctctttctacatgtgttgctaacgcgacaattttccctcaatgctcacaagctcctatagcttcccttcttcccccataccttccatcacatattgaagctataattgatggaaggtatgggggaagaagggaagctataggagcttgtgagcattgagggaaaattgtagcttcaatatgtgaaaacccagctcttcaaccatataggcttcaacaa

SEQ ID NO: 313739 - DNA, 171 bp, Zea mays
attgaagattacaagtgctcatggctagttgtgcaagcccttgagcgtgctgatgagagccaaaagcgcattctatttgtaagtcggctgcagacctctttgaaacgattagaagtttgttgtctaaaggtttatacaattgatggctctgcaggaaaatatggcaagaaa

SEQ ID NO: 313740 - DNA, 244 bp, Zea mays
ctcgagagagggatatctgtttccgcatcggcagcgttctctgcagcggcgatgccgctcctcgagattcttgagcttgggattgtatcgcactcagtgatcatcgggctatctttgggcgtctcacagaatccttgcaccatcaaacctctaggtgctgctctctccttccaccagttttttgagggctttgcattgggcggctgcatttccgaggctcatcaaagatttcacgcactcttat

SEQ ID NO: 313741 - DNA, 105 bp, Zea mays
tggaagggccctgccaagagagatcctggatcatgcagttccaggagagatcctggatcatgcagttcctcaccatctcctcgaagggccctgccaagaactggg

SEQ ID NO: 313742 - DNA, 257 bp, Zea mays
aacagattcatcctgtcgtttctcgtctgtgtgcttccattcagggcactagtccagctcgtctggctgaatgtctgggccttgattcggctaagttccaaccaagattgactgagtcgagcaaccaagatacatctatgatgctgttatctgtaatcgatgacgaagatgagagatatcgtggttgtgaaccactgcgtttgtcatgcccaagctgttctggtaccttcgactgcccccctgtatctagtctgatt

SEQ ID NO: 313743 - DNA, 270 bp, Zea mays
ctcgagcgctcgagccgattcggctcgaggaaggtgagaacagagagagagagtatgtgtgataggtacaaggatcaccgctgtgcctacgcgtgctgcttcaccgaatcgagtcagatcctgtccgaatccgagctaagggatggcaaccggtagtgaagcctcgaaggcagctgaggctgtggttgactggcataaacacgacagcaagaggatgctccatgcggtttaccgtgttggggatctggaccgcacaatcaagtactacac

SEQ ID NO: 313744 - DNA, 187 bp, Zea mays
ctcgagccgcaacaagcaacatagaaagtggaatacagtagcaaaaatagagcaacaatggcggcaagatattttccatccttatgctccttgctcttctgcatgtgttgctacggacattttctcatactcaagtctatagctgctctcccaactcacatgcgttagaggaacacctcactaagtc

SEQ ID NO: 313745 - DNA, 172 bp, Zea mays
cgattttgatcttgcagccacctttttttgttctgttgtgtatctagtagttggaggagatatgcagtttgcacttgcattggacacgaactcaggtcctcaccagataagatcttgtgagggtgatgggattgacaggttggataaattaagtattgggggcagaaagcag

SEQ ID NO: 313746 - DNA, 205 bp, Zea mays
tgctgccattccatcggcatgctatggcaaacattgctgctttcttgcaacaacaacagttgttgccattttacccacatgtggtgggaaacattactgccttcttgcaacagcaacaattgctgccattctacccacagaatgtggcaaacattgttgccttcttacaccaacaacaattgcttccatttagccaacttgcttt

SEQ ID NO: 313747 - DNA, 252 bp, Zea mays
tagcaacattagaaagcactaatacgtgtacccaactaatgggcagcccaacatatttttgcctcccttatgctccctgggtctttcctgcagtgctgctacgggcgacattttcccggaatgctcgcaagctcctatagcttcccttcttcccccgtacctctcaccagcggtgtcttcggtatgtgaaaacccaattcttcaaccctacaggatccaacaggcaatcgcagctggcatcttacctttatc

SEQ ID NO: 313748 - DNA, 228 bp, Zea mays
ctcgagccgctcgagccgatcaccggctcgagctcgagcgctacgagcacggaaaatttcatatagcagctgtttcgcgtacacgatcgactacaaaggtcgcgtctcgaaacgtcttgccctgttcggaagggatggcgtcggaggtggaggacgacgcggcggtgcctggcgcgccgctggtcgccaatggtgcagccgacgtccgccggcagagggatcaggcga

SEQ ID NO: 313749 - DNA, 232 bp, Zea mays
  unsure (1)..(232): unsure at all n locations
ggatttggctgacattgttgccaacaagtggaagtgagagccatcanattctgaattggtaattcaattattatatgtatgtaccatgccattgtagttttgtatgcttactactactactactaccactataaacacttgttgcttcatttttcattctaaaacttgtactgagaaacagaaccatcaattttctctgccttctcattgtgcaataaaattcttaccttga

SEQ ID NO: 313750 - DNA, 260 bp, Zea mays
gcaacaatggcgaccaagatattttccctccttatgctccttgctctttctacatgtgttgctaacgcgacaattttccctcaatgctcacaagctcctatagcttcccttcttcccccataccttccatcaattatagcttgagtatgtgaaaagccagctcttcaactagagcggcttcagcaagcaatggaagcaagcaccatccctgtagcgctcttgttgtgcaaacaatcgccagccctatgtatggtgcttga

SEQ ID NO: 313751 - DNA, 263 bp, Zea mays
aaatttgaagatgactgccgctccatcattgggactcagtcatatgttctctttactatagataaactgatatacaaaattgtgaagcagcttcaagcattagcatctgatgaaatggacaaccagcttctccagctttatttatatgaaaagtcgaggtctcctgggagcttctttgatctggtttatcacgaaaatgcacgagcccttctacatgatgacaacatataccgttttgaatgtcattctgatcctcagaatta

SEQ ID NO: 313752 - DNA, 270 bp, Zea mays
agggaattctgacatatacagaattgttaagatgatatggagcgcaagtttcaaccagtcataattttcagctttagtagaagagaatgtgagcatcatgccatgtctatgtcaaaacttgacttcagcactgaagaagaaaaggaatgcattgagcaggttttctgtaatgccattggttgtttagtggaggaagacagaagtttacctgctatagagttgatgttgccactccttaaacgaggtattgcagtacaccattctggacta

SEQ ID NO: 313753 - DNA, 273 bp, Zea mays
cgcacccaaaaaggttatgattctatatgggtgatgtggatagattgaccaaagtagctcacttcattcatgttaagactacttgtaagtgatctcaattggctgagttatataaggcttggattgtgtctctatatggtgtaccgaagaagatcattttggatagaggatcacagtttacctcaagattttggaaaagttttaatgagaatagggatacaaagtggaattttagttcggcctaccatccacagactgatgggcagactgaga

SEQ ID NO: 313754 - DNA, 141 bp, Zea mays
caacttcagaggctatccgtgactgggtcacaaatgtggagaccacacactatatcttgggctctgttgccggtccgcacccgtacccgatgatggtgagggagttccataaggttattggcaaggaaacccggaggcagg

SEQ ID NO: 313755 - DNA, 284 bp, Zea mays
caaaaccagaccaccaaacaagtgccagcgccctctcgcagtcgccgcaatggagagcaccttcatcatgatcaagcctgacggcgtccagaggggcctcattggtgagatcatcagccgttttgagaagaagggcttctacctgcaagggtaatctagcgtccatgttttgattcaaacttccattatgttccgaaacagccttaaatttctccatttaaagactaaagatgtggctttagacggaaattcaacagtttgtgctcaaatgagttgtcgctttt

SEQ ID NO: 313756 - DNA, 278 bp, Zea mays
ccgaaccccaaaccctagcttcgctcgttgcggcggcgagccgccgatggcgaagtctctgcgatccaaacgcgagaagcggcttcggacgttgccccgggagatagcggacccgttctacgacaagaaggaggccgccctagctgctgccccgctcccggtccgcgggcccccgccatcccaggatgccggcagctcccgcgccgctagctcggcctctcgctatggatgtggagatgtctgatgcatcgaacaacaggtctaagaccttcttgagg

SEQ ID NO: 313757 - DNA, 279 bp, Zea mays
attcagatgataaacggttttatataattactccgaccaaaacacttcaactgaagactggatgtgactatatccgggcgacttggattgaagcgcttgtaactgcatgaagcgtatatacttttaatggggatttatccggtgatcagaatgatgcatcattttccacagaaaagctcagacatcgcttgaatgctgaaggcgttggcgaggccgttattaaagactgtgagcagattattcattcagaattttcgcagtaccaaacacagtgaagca

SEQ ID NO: 313758 - DNA, 250 bp, Zea mays
ggacaccgtggggcagtacgagtcccacatcgcgttcactcttcctgggctctaccgtgtccttgcttcccgcgatttcttggaatgtgctggtgatgatgaaatcggtgtggttcatggcaataaggtcagctgtgaactggcaagagaagtggtactggctgtacgagtcccacatcgcgttcactcttcctgggctctaccgtgtcgtccatggcatcgatgttttcgatcccaagttcaacattgt

SEQ ID NO: 313759 - DNA, 142 bp, Zea mays
attttcagcattcaataacacaccaagcgaagcgcactagcaacgacctaacaccaatggctaccaagatatcagccctcgttgcgcttcttgcccttatagtgagcgcaacagatgcgttcattattccgcagtgctcact

SEQ ID NO: 313760 - DNA, 262 bp, Zea mays
cacattgaagacaccgctggtgagaggtatgggggaagaagggaagctataggagcttgtgagcattgtgggaaaatggttgcggtagcacacttgcagaaagaccaaggagcataaggcatcttaccactatcacccttgttcctccaacaaccgtcagccctattacagcagttacctttggtccatttggtggcacaaaacatcagggcacaacaactacaacaacttgtgctagcaaaccttgctgcatactctcagc

SEQ ID NO: 313761 - DNA, 250 bp, Zea mays
gcaacatagaaagcacaatagtgtaccaacaatggcagccaaaatattttgcctccttatgctccttggtctttctgcaagtgctgctacggcgaccattttcccgcaatgctcgcaagctcctatagcttcccttctcccctagttcttatcaccgtgtcttccgtatgtatgagcccattcttttaccccaccagataccatcagacagtcaatcgcagctttcatcttatcttcaccattttgtccc

SEQ ID NO: 313762 - DNA, 262 bp, Zea mays
gggttaccagcagtattaaccgccacattcttggaagcaaaggtaggaagtttcccatagagattgttaaaatcacagttgcagggggaaatgctaatggtggtgctcgcgcaagtgagacatatagccaagcgagcagtggtccacgggacatccatgttgttgaaagtggaaatatggtcatttcaatccaagttctccgcaatgtgaccaacaacttcagcgaggacaacatccttggtcgaggacggtttggcactgt

SEQ ID NO: 313763 - DNA, 127 bp, Zea mays
ctcgcgccgtcagcattcaaatgcacaccaagcgatggcagctagcatcgaccgaataccaatggttaccaagatattagccctccgtgcgtttcttgcccttttagtgagcgtcacaatgcgttca

SEQ ID NO: 313764 - DNA, 256 bp, Zea mays
tgaggcatcagtgcagcccgacggcgacgccctactgctcgcctcagtgccagtcgttgcggcacagtgttgccagcagctcaggcaggtggagccgcagcaccggtaccaggcgatcttcggcttggtcctccagtccatcctgcagcagcagctgcaaagcggacaggtcgcggggctgttggcggcgcagatagcgcacaactgacggcgatgtgcggcctgcagcagccgactccatgcccctacgctgctg

SEQ ID NO: 313765 - DNA, 136 bp, Zea mays
agtgaactcaacaaagtcgatgacaggccatctgctaggagctgctggtggaatagaggctgttgctgctatacaagctataaggacaggttggattgtccaaattgagatttggatgcacccaacctgtccttat

SEQ ID NO: 313766 - DNA, 243 bp, Zea mays
tgacaaagcaagcggccaaagaaaaattatttgcaatacatacttcgccactattgattctctcttgtaggcttttaagtttagctccaaacaacaaaattttagagctctagtttagagttctacatttgagttaaagctctaaatagttgctgttgggcctatgcttcgtcgccgaaggtcttctaggaagaagcggctttcggctgaagctgtttgtataagatggccgaagtccctctt

SEQ ID NO: 313767 - DNA, 254 bp, Zea mays
acctcatccaacaattatcttgcaatttatcttttgttagttatattagtgttgaggacttgaggtcattgttcttcttattattttgcagaatggatagattttccaagaggtccgcaaagacttccaagtggtaagtttattccagggaataacaacagttatgacaaatgtcgtcgaagatttgacctggtaaactttctttgattgtgcaaaagtccaagtttgtatttacttttaccactgatccagtg

SEQ ID NO: 313768 - DNA, 277 bp, Zea mays
tgcgcctctacatttcttctctctctgctcctccgcctccgcctgatccatccaagacagggatcgccatgtcggactcggaggagcaccacttcgaatcgaaggccgacgctggggcgtccaagacctacccgcagcaggctggcaccgtccgtaagaacggcttcatcgtcatcaagaaccgtccctgcaaggttgtggaggtttctacctccaagactggtaagcatggccacgccaaatgccactttgtcgcatagacatattcaatgggaaa

SEQ ID NO: 313769 - DNA, 249 bp, Zea mays
attatataccatgttaacacccacaaacaggtagtcgatatctttaccaagcccttggatggaaagagattctgtgagcttaggaatgaactaaatttcatagattctcgaaaccttgattgaattattgcactatgctcattttatacctttgatcacgacatgtctctttcatttggttcaaatgcatatttcttattctttttgtgccaaagctaagactaatatgctttcaactgtgtttctata

SEQ ID NO: 313770 - DNA, 250 bp, Zea mays
ggactgtggatgcttcgctgccggtaccagtaacggattcaggatctttaactgtgagcctttcaaggagactttcaggagggatctcaagagtggcgggtttgcggattgttgagatgctgttcgttgcaacgtccttgctcttgtaggtggcggctccaatgtgctgtacccgccgaacaccgtgatgatctgggacgatctccagagccgttgcattggggagtttgcctttcgctctgatgtccga

SEQ ID NO: 313771 - DNA, 258 bp, Zea mays
atatgttcagcattcaaaaacacaccaagcgaagccactagcaacgacctaacaccaatggctaccaacatattagccctccttgcgcttcttgcccttttagtgagcgcaacatatgcgttcattatcccacagtgctcacttgctcctagtgccagtattccacagttcctcccaccagttacttcaatgggcttcgaacatccagccgtgcaagcctacaggctacaactagcgcttgctgcgagcgccttacaa

SEQ ID NO: 313772 - DNA, 219 bp, Zea mays
ctgcgtacacggtctccctcttcctgtcagtagtagagtgagcgtgaggcagcgagtgggagacaaggggaaatggggaagggagcgcaagggagcgatgcggcggcggcgcgggaggtggacgtggtgggcgtgttccggtacaaggatacctggccgctgtgcatcgacttcctgcgcagggcaaggtggacgtcaagccgctcatcacccaccgct

SEQ ID NO: 313773 - DNA, 241 bp, Zea mays
aaaagcgcttccagagttaacactcttgatgagcctgatctggatccgaaggatataatttcacttagtgatgcatatggagccgagggtgaactaggcattgtattgtctgataggttcatggaacatgatgcttattcaatgtttgatggtttgatggacggacgtagtggagtggtctgcatggcagagtttttctctacatccaaggttggatctagctcaagtctagcacctgtca

SEQ ID NO: 313774 - DNA, 196 bp, Zea mays
attcggctcgagattctctaggaagcaagggaatcacatcgccatggcagccaagatgtttgcaatggttgcggttcctagctctttgtgcaaccgcaactagtgctacccatatcccagggcacttgtcaccactactgatgccattggctaccatgaacccatggatgcagtactgcatgaagcaacagggggt

SEQ ID NO: 313775 - DNA, 304 bp, Zea mays
cctcaatgctcacaagctcctatagcttcccttcttcccccataccttccatcaattatagcttcaatatgtgaaaatcagctcgttaaccatattgggattaacaagcaattggaggaagcaaccttcctttaaccgcccttgttgtttcaacaatcgcaagccctaatctttggtgcagtcattggtacaaaccatcagggcacaacagctgcagcaactcgtgctacctctgatcaaccaagtagctctggcaaacctttctccctactctcagcaacaacaatttcttccattcaaccaa

SEQ ID NO: 313776 - DNA, 247 bp, Zea mays
attgagaccaactagcaacatagaaagcacaatagtgtaccaacaatggcagccaaaatattttgcctccttatgctcttggtcttcctgcagtgctgtaacgggacaattttccgaaatgttgcaagttctatagcttcccttcttcccccgtactctcacaacggtgtcttcggtatgtgaaacccatttttaaacctacgggtcaacgggcatcacagtggctcttactttatcaccttgttct

SEQ ID NO: 313777 - DNA, 254 bp, Zea mays
gaccaacaagcaacatagaaagtggaatccagtagcaacaacagagcaacaatggcgaccaagatatttccctccttatgctccttgctctttctgcatgtgttgctaacgcgacaattttccctcatgttcacaagctctatagcttccttcttcccccatactttccatcatgatagtttcgtatgtgaaacccactcttcagcctatagctcaaacagcatcgcagcaagcacatactttatcccttgtgt

SEQ ID NO: 313778 - DNA, 125 bp, Zea mays
tccattggactgcttgctccctgttgaccattgggtattctgaaccatcgagccatggctgccaagctgactcgcctccacagtcttcgcgaacgccttggtgccaccttctcctcccatcccaa

SEQ ID NO: 313779 - DNA, 253 bp, Zea mays
aatattttgagcattcaaaaacacacaaagggaagtgcactagcaacttcctaacaacaatggctaccaagatattagccctccttgcgctcctttccctttcagtgagcgcaacaactgcattcattattccacaatgctcacttgctgctaatgccattattccacagttcctcccatcagttacatcaatgggcatcgaacaccctattgtgcaagcctataggctacaacaagcgcttgcggcgagcgt

SEQ ID NO: 313780 - DNA, 250 bp, Zea mays
ctcctgcagcgcccgtcgcctccctttccccttccctccctccctctccccgcgggccgccagaggcaatttcgccctcgattcgaccccgattcgtccgcccgcgaccgggattccctccgccaagcgcggatctgaacgctgcgctccgtgtcgccgctcgaatccgccatgaagggggccaaatccaagggcgccgccaaggccgatgccaagctggcggtgaagagcaagggggcggagaagcccg

SEQ ID NO: 313781 - DNA, 246 bp, Zea mays
tgccattttacccacaggttgtgggaaacattaacgccttcttgcaacagcaacagttgctaccattctacccacaggatgtggcaaacaatgtcgccttcttacaacaacaacaattgctgccatttaaccaacttgctttgacgaatcctaccaccttattgcagcagcccaccattggtggtgccatcttctagatttttttatgctttatactgtaataataaagttctcatactgatatgt

SEQ ID NO: 313782 - DNA, 244 bp, Zea mays
ctcgaccgtttcagcattcaaaaacacaccaagcgaagcgcactagcaacgacctaacaccaatggctaccaagatattagccctccttgcgcttcttgcccttttagtgagcgcaacaaatgcgttcattatcccacagtgctcacttgctcctagtgccagtattccacagttcctcccacaagttatttcaatggggcttcgaacatccagccgtgccaagcctacaggctacaactagcg

SEQ ID NO: 313783 - DNA, 236 bp, Zea mays
ctacaacaagctccacttcctttttgtagctagctggccacattgtagtagtatttgctgctggatataagcagaggtgttcagtgtggtcaattggtcagctagctacgacaagccccacttcctttttgaaacaacaacaattgcttccgttctaccagcagtttgtggatagccccgcagccctcttacaactgcagcagttgatgccctttgtccaacttgctttgacatac

SEQ ID NO: 313784 - DNA, 185 bp, Zea mays
caccaccaatgatgggttgtttgtgctctcttttagattgcttatgagttatacttcattattgaagtataactcataagcatttccaaagagggcacaccaatgatgggttgtgagttatacttcaataatgaagttttttggatgatgtttgtggcttcccaggtataagaaagtacatttct

SEQ ID NO: 313785 - DNA, 252 bp, Zea mays
tgctggcaaaattgtactagcattttatgggaagacaactactgtctctacaccaggagcaggacttacaggtccatcactcgaaacctgtgcagagacagtagttgtcttcccaaaaaatgctggcaaaattgtactagcaggtgaagaaactgacttactagttggtctgcaaaatgacggtgaatcaatcttgactgacgttgcagttcattcaactctccatcttccttttgaccacaatatgtatgg

SEQ ID NO: 313786 - DNA, 273 bp, Zea mays
acttagagatgcctttgcggagtttggtgaagttttgcatggtatggttctctccttcctttgctgttctttttgtgataaggattcgaagcttctcatttctcttacgactgcagctcgagttgtgaccgatcgtgtcagtgggttttctaagggatttggctttgtaaggtatgctacgaccgaagaggcagccaagggaatagaaggaaaggatggaaagttccttgatggatgggttatttttgcggaatacgctaaacccagaccacc

SEQ ID NO: 313787 - DNA, 274 bp, Zea mays
acgactccgagccccgccgcgccgcgctacctccgctcctctcttcgcccctgacggcgtcgaggccgaagcgaaggcgagcatgcatcacgaccccaaccccttcgacgagggcagcgccgaggacaaccccttctcagatatcaagaggagggaagaggcgctgaagaatgctggcgtgccaatggaggagaagaactggccaccattcttccccatcatccaccatgatattgccaatgagataccagcaaatgtgcagaagttgcagtat

SEQ ID NO: 313788 - DNA, 274 bp, Zea mays
ctactctcaacaaagctgtatctacacaacaggcctcacgagctcgacaggctcgtcgcggcaggtgttgccggcaccgcgctgctctgcgtcgagttgttcttgttctcgccccagtgccatagcatgctctcccagaagcagaacttctcgaagcaagtcttcagcctcggatcggttatgttccgtttccaatgcccgtcggtgaagttcgccttctcggcctgccgccgctcccactccaacccagccttcagccttgacctcaggagga

SEQ ID NO: 313789 - DNA, 140 bp, Zea mays
aaattttaaatctataatactttattagtgatatgttgcacagatcagcatgagaactttattatgacagtataaatcataaagttctcatgctgatatgtgcgacctctcagtaataaagtattatagatctgattttg

SEQ ID NO: 313790 - DNA, 250 bp, Zea mays
ggacactgctggagagggtgagagctagggagcagcggtcgggcagccatggggcaccactgctgcagcaagcagatggtgaagcgtgggctgtggtcgccggaggaggacgagaagcttgtcaagtagatcagcgcccacggccacagctgctggagcgccgttcccaagcatgccgggctgcagcgctgcggcaagagctgccgcctccggtggatcaactacctccggccggacctgaagcgcggaa

SEQ ID NO: 313791 - DNA, 142 bp, Zea mays
catttccgatggacttcgacatggagtgcaattccttgtcctggaacaacttggacgaggagagtttgtaccccttgctgaacttcctcaaggctcataactacaagggcacgacgatgatgttgaatgacagaatccaaag

SEQ ID NO: 313792 - DNA, 99 bp, Zea mays
gtactgtagtaataatgtaatggagccgctgactagctacctagctcgctagtttactcatttagcggcgatgagtaacgtagtgtcaaccctcaccat

SEQ ID NO: 313793 - DNA, 105 bp, Zea mays
ggtagtaagtcggaattggctgcaggacacaacaagcaagatagaaagtggcatgcagtaggaacaatagagcaagaatggtgacgacgatattttgcctgatta

SEQ ID NO: 313794 - DNA, 121 bp, Zea mays
ttttatttgcaggcgtcgctgaataaggctggttgtctctcccttgacatgaaatccaaataactcacaattaaccatgagtgttccgtttggtcccagtttcgaaggtattgttaatcat

SEQ ID NO: 313795 - DNA, 100 bp, Zea mays
gcaacaagtactatcttggccctgctcctttgcaggatatggcaaggcaaattgctacagccaatggccctactggctataatagggattacctgttctc

SEQ ID NO: 313796 - DNA, 305 bp, Zea mays
  unsure (1)..(305): unsure at all n locations
cagctgcttgcatccaacccacttgctttggcaaacgtagctgcataccaacaacaacaacagttgcaacagtttctgccagcgctcagtcaactagccatggtgaaccctatcgcctaccggcaacagcaacaacttctttcatctagcccgctcgctatgggcaatgcacctacatacctgcaacaacagttgttgcaacaacagttgctgcagccaattgtaccagctcttactcagataacggagaaanacctgctgcctacttgcaacaactacttcccattcaccaactgactgtgtcg

SEQ ID NO: 313797 - DNA, 291 bp, Zea mays
aaggtgcactcgcacttcgaccgctccctagagtccgggccgtacaccctcaagtaccgcggatccatgtggggctacaaaaggttctttcggcgtactgctcttgagcaatcagattttcttaaagatgattgcttgaagataaactgtactgtgggtgttgtagtatcaactatggattattctaggccacattcaatagaggttccagagtctgacataggctttcattttggaacgcttttggacactcaggaaggtgtagatgttatttttagtgtagcaggagag

SEQ ID NO: 313798 - DNA, 238 bp, Zea mays
agccgccgccgctgctcatctcacatccctcgagaagacgcctgctcctcgccgatcgatacgatggccgtcttctccgacctccacaccgccgacggcctcaagtccctcgaggctcacctcgccggcaaaacctatgtgtctggtgactccattactaaggatgacattaaggtcttcgccgcggtgccgtcgaagcctggcgctgagtttcctaatgccgcccgctggtacgaga

SEQ ID NO: 313799 - DNA, 258 bp, Zea mays
aaataacaataagttggaggttaacaaggtagatactaatgaagacaacagtggcaaccaaagcttctctgccactaatagaaacatgtctgcaaatattgaattaactgatggatggtattcacttgatgcatcattggatgtggcacttctggaacaactagagaaaagaaagcttttcgtagggcagaagcttcggatatggggagcttctttatgtggttggtctgggcctgtgtcatttcatgaggtgtctgg

SEQ ID NO: 313800 - DNA, 250 bp, Zea mays
tgagaatctaattaggaccgagaatgaagccgatgtagctgcagcgcaagatgctggatatgagaaatttttggttgatagattgaccctaaagccaggaaagatatcagccctcgcgaaatccattcgcactcttgcacgtatggaagacccaatcaaccaaatactcaagagaacagagattgctgaaaatttaattctcgagaaaacatcatgtcctttgggtgtcctattggttatatctgagtcc

SEQ ID NO: 313801 - DNA, 246 bp, Zea mays
ctcgagcgtttttggatgatgtcctgtggcttcccagataacatcattattgaactatacactctaagcactctaaaagcgggtatgccaatgctgggttgttggtagaacgttgttgggtttgtcaaagcaagttggttgaatggcagcaacccatcattggcggtgccctcttttagattgcttatgagttatagttcaataatgaagttttttggatgatgtttgtggcttcccagaaataag

SEQ ID NO: 313802 - DNA, 250 bp, Zea mays
  unsure (1)..(250): unsure at all n locations
ccaactaccaacatacatagtgaagtacactagcaacatcttagcaccaatggcagccaagatttttgcgctccttgccctccttgctctttcagcaagtgttgctaccgcgactattattccacaatgctcacaacaatacctctctccagtgatagccgcgagatttgaatacccatctatacaatcctcaangctacaagaggccatcacagcaagcatcttacggtcgttagcattgaccgtccaa

SEQ ID NO: 313803 - DNA, 242 bp, Zea mays
gccggaacccagactccaagcgagctaattttgtagatctgccatggtgtgctttgtcccgttagtaggggtggtaacgggccatttaatttagcctagcaaatttaaggatcgaatcaagttagggtcggatcataaaacaatataattttgaactagcaaaattaagggccttgttagtttgtgaagcacatattaggaccatgatccattaccacccctacccgttagtcgatatatgt

SEQ ID NO: 313804 - DNA, 263 bp, Zea mays
gtaaaaaccgtggataaacgtgaaagaggttggtatgatgttgtcgtcctatcggtacatgaacgtaaatggaatttgatagaaggcgatgttgctattctgtcgattgcacatcctggttcagagagtcaatcaggtcgatctagtaggaggactatgagttcaaatgaggattctgaaccagaatgtggacggcttgtcggtactgttaggcgccatattgcctattgatacacgtgatcctgttggagctgatatccatt

SEQ ID NO: 313805 - DNA, 270 bp, Zea mays
aacaggcgtcttcgtactcgcctatctccgcgactcaaagctttccccaattcccccccttctcccatttctcaccaccgccgccgctccccccgttcaacaacaccatgagggagtccatctcgatccacatcggccatgctggtatccaggtcggaaacgcgtgctgggagctgtactgcctcgagcatggcattcaggctgatggccagatgcccggtgacaaccttattgggggaggtgatgatgctttcaacaccttcttcagtg

SEQ ID NO: 313806 - DNA, 263 bp, Zea mays
ttgcagcaacaattaccattcagccagctagttgctgcctacccccagcaatttcttccattcaactaactagcagcattgtactctgctgcttatttacagcagcaacaactactaccattcagccagctagctgatgtggagccctgctgccttcttgacaccacaacagttgttgcatatctacctgcacgctatgcctaccgctggcaccctcttacaactgccacaattgctgtcgtacaaccaacttgctttgacaa

SEQ ID NO: 313807 - DNA, 217 bp, Zea mays
agtcacgatgctagtagcactataagtgaggtatccacatcgaattacaatccttcgtggataccacgagagtcggcagatcacacatgtgtatggattctacgacgaatgcctacgacagtgagtttgtttaggtgcttaaagttcaagttacatttctaagcgtacttggttcctacatagcacatactgtcatcattactgtgtgagaagacta

SEQ ID NO: 313808 - DNA, 257 bp, Zea mays
ctggaaaccatgattggttcgatggattaaacacattcataaggtatatctgtcataagagttgggtgggtgggtggttcctacctcagaagaagagttattttgcattgaagcttcccaatggatggtgggtttttggtcttgaccaagctcttcatggtgacatttttgaataccagttcaagttttttgctgagttgtgtcaacagaagtatgcaggtcggagaaagtgattccgtaattattataactcatga

SEQ ID NO: 313809 - DNA, 270 bp, Zea mays
agctgctcttctgtcgccgcgctaagctgcgaggtgcttggcgcgcagctgcggtccattgaggccggcgagacgctggcgtccgacagtggcatcgccagctgcctggcgaggacgctaggaagtagaaaccagcgagtcattgaggctgcttgtaattctatattggatctctcggcgtcttcagtcggtagggagcgacttgcaggctcacctgttctgccgaggacattggtcggaggatctggaatcgacatcagaagcaaatca

SEQ ID NO: 313810 - DNA, 270 bp, Zea mays
ttttgagcattcaaaaacacacaaagggaagtgcactagcaacttcctaacaacaatggctaccaagatattagccctccttgcgctcctttccctttcagtgagcgcaacaactgcattcattattccacaatgctcacttgctcctaatgccattattccacagttcctcccatcagttacatcaatgggcatcgaacaccctattgtgcaagcctataggctacaacaagcgcttgcggcgagcgtcttacaacaaccgtttgccca

SEQ ID NO: 313811 - DNA, 265 bp, Zea mays
gtgctcctccatgggccacggctgacgggtgcacgcaccgggcgacgagcacccaccaccggttatgtgcaccctctctccttcggtccttcctccctttcttccgtgctaagccaccgagcacccaagcggtttggcctgatgccacatctctggtaggagaggtggatttggtggacctagattcgatgtgcagagagcgacttggaggtggctgacatcttcaagcactgcatcatgcagttacaactactgttggccatac

SEQ ID NO: 313812 - DNA, 263 bp, Zea mays
  unsure (1)..(263): unsure at all n locations
attgatctataactcataagagatctaaaagagggcacatcaatgatnggttgttggtagaactctcctgcttatttacagcagcaacaactactaccattcagccagctagctggtgtgagccctgctaccttcttgacacaaccacagttgttgccgttctacgtgcacgttgcgcctaacgctggcaccctcttacaactgcaacaattgctgccattcaaccaacttgctttgacaaacccagcagtgttctaccaaga

SEQ ID NO: 313813 - DNA, 168 bp, Zea mays
ggcaagtgcgatttcgatctcgcagccaccttctatcagttctgttgtgtatctagtagttgaaatgagatatgcagtttgcacttgcattggagacgaactcaggtcctcaccagataagatcttgtgatggtgatgggattgacaggttcgacaacttaactattg

SEQ ID NO: 313814 - DNA, 261 bp, Zea mays
gttcttcttcttcttctttccccgtactaatcgaaggagaagcccaggccggagaaccatcgcctgcatttcgatctgtttcaccgcaattcgcattgttagttgtgtattggagttatgtgttcttggaaaccaagtacacataactccaatacacgactaacaatgcgaattggagttatgtgtacttggtttccaagaactttggttccttgtttttttttctttcttgtttgagcgtttttgggcagcgctggcctg

SEQ ID NO: 313815 - DNA, 257 bp, Zea mays
ctcgagccgaatcggctcgaggtattagttagataaccgtgctagtgcttattgattgtcaagtcccactgttcttgctctaaatctgtgtctgttgttttgcagatgagctcatcaagaatgctgcctacatcggcacccctggcaagggtatccttgctgctgatgagtcaactggcaccagtggcaagcgcctttccagcatcaatgtcgagtacgtggaggagaaccggcgggctctccgtgagctcctgttc

SEQ ID NO: 313816 - DNA, 258 bp, Zea mays
gcaagttcaatctcacctccaaccatgggtaaagagaagtcccacatcaacattgtggttattggtcatgtcgactctggcaagtcgaccaccacaggacaccttatctacaagcttggaggcattgacaagcgtgtgatcgagaggttcgagaaggaggctgctgaaatgaacaagcggtccttcaagtacgcgtgggtgctcgacaagctcaaggctgagcgtgagagatgtatcaccatagatatcgctctgtgg

SEQ ID NO: 313817 - DNA, 254 bp, Zea mays
caacaactgctttcatctagcccgctcgctgtgggcaatgcacctacatacctgcaacaacaattgttgcaacagattgtaccagctctgactcaactagctgtggcaaaccctgttgcctacttgcaacagctgcttccattcaaccaactgactctgtcgaactctgctgcgtacctacaacagcgacaacagttacttaatccattggtagtggctaacccattggtcgccgccttcctacagcagcaaca

SEQ ID NO: 313818 - DNA, 255 bp, Zea mays
tagggagaaaggtttgccagagctactgcctactctcagcaacaacaacttcttccatttaaccaattggccgcactgaaccccgctgcttatttgcagcagcaaatactactgccatttagcgagctagctgcagcaagtcgtgcttccttcttgacacagcaacagttgctgtctttctacaagcagtttgcggctaaccccgcaaccctcttacaactacaacaatgttgccctttgtccaactgtgctttg

SEQ ID NO: 313819 - DNA, 135 bp, Zea mays
gttccttagggctggtcaaattgcgattttagatatgcgccgtgctgagattttggacaacgctgcacggcacattcaaggccgtttcagaacatttatcacacgcaaagaatttgtgaaaacaagggaggcttc

SEQ ID NO: 313820 - DNA, 210 bp, Zea mays
  unsure (1)..(210): unsure at all n locations
tgcaccaccaatgatgggttgttggtgccctcttttagatttattattgaactataactcataagatatctaaaagagggcaccaccactgatgggttgttggtagaacactgctgggtttgtcaaagcaagttggttgtgccctcttttagatttctactgagtnatagttcaataataaagttttttatctgatgtttgtggcttccc

SEQ ID NO: 313821 - DNA, 235 bp, Zea mays
ctcgagccgcttatatatgtgcggtgatgccaagggaatggctagagatgtacacaaaatgcttcatacaatagtccaagagcagagatctttggatagctccaaaaccgagagctatgtaaagagcatgcagatggaaggagcacgagattagcgcgttgatgtacttagtactgtgaaatcaaactggaggaggctgcaattctgcattacacctacaaaaaattctcaaacc

SEQ ID NO: 313822 - DNA, 130 bp, Zea mays
gcaacagcaagtggcggaaacggtgcatctcttgcgtgcccctcattttcaaagtggagccaagggcggccccaggaagggtttccgtgctcaaggacggctccgtagtggtggaggtcggaggaatcga

SEQ ID NO: 313823 - DNA, 265 bp, Zea mays
caagcaacatagaaagtggaatacagtagcaaaaatagagcaacaatggcggtcaagatattttccatccttatgctccttgctctttctgcatgtgttgctaacgcgaccatttatcctcgatactcacaagctcctatagatgcgcttcttccgccataccttccatcaatgaccgactaagtatgtgaaaaagcagcgcttctacactacaggatccagcaagcattcggaacaagcaacttacgcttacacaccggttctt

SEQ ID NO: 313824 - DNA, 263 bp, Zea mays
agcttcccttcttcccccatacctctcaccagcggtgtcttcaatgtgtgaaaccccaattgttcaaccctacaggatccaacatgcaatcgcaacaggcatcttaccattatcacccttgttcctcctacaaccgttagctctattagatgacagccgcgagatttgaatacccaactatacaatccttcaggctacaagaggccatcgcagcaagcatcttacggtcgttagcattgaccgtccaacaccatatgccctat

SEQ ID NO: 313825 - DNA, 246 bp, Zea mays
attttgagcattcagaaacacacctagcgaaggcatctagcaacgacctaacaacaatggcttctaagacattatccctccttgcgcttcttgccctttcttgtgagtgcaacaaatgcgatcattattccacaatgctcacttgctccgagtgctattaatccacagttcctccatccagttatttcaatgggcttcgatcatccagctgtgcaagactatcagctacaaccagcgcttgaggag

SEQ ID NO: 313826 - DNA, 200 bp, Zea mays
caactaccaacatcgaaagcacattagtgtaccaacagtgggagacagaatactttgccttcttatgctccttggtattccttgaagtgctgctacggcgaccattttcccgcaatgctcataagctcctatagcttccgttcttcccccgtacttgctcaccagcggtgtgttcggtatgtgaaaacccaattcttcaa

SEQ ID NO: 313827 - DNA, 247 bp, Zea mays
gcaacagttgctgcctttctaccagcagtttgcggctaaccccggatccctcttacgactacgacaattgttgccctttgtccaacttgctttgacaaacccagcagcctcctaccaacaacacattattggtggtgccctcttttagattgcttattagttgtaattcaataatagagttttgtggatgatgtatgtggccaaccagatataagaagttacatttccagattctacaaaataaaaa

SEQ ID NO: 313828 - DNA, 251 bp, Zea mays
gagagacttgcttcataagatttcacgctggacctccatacgaggatattgctttccgtattgtgaacaaggagtgggaatactcacacaagaaggggttcaagtgtacttttgagcgtgggattctccatctctatttcaacttcaagcgttaccgttacaggcgctgaaatggctcaagagggggagtactggatcgattggactggtgcgtcatgattctgctgtatgctgtggcatggataccagtc

SEQ ID NO: 313829 - DNA, 257 bp, Zea mays
aatattttgagcattcaaaaacacacaaagggaagtgcactagcaacttcctaacaacaatggctaccaagatattagccctccttgcgctcctttccctttcagtgagcgcaacaactgcattcattattccacaatgctcacttgctcctaatgccattattccacagttcctcccatcagttgcatcaatgggcatcgaacaccctattgtgcaagcctataggctacaacaagcgcttgcggcgagcgtctta

SEQ ID NO: 313830 - DNA, 253 bp, Zea mays
gtagaaactgttgcaattgttgttgttgttggtatgcaactatgtttgccagagcaagtgggttggatgcaagcaactgctgttgcaagtaggcgacagggttcaccacagctagttggctcagtgctcagtcaactagccatggtgaaccctgccgcctacctacaacagcaacaactgatttcatctagccctctcgctgtggttaatgcacctacatacctgcaacctctgttgctgcaacagattgtac

SEQ ID NO: 313831 - DNA, 256 bp, Zea mays
ctcgagccgaatcggctcgagaaaagaagaaccttgataggattacgtgtaggttgttggaacggaacaaatgcccaagatgacacgggcacttgtgttggacatgcaagcaagattacttctggatatgctaggcaaaggaatcgagtctgcccttacaaatccatcaactctgctacctgagccctggcaagcttccagtgatatgttatccagcatcgatgctgacaaaatgactgttgagccagctctgctt

SEQ ID NO: 313832 - DNA, 240 bp, Zea mays
ggaatctcatagtgaagaggccgatgacggcgatgagagtaatggccacgataacgatgatccttcagctccaaagaaaccaagggttctctggtcagttgaactgcaccgaaaatttgttgctgctgtcaatcagctaggaattgacaaagctgtgccaaaaaggatacttgagctcatgaatgttgagagactcaccagggaaaatgttgcaagtcacctgcagaagtatagactcta

SEQ ID NO: 313833 - DNA, 253 bp, Zea mays
cggtgtggtcctgcagtccttcctgcagcagcagccgcagggcgagactcgcggcgctgactagcggcccaggtagcgcagcagctgacggcgatggccggtcggcagctgcagcagccatggtcgctgcccttgcaacgcaactgccggcggtgtctactactgaggcaactatgtactgtagtactaatgtactggtgccgctgactagctacctatagggctatagctaggtcactcgcttagcggcgat

SEQ ID NO: 313834 - DNA, 261 bp, Zea mays
ctgcaagcaaggggtaaagtagaatccattagcaacaatagagcgacgatggcgaccacgatgttttccctccttatgctccttgctcttgctacatgtgttgctaacgtgataattttccctcaatgctcagaagttcctatagcttcgcttcttgcctcataccttgccatcaattatagcttcagtatgtggtaacccagctacttcaaccatataggcttcaataagcaatcggagctagccacatatctttatcgg

SEQ ID NO: 313835 - DNA, 255 bp, Zea mays
gcgcctccatttcggcctctgtccctcgcaagttcaatctcacctccaaccatgggtaaagagaagtcccacatcaacattgtggttattggtcatgtcgactctggcaagtcgaccaccacaggacaccttatctacaagcttggaggcattgacaagcgtgtgatcgagaggttcgagaaggaggctgctgaaatgaacaagcggtccttcaagtacgcgtgggtgctcgacaagctcaaggctgagcgtgag

SEQ ID NO: 313836 - DNA, 167 bp, Zea mays
atcctctccaattccacacaaaaccctagtgactagagagagtgatttgccgtgttcatttgagctcttgcgcttggatcgcattctttctttctcttttgctcttgtgatcaacactcaattgtaaccgaggcaagaggcaccgattgtgtggtggcccttgcggg

SEQ ID NO: 313837 - DNA, 268 bp, Zea mays
atttactttacacaaagagttgacgcaactggtatgcccggactaggaccattacaaaaagtttgtgcggcctgcggatacttgcttatggcttaccttcagatgcggtagacgagtatattcaaattggggaatcaacggctagggaatgccttcatcatttttgtcgcgcaatcattgattgttttagtgcctggtatttacgcactccaactcaagatgacattactcgcatcatgcataatagtgagtcgcggggttttcctgg

SEQ ID NO: 313838 - DNA, 199 bp, Zea mays
cgcgacgcttcgggaaacccgcaatccaacagtacgccgtccatcaacggtcacatcaaaaacccccgcggaaccacttcgagcgagggcagcgtctccgccatctagcgacgtcttcggcaccaggtgactttgtcgaactggtccctcggagggcaaatgttggggcgaaggcaaagacgccacccttcgctcgagg

SEQ ID NO: 313839 - DNA, 246 bp, Zea mays
accccgtccaatccctggaccggcggtacttactcctggcagctctctaggatcatatatcgtccccaccgaccaacacgagtcttttgtgcgcactttgtcctcactcatgcgcacccgagaaaacttcccggtaggtcacccatcctaaatttctccaagtcaagcacgcttaacttgtaggttctttcgaggtaggcttccgaaaaagaagatgcaccttgttggtatgattacactattaat

SEQ ID NO: 313840 - DNA, 264 bp, Zea mays
gcgctgatcacgctgccgccccccagggaggtggcgcggccggagatgcccagagattcggctccggctgctggacgggtcgacgaggaggagtgggtcaccgttaccggatactttcctggtgatactaacatggtgctgcgagaatttgagaaatgtgggcatagtcttgagacatgttcttggtccaagggatgcgaactgggtgcatatcttgtatcagagccggcatgatgcgcagaaagcgctcgcccagcatgggca

SEQ ID NO: 313841 - DNA, 252 bp, Zea mays
gaacgaactcgcaaacgtcagtcacatcagcaggtcgccgccactcgccataaataaatttgttatccagggcaaaggatagggtgcttacgtgcgcggccatgcgcgcccacttgttgccgagctgcgcgtggtgctgggcgatgaggagctcctcgtcgggggagaaggagcccttcttgaggttggggcggaggtggttggtccagcgcaggcggcagctcttgccgcagcgcacaggccggtcatcct

SEQ ID NO: 313842 - DNA, 100 bp, Zea mays
ggggtttccaatctccacctacaagatgtacgaaggcggagagcctcccacatcatcaggctctccgccttcgtacatcttgtaggtggggtttccaatc

SEQ ID NO: 313843 - DNA, 220 bp, Zea mays
ctagcaacatagaaagctcaatagtgtaccaccaatggcagctattatattttgcgctcttatgatccttggtatttctgcaagtgctgctatggcgacaattgtcgcgaaatggacgataactccaatatgttcacatcaatacctgtatctggcgacagcggtgagatcggaatgtgcaaatcatcactactctaaaggtaacgggaggacaacgcag

SEQ ID NO: 313844 - DNA, 270 bp, Zea mays
  unsure (1)..(270): unsure at all n locations
ctgaagacaccgctggtgagaggtatgggggatgataggacgcagtaggatgttgtgagcattgtgggaaaatggttgcggtaatcgcacttgcagaaagaccaaggagcataagctcctatagcttcctttcttcccccatacctctcatcagcggtgtcttcagtacgtgaaaacccaattcttcaaccctacaggatcgaacaggcaatcgcagcaggcatcttaaaggtnacagccttgttcctccaacaaccgtcagccctatta

SEQ ID NO: 313845 - DNA, 268 bp, Zea mays
gcagtttgcggctaaccccgcaaccctcttacaactagaataattggtggccttcgtcgaagttgtgtgcacaaaagcagagtatgaagagtacggtgcgagcatctgccgatcgaaccctgtattcaaagggatgtactgactcagcctatcatagtcctgttctcaagggtatgatatgtatttaaaccgagatctgttccctgtggctgacgtcgtgaatggcgtccactcaagcgtaaatggcggagatctgacagcggaaacg

SEQ ID NO: 313846 - DNA, 272 bp, Zea mays
gaaacttcttggacggtataattttctggatgaactatcaactcttgatcctgagctttatagaaatcttatgcaactaaagcactatgatggagatgttgaggatctatttttggattttactgtaactgaagagttgggtggtaaaagaatcgtccatgagcttagacctggtggtaaaaatatataacagacgaacgaaaacaagttacactatgttcatgcaatggcagatttcaaacttaaccgacagcaccattgtccttgcagat

SEQ ID NO: 313847 - DNA, 171 bp, Zea mays
gtttgtggcttctcagaaataagatagtacatttctaaaacacttgctctggcaaccgtagctgcataccaacaacaacaacaattgcaacagtttctgccagcgctcagtcaactagccctggtgaatcctgccgcctacctcacaacagcaacaactgctttcatctag

SEQ ID NO: 313848 - DNA, 259 bp, Zea mays
tcggccagtgcgtcgcgttcctgaggcatcagtgcagcccgacggcgacgccctactgctcgcctcactgtcactcgttgcggcagcagtgtcgccagcagctcaggtaggtggcgccgcagcaccggtaccaggcgatcttcggcttggtcctccagtccatcctgcagcagcagccgctaagcggcatgtcgcggggctgttggctgcgcagcatagcgcacggctgacggcgatgtgcggcctgcagcagacgact

SEQ ID NO: 313849 - DNA, 165 bp, Zea mays
gacattctcagcgtatcctccccttggtaggtttgctgtccgtgacatgaggcagacggttgctgttggagttatcaagagtgtggagaagaaggacccaaccggcgccaaggtgaccaaggctgctgccaagaagaaatgatgcgatcctgcgcctgctttagc

SEQ ID NO: 313850 - DNA, 127 bp, Zea mays
ggaaaggaataatatatagggaaaaaggatgtatgctcacactgccacccatggtgatgggtggcagtgtgaccatgatcctggatgaaccattgaaatggaaaggaataatatatagggaaaaagg

SEQ ID NO: 313851 - DNA, 286 bp, Zea mays
tacgcgtgctcggtctccaacttcagctcgagccgaatattttgcgcattcagaaacacaccaagcgaacgcactcagcaacgacctatcaacaatggctaacaagatattagccctgccttgcgcttcttgccctttttgtgcgcgcaacaaatgcgttcattattgcacaatgctcacttgctcctagtgccattattccacagttcctgccaccagttacttcactgggcttcgaacacctcgctgtgcaaggcaacatgcagcaacaagcgcttgcggcgag

SEQ ID NO: 313852 - DNA, 214 bp, Zea mays
cgttctaccagcacggtgagagttgtggtggcatcctcttagtactggggcaattgctggcattcaaccaacttgctttgacaaacctagcagtgttctaccaacaaacgatcattggtggtgccctcttttagatttcttatgagttatagttcaataataaagttttgtgtctgaactttgtggcttcccagaaataagaaagtacatttct

SEQ ID NO: 313853 - DNA, 251 bp, Zea mays
caagttggttgaatggcagcaattgttgcagttgtaagagggtgccagcgttaggcgcacgtgctggtagaacggcaacaactgtggttgtatcaagaaggtagcatggctctaccaacaacccatcattggtggtgccctcttttagatttcttatgagtgctagttcaataataaagttttttgtctgatgtttgtggcttcccagaattaagaaagtccatttctagagaaaataaaaaaacaagggg

SEQ ID NO: 313854 - DNA, 260 bp, Zea mays
taggaaaccttgctgcctactctcagcaacagcagtttcttccattcaaccaactggctgcattgaactctgctgcttatctgcaacagcaactaccagtcagtcagctagctgctgcctacccccagcaatttcttccattcaaccaactggcagcattgaactctgcggcttatttacaacagcgacagctagtaccattcagcgagctcagctgatgtgagctctgttgccgtcttgacacatctgcagttgttgcc

SEQ ID NO: 313855 - DNA, 279 bp, Zea mays
ggttgttcaagataagaatacctttgattgtcatccaggcagtaagctatttggtagagtggggatacaaggttctacaccattatggaatgtgccagcctcaagtgctaacaccagcaaggatcaagtatctgacagttcatagaacattcagttgtaacaaagctgctgaagaacttggctacaaaccaattgtgacacttatggatggtatgaagctagcagtcaaatcatatattcggttgagaaatcatgcagatttatcttacaaacatatat

SEQ ID NO: 313856 - DNA, 281 bp, Zea mays
aagttcgagccgaatcggctcgaggagaccaactagctacatagaatagtccatagtgtaccacttatggcagctaaaatattttgcctcctgatgctccttggtctttctgcaagtgctgctacggcgctcattgtcccacaatgctcacaagctcctatagcttcccttcttcccccgtacctctcaccaacggtggcttcggtatgtgtcaacccaattcttcaatcctacaggatccagcaggcaatcgcagctggcatctgaccttgatgcacctt

SEQ ID NO: 313857 - DNA, 230 bp, Zea mays
cagaccattagctttatctactccagagcgcagaagaacccgatcgacaccatgagggtgttgctcgttgccctcgctctcctggctctcgctgcgagcgtcatctccatgcatacaaggcgctgcagccgctgacagccactgacgacggttcatctaccgacgccacaataccactaccctacacaacagctacggcctcaggctcagcacaagtcacagcgatatcc

SEQ ID NO: 313858 - DNA, 274 bp, Zea mays
ttagaacaactagctctttgcttgcgttatgttgatgcattgggaaggccatgtgaacacttcattggagttgttcatgtagatgatactagctctttatcacttaagaatgcaattgaagctttacttgttagtcatggcttgactttgacacgaattcgtggacaaggttatgatggggctagcaacatgaggggtgatattaaaggattgaaaacattgatcatgcaagagtcaccttctgcttattatatccattgttttgcacatcaac

SEQ ID NO: 313859 - DNA, 266 bp, Zea mays
ctgcgcaggaactccgacgtcctggagatcctaaggaagaccaggttcccgcgggtccgcggcgccggtgacgtcaggtcacctgagacgatcctcgagcacgatcgggttatatggctttgggatttgaactaccggatcgccctgtcttactgctcggcgaaggatctcgtggaaatgcatagctggaagcagttattggaggtagaccagctgcggatgcaacagagatacggacgagttttccagggctggaaagaagggag

SEQ ID NO: 313860 - DNA, 158 bp, Zea mays
gctggtagaaaggcagcaactgttgctgtgtcaagaaggaagcacggtttgctgcagctagctggctaaatggtgcttccttcttgacacagcaacagttgctgactttctaccagcagtttgcggctaatcccggaaccctcttacaactacaacaa

SEQ ID NO: 313861 - DNA, 254 bp, Zea mays
aatacttttagctgctacactgatgtgttttgcatgcagtgatgtctacgaatgattctatgagtatggtgtttaagtgtttgtcgaagggagcagttgatttcttggtaaaaccactacgtaagaatgagcttaagaacctttggcagcatgtttggaggcgatgccacagttccagtggaagtgaagtggcatccagacacagaagtgtgccaaactaaatactggcgacgagtatgagaacggcagtgaca

SEQ ID NO: 313862 - DNA, 253 bp, Zea mays
ctgcctttctaccagcagtttgcggctaaccccgcaaccctctagcaactacaacaattgttgccctttgtccaacttgctttgacagacccagcggcctcctaccaacaacacatcattggtggtgccctcttttagattgcttattagttgtaattcaataataaagttttttggatgatgtatgtggccaaccagaaataagaagttacatttccaaaaaaaacgaaaaatgccggtatggagttgccat

SEQ ID NO: 313863 - DNA, 247 bp, Zea mays
tcacgatgtcctggcatcaccatttgttgttccttgagctgcttagcaacatcctttgctgatgaaccagaaacttcaaaaccttcgagaaggaaagggcaacagagcttggtttctttggtttttgattagtagctgtggaaccttgaaccgatagctgaattttcttgtaaggccctgtttggaagcaacccggttttttagaaaccagtttttatattttagctaggagaggccagcttcttgg

SEQ ID NO: 313864 - DNA, 244 bp, Zea mays
gtgccctcttttagattgcttatgagttatagttcaataatgatgggttgttggtagaacactgttgggtttgtcaaagcaagttggttgaatggcagcaattgttgcagttgtaagagggtgccagcgttaggcatagcgtgcaggtagaacggcaacaacttgctttgacaaacccaacagtgttctaccaacaacccatcattggtggtgccctcttttagattgcttatgagttatagtt

SEQ ID NO: 313865 - DNA, 254 bp, Zea mays
ggatatcatatgtcccaactgcagtgatggttttatccaagagatcagtgagatgggtggcgcactggacacttggtcgttctgcaagtgttgctaccgcaaccattttcccacaatgctcacaagctcctatagcttcccttcttcccccatacctctcaccagcggtgtcttcaatgtgtgaaaccccaattgttcaaccctacaggatccaacaggcaatcgcaacaggcatcttaccattatcacccttg

SEQ ID NO: 313866 - DNA, 238 bp, Zea mays
gcaacatagaaagtagaatccattagcaacaatagagcaacaatggcgaccaagatattttccctccttatgctccttgctctttctacatgtgttgctaacgcgataatttgccctcaagtggtcagaagctcttatagttgcccttcgggccccataccttggatcaattataggttcagtatgtgagaacccagttcttcaaccatataggctgcaacaagcagtcgcagcaagc

SEQ ID NO: 313867 - DNA, 263 bp, Zea mays
gctcgagggttgatcaaccttgggctccctaggaccatggacttcctgggtgtcaaccccaacagcttcgacgggcacggcaactacagccttggcctccgtgaccagggcgtgttcccggagatcccgtacgacgtgggcgggaagaagaacggcatggacgtgtccatcgtcaccagcgccaagacggagaacatcaagaccgacgtggtgatccggaagaagaggttgaagcgccaccacttcctgagcaagggcaaggg

SEQ ID NO: 313868 - DNA, 249 bp, Zea mays
gtgtggtcctgcagtccttcctgcagcagcagccgcgggcgagctcgcggcgctgatggcggcccaggtagcgcagagctgacggcgatgtgcggtctgcagctgcagcagccaggtccctgcccttgcaacgcagctgccggcggtgtctactactgaggaaactatgtactgtagtaataatgtaatggagccgctgactagctacctatagggctatagctagttcactcgttagcggcgatgagt

SEQ ID NO: 313869 - DNA, 285 bp, Zea mays
ctgaaaggactaatcaagtattggaagacatgttgagagcttgtgccattcagatggtagtagttggaacaagagtctaccttatgctgagttcttaggccagtctgaagatgtcaccgttcgaggctctatatggcaggaagtgcaggactcctctatattgggataagactagaggaagataattctttggacctgaacgtgttcaagaggcagaagaacaagtctatataatcaggaagaacttgagggtagtcagaccaggcaaaagagctacgctgataa

SEQ ID NO: 313870 - DNA, 103 bp, Zea mays
ttcaataataacgtttcatatctgatgtttgtggcttcctagaaatgtactttcttatttctgggaagccacaaacatcagatacacaagtacatttctagac

SEQ ID NO: 313871 - DNA, 262 bp, Zea mays
gccattcggtctgacaggagcaccggctacctttcaagattttatgaatcacatcttagctccccttttgagaaagtgtgttgtggtattcttggatgatattttggtttatagtactactttagaagatcacgttggacatttggaacaggtttttggtattctgacccaaaatcagttgaaactaaaacaatccaagtgtaagtttgcccaagacaaattggaatttttgggccatgtaatcagtgctgctggtatttcg

SEQ ID NO: 313872 - DNA, 104 bp, Zea mays
gcaatctaaaagatggcaccgccaatgatgtgttgttggtagaaggctgctgggtttgtcaaagcaataatgaagttttttggctgatgtatgtggcctcctag

SEQ ID NO: 313873 - DNA, 255 bp, Zea mays
aaaattttattgtcacctaatgtttttaagttgtggtatgatgctgcttgccctttgaggccctgactcttgcctaattattttgttgcaccagattcctgtatttttcatacgtatggtttgccccagtataccatttttaagtacactactaagcatgcactgtggaccatttctcatgggggatttactgaagtggatattggtaagcattgtacagtttgttgttggcaaacggttctatgttgcggctta

SEQ ID NO: 313874 - DNA, 266 bp, Zea mays
cgaagaaaaggttcagagaataatacataatctgaagaaagctcaaacccatcagaagagttatgcagacaaacgacgaatgcccatatattttctagtgggagattacgtttatctaaaggtctccccaatgaagggggtatcgcgtttcagggttaaaggaaagcttgcaccccggtacattggtcgattccctatacttgagcaatgtggaccagtggcataccgactccaattacccggaactttgtctgctgtacataatg

SEQ ID NO: 313875 - DNA, 253 bp, Zea mays
gcgagactgttgagtattcagtgaacaccaagcgagtacctagcaacgattcgaacatggctccaagatatagcctctgcgctctgcgcgtttgtgagcgcaacaaatgcgttcattattccacaatgctcacttgctcctagtgccattataccacagttcctccgaccagttacttcaatgggcttcgaacacctagctgtgcaggcctacaagctacatcagcgcttgcggcgagcgtcttacaacaacc

SEQ ID NO: 313876 - DNA, 212 bp, Zea mays
gctgcgcataacgctggcacgctcttacaactgcaacaattgctgacattcaagcaacttgctttggcatacccaacaacgttctacgcaacaacccatcattggcggtgccctcttatcgattgcttatgcgttatagttcaataatgaagtttattggatgatacttgtagcttcccagaaatgtactttctatatatctgggaagccac

SEQ ID NO: 313877 - DNA, 131 bp, Zea mays
agttgcaacagtttctgccagcgctcagtcaactagccatggtgaaccctatcgcctatctacaacagcaacaacgtctctcgtctagcccgttcgctatgggcattggacctacatacctgcatcatcag

SEQ ID NO: 313878 - DNA, 268 bp, Zea mays
cttttggctctcatcagcacgctcaagggcttgcacaactagccatgagcgcattctatttgaaaattatggcaagaaagatccagcctctaggtcaagttctttgtagaggtggtatttcaggagtacgagaatgagagctacaagaagctgattgcagacattgaagcccagccaagcattgcggttcagaaagtgctgaaatccttcttgcacaagatctacaagaggcagaagtagggtgctcttggataaacgagctcaggag

SEQ ID NO: 313879 - DNA, 218 bp, Zea mays
aatcaatatattgattgagatttttctcgaaacaatggcgaaccacgatattatccctccttgatgctcctagactctggctacatgtgttgctaacgcggcaatcttccctcaatgctcacaagctcctatagcttcccttcttcccccataccttccatcagttatagcttcagtatgtgaaaacccagctcttcaaccatataggcttcaacaag

SEQ ID NO: 313880 - DNA, 254 bp, Zea mays
gccgccgacaactctctctaccgtccgataccccaagcaccagcgcggcggcggcgaccatggctgtcggaaagaacaagaggatctccaagggaaagaagggtggcaagaaaaagaccgtcgaccctttctctaagaaggattggtatgacatcaaggcaccgtcggtgttcagtgtgcgcaacatcgggaagactctcgtatccaggacacagggtaccaggattgcttctgagggtctgaagcacagagtc

SEQ ID NO: 313881 - DNA, 255 bp, Zea mays
cgctagcaacatagaaagcacaatattgtaccaataatggcagccaacatattttgcctcattatgctccttggtctttctgcaagtgctgctacggcgagcattttcccgcaatgctcacaagctcctatagcttcccttcttcccccatacctctcaccagcgatgtcttcagtatgtgaacatccaattcttctaccctacaggatccaactggcaatcgcagcacgcatcttacctttatcacccttgttc

SEQ ID NO: 313882 - DNA, 122 bp, Zea mays
ctgaatcctccgcaactcgccgccgccgggaccgaccgacccgatcctatcgatcgaggatgtcgtacgcctacctcttcaagtacatcatcatcggcgacacaggcgtggggaagtcgtgc

SEQ ID NO: 313883 - DNA, 292 bp, Zea mays
  unsure (1)..(292): unsure at all n locations
gcccactacgagaagcgcctcccggcggccaagtcgtccggcaaagaaggcggcgacaagaagggtaagaagaaggcgaagaagtcggtggagacctacaagatctacagcttcaaggtgctgaagcaggtccaccccgacatcggcatctcttccaaggccatgtccatcatgaactccttcatcaacgacatcatccagnagctcgccggcgatgctgcacagcttgcgcgctacaacaagaagcccaccatcacctctcgggagattcaaacctctgtccgccttgtcc

SEQ ID NO: 313884 - DNA, 286 bp, Zea mays
  unsure (1)..(286): unsure at all n locations
cagtcagtcacagctcacagcaaacaccgcgaaccgcccccgctcccaaacccgaccgagcaaagcgcaaagccccccaaccgcggatcaatccgcagcatcgatggcgcccaaggcggagaaaaagccggcggcgaagaagcccgcggaggaggagcccgcgaccgagaaggcggagaaggctccggcagggaagaagccgaagcgaagaaacgcctccccgcgggcaagtacggcgccgncgagggcaagaagggcaagaagaaagccaagaagagcgtggaga

SEQ ID NO: 313885 - DNA, 224 bp, Zea mays
cttcacagcgtatcatcgttttccatcgctcctactcctatcatccagaaaatctgagcggtattgatggcgcccaaggcggagaagaagccggcggcgaagaaggtggcggaggaggagccctcggagaaggcggctccggcggagaacgcccccgcggggaagaagcccaaggcggagaagcggctacctgcgggcaagtccgccggaaaggagggcggcaa

SEQ ID NO: 313886 - DNA, 303 bp, Zea mays
cagagagccagatgtgtgaatccgatcctagagaaatttctcaggccaccccagcaacaaaagcatgccagggacccaagcatcctagcggccccgttcttcccagttctgagcaaggacgaaagcactgccctgcagtggccgtcagaactgctcatcttcaccacagcagagcctcccatttcctacagctgcaaccctttatactttgactttaaactttcaagaaacaaagatgctagagctaaagggacagagaagccaaaagatgtcggagactcgtcaaagggtcatctccagagc

SEQ ID NO: 313887 - DNA, 131 bp, Zea mays
aaaggaatgataataaagttacttgctttaaaaagaaccaaggaaaattcacaacatatgtgaaacacaaacagctgtgaattttccttggttctttttaaaggaatgataataaagttacttgctttagg

SEQ ID NO: 313888 - DNA, 289 bp, Zea mays
  unsure (1)..(289): unsure at all n locations
cttgcagggagagaaggacgacaagatcatcgccgtctgcgccgacgaccccgagtaccgccactacaacgacatcagcgagctctcccctcaccgcctccaggagatccgccgcttctttgaagactgtacgcgcgcttgctctctctctctctctctgggggcgcgctttctggngnctctctctctctctctatctctcggcgctcgctgtgtgcgcgcgcggtgctctgtgagcgcgcgcgcccctctgtatgagtgcgtgtgtgggtgttgtgtctcgcgctct

SEQ ID NO: 313889 - DNA, 299 bp, Zea mays
ggccattgctattcttggtttcaatgagatcatggtgcttattaggaatcccatttatctgttcttgctatttgtgggctacttgatggtcaaagctttggcgatgcagctagatgtcagcagagaattccagaatggagtggttcctggaataatctctgtgtcggtgaagctcctaccagcgatacagaacctggtgaacaaagtggcagccgagcagcaagctgagcaccagcagcagcacccgcaccctcaccctcacactcaggccccaggacccccacagccacagatgcagc

SEQ ID NO: 313890 - DNA, 306 bp, Zea mays
  unsure (1)..(306): unsure at all n locations
aatggggtttcgagaagctcgtcttccgtaattcgatcaccagagtcaggcgagaccgcaaatatgcgatccgagctcggaacgcgtactccacaggtgtacacatgtcccagaatgtcatcggtaggacaacccacaagacggagagcttgatcctatactaccactatcacaactcgatcaacgtcatgggggagccctgcagggaattcgtgccgagacccaacaatggaagcaaggtgatgtttgaggggatacgtatgtctacgatgacaacatngagcgcgtggcaggggagatcaacgc

SEQ ID NO: 313891 - DNA, 290 bp, Zea mays
atggcgtccatcctcgaggtcgatgactgcaggaatcacacatttattcagtttgagccagctcctaggagaggtgaaccagacgtgacgcggaggacacctgattatttcctttgagttatctgccagaccatttttggaatttgcccaatgttggaatagtgatgctagccagtaacaatttttgttggatctatatgataacttaaccgaccagcaacagtaagaaaatgtggaagctgcatctgtcattgcaagaggtgctcgctaacagtaacaggtcgacgact

SEQ ID NO: 313892 - DNA, 275 bp, Zea mays
agtcaatccgagcttttgctgaggcttctatgacaactgcttatgagaagcaatggccactctaccttagcaccaaaaacacaatcctgaaaaaatatgatggcaggtttaaggacattttccaggaggtctatgaagctgactggaagtccaaatttgaggctgctggaatatggtatgagcatcgtcttattgatgacatggttgcgtacgcgcttagaaccgaagaaggcaatttttggctttcaaagatctcgcttggatatgcgcagagt

SEQ ID NO: 313893 - DNA, 284 bp, Zea mays
gacgcgcaggtcagtacaatgagaggatcgatgttctgcggcggagatctccggtggtggatgttggccatcttcttcctctgcacactaattgctgccgcggatgagcgcgtcgtcacccatctccccggcttccagggaccactccccttccagctccgaactgggtacgtggaggtggacgaggacaatggcgtccgcctcttctactacttcaccctctccgagggctcctcagccgacgacccggtcatgctctggctcagcggcggccccggatgcac

SEQ ID NO: 313894 - DNA, 193 bp, Zea mays
tgaaactgatgaggacaagaaggcagctgatgagcgtgctgccgctggcaaggcctcttctgagaagatagaaagtggtaaatcctccgtccttatggatgtaaaaccatgggacgatgagactgatatgaagaagctggagtaggctgtccgcagtgtccagatggaggggctgacttggggagcatcgaag

SEQ ID NO: 313895 - DNA, 272 bp, Zea mays
caaggtccgcaaggaccttggctctgcttttctgtacctgcagtcggggacctgctcggggatcaaggtgggtaggctggacatggagcaagaggtgatcgtggacaatgtgatgaccacagtggaggaggctgtcgagaaggtgccaaagaagtgggccaacgttagggcactgcatctgaaggctgtggattcagttgctctaccaatttaccaggttgtaccagagttgggtatgaaaatcgaggtgcctgtgttattggatctgggga

SEQ ID NO: 313896 - DNA, 276 bp, Zea mays
tccagggccgtgagtagagcggtggtggtgtcgtcggaggcattggcagctcgagactgagttcaagaatcagcatgattcttcagacgctcatcaggttcgcctctgtcagtcgttcagccgtctcagtccatttgcggaggaacattggtgttacagcagtggcatttaataaggaacttgatcctattcagaaactctttgtggacaagattatagaatacaaatctaagcgacagacatctggaggacctgttgatgctagtgcagagtatc

SEQ ID NO: 313897 - DNA, 221 bp, Zea mays
cactcatccacagctcccaccggcattcctgtctcgtatcctctctcgccgctccgatggcccgcacgaagcaaacagcgaggaagtcggccccggccaccggcggcgtgaaaaagccccaccgcttccgccccggcaccgtcgcgctccgcgagatccgcaagtaccagaagagcactgagctgctcatccgcaatctccccttccagcgcctcgtccgc

SEQ ID NO: 313898 - DNA, 100 bp, Zea mays
cgactcgccaagatgggccgcgttcggaccataaccgtgaagaagtcggcccgggtcatcatagaaaagtactacacgcgcctgggcaacgacttccaca

SEQ ID NO: 313899 - DNA, 213 bp, Zea mays
cttgaggtctggagcagcgagcgagtgccagcctcggaaggaacgttccagaagcgcgagactctaaaggccgtcgccttcccattcttcctcgacgcgtaggtctcctcagatcagataaacaatggtgaaggctgttgctgtccttggtacgagcgatagtgtcaagggcacgatctttgtgacccaagagatagatgggtctaccgctgt

SEQ ID NO: 313900 - DNA, 146 bp, Zea mays
  unsure (1)..(146): unsure at all n locations
acttgtggcttgcttggttgtgagatgcgtcattccagagagcagcctggtggaggtggcangctcagccagctcttggtaggtcagagcagctggctcaggctccagctcgcctccagtggaagcccgagcgccctcagaaacga

SEQ ID NO: 313901 - DNA, 393 bp, Zea mays
  unsure (1)..(393): unsure at all n locations
gagacaggcgtcttcgtactcgcctatctccgcgactccacagctttcccaattccccgccttctctcatttctcaccaccgccgccgctcgccccgttcaacaacaccatgagggagtgcatctcgatccacatcggccaggctggtatccgaggtcgaaacgcgtgcttggagctgtactgcctcgagcatggcatgcaggctgatggccagatgctcggtgacaagaccattgggggaggtgatgatgctgtcaacaccttcttcagtgagactggcgctgngaagcacgtctcccgtgctgtttntgttgaccttgagcctactgtcatcgatgaggtgaggactggctactactgctagctcttcgatcctgagcagctcatcagtgg

SEQ ID NO: 313902 - DNA, 310 bp, Zea mays
  unsure (1)..(310): unsure at all n locations
cctcaaccanattcagagtcacagcggcganactctcggcgatgtctggccgcggcaanggcgngaanggtctgggcaagggcggcgcaagcgcaccgcaagtgctgcgtgacaacatccagggcatcaccaagccggcgatccgcaggttggcgangatgggcggcgtcaagcgcatctccnggctcatctacgtagagactcgcggcgtgctcgagatcttcctcgagaacgtcatccgcgacgccgtcacctacaccgagcacgctcgcctgcagactgtgactgccatggacgttgtctacgctct

SEQ ID NO: 313903 - DNA, 232 bp, Zea mays
ctcgacactcgccttcttcttcgaggccgtgcggcgcgagtactaccacgccatccgggtcaacttcttcttcgcgccgtggatcgcctgcctcttcctcgccatcggcgtgccgccgtccgtgagcactgagcccctgccgcagtggctctggtacgcgctcatggcgctcgtgctcttcgatgagtctcagatctacggccagtggatgtaccgctggcaagagcgcctg

SEQ ID NO: 313904 - DNA, 326 bp, Zea mays
acagagacaggcgtcttcgtactcgcctatctccgcgacccaaagcgttcccccttctcccattcttctctcatttctcaccaccgccgccgctaccccctttcgacaacaccatgagggagtgcatctcgatccacatcggccaggccggtatccaggtcggaaacgcgtgctgggagctgtactgcctcgagcatggcattcaggctgatggtcagatgcgcggtgacaagaccattgggggaggtgatgatgctttcaacaccttcttcagtgagactggcgctgggagcacgtccccgtgctgtttgtgttgaccttgagcc

SEQ ID NO: 313905 - DNA, 112 bp, Zea mays
tcccagttcttctgctcaataagacttcggataagtcgtccatcgccgggagctagtagtcaaagtcgctcgagaaggccgccaagtgccctaagaatgcatagactgactg

SEQ ID NO: 313906 - DNA, 306 bp, Zea mays
gttcaggaaaaagaacaactgcatgtatgatcgagtttttcaccaggcctttatgctttggacagcttgccctgcatgctatttctcatctgcttgagagatacatttaaacaagacaagagaaaatttaaagatccaagaagattgtatgcacctgggcgaatgtatcatatcgttgagaggaaattttgcaggtaatgtatcatgtcattgcaaatagtatcttcccctgcttgcgaattgctcttttctttttttatgtcataaatgatataaacgaaaacctactcttctagtatatgggag

SEQ ID NO: 313907 - DNA, 290 bp, Zea mays
ggaaaaaaagggctgccagaccaccagctcagcccatatggctatccatcccatataggggtggtaatggatcacgatccaaatgtttcttcacaatttgttagggccctaaattatttttagttcaaaaatgaatagagatagagcccgatcctaatccgatccgatccttacattttgtagtgtagaatttagagcccattgtcacccctaatcacgtacctgtcttgacctactttgagctccctccagcgccgctcacctacccttagagctcctccatagtcgtt

SEQ ID NO: 313908 - DNA, 293 bp, Zea mays
ggtagcgctcctgcaaacatggtgaacgttcctaatacacgccggacattctgcaagaaatgtgggaagcacgaagcccacaaggtgacgcagtacaagaagtgcaaggattctttgtatgcccagggaaagcggcgtgatgacgttagacagagtggctacggccggcagactaagcccattttccgctgaaagtctataactacgaagaagattgtgctgagacttgagttcgtggagcccaactgcagatctaagagtatgctggcgattaagagatgcaagcgttttga

SEQ ID NO: 313909 - DNA, 203 bp, Zea mays
gcagcgggcgctttacgctccatggcaagccgcgttagatgcctcaggtaccggcatctgggccaattcgccccactaggagggaaacaaactgctgcacagcttcccggggactggatctccattgaagtttgcaggacatgctcttgatattctttcacgagcaccactctggatgagagggtcttgactaatcggcatgg

SEQ ID NO: 313910 - DNA, 290 bp, Zea mays
gacacccagctcatcgcccacgacaaggaggtctacgacatcgcctggggcggcgcgggggtctttgcctccgtctccgccgacggctctgttcgcgtctttgatttacgggacaaggagcactccacaatcatttatgagtctggttcaggtggcagcagcggcggcggttccaactctggcgccggagatggtgggactgcgtccccgacaccactcgtgaggttgggctggaacaagcaggacccaaggtacatggccaccatcatcatggacagccccaaggtggt

SEQ ID NO: 313911 - DNA, 235 bp, Zea mays
gtacgcaaccccgactcacaagcacgtcgtctacgactggtttagcgccacgttccacacaacacactatcttgccacctctgctgagagcgagaagagatggcaggcaagggtgatctgccggcaatccgcatcgatctcggcacgacgtactcttgcgtcggcgtctggcagcacgaccgtgtcgagatcatcgccaacgaccagggtaaccgcaccacaccctcgtacgtcg

SEQ ID NO: 313912 - DNA, 268 bp, Zea mays
ggccgataaacaatacaacatagccctactccctgcctaacaaaaactcataatcatctagtctgaactgtgatggatatcccatgcgtaattttgttatactgaattcgttaagtttgcaggacatgctcttgatattctttcacgagcaccactctggagagagggtcttgactatcggcatggtacaggccatggaattggatcttatttgaatgtccatgagggtcctcatctaattagcttcagaccttctgctcgaaatgta

SEQ ID NO: 313913 - DNA, 249 bp, Zea mays
ccactgcacgcgataattagttgcctgttaatatgtagatttgcaagtatataatttatataattttgttgaggctgtgttggctgaactttgtcatctgcttcttcagaattttcaacacggggctggattttggagtgcaccttctagtcaaggaatgtgctaagcaagaaatttatggtgaatgaattattacttttaaattttcttgggtaatcaaagcaatcaactaattgatatgtttagttt

SEQ ID NO: 313914 - DNA, 309 bp, Zea mays
cacacacacggcaaccaagatgctcactccaaatccagaacgtcggacacctcacgctgtcaagatcgcagatcaaccgtgaaaaccctgactggccagactatcactctcgaggtggagtcgtctgacaccattgacaacgttaaggccaagatccaggacaaggagggcatccccccagaccagcagcggatcatcttcgctggcaaacagcttgaggacgggcgcacgcttgctgactacaacatccagaaggagagcaccctccaccttgtgctccgcctcaggggaggcatgcagatcttcgtg

SEQ ID NO: 313915 - DNA, 162 bp, Zea mays
tagctgcaccaagaagacacatgaatgggacaagactatcattgaatacaagacgaataagccatctcgcctgccattccttgacattgcacctctggacatcggtggtactaaccaagaattccgtgtggaggttgcccctgtctgtttcaaataagtgaa

SEQ ID NO: 313916 - DNA, 179 bp, Zea mays
cagccgacgaagggtacccggccttcgtgctcgtcaacagggtcagcggcgacgccatcaagcactcccagggcgagggccaccccgtcaagctcgtgccctactaccccggctaccatgacgagtcggtgctatggacggagagacgcgacgtcggccatggcttccgctcaggccgc

SEQ ID NO: 313917 - DNA, 214 bp, Zea mays
cacactacacctcccgaactccgcactacaagtttcgcttctcgtcgcgacgactgggcgagaccgacgccgccgccgccgcctgagttctttagaaatggctgatggtgaggacatctagtctcttgtctgcgacaatggcactggaatggtcgaggctggctttgctggcgacgctgcaccaaggggtgttttccctaggattgttggccgt

SEQ ID NO: 313918 - DNA, 277 bp, Zea mays
gttttgcggcatcatggctgcccttcggcctctggtgaagcccaagatcgtcaaaaagaggaccaagaagttcatcaggcaccagtcggaccgatatgtgaaaattaagcgaaactggcggaaacccagaggcatcgacaacagggtgcggagaagattcaagggccagatcctgatgcccaatattggatacgggagtaacaagaaaaccaagcacatgctgcctagcggcttccggaagtttctggtccacaatgtcaaggagcttgaagtgctg

SEQ ID NO: 313919 - DNA, 297 bp, Zea mays
ctcagggcggcgtccacggcgcggctgcacaagcgcaactggcgccgcttcgcgcagcacctcaagctcatcagcggcctgctggagcagctccgcgtgtcggagctgaggcagtacccagagacgccggagccgctggagcagctcgaggacgcgctccgccgggctacagatgaagtgggaagttcatcattcgtgtcaatgagcaactaaatctacattcttatcctatcccaaatggtggtcaacatgatttgcttcccaaccttgatgtgctatcttcacataccgatccag

SEQ ID NO: 313920 - DNA, 289 bp, Zea mays
tggcctgggtgtgttcagaacacatgtgctcacagggcttgcccgctgcatcttggttcagtgaacgagggtaggatccagtgcccttaccatggttgggagtactctactgatgggaaatgtgaaaaaatgccatcaacaaatatgctcaacgtgcacatccagtcattgccatgctttgagcaggaaggaatgggggtgcatggcctagggggaggatggcgactaggttcatcgatggcggcaagcagctcgtgttcgaccacgcgacacagttcttcaccgcgag

SEQ ID NO: 313921 - DNA, 295 bp, Zea mays
cgttacaagggcccgacggcggtgtcgtcgccatcctgcgcagagttgaaatatatccccacaataaagaagaaagaatcgcaagaacatggggtacaactgcacctggtttaccctatgttgatgaggctattgcgtcagctgggaactggctgatcggtggcgatctggaggtgttggaacccatcaaatacaatgatggtcttgatcactacagactttcacctcggcaacttaggaaggagtttgacaagcggggggctgatgctgtgtttgccttccagttgagaaacca

SEQ ID NO: 313922 - DNA, 278 bp, Zea mays
ctcgagccgattaaaagggcatgttaggattgtggcaaatgtacacacagtgcctaaggttagtcgttcgaattgaataactaaccttaggcaaaaaagttaggcaaagtgtggcaactgaggtaatgaaccaaacataccttaagactgactactctttatagatgaagcagcatcaagggacgcctgattgttttaagcttggaggccgttgaaagtcctcatgagagcagttcgtttattccaacttttagttttaatccctcttcacattctgg

SEQ ID NO: 313923 - DNA, 99 bp, Zea mays
ggtgcagggaagctatctgtccaccagaccagcactagcagccgctcactccagccattagccgcagctagcaaacaaatggccaccgtcctgagcagc

SEQ ID NO: 313924 - DNA, 290 bp, Zea mays
tacaaggttgctagtcatccgaatatatacgtgttggacactcctggtgtgctttcgccgagatttgcagatgatggttctggccccaggctagccttgacaggagctatcaaggactccttgttggaggattacgatactgtacagttccttcttgcgattgtgaactcagggaaggaatataggaagtgggagaagctgaataaagcaggagataccttttcttgtggcaacacagtcacgtccagggggcacaacagtatagagcaatatgcttcagatcacactca

SEQ ID NO: 313925 - DNA, 204 bp, Zea mays
gactggcgaggcaaaagcgcaaacgcgaccacagacagagcgcgcttcaaggccttttttttttgagataacaaggaggagaggatgagatggcggtcacgatcacctgggtgaaggcgaggcagatcttcgacagccgcggcaaccccaccgtcgaggtggacgtgggcctcagcgacggcagctacgcgaggggggccgtac

SEQ ID NO: 313926 - DNA, 248 bp, Zea mays
ctgaaggaaaagtgcctctatgggaggctttatgtgaaaagcacaatgcagtgatagagctgttagtagagagtggtgcagagctatcatctggagacacggccttgtatgcttgcatcgctgttgaggaaaatgatgctgagttgttgctggaacacggagctgacgtcgacaagcaagacagtaatggctggtcgccaagagatctagctgatccgcaatgccatgatgacattcaggctctcttc

SEQ ID NO: 313927 - DNA, 286 bp, Zea mays
attatacaaagagcggtacatactcttcacatgctcccatgttcttgtaagaaattctggaacctctttcacttgcagcctatgcgtgatcagaagggtgatgttcaatacttcattggggttcaattggatggaactgagcgtgttcgagaggctgctgcaaaagatggtgccatactggttaagaaaactgcagacaatattgatgaggctgcaaaggagcttccggatgctaatttgagacctgaggatctatgggctaatcactcaaaaccagtcttgccaa

SEQ ID NO: 313928 - DNA, 276 bp, Zea mays
gcgcctctacatttcttctctctctgctcctccgcctccgcctgatccatccaagacagggatcgccatgtcggactcggaggagcaccacttcgaatcgaaggccgacgctggggcgtccaagacctacccgcagcaggctggcaccgtccgtaagaacggcttcatcgtcatcaagaaccgtccctgcaaggttgtggaggtttctacctccaagactggtaagcatggccacgccaaatgccactttgtcgccatagacatattcaatgggaa

SEQ ID NO: 313929 - DNA, 307 bp, Zea mays
ggatttctttgtcacactgcatggcatattagctgagaaggaagaagttgctgagttgcaacctgtacctgatgctcatgtacctgtattgaaatttaagttccgtgggatatcaattgaccttctctatgctagcatctctctttcagtgataccagcggatttcgatatttctcaaggatctgtactttgtgatgttgacgaagcaactgtgcgaagtcttaatggttgcagagtggcggatcagattcttcggcttgttccaaatgttgagaatttccggacaacactcagatgcttgaagtac

SEQ ID NO: 313930 - DNA, 309 bp, Zea mays
ccggacgcgagctcgcggaccgtgaaccgggccataatggctgagctggtccgcctctaccgctcgtccgacctggggatgcggctcccggcctacgacggccgcaagaatctctacaccgccgggaccctcccgttcgacgctcgcgagttcgtcgtgcggctcaccgatgaggacgacggcaccggcgtcccgcctcgggagagggagtacagggtcgccatcaagttcgccgcgcgcgccgacctccaccacctcaggcagttcatcgccggacggcaggcggacgcgccgcaggaagccctacag

SEQ ID NO: 313931 - DNA, 300 bp, Zea mays
gtgaagagcaaggaggcggagaagcccgccaagggcaggaaagggaaggccggcaaggaccccaacaagcctacgagggctcccagcgctttcttcgtgttcatggaggaatttcgcaaggagttcaaggagaagaaccctaagaacaagtctgtcgctgcggtggggaaagctgctggcgacaggtggaaatccctgagcgagtcggacaaggctccctatgtagccaaggctaacaagctcaagctcgagtacaacaaggccatcgctgcctacaacaagggcgagagcactgcagct

SEQ ID NO: 313932 - DNA, 153 bp, Zea mays
actgaaaagaaaaatagcaaaatgactgcggctcagaaggctttggctaaaggcatcagtacttttcattccactcttgtcaactgtagccaaagccttctgagctgcagttgacaagagtggaatgaaaagtattgatactttttttggggt

SEQ ID NO: 313933 - DNA, 264 bp, Zea mays
acgccgaccagcacctacgccccgcctgaagtgccctcgagggtcgccgccttgttcctcaccatcccctatgccttcttcctaccggagctggtgtttgggatctgggtgtggactctggtggctgccacacacgtggcataccccctgctgcacggatgggtcgtgtatgtctcgctcacgtcattcctcgtctccctgatgctcctgctgccctacatattcgggttttacaaacgatttgactcctggagagtactggac

SEQ ID NO: 313934 - DNA, 299 bp, Zea mays
  unsure (1)..(299): unsure at all n locations
ccgctcnccccgaccgattcggctcggctcgacgcaactgtttcaacaaccgcataaacaagatacctgttatgactcagttcagccctgttctcttaaccgtcacattcatcgtacctatcttggtggggacatcaacttcactgatggatctgttgaggtgctggctgcaacacaaatgcctggcgaggctgctggttggttccagggcacagcagacgccgttagacaatttatctgggtacttgaggattattacaagcatacagctatagaacacattttgattttgtcaggag

SEQ ID NO: 313935 - DNA, 225 bp, Zea mays
ggctgtgtaatactatattagtataccataatctagttaaataaaacctttttaactagatcgatgcacaagcgccgagccacaggtgtgaagcatgaggcctggaggaagaagcgaaagtatgagcttggtcgccagccagctaacaccaagttgtcaagcaataagacagttaggagggtccgtgttcgtggaggtaatgtccaatggagggctcttcgcctt

SEQ ID NO: 313936 - DNA, 273 bp, Zea mays
  unsure (1)..(273): unsure at all n locations
cctttgtatccctctgttggtggggaaaggtgtctttctttctgccctctcccctcaaaataattctgttcacttttgtgttatttccttgtgtactccagcattggttatagtcatgggaaaggaaggtgtctacggaggctcacttaacaagaaagcatatgaattcgcatttgnactgaggatgtctgatgtgtaagcagcctctccccatctacctagctactgtcttcatcaacaatcctaattatggtcacatgctaccattctgta

SEQ ID NO: 313937 - DNA, 221 bp, Zea mays
  unsure (1)..(221): unsure at all n locations
atngctcacacacgcaaccagatctcccccaaatccagccgtcggcacctccgcttcaagatgcagatctctgtgaaaaccctgactggcaagactatcaccctcgaggtggagtcgtctgacaccattgacaacgttaagggcaagatccatgtcaacgattgcatccgcgcagattagtagcggctcatcttcgctggtaaagcactttaggacaggtg

SEQ ID NO: 313938 - DNA, 211 bp, Zea mays
  unsure (1)..(211): unsure at all n locations
ctatcaccctcgaagttgagtcgtctgacaccattgacaacgttaacgccaacgattcagaccacgaatgcgatccgcccataccagcatcgactcatcttcgctggcaaacagcttgaggatcagcgcacgcttgctgactacaacatccaganagagagcacactccaacttgtgctccgcctcagcggaggcatgcagatcttcgtga

SEQ ID NO: 313939 - DNA, 285 bp, Zea mays
  unsure (1)..(285): unsure at all n locations
ttggagaactcctcggctcgatgagatcgtgacattgagatgacgatgagtanggcgcgcgctcctcctcctcctcctggtctcggcgttggtctttcagatccacgcctccgactacgtgctgtacgagccgttcgatgacgactctgtagggagaatgggtcgtctccatgaaggatgaataccaacgtgtgtggaggcatgctacgagtgatggtcatgcagactatggactccttgatagtgatgaagcaatgagatacgccataatcaaggagcttgatg

SEQ ID NO: 313940 - DNA, 354 bp, Zea mays
  unsure (1)..(354): unsure at all n locations
tcatcgcgagtctccagctaccgcatcaaatcnacncncatccncgtcgaccccgacaaacncgacccgatggcgctcaaggccgagaagaagccagcggagaagaagccggcggccgaggagaaggcggagaagacgaccgcacgtaagaagcccanttccgagaagcgcttgccggcctcgaagtcctccggcaaagatggcggcgagaatgaagggaagaagaaggccaagaagagcgtggagacctancaaatctacatcttcaaggtcctgaagcangtgcaccccgacatcggcatctcctccaaggccatgtcgatcatgaactccttcatcgacgacatattcgag

SEQ ID NO: 313941 - DNA, 335 bp, Zea mays
  unsure (1)..(335): unsure at all n locations
gatcgctcaacgactcagacagcacatgtgctctactgatgctgacaagctctgttatcgctgtggcgaaggtgaacctgttgagattggcgctgagtcgcttgccagtctgctgattgtctacacttggacacagacgtacttttctaaatttgaggaccctgtctctgactctgctagcatgtgtantccccaggtgaaggctcatggcgagaaggtgataacgccttcgatgatggcctgaaacacttcgacaacctgatgcgcacctgtgcacacctcagtgagctcgactgtgacaagctgcatgtcgatcctgagcacttcatgctcct

SEQ ID NO: 313942 - DNA, 343 bp, Zea mays
  unsure (1)..(343): unsure at all n locations
cttctcgtgtccgttcgggttccacagngtcacgcgcagggatctcatgtcctccttcatcggcagcatggtctgctgtgagggcatcgtcacagatgttcattggtaaggccanagttgttagagtatcacttgtgcctgtaactggagctttctctcgcgtaatatagagcatccttctttgtaggctgctactgctctgttatgcacagggatgcacgcagctcgtgcacgagtatgatgtgtgatatagtacagcatgtcatcagaggctgaatcgactgcactcagatgtggtattaagtgactgtgtgtcactgcgcggccatgtgggtcagctcag

SEQ ID NO: 313943 - DNA, 191 bp, Zea mays
cgtgaatcaggcgtcggagggccccctcaagggcatcgtgggctacactgagcaccaggtggtctcctctgagttcaacagcgacacccactcctccacctttgacgctggggctagcattgccctcaacgacgactttgtcaagctcagttcctggtatgacaacgaatttggctacagcggcagggtgg

SEQ ID NO: 313944 - DNA, 266 bp, Zea mays
cttgcctggacgctgcgccacatcgcaccggcccctacactgtggtgtccagcagcatccggcttcatggggggacttgcaccctgcagcaggctcctgctcctgcctctcctgctggctgtaagtggtctccgtcctgtctaggcccacgcccagatcgattgcagttgctccacggtgaccccgggcgtgctggcacccatcgttatgtgagtcctggtgcttacagtgctcattgccctggccgtgtacttcctgggccggct

SEQ ID NO: 313945 - DNA, 286 bp, Zea mays
  unsure (1)..(286): unsure at all n locations
cgctgaccggagcggaaccatggctcgatcggtgaccgggatctgtctgggtgttatctctctcgacgtcgagcctgacaatcacatggctcccccaatgccagtgtagtctcgtcagccaccggagaatccgatcaccatcttcctcaactgctacgcccctcagttccanccacctcagatagaaattgagctactgaagaatggaaagaagataccaaatatcgagatgtcagatctgtccttcagcaagnactgagtctttctacatcctggctcacactga

SEQ ID NO: 313946 - DNA, 283 bp, Zea mays
gcacttcaagaaataacaggacttgttgatggacagctttaccgattttgacaaacagattgggatcactgctggtcctgaatgcaaggcagcacttcaagaaataacaggacttgttgatggacagcttcagtctggccgtaactcagttaaggagctgtttggagcgacaaagttagaaaatgatggtgacttcctgtacttactggcagatgctgctgctattgcgttccaatatggtaatcctgatgtcttgtgctccccgctagctgaagcaaagaag

SEQ ID NO: 313947 - DNA, 117 bp, Zea mays
caaaggtgaatgacgaatggctggaacgcgagtgcaaagggaaggtgggcattttccccaaagtttttgttgaagactgcgcaactacagatttggaaagcactcggagagaagtct

SEQ ID NO: 313948 - DNA, 220 bp, Zea mays
ctaatccagtaactcgcatcttcctgcgtcatccaagttctagcagcgcacgctacggtttcgacaatgtcggggcgcggcaagggcggcaagggtctgggcaagggcggcgccaagcgccaccgcaaggtcctgcgcgacaacatccagggcatcaccaagccggcgatccggaggctagctaggaggggcggcgtcaagcgcatctcggggctcatct

SEQ ID NO: 313949 - DNA, 286 bp, Zea mays
caaagaccgcggctggaacgacccgccacaattctcctatgggctgcagactcagactggtggaaccaaacgcactcctcgtactaggatggttgcggacccacaggttgtgtttggctagagcttccagagacttctggagcaacgtctagtggatcatccacatccttcaagtagagcttccaggcctgcacccatggggagctgtcctgcttctggtgtggacgcccagatctcgagtcatgagtctgagactcgaatagaggagtgctagaactctggaaca

SEQ ID NO: 313950 - DNA, 264 bp, Zea mays
cgcgaggatatgacttttgaagaagctgttaagctggttgagaagtgcttgttgatagctgacctgtaccggtacagcaacatatagcaagcacttctcaaccagcttaacagcttcttcaaaagtgcttgctggtcttgctgtaccgtgacaggtcatctatcaacaaattccagattgccaagatcacaactgtaggatctatcatctacccaccatattccttgaagacctactggggcttctctcactttgaaaacccag

SEQ ID NO: 313951 - DNA, 318 bp, Zea mays
tttgctccatcattatgatacctaatctatagatgtcagactttagggacattttgccatggtattggtattctggagcgcagtatcctagggataaaagccgttcattgctcatagtacgtgatacttcagccagccttgatagaccaaagtctgcaatctttggtaccatttgatcatgtactagtatgttggcaggtttaagatccatgtgaatgatgtcccttaagtctgacatctatagtttaggtgtcataatgctggagctggtgaccgggagctaggaggagccggacattactaatgtacttcgacggt

SEQ ID NO: 313952 - DNA, 305 bp, Zea mays
ttttaatcctcactctaagatacatggcggtccatcggatgaagagaggcatgttggagacctgggcaatgtggctgctggaaaggtcggtgtggccaatgtgtccattgaagatcgtgtgatctcactctcaggagagcattccatcattggccgtactatggtggtccacgagaaacaagatgacttgggcaaaggtggaaatgaggaaattccaaggcttgaaatgtctggaagcgctttggcttgtggtgtgattgggattgcccaataaacattccctatgtggtctgagtctcagactc

SEQ ID NO: 313953 - DNA, 314 bp, Zea mays
tatcaggttctgaaaagggtttctgaggaacactgggtgatcttcacatgggccatgcgctcaataaaatcctcaaggattttataaatcgctacaagctgcttcagaatcataaagtgtcctttgttcctggttggtattgccacggccttctaatagaactaaaaggtggcttgtgcgaacgaggcgtggcaatcgatgctgcatggcaaacccaaaaatcttcaaaagcctaggcaaaagtagtaactaaagatacatcaccttgtccagtttttctgcttttacttcgactatatgtcattgtgccacaa

SEQ ID NO: 313954 - DNA, 211 bp, Zea mays
gtgaatttggctttgctacctcaatttgcaggtgtgtgtttgcctttataaactgttgcaaatggcagtaatatatttgtgagtaagagcaatatttaaacatttttacacacatcggtgttggaaaattgccattttaggccacaattttgaaaaatttttggactgacttccacagagtgttttgccaccggtagctcatcaattaaac

SEQ ID NO: 313955 - DNA, 297 bp, Zea mays
ccgactacaacattcagaaggagagcaccctccacttggtgttgcgtctcaggggcggcatgcagatatttgtgaagactctgactggcaagactatcacccttgaggtcgagtcttctgataccatcgacaatgtcaaggccaagatccaggacaagtagggcatccctccggaccagcaacgggtcattttgccgggaaacaagttgaggacgggcgcacgctggccgactacaacattcagaaggagagcacctccacttggtgctgcgtctcaggggtggcatgcagatcttc

SEQ ID NO: 313956 - DNA, 147 bp, Zea mays
ctagcaagtactatgtgactatcattgatgccccatgttacagagactttatcaataacatgattacagggacatctcatgctgactgtgctgtcctgattgttgctgctggtgttggtgaatttgaagctggtatctccaagaatg

SEQ ID NO: 313957 - DNA, 266 bp, Zea mays
gcatcagcaagcaagttcctcaattacttcgttaagcaaattgttccagcattcgagaagattcctgaagaaaagaaactggatttgctcaagactattgcttcaagttcaccgtacgcgacagcccaagattcacgtcagctgcttccatcggtggtccagttactcaacaaatatatgcccggaaaaaaggtggcctatctcccccatttttgtgtaaacttgctgtacacttatcatcatttggctcataagactccaaacac

SEQ ID NO: 313958 - DNA, 291 bp, Zea mays
gccgctgagatccggtcgcgcctcgccgatgccgtgagagggatattctcggagttcgagagcgtcgtgctccgcgatccgtccaagaccgcggtgcctggcggtaccgtccacccgctcactcgctagcgctcgtcttgctgccgagggcaatgagctcgcgccgtccttagctgacctcgagctccccgagcttgagaaccagttaccccttgcctctcacattgtctggatcattgttattcttgaacacaacctggagggggaaatgaattgacgcggaaagcttgc

SEQ ID NO: 313959 - DNA, 107 bp, Zea mays
  unsure (1)..(107): unsure at all n locations
cattctgacagtcttacacaactgtggatatacctcacagtctttcgaangatgttcagccaatcataaattttcattgtggttattcatatagttatgaatagttg

SEQ ID NO: 313960 - DNA, 345 bp, Zea mays
  unsure (1)..(345): unsure at all n locations
atcggctcatgacggcgcttcgtatcgctatctcgcgactagagctttcccaattcgccccttctcacatttatcaccaccgccgccgctgcccacgttcaacaacaccatgagggagtgcatctcgatccacatcggccaggctggtatccaggtacggaacgcgtgctgggagctgtactgcctcgagcatggcattcaggctgatggccagatgcccggtgacaagaccattggggggagtgatgatgctttcaacaccttcttcagtgagactggcgctgggaagcacgtccaccgtgcatgttttgttgacattgagccnactgtcatcgatgaggtgag

SEQ ID NO: 313961 - DNA, 330 bp, Zea mays
ggaactgctgcgattttaacagtagagcttgatgctgctcttggcgggcgtgctgttcagtaccgagaagtacaaggacatgaaacagaaaaattcctgtctgatcttagaccatgcatcatgccacagccaggaggagtggcatctggattcaaccatgttgagtgtcatgagcaggattacaagacccacttatatgtctgccatgggaagcatgttgttcatgttaacgaggttccctttgctcgatcatcccttaatcatgatgacatatttattttggatacgaagtccaattttccattcagtggctcaaatcatccatcagag

SEQ ID NO: 313962 - DNA, 317 bp, Zea mays
gcttcctgctaacagttcgttctcaaagcacagcttagcatacatgcaagcaagtgctcagtatatcaagcaggtgtctggcctattaaaggtcggtgtaactactctgcggagcagttcagcctatgaagcaccacaagaaacatactcctgccagttgaggcttaaaagttcacctgaagatgatgtggtacctatgcggccaggatctggtgaaacacatgtcatctttcctgatagcctcggagatgatttgatcatcgatgtgtctgattcaacagggaagtcttgtggtcgtgttgttgcccaagttgcta

SEQ ID NO: 313963 - DNA, 258 bp, Zea mays
ctctttcgccggcgcgtaggaagagatggcagagcgtttgacccgtatcgccatcgtcagcgaggacaagtgcaagcccaagaagtgccgccaggagtgcaagaagagctgccccgtcgtcaagactgaaatgtccatttgatgccattgaaatcatcaaccttccaaaagacttggaaaaggataccactcaccgatatgggcctaataccttcaagttgcacagattgcctgtacccaggcctggtcaggtttggg

SEQ ID NO: 313964 - DNA, 280 bp, Zea mays
gttacttctccctccgccgccactcccctcccattcaccgccaccgccaattccataccgtcctccgccacctctgctgagagcgagaagtgatggcaggcaagggtgatgggccggcaatcggcatcgatctcggcacgacgtactcttgcgtcggcgtctggcagcacgaccgtgtcgagatcatcgccaacgaccagggtaaccgcaccacaccctcgtacgtcgccttcaccgactccgagcgcctcatcggagatgcggccaagaaccaggtcgc

SEQ ID NO: 313965 - DNA, 282 bp, Zea mays
caaaaaagctgaaggaactagagaaagaagcttacagattggcaggcaagaatttctctctaaatgctactgctgatatcgcagacattctatatacacacctaaaattgccagttccaaaaggctgtgagaaagggaagctgcatcctagcactgacaagcagtctttggaccacctaagggatcaacaccccattatcccattaattaaggaacacagaacattagcaaaactgttaaatggcacgttgtggtccatttgttcacgtgctcaattgtgca

SEQ ID NO: 313966 - DNA, 282 bp, Zea mays
ccgagtcatgactgtttcctttcacaagtatggggattttttccctggtactggacatatcactgacgttggggcagccgaagggaagcattatgctctgaatgttcccctgagtgatggtatcgatgacaccacctttcgtggtctgtttcaatgcatcattaagaaagttatggaggtttatcagccagacgtggttgtcctccaatgcggagctgactctttggctggagacaggttaggttgcttcaacctgtctgtgaagggtcatgctgactgcct

SEQ ID NO: 313967 - DNA, 253 bp, Zea mays
aatcctcttcctcgagttctcctcaaccaaattcaaagtcacagcggcgaaactctcggcgatgtctggcagcggcaagggcgggaagggtctgggcaagggcggcgccaagcgccaccgcaaggtgctgcgtgacaacatccagggcatcaccaagccggcgatccgcaggttggcgaggaggggcggcgtcaagcgcatctccgggctcatctacgaggagacccgcggcgtgctcaagatcttcctcgag

SEQ ID NO: 313968 - DNA, 301 bp, Zea mays
aatcgcgtgatgttgtctcttggtccgcggtgatatcaagccacgcgcaccatggctgtgcaagggatgctttatgcgttttcaatgaaatgctggatgcgaaggtggcaccgcctaacgagatcacttttctcagcatccttactgcatgtagtcatggaggattggttgatgagggactcaggtattatggaattatgaatgatgaatatggattgagcccaaccataaagcattgcacctgtgttgttgatcttcttggacgagccgggaggttagccgatgctgaggctttcataag

SEQ ID NO: 313969 - DNA, 284 bp, Zea mays
tgtcgttgttgaaaagcatgggatggtagctgctatgccaacaaaagcctcatcctcaaccgtgcatccttgtgacacagcactgtgacctcttgtgcatgtggcaccgtctgatctaagtgggaaagtctttccaacaatcattggtaataacgtcacaataggtcacagtgctgtgttacaaggatgcacggttgaggatgaggcttttgttggcatgggggcaaccctattagatggtgtcgttgttgaaaagcatgggatggtagctgcaggctcccttg

SEQ ID NO: 313970 - DNA, 293 bp, Zea mays
caataatacttaattatttagtctgcaaacatgtaaagtggttgctatttttagatattgagtgctctgcctacaattgagttggatcctcccacaatatctatgacgtttggcgtgaatgattcaccgttggctggccgggatggcactcatgacgggttcatccatcattttcttggaatggatccatcccgcgaattggcttaccggttgccttccgggaacactgctctgctgtgcagaatgccatgagttcagctcgtgttgaaaacaaaacagctaagggaggttca

SEQ ID NO: 313971 - DNA, 212 bp, Zea mays
gtcaagagccctccccggctcaatctactgtgaaggtgaggtaggagaagctaggggatcgaataactgatctccaccagcttgtctccccgtttggaaagactgacacagcgtctgtaatccttgaagccattgggtacatcagattcctccatagtcaaattgaggctctgagctccccgtacgtgggcggcagcaatggaggtgggggc

SEQ ID NO: 313972 - DNA, 292 bp, Zea mays
  unsure (1)..(292): unsure at all n locations
gcattctcgaattacgattcccaatccagcaaaccctaccagccttttgcaaactcagagagggacccgatggcacccaaggcggagaagaagccggcggcgaagaagcccgcagaggaggagcccgcggccccggcggagaaggcccccgctgggaagaagccgaagggnaagaagcggctcccggcgggaaaatccgccggcaaggaaggcggtgttgacaagaaggggcggaagaaggccaagaagagcgtggagacgtacaagatctacatcttcaaggtgctgaagc

SEQ ID NO: 313973 - DNA, 291 bp, Zea mays
  unsure (1)..(291): unsure at all n locations
gttgaggagataattggggagaatgttcgtgccatctgcagaggtgatagctgcaagttccatgctgctgggagagaagacattgatgtacggatgcttggatctggtcgtccatttctagttgaagtactgaatgttcgatccattccatctgaaactgaagttcaacaaattgaagagagaattaacaactctgaaaagaaatatgtcatagttcgaaatctcaagttggtagataatgaaatatggaccatgatgcgtgaaggagnagcagagaaacagaagcagtac

SEQ ID NO: 313974 - DNA, 281 bp, Zea mays
cgcagagataggcgtcttcgtactcgcctacctccgcggctcaaacctttgccccttctcccaattccctccgtcggccgccgctccatcccgtacgacgacaccatgagggagtgcatttcgatccacatcggccaggccggtatccaggtcggaaacgcgtgctgggagctgtactgccttgagcatggcattcaggctgacggtcagatgcccggtgacaagacattgggggaggtgatgatgctttcaacaccttctcagtgagatggtgctgggaa

SEQ ID NO: 313975 - DNA, 220 bp, Zea mays
  unsure (1)..(220): unsure at all n locations
acaaaacctacctagccgccgccgcacganncccacatcgccgccaagatgcagatctttgtgaagactctgacggggaagaccatcactttggaggtggagtcctcgacaccattgacaatgtgaaggccaagatccaggacaaggagggcatccccccggaccagaagcggctcatcttcgccggaaacagctcgaggacggtcgaccctcgccgact

SEQ ID NO: 313976 - DNA, 269 bp, Zea mays
cagatgttgacttccatatcgacagttgatgatctaaattaccctgaaaagacagagacctattatgtagtcaacgttccatacatattttctgcttgttggaaggtactatcagttacagccaacgctcggacctacggtttttagtaatttttttagcagaaaggaactgatgacagttaatttgagcatgccgctaggttgtgaacaccctctttctgtactctactgcataaggatacaccactgcggctgctcaattaactgtc

SEQ ID NO: 313977 - DNA, 232 bp, Zea mays
gtccctattaactgcattcactcactattatatcgataagggctatgacggtattgtgctcgagtcctggtcaagatgggctatttatggtgtgctggatgaccaagagctacgttacatggcacttgaatttgttaagcagctgggagaggttttgcattcagtcaattccaaaatcaagtagccaccatttggaattaatttatgttattccagctccaggattgcaaag

SEQ ID NO: 313978 - DNA, 289 bp, Zea mays
gtgatcacgcgcgtcacccgaaagggaatcgggttaagatttcccgagccgggacgtggcggcagacggcgagagcggtctgcacggcggggcctgcgccgactacatggtcgtcgccacaggccgctccgattggcacgtccgtaacatcgcgcaggcgctcctctacaagataaagcaaaagcagaagggctctgatagaatattgatgccaagtgtagaaggtcagcaagcgggaaaatgggttgtcattgattctggaagcataatcatccatgcacttgaagaa

SEQ ID NO: 313979 - DNA, 275 bp, Zea mays
gccacaccccgtgtcgaaaccccagggcgccaagcttcccgcgggccaccgccgctgccgatgccggtgccgaagccgatggagaggaagcaagccgcctacagcaacctcgatgagaggtacgcgatccagggggagaagtaccaggggcagcagtacagccatatctacttcacgcgcctccaccacatgcggaatctcctccacgccctcgtcccctcctggaagccgcaactccctgtcactacagtgttaggacttgaagaaggaaagga

SEQ ID NO: 313980 - DNA, 187 bp, Zea mays
cggactggtatctaactggacttggttctcttgcaacaacacaacgagagcatgttgctttacacgctttccgccgtcttagtgtgcagatgcaaaatgcaatacttcaaccaagtccagagcatttcccgaagtatcaagagcaaccaccagtgctgccagactgcgtcaccccaaatttcgctga

SEQ ID NO: 313981 - DNA, 297 bp, Zea mays
tccacatagcacattattgtctggttacttcagtaaggtggtaatatgtttgatgctgaggaagactgctccacttatgagttatgttcaggggcatccatagatagttgtccagcttgttgacctgattggcatcacatcgataatggaggtgctgatacgactgattggtgctgatgagaccatatattcaaactatggtgatacattgcagtggttagaaaatacagatgtccttgaaatgattgcagacaagtttggctcatcggattctcctgaagtgcatgccatgctgcg

SEQ ID NO: 313982 - DNA, 276 bp, Zea mays
catatccgctcccctacctctccagcatcctcccgtctccgtcgtctgcgtctccgctcctcacctcgccagccatgggcaagatcaagatcggaatcaacggtttcggaaggatcggcaggctcgtggccagggtcgcctggagagcgaggatgtcgagctcgtcgccgtcaacgaccccttcatcaccacggattacatgacgtccatgttcaagtacgacaccgtgcacggccaatggaagcacagcgacatcgccctcaaggactccaagac

SEQ ID NO: 313983 - DNA, 206 bp, Zea mays
gggtggtggtggatcccatgctgatccatttgacattttctcatcattctttggaccctcttttggaggaggtggtggaagcagcaggggaagaaggcaaaggaggggagaagatgtagtccactcacttaaagtttctctggaagatctttacaatggaatctcaaagaagctctctctttcgcgcaatgtcatctgctccaagt

SEQ ID NO: 313984 - DNA, 154 bp, Zea mays
ggatctactgtcaagtagtaatgaggaatggtctgtttagatgctagcaagcggtttgcggtaacctttcttatctgtgcatttggaatatcaacgtaacctaaccctggagctgcacgtgttgacaaacttgtcaagttgcgaggtgaactga

SEQ ID NO: 313985 - DNA, 146 bp, Zea mays
atccgggaagcattgtttcagacgcacgagaatctggaccacctagcaatgatggatagggatttgggagctctaccagaggttatgatactgaaagcaagctcttcagctcagaaatattttaggagagcacacgattacattgg

SEQ ID NO: 313986 - DNA, 300 bp, Zea mays
atcgtggactccaacttccggttcgacacccaggcatacgagcgcaacggcccgctctacctcagcaccttcttcgccgtcacctacggggtcggcttcgcgtccctcaccgccacggttgtgcacgtcttcctcttccacgggagcgagatctggcagctgagcaggtcagcgttccaagagaagaaggtggacgtgcacacgaggctgatgaggaggtacaggcaggtccccgagtggtggttcatctgcatcctcgtcgccaacgtcgccgtcaacatattcgcctgcgagtactac

SEQ ID NO: 313987 - DNA, 311 bp, Zea mays
  unsure (1)..(311): unsure at all n locations
cggagcacaagagccaggagagtgggaaaatgcacgcttgcggacacgacgtgcacacgacaatgcttctgggggctgccagaatactccaggatcgcaagagcgacctaatggtaactgatgcttaattaacccggtcaattccacacagnttcgtgttgtnactccacgttcccatgcgtatgccgtcgacgaggtgttcttgcttgcttcttgtgctcaccatgcanggcaccgtgaagcttgtattccagccggcagaggagggccnaggcggcgcgtactacgtgctgcaagaaggcgtccttgac

SEQ ID NO: 313988 - DNA, 294 bp, Zea mays
cactggcaggcaaccatcatgggtcctcctgatagtccatatgctggaggtgttttcttagtgaacattcatttccccccggactaccctttcaagcctccaaaggttagcatcactttattatagagttaaattttcttttcgtattttgttttctttattggaagatgaaaagtgttgttctgtcagtctacgaatgggtttctagctgagttggttaggtggctctattagtactcctgaagtcttgggtttgactcttcatgagagtgagtttaggctggaggtacaaaa

SEQ ID NO: 313989 - DNA, 282 bp, Zea mays
gttggagcaagcattgcagttctggaagcaagagtttatcaaaggaaagatggacccagacaagtttgataaaggttactcttacaatatccgacatagctttggaaaggaaggcaagaggacagactatacgccattcagttgcatgaagattatcctgaccaacccaccaagccagggggatttccatgggtgcccattccgtcacagtgatgcagagctgctgaagcagaagatgcagacctacaagatccctgcctcggggatcagccagattttgga

SEQ ID NO: 313990 - DNA, 213 bp, Zea mays
cgaatgcatacatgagctgatctgcagcgggaacaagttccattcgtgtgtttttcacccaaattacccgaatttgcttataatcggttgttatgagtccctagagctttgggacattagggagaagaacacggtgacaatcagcaacgctcatgacggcatggttgctgccctagccgcgtcaagtgcatcggggctggttgcatcagtgag

SEQ ID NO: 313991 - DNA, 198 bp, Zea mays
gcgccgcggccggccccccggctccggcaagaagaagcagttcgaggccctgggttcctggggcatcgctttcacccctcacatcctcgccgtcaaggcaggcgaggatgttgcttcaaaaataatgacattctcacagcaaggccctcgcacagtctgcatcctctcggcgaatggcgcgattagcaacgttacgct

SEQ ID NO: 313992 - DNA, 135 bp, Zea mays
agaaggttggatacaaccctgataagatcaccttcaaaaccagagcttggcacgactgcactcttatcagggttgtatccaaccttcttcaggtaggcagcggcttccttcctgttgaaggttggatactacctg

SEQ ID NO: 313993 - DNA, 219 bp, Zea mays
caaagacgggctcatccacaaggaggagttccagctcgccttgttcaggaacagcaggagagcgaacctctttgcagacagggtcttcgatctgttcgatctcaagcggaacggagtcatcgatttcgaggagttcgtgcggtcgctcagtgtgttccaccctaaagcagatacgtcggagaagacggcgttcgctttcaagctgtatgatctgagggg

SEQ ID NO: 313994 - DNA, 287 bp, Zea mays
gtctccagttgcacccagacaagaacaagtcggttggtgcagaggttgccttcagacttatctcggaggcatggagtgtattgtctgacaagagtagaaagatgctttatgatcagaagaggagagaccattgtgtggcgagtgtgtccaacggtttgtatgcttatgattatgatacaaagctcagtaagcgagcacgaaaaaatgccgttgcctctgcctcagcagctgttgaggctactactcgtcttgcaggggctgacacatctggacatcatgcaacagct

SEQ ID NO: 313995 - DNA, 194 bp, Zea mays
gccgcggaagccagcacctcaaagccatggcgtaagtggaccacctcgctgccgagagggccaccgcgcgcttcgacgtcgaggagatgaaggttgcgtgggccggctcacgccacgccgtccacgtcgccgaccgcatggcgcgcctcgtcgcatccgaccctgtcttccgcaaggataacaggaccatgctc

SEQ ID NO: 313996 - DNA, 283 bp, Zea mays
gttgattcagacgtcctccgctgccagtctgcgttgtcataccgtggagtttgttcgtccaggatattgccttcggaggacgatagtcttgcaagggctcttcgctcgtgccactcgcagcctttctcattcgtagaggaaggagacaccggtgcatcagggatgataagcttagcagagtatctaggaactaatgtagctgaccacatccctgaaactcccaacaacctgtcagaggagatggtgagatgcatggcggggatatactgcagacttgcagatc

SEQ ID NO: 313997 - DNA, 137 bp, Zea mays
cggtgctgtgagaggtatcggtaggagctacgatgactccggggtgtgaagccgaccggtctgacttttcatcactgccgaacccactcgaaccacagccatgtccgggtacgagatgattcttgatcctactatga

SEQ ID NO: 313998 - DNA, 185 bp, Zea mays
cacaaacaagagcttaaactgtcacagtacaaggatatcgagaagcgatatactaatcaatttctccagcttaagacaactgaaatggcaaacaaggacttggacagatattatactgctttagacaaggctcttatgcggttccacagcatgaagatggaggagataaataaaataatcaagga

SEQ ID NO: 313999 - DNA, 279 bp, Zea mays
ttccccttccctccctccctctccccgcgggccgccagaggcaatttcgccctcgattcgaccccgattcgtccgcccgcgaccgggattccctccgccaagcgcggatctgaacgctgcgctccgtgtcgccgctcgaatccgccatgaagggggccaaatccaagggcgccgccaaggccgatgccaagctggcggtgaagagcaagggggcggagaagcccgccaagggcaggaaagggaaggccggcaaggaccccaacaagcttaagagggttc

SEQ ID NO: 314000 - DNA, 291 bp, Zea mays
gttagcaaaatccaaggatgacgggggttccaagaagctgtctgaggatgcaaatggttcggctccggctgctgcatctttgtcaggcgctgttgacttggtccaggaggaggaggaggaggagggtgatggggaggaggagccgctaatccaggccgcggagtgccgcatatgccaggaggaagatagcgtgaagaacctcgtgaaaccgtgtgcttgcagcggcagtctcaagtatgctcacagagcttgcgtgcaacgctggtgcacgagaaaggagacacacttgtg

SEQ ID NO: 314001 - DNA, 307 bp, Zea mays
gttgggcgcagagaatccccaagcaaacaaacagggtagagggagaggagaggagaggagaggagaggttgggtctgggacaccatggctccgatgaagctgtacggggcggtgatgtcgtggaacgtgacgaggtgcgcaacggcgctggaggaggctggctccgactacgagatcgtgcccatcatcttcgccaccgccgagcacaagagccccgagcacctcgtccgcaacccgtttggtcaggttccagctctgcaggatggtgacttgtacctcttcgaatcacgagcaatctgcaagtacg

SEQ ID NO: 314002 - DNA, 304 bp, Zea mays
ctccgctcggccaccagctttgaccgcctcccctcccctcctctcctgtgttcctccataccccactccccccgcaggagcggcgcggcggcggcaaaggcaaaggcaaaggcaagatgttcgggcgcgcgccgaagaagagcgacaacaccaagtactatgagatcctcggggtgcccaagtcggcgatcccaggacgacctcaagaaggcctaccgcaaggccgctatcaagaaccaccccgacaagggcggtgaccccgagacattcaaggagctcgcacaagcctatgaggttttgagtg

SEQ ID NO: 314003 - DNA, 273 bp, Zea mays
  unsure (1)..(273): unsure at all n locations
gtggtggatatggctataaccaaggcagatatgggaactatcaagaaaatggtggaatgctcagtcattcatccaccgtggagaagctctacgcatgggagaagaagctgtttcttgaggtcaagagttacgaggggtataagcaggagcatgataagaaggtcagtctgttgaggaagcaagaggtgaagggtgtggattacttgaagatggagaagaacaagatggagattgagagcctggagtccagntgctggttgccaaccatcctcg

SEQ ID NO: 314004 - DNA, 272 bp, Zea mays
  unsure (1)..(272): unsure at all n locations
cagcaagcaagttcctcaattacttcgttaaacaaattgttccagcatttgagaaaattcctgaagaaaagaaactggatttgctanagaacattgcttcaagttcaccatatgctgcagcacaagattcacgtcagctgcttccatctgttgttcagttactcaagaagtatatgcctgggaagaaggtggaagatatcaaccataattatgttgagtgcttgctatacacttttcatcatttggctcacaagactccaaacacaacggac

SEQ ID NO: 314005 - DNA, 242 bp, Zea mays
ttacctacgaataatgtatctgcgtaattaattactatctgtcttgtgtcctagtagctgttttaaaacccttaattaattttattatgggcgagctagctcaagagtggagtcataaaaccgcatggatggtgaggtattgtatagtacctgtgtaagacaagcttggctggtttttttattttatattttaatctgtttgctcaagacaaaacaaaaaaaaaaaaaaagggcggccgccg

SEQ ID NO: 314006 - DNA, 296 bp, Zea mays
ctcggggagacagtctgctccctctagttcgccgaccgagtgggtcaactggagctggggccagcccggcgccgcatggtcccgcgctcctccgggacgccttcttccctcagcaccgacactccgctcttcgcgacctcctgcactactacgtcgtcctctggcagtcctccatgccccagtcgcgacaacggctcgggctccagtctcgcgtgcgcagatgtcctgcctgtctagtcctgggtcgcggccctgcgcatagggtctcaggctaggtctctgctggcacaggcggt

SEQ ID NO: 314007 - DNA, 290 bp, Zea mays
gggttttgctgctctccgaccccgagctccgaaggccgcagcatcaggcgcggcccccctcgcgtgtgaccgagatggcgctgccgaatcaggggaccgttgattaccccagcttcaagctcgtcatcgtcggcgatggtggaactggtaaaactacatttgtgaagaggcatctcactggagagtttgagaagaaatatgaaccaaccattggtgtggaagttcatccgttggatttcaccactaactgtggtaagatcaggttctactgctgggataccgcaggcaag

SEQ ID NO: 314008 - DNA, 278 bp, Zea mays
agcttaggacggcgactgcgctccttgtatgctgtcagcatcgctactacggagagtccatgcctttcggtagcaaagccaaggcgtacagcgactccaagtccctggcgtatctcacggccgagcaggcgcttgctgactttgctgtgctgctcactgacctcaagaggaacctatcggcagagggcagccccgttgtgctctttgggggctcatacggtggaatgctagctgcttggatgagactcaaatatccccatattgctattggggctctc

SEQ ID NO: 314009 - DNA, 300 bp, Zea mays
aagatcagattgagcgtgttactcagattttgggcaggcggacaaagaacaacccctgcctaattggagagcctggtgttggaaagactgctattgctgaggggcttgctcagcgtattgctaattgggatgttcctgaaacaattgaaggaaagaagagcgtcggctccatggacgaggacgatgacagtcccgcctccggctccggtcgccataagaagaagttgcgcctcatcatgggcctccacgacggatcagcaaaggttcaaacaggaatatctctgaacaccttgggctctc

SEQ ID NO: 314010 - DNA, 272 bp, Zea mays
ccaaggccgacgcatggacggcgctgtggaccataagcctgcacaagatcttcgcggccatcgccatgggcatcgcgctgctccggatgctgcccaaccggcccctcctctcctgcttcgcctacgccttcgcgttcgccatctccagccccgtcggcgtcggcatcggcatcattatcgacgccaccacgcagggccgggtggccgactggatcttcgccgtctccatgggcctcgccacgggcatcttcgtctacgtctcaatcaaccac

SEQ ID NO: 314011 - DNA, 291 bp, Zea mays
gataatttgcctcttctttcaagaatgtatttttccctgcatatcaattgagggaaaaaggcaacaacaagacattctgcctgatcagccaaggttaagaggcactgagtgcagtagggggccaaatggctattcaatcaggaaaacacatagaaaatttaactgacacagtaggcggttccactactaccatatcaaacttggaatcatgtcaacatgcaacgtgagagggtctctagctgaattggttaggtggtctgagtagcactcaggttgactcctcgtgggagc

SEQ ID NO: 314012 - DNA, 284 bp, Zea mays
aagactgatgagaaaggctgtgcttctacacttaaagctttcattgattatatatctttgagggaaactgaaaattttcgatcccgaaaggaggaaaataagaattctatcacattaacaactattcatcagtcaaaaggtttggagtgggatgttgtgtttattgtgcaggtatttcttcactcttcaggacgagcttgcatatacaaatattctgccatatatgtagtgttaggcagacagtgtggtagcgtctggcatctaattgctgattaagcagcttg

SEQ ID NO: 314013 - DNA, 250 bp, Zea mays
agcaccttcccaaaaaatcccccattttcttcgaggcgacgagagcgtgaaagacagggtacacggcagcgacgatgtcggggcgcgtgcaagggcggcaaaggtctgggtcaaggcggtcaaagcgccaccgtaaggtgctccgtgacaacatccagggcatcaccaagcccgccatccggaggctgctctcggaggtggcggcgtgaagcgcatttcgggggcttatctacgaagaaacccgcggcgt

SEQ ID NO: 314014 - DNA, 125 bp, Zea mays
aggaggagcccgtggagctcgagcccggcgccttcgtccccgttgacctccgccgcgccaatcccaacggcctcgagtttgacaacctctacctcgacatgaatgggatcatccacccatgcttc

SEQ ID NO: 314015 - DNA, 286 bp, Zea mays
ctcgagccgcaaggagtttgaggagatgtctgagcagtacgtggccgtcacgacgaaggagaagatgagaagggcatgctatcgctgtgggaagaggaaatgggagagcaaggagtcgtgccttgtttgcgctgcaaggtattgcggctatagcgtccttaggatgatggggtcaatgccataagggcgctagtgtgtcaactgcatcggccagccaatcgatgaatccaaaaggtcgaagctggggaagaactccaggacgctttcgcggttgctcagcccgttg

SEQ ID NO: 314016 - DNA, 257 bp, Zea mays
atccagatagaaccggatgtttataaatgcacatttgttcagtctgagataactgacctgccattatttgcatcaagagtccagttgggcaacaatgctgttgagtccgtcatttctgccgacctccagggaatgactgagtatgatgccaaggcacttgaggcgctgaaggccgagttgatggcaagcattaagaaggatattgctttcgtgaacaaacagcgggaagctgctagaactgtgtgaggcgaacaagt

SEQ ID NO: 314017 - DNA, 282 bp, Zea mays
gcaggagcaataagatttggtctggaccagattttaaacgactctgctggtcgtcgaatctctatccggcgtgcgaattaactgaatagggtttcgttggcgatggcgagctcgtggacgcttcctgaccacccgaagctccccaaggggaagccggtggctgtcgtcgtgctggacggatggggcgaggccaaccccgaccagtacaactgcatccatgtcgctcagactcctgtcatggactcgttaaagaatggtgctcctgagaaatggagactagtg

SEQ ID NO: 314018 - DNA, 256 bp, Zea mays
ggaagaccgaggctgagaaggacgcagacatgcccaagatgcctccgagggcgttcttcgtatttatggaggagttcaggaaggactacaacgagcagtaccccagtgtggagcaagtatcgctgattggcaacgctggtcgtgacgagtggaagtccctgtctgatgccgagaaggctcactacgtgtctaaggcagtgaagctcaaggatgagtacacgaagaagatcgacgtttacagcaacaagcagtctgg

SEQ ID NO: 314019 - DNA, 288 bp, Zea mays
ggccctaccgctgtcaccggaagtgtcaccaccctcaagcatggaaaaactggaatacataaaaatgcaactggtgacaccaccaatagatgcatgtcaactgagacacactacatccctgcgagcaaggatcatggggcaccagaacatgagaaccgccatgctacttgatcttggaaacgtgacagctgcgagcagatggtgtagctaatatcaatgtcaccgacagccagatcaacatgactgggccaaactcaatcattggcagagctgttgttgttcacgctg

SEQ ID NO: 314020 - DNA, 233 bp, Zea mays
gccggtggaagattctggaatgccgtgaggatgaacttcagcgcccgagtcagtcccagctcatcctccccagtgtaccactttgttctaataggagatgggaacacgagaagtttgatggctttgccctgggctgggaatacctcacccacgcccagttccagaaaggcctccagctgagcagacggccccgatcccgccagatgcggcttttgcttccagccaaagaacac

SEQ ID NO: 314021 - DNA, 297 bp, Zea mays
cgcacggcgcccaagtccgacgatgtctacctcaagctcctcgtcaagctctaccgcttccttgtgcgcaggacaaagagcaacttcaacgccgtgatcctcaagcgcctcttcatgagcaagaccaaccgcccgccgctctcgatgcgccgcctcgtcaggttcatggaggggaagggtgaccgacgacaagaggatcagcgaggtgccggcgatgaaggtctgcgcgctcaggttcactgagacagcgagggccaggatcatcaatgctggcggagagtgcctcaccttcgacca

SEQ ID NO: 314022 - DNA, 242 bp, Zea mays
attacggatcactatgatcctaacagtgcaacccacgataggagcaaggatggtcttgagcttggcaatgtcctgccagatattagaagcactcggcaatgtctccaggcagtataagacgccgggtatgaggttgtttgggatcaggatcttgctgtagaatctcccttgccttggtacttgcccatggatccaagccgattctccctgagtagcttccgtctgacttctgtgggacgcat

SEQ ID NO: 314023 - DNA, 289 bp, Zea mays
cccggatcgcccgggtcgtgctgcaacatgaggacatcaccaccaagattgagggtgactggaagcggctcaacacactgatgcattatcaggtgatagggggtgtcttttcccctcttcagcttcccagaatgttctcttcccgctaagccttgctctaaggcctcaaaagtctacaaaggattttcctctccctgctttcctcctcatgctggagcatagaacagggattcttagctatggctgcccattggaattactgagggaactgatagaaaacgtgagtgac

SEQ ID NO: 314024 - DNA, 294 bp, Zea mays
agcatgtctggttattctgctccccaagtctgtgcatccacctctgttttcacatatccagattcattgttctacaactttgaagaagaccggtcatataataagtttgaacgaggacagatatgggctctttacagtgattttgatggccttcccaaatactatggttgggttacaaaagttgattcagatccatttggagtgcacctgacttggctggaagcttgccctcgatcagagcatgagaacacatggttagagcatgacttacccgtgagctgtgggacatttaaa

SEQ ID NO: 314025 - DNA, 105 bp, Zea mays
gccatgaaggccgagttcaacatcacgcttatccaccccaaggacctgacagtcctgtccaacatgcttcccaaaggtcccagcaccccacttccagaagacccc

SEQ ID NO: 314026 - DNA, 288 bp, Zea mays
ttcatcactcctttggaggcgggcggcttggcttggagctcagctgctgtaactctgtcggcgggtacggtgcgcgcaggatcggggcaaggacctgggcggcttcatcgaggaaggcttcgggcctcaggggctcggcatcgtctccatcgccggcgtacccggttacccagagctcaggaaaaggctgctgcgcttggcgccaaggatcgtcagccttcctgatgatgtgaagaaacaactggaggacccagatagcagataccactttggttggagtcgtgtaga

SEQ ID NO: 314027 - DNA, 293 bp, Zea mays
gaaatcgcctcagttcttccgtccaaggatctcggtccgaaccctgaccaggcagtcaggcacccaccccaatgctatgtccaaacttcagtcagattcgtcaggcaaacccaccacaccttgggtctgtttggttcagcttttttctgaccagcttttctgaaaatctggctgtgggaagaatctggttgtgaggagaatctgagtatcattacgattacgcgtggaggaggataaagttgttcgtagggctcaggatctagaaagtgacggtttcctactattacaacgac

SEQ ID NO: 314028 - DNA, 292 bp, Zea mays
gtttgttccgtccaggcaaccaaaaagcgttgccccgccgcgcagaggaagaagagagcagaggaggatggctcgtacgaagcagaccgcccgcaagtccacgggaggcaaggccccccgcaagcagctcgccaccaaggcggcgaggaagtcggcgccgacgaccggcggcgtgaagaagccccacaggtacaggcccggaaccgtggcgctgcgcgagatccgcaagtaccagaagagcacggagctgctgatccgcaagctgcccttccagcgcctggtgcgcgagatc

SEQ ID NO: 314029 - DNA, 266 bp, Zea mays
  unsure (1)..(266): unsure at all n locations
ctgaaataagctgttttcaaaggaacagaagggaaacttgctacctgttctgaaagcagtgtaaacctcacaggactttggatataatcagatgtagaggagnatgnaggaaaggaatagttaaggatgcacaggaatttatctgtctctgatcaggaaataaagctggctatgggtctgcaggggcatgactgatggttgtctgcctcttttcaccctgtaagtgaatccctgaactggattcactgtagcaagtcttggttaac

SEQ ID NO: 314030 - DNA, 300 bp, Zea mays
gatgaatttatggaagaagattccaaaattacagatgaagaagatgaagatagctttgttgtgcctgatggctatctatcggacaatgagggaatacaaattgaaagcctattggatgataaagatgaggaagccagtagctcaccaactggtcagtgtgcagaagttgaagagttcaggtctctactgcgccaacaaagagtcctgaacattttaaccgagcaagctctccggaagagccaacctcttattatatccaacctaaatcatgaaaaagctgaattactgactgccgaagac

SEQ ID NO: 314031 - DNA, 299 bp, Zea mays
actcagattgcttcaactgcctgcctattgcagcgctcattgatgacaagatactgtgcatgcatggtggtctctcaccagaatggactagtttggatcagataaaggatattgagaggcctgctgagattcctgattatggtctcttgtgtgatctgctttggtctgatcctagtcctgatggagaagggtggggggagagtgacagaggtgtttcgtgtacgtttggtgcagataagctcgtagagtttttggagaagaacgatctcgaccttatatgccgagctcatcaggtagtt

SEQ ID NO: 314032 - DNA, 284 bp, Zea mays
gagactgagcagacgcctccaggatctgtcggcagctgctgttctgagggagagcagagaccatgtctgacatagaagaggtggtggaagagtacgaggaggaggagcaggaagaagcagctgttgaagagcaggaggaggcagcggaagaggatgctgaagcagaggctgagaccgaggagaccagggcagaagaagatgaagaagaagaggaagcaaaggaggctgaagatggcccaatggaggagtccaaaccaaagcccaggtcgttcatgccgaacttg

SEQ ID NO: 314033 - DNA, 280 bp, Zea mays
ggacgaggcggcgaaaaaggagatcaaggacatcttcatgcgctacgagcgcaccctcctcgtcgccgacccccgccgctgcgagcccaagaagttcggcggccgtggcgcccgcgccaggttccagaagtcctaccgctgagcgagagcgcttgccggaccgctgtcgtggctccgtttgctaccatcgtagctacgactttacagaagtcagtctgataataacatggttggcgattcgtaggcttctcaggctttattttattttattttagtttat

SEQ ID NO: 314034 - DNA, 270 bp, Zea mays
ttcagaattaaattttgcctgcacacctaaacactgacaacatttagcttaaaggttttccatggagtatagtggtaagagctgtagttagcaaaattggcatcctctttagggtgtcaattctgtgctgctttgcaaattgttgaaacttttgattttctgtttggcgatgctagtcagtgttcacttcttacatcttagccaagaatttttatctaaatgcagaaacttattaatgaaatccatttaaactagcacaacattttggga

SEQ ID NO: 314035 - DNA, 172 bp, Zea mays
  unsure (1)..(172): unsure at all n locations
cacagtcacagatgacaaaaggatccaggaggttccagcaatgaaggttactgccctggggttcacggagacagcaagggccagggttgtgaatgctnncgcctactgtctccgtgaacctcanggcgagaacacggtcctcttgaggggccccaagaatgcccgtgaggca

SEQ ID NO: 314036 - DNA, 267 bp, Zea mays
  unsure (1)..(267): unsure at all n locations
gcatttctctaatggtgtatctgttgtgcaactaccggatcttgtagtcaggtttgagcatgtctatcctgattacatctctcataacgttattgcttctagtcaagatatgatgggtagtntttgtcttngtatagtctgcagatgtggatcctaactcctgcgagaagtaactcacagtgagaaagctgcctttgcttttatcgagttgcaaatcaaagaggggggggcatgttggtaacaggccccccaagatctggccataaa

SEQ ID NO: 314037 - DNA, 312 bp, Zea mays
tcgtaaataaccttcactatagaaaacatgaaatataccactccattttgcaatgtgacctggtcctggtgtaacagcttttataacataaatttcccttcaccttctctgttcgtacagaattatggtgcattctttgacctggtaggtgatggaattactggcccagtaaaactgagtggactaaacggtgcgctcgatctgtcttctgcagaatggacatatcagattggactcagaggagaagatttgcacctatatgatccttcagaagcttcaccagaatgggtctcagccaatgcttatccaatc

SEQ ID NO: 314038 - DNA, 314 bp, Zea mays
agtgaacagccccgctgtggattcccagagaagaatttatcagtgaatttggagaatttgacaggagggcagaggcaatggtgggaattcaaatcacagcacatggataaggttctgtttttcaagatgggcaaattctacgaactatttgagatggatgcacatgttggagcaaaggatcttgatcttcagtacatgaagggtgaacagccccactgtggattcccagagaagaatttatcagtgaatttggagaagttagctgagaagggttatcgagttctggttgtcgagcaaactgaaacgcctgacca

SEQ ID NO: 314039 - DNA, 249 bp, Zea mays
atcgatcacatgtgtcgagtcgtactctgtggctgaccttgtgcctgataacagggatatcatggggagcaacatctccagtggtcagatcgtcacagtcttatggacgagcccttatgatatctggggaagttaaagtccatatgatggctgataagagtacgatacaggtgccatgcggacacgtgacatcactgaagactgcctggcacgggccgcgcgtgtgttcatgcctatacggtaaacatg

SEQ ID NO: 314040 - DNA, 296 bp, Zea mays
ctcaggatggcttaagggtaaatcctgatggaactgctgtgaatcctcaagcttttcaacaacatgctcgaggtgattcacaacttatggcacagctccttcagaatgatcctcaactagcacaagctatccttggggatgacaccactgagctacagaatatcctgcggtcccgccaccaacaaagaacagaactaaaacgtaaacaagaagaagagcttgctttattgtatgctgatccttttgatgtggaagcccagaagaaaattgaagctgcaatccggcagaaaggcata

SEQ ID NO: 314041 - DNA, 291 bp, Zea mays
gaccgcgaacacgcccatgattgatggccttgggaaggctgcggatctggtgagtgcgaactgcgagacttatgagggccacatgagagacatccgggattacctggaagagaggctggaagctgaatttggtaagagaatccatttgaacagccgccatccaggagtggagaggcttccgaacacctgcaacttttccatccaggggtcccagcttcgagggtacatggtccttacacagtgccagacactgctggccagcgtgggagcttcatgccactcggatcatga

SEQ ID NO: 314042 - DNA, 167 bp, Zea mays
cggcggcctccgcgcgcacggcggctacaagctgcccaagcactgcgacaacaacgaggccggctgggtcgtcgagcccgacggcaccacctaccgctcaggaagcaagcccatggaacgcatggatcccatcggttgctccgtgtcaccaagcccatgttcctcgt

SEQ ID NO: 314043 - DNA, 274 bp, Zea mays
cggctcgagagctcctggcctgcgcggcttccggatccttggtctgcgctccagcgtgggcccggctgtgcaggcacgaggtgtccatcagagcgtggccaccgatggcccaagcagcacccagcctgccctgccaaaggccagagccgtggctcgcaaacccagcagccggggcgagtatgtggtggccacgctggatgacctcgtcaactgggctcgcaggagttctctttggcccatgaccttcggcctggcctgctgcgccgtggagatg

SEQ ID NO: 314044 - DNA, 276 bp, Zea mays
aggcaacatccgaggcgtggctgtcaaagcatatagatgactctgtaggatatagttcaaatggttcaaatgttgttatatgggacacactgtctccaccagctacatctcaaacatctatcatgtgtcatgaaggaggagctcggtctatttctgtgtttgatagtgatagaggctatgggtctatctcaccgcttgttgtaactggtgggaaaatggagatatagctttgcatgattgccgcttcctttctactggaaagtccaagcatcatag

SEQ ID NO: 314045 - DNA, 301 bp, Zea mays
attgcatagtaacgagtcttgactggtctaaaaagttccctttgcatcagtcaccactttggaattttcaaaataggcagggcagtaattgcagttacatatataagaccaactacatcgactccaccctgcctgctgaggccgtgtttgcagcggaagtggagaagctcaaggcggatcagttcaagcccgcggagcaggtgacgttggagccctacgagcgtgaccatgcatgtgttgtgggtgggtacagggtgcccaagaagcagaaggccacctcttaggatcggaatccgtgctc

SEQ ID NO: 314046 - DNA, 277 bp, Zea mays
ctggggtgtctgaactctgtcggccctgcttcctgccaggacgtggcctcttccgatccttttctctcagacactggaggtctcttctgccattgtgctggtcccatcccaagaattgtaggacagagaccagactgggtcggcggacacaaagtccatccaggacccaggccgcagagggagcaggaagagatgctgatagtttgatctagaaaccagcagctactggctcaaattcaggttctggcgtcgaatagcgactttcgagttctctaaa

SEQ ID NO: 314047 - DNA, 289 bp, Zea mays
ctaagattgataggttagatgaagcttacatgctttttgaggaagcaaaatcaaaaggaatagaattgaatgttattgtgtatagctctctcatcgatgggtttggaaaggttggtaggatagatgaagcttatttgatattagaagagatgatgaagaagggtttggcaccaaatgtttacacatggaacagccttatggatgctttagtgaaagctgaagaaatcaatgaagcacttatttgtttccagtcaatgaaggaaatgaaatgttccccaaacacttacac

SEQ ID NO: 314048 - DNA, 266 bp, Zea mays
cgggaagcactttagcgcctactcttccctgatttatcaccagagattccacaccggagagaaaccctataaatgtaatgactgcgggaaagccttcagtgatggctcaatccttatccgacatcgtcggactcacaccggagagaagccatttgagtgcaaggaatgtggcaaaggctttacacaaagttctaaccttatccaacatcagagaattcacactggagagaaaccctataaatgtaatgaatgtgagaaagctttca

SEQ ID NO: 314049 - DNA, 293 bp, Zea mays
caggcatagccctggggtcacacgaaaatgcttggggaatctcgtgtttcttcttaagacttttgggacatggtttgactctcgaacatcaccgacgtgtctcctgtttttctgggtggcctcgggacacctgccctgcccctacgacggtcatgactgtgactctttatttggtcaggcaggtgctctggacatttgccttgctggatggggactgccgatgtggtatggagcagacaggaggaatcatttcaggcctgtgtgtgaaaggaagctccagtgtcacctgcatc

SEQ ID NO: 314050 - DNA, 298 bp, Zea mays
atcaaggccattggccgatgctaaccgaatcaagatcaagaaggcattacggggcgtaaaagttgaggtcacgcaccgggggaatgtaaggcgcaagtatcgcatatctgggctcacaacacagccaactcatgaactgattttcccaattgatgaacaaatgaatatgaaatctgtcgtggagtacttcaaggaaatgtatggtttcaccattcagcatcctcatcttcctcaacttcaggttggaaaccaaaagaaggcgaactatttaccaatggaggcctgcaagatcgttgaa

SEQ ID NO: 314051 - DNA, 264 bp, Zea mays
aaatgaactctaccaattggcctccgttgcatattgcttgcttctagcctggtgcagtgaatatttaggattgagtcttgagttggggtcatttcttgctggtgttatgatatcaaccacagattttgctcatcatactatggagcaggttgaagccattcgcaatctatttgcagcactcttccttgcaagcattggaatgctcatacatgttaagtcctggtggaatcatgttgacatattacttgcagctgttatactcgt

SEQ ID NO: 314052 - DNA, 288 bp, Zea mays
aaagtgaggggccaaacctgtcatcagtgccggcagaaaactcttggtcatcatacaagctgctgtaaatgccagattgttcaagggcagttctgtggagattgtttgtatatgaggtatggtgagaatgtgttagaagttaagaagaatcctaactggatatgtccagtttgccgtggcatctgtaattgcagcatatgcagaaccaagaaaggatggttcgctactggttctgcctataggaaggtggttggacttgggtacaaatctgtggcacactttttaatt

SEQ ID NO: 314053 - DNA, 291 bp, Zea mays
agttaatggcatagagtttgccagtggaggacctaagacaacttggggttctgttcgtgcagcaatgggacacccagaaccctttaagcttgattatgtttcaataggaaatcaagaatgttggatgctctactatagaggaaattaccaaaagttttactcagcgattaaatctgcctacccagacatcaacattatatcaagttgtgataggccaactatttcgccatccaaccctgccgatctttatgatgttcatgtctacacctcttcgactaatatgttttcaaa

SEQ ID NO: 314054 - DNA, 282 bp, Zea mays
  unsure (1)..(282): unsure at all n locations
agcattcgttccaactcctgagcactttctcctcgtccccgacaagccaatcgaagccgagatacggccatggactccaccggcaccggagcagggggtaaggggaagaagggagcggccgggcgcaaggtcggcgggccaaggaagaagtcggtgtcgaggtccgtgaaggccgggctccagttccccgtcggccgcatcgggcgctacttgaagaagggccgctacgcgcagtnngtcggcaccggcgcccccgtctacctcgccgctgtcctcgaataa

SEQ ID NO: 314055 - DNA, 289 bp, Zea mays
acctctgttacttctccctccgccgccactcccctcccattcaccgccaccgccaattccataccgtcctccgccacctctgctgagagcgagaagagatggcaggcaagggtgatgggccggcaatcggcatcgatctcggcacgacgtactcttgcgtcggcgtctggcagcacgaccgtgtcgagatcatcgccaacgaccagggtaaccgcaccacaccctcgtacgtcgccttcaccgactccgagcgcctcatcggagatgcggccaagaaccaggtcgccat

SEQ ID NO: 314056 - DNA, 285 bp, Zea mays
gcgaagcaaaacgcccattccccttcgccctcttcgaccctagcaagaaggcggcggcggagatggtgtactacgcgcttttggtgggcgcagagctggacggcctcaccaacctgcagcccagcggcggctgcgacgaccccagcttcccctactacctcaagtgcaagctttgtgggagagatggaacaattgtgatgattcctggtcaggggacgccacttactattgagcagagccagaaagaagagaagacttgtttgatggtgtttgactgtagaggtt

SEQ ID NO: 314057 - DNA, 194 bp, Zea mays
cgaggattttgatttcgcagaactggatgatgtgctgcgctactaccctcagggctaccatggtgtggaccgcgaaggccggcccgtgtacattgagaggctagggaaggtagatcccaacaaactcatgcagatcacgtctgtggatcgctacatcaagtaccatgtccaggagtttgagagagccttcaggg

SEQ ID NO: 314058 - DNA, 233 bp, Zea mays
agagttgccatgatttttttttacttaccattctgcaatcatccttgcttccaaacacagcacgctaatacaggtgcgtacttgtgcaggactggtagagggaaggtttccttggcagccatcactctagatgattaccttccaatgcgaacactgaagtgaagaaccggtaacttgtttatttctaaaagaatgctgacaatactatttcatctgaatttttggcagtattt

SEQ ID NO: 314059 - DNA, 293 bp, Zea mays
cttcaacgcatctcaggatcttgcttcaccatctgatagtgatggccatgggacgcatacagcatccattgctgctggcaatcatggaattcctgttgttgtggctggacatcaatttggaaatgcaagcggcatggctcctcgtgcacacattgctgtctataaagctctttacaaaagctttggtggttttgctgctgatgttgtggctgcaatagatcaggcagctgaagataatgttgacattatcagcttgtccattactcctaatcggaggcctcctggactcgcaa

SEQ ID NO: 314060 - DNA, 291 bp, Zea mays
acgacgcacgcagagccgcagagatccgtcacactgcaagttttgaaaactgaactgtaagatggcatcagcagagctttcccgtgaggaaaatgtgtacatggcgaactcgccgagcaggcagagaggtacgaggaaatggttgagttcatggagaaggtagcgaaaactgttgactcggaggagctcactgtggaggagcgcaacctcctgtctgttgcatacaagaacgtcattggagcccgccgtgcctcatggcgcatcatctcctccatcgagcagaaggaggag

SEQ ID NO: 314061 - DNA, 287 bp, Zea mays
aaggtaagagatgatctcagttctccagtcttcaccataaacaggagatatattgaggactgctctttcaagaagttccactgaaggtgcttttattgtttcgaagaacacgtccgaaggtaagggcagcccctgtgctgctgacttagctagcaaatcagcatgctcattttgtcctcgagggatatttttgacagaaaatccctcgaaggaagcttcaatccttcggaccgtgtctagatatttttcaagcttcggatctttagccttacagctcttgtcaatat

SEQ ID NO: 314062 - DNA, 292 bp, Zea mays
gccactcgaagccgagatacggccatggactccaccggcaccggagcagcggggaagggaaagatgggagcggccgggcgcaaggtcggcgggccaaggaagaagtcggtgtcgaggtccgtgaaggctgggctccagttccccgtctacctcgccgctgtcctcgaatacctcgccgctgaggttctggagctcgccggtaatgctgccagggacaacaagaagactcgcattattccgcgccacgtgcttctggcgatccggaacgacgaggagctcgggaagctgctgg

SEQ ID NO: 314063 - DNA, 277 bp, Zea mays
  unsure (1)..(277): unsure at all n locations
gcgagatactaaaactaaaggtatttggatttggggtactcctatcatcatacacatttgattncccaacactttcaaacccttcagtgtctagataaaggacagaaactgaagggtttgaaagtgttgggaaatcaaatgtgtatgatgataggatatttgctttggcgactgtcttaagctcggtccttatctacaaccttcctgagacggtacgtgaagctgatatatctaggctttcatttgccgttgaaattgctgcagagttctatggaag

SEQ ID NO: 314064 - DNA, 323 bp, Zea mays
tatctttgcttcacaaaaccacttggaacatattaaggtgtaaacaccaacctaccttatagtaatgaaagatgtgcatctgaaatgaaccttattaagggtctttcctctcagtctaccactagcttgtttcaccattctaattcacgggatctccaattacatagaacaggttaccactatgataaactttaggtgggtctcaggccatctcaatcgatgcactattatcacactacgtgatagccccttagtaaattgatctatcagatttttagacatatagacatagtccaacgcgattactccggagtttttcaatt

SEQ ID NO: 314065 - DNA, 195 bp, Zea mays
cgctcatcttgtcgcggtgagagcctctagaatttcccccactcgccagtcgcagcagcacctgtagcagccattgacgcgagcggagccggtagcaaggtgtataagggggctgccgtgcgcaaggcagtcggccccaggaataagtcggtgacgcggtccgtcaaggccgggcttcagttccccgtcggccgg

SEQ ID NO: 314066 - DNA, 153 bp, Zea mays
aagatacgctgagagaaggatacaggttcattctttccgaggaagatgagatggattctacttgggagaaaaggctggtcaaacgttactatgacaagctgtttaaggagtattgcattgctgatatgacccagtataaaaaaggcaagattg

SEQ ID NO: 314067 - DNA, 310 bp, Zea mays
accgccgccaccccttcaacacaacctccgcccacggccgtaggggagggagggccggaggaagcgaccgagcaacccaccgccggagatgcagatcttcgtgaagacgctgacggggaagaccatcacgctggaggtcgagagtagcgacaccgtcgccaacgacaaggcgaagatacaggacaaggaaggcatcccgccggaccagcagcggctcattttcgccgggaagcagctagaggacgaccgcaccctggccgactacagcatccagaaggactccacgctgcacctggtgctccggctccgc

SEQ ID NO: 314068 - DNA, 299 bp, Zea mays
ctagaaaagcatacaattatctggacatacatcgattttctgatagtccatacctaaccagagaggtgtttccagcactgatacacgtcttttggcttctttgtgatttggtggaaacacttcgctgatcaaattcaagagctcgttgtaacaattgttcgagaacatggtcttggatttagtagtcataagtcgagacacgaaagcgaggatggaaactgttatgtgtttgtgcaactgctcttctgcaaccttaatgaggttgaagaaatttttaacctcttaaggtggtggcacct

SEQ ID NO: 314069 - DNA, 101 bp, Zea mays
ctcgatcaggggccagagacggtagagcaagagacactggagacatcaataagagcctactaactctaggacgtgtcatcaatgcacttgtggaacattca

SEQ ID NO: 314070 - DNA, 180 bp, Zea mays
cggatgccagattttatgtaataaaatcctacactgaagatcacattcacaagagcataaagtataatgtttggggcagcactcccagagacaacaaaaagttaaatgctggttatcatgaggcaaaagcgaaggaagatcattgtcctattttcttgtttctctcggttaatagcagcg

SEQ ID NO: 314071 - DNA, 287 bp, Zea mays
catagggtcatcaacacagatctccatgtttgtggtaataataataggaattccataataatacatagtgtaacagatacaacaactaccctactctggttttacaattttgtctgtcattagccaaatcatgttttagacagtagataccacctttttccaataattgttctggtattcttttgcatgatcttcagattccattctgcgtggtaattggctggatgatgggacaagaaatggacttgaattttcaactgttcgagacagcgactctctttataact

SEQ ID NO: 314072 - DNA, 118 bp, Zea mays
ctgtagcggtcctttggagagtgtgtgtggcgggagagtgaaaccttgggggaaaatgctaggagatacatagatctatttgttctacttttcgctcggaaagtttttaaatcctcat

SEQ ID NO: 314073 - DNA, 208 bp, Zea mays
gcaacactatgaaatatggtatgcatcgttgagctaataatagcatataagtcttcagcaacttgccatcagtacaaggaaactagtgggggatcaaaacacaaagacatggctatatctacttctccgaggagttggggccgcgtttcttgccgaatccgacgacggcggtgacgaagcggcggttgtactgcatgcgcttgtacgc

SEQ ID NO: 314074 - DNA, 201 bp, Zea mays
gagccagtaacaaaattgttagaaagcagataccatcaaattggttctgggaagtgtgaaatcaaagttgcacaaaccaaagaggtatataggcagcaacagcaacaacaaaaaggtggaataggtgctgcagctggtggacgaggtggtacgaggggtcgtggccgaggtcagggccaaaactggaacaaggattttatt

SEQ ID NO: 314075 - DNA, 266 bp, Zea mays
cgacaacgccagcatcgggaagacgctgaacgagggggagcactcgagcgtgcagtgcttcagccatacgagtgaacctgatcgtcagcgaggccattagtagccagcggatcgtgcagagcctgtcgagcctcgcccggaagatctgcgagcgggtgcaccggtcgcccaaggcgaaggagaaactggccaagctgcagagggagtacgcgctgcctcagcatcacctgcatccaggacgtcccgtccaagtagagcacttcctt

SEQ ID NO: 314076 - DNA, 144 bp, Zea mays
ggccaaggtacagagacgtgtgtgcatgctgagcaataccacagctgttgccgaggtctgggatcgcatggaccacaagtttgacctgatgtatgtcaagcagtgcccagctgggggtcactaaagttacccttgtacttgcag

SEQ ID NO: 314077 - DNA, 241 bp, Zea mays
ggaattcgcgagagggaaaggactcacctgactttggacagctgacctgggatccccctgctcaaacacaatggggatcagaggaaaagggctgaaaagggagggatggcccatatctcaagaagcaagatcttgtttgtggtggttgtgtgtgggagtgtgttttttctccgtctttctttttattatttttgaatgggggaagctatttattgtactgagagtggtgtctggatatatt

SEQ ID NO: 314078 - DNA, 175 bp, Zea mays
ccgagggtacaaatccatggctgggtttcacttcaaaaaaatattatctgagattccttctgtggaacaaagttccatcaaagccaatttacaagcctatgtaaaaaaatacttattcttgctgtactgtatacaaataatcaggccaagtataataaagcaaatcagtcctacc

SEQ ID NO: 314079 - DNA, 300 bp, Zea mays
aatagatccaaatattttgatattgataaagatatagtgaatgccgaacagacagtattcatgagccagtggtgttccatgcaacttacgagggtaagggtggttagcagtacaaatagaacgtggttaaaacacaatcgtagggccgggcgcagtgactcacacctgtaatcccagcactttttgaagccgagacgggtatatcacctcaggttaggaattcgatagcagcctggccaacatggtgaaatcctgtctgtacaagaggcgcaaaaagttagctgggtgaggtggcgggca

SEQ ID NO: 314080 - DNA, 304 bp, Zea mays
ccaattcgccggctggattctgagcctcgatttcggtctctgtcgcttgcaatgtcaatctcacctccaaccatgggtatggacaagtctcacatcaacattgtggttattggccatgtcgactctggcaagtcgaccaccacaggacaccttatctacaagcttggaggcattgacaagcgtgtgatcgagaggtttgagaaggaggctgctgaaatgaacaagcggtccttcaagtacgcgtgggtgctcgacaagctcaaggctgagcgtgagagaggtatcaccattgatattgctctgt

SEQ ID NO: 314081 - DNA, 304 bp, Zea mays
accggcgagaagggtgcagcagcgccgacgagcccgtggagactgtgcacggtgtcccaggtggaggagctgaagatgctgctccggttgctgccggtctgggcatccatggtgctcttcttcgccgtcagtgcgcagacggtaaccacgttcattgagcaggctagggtgatggacaaccgcatcggcccgttcaccattcctccggcgtcgatagcgaccttcgacgtgatcagcgtcatggtctgcgtccccgtctacgacgccgtgctggtgcctctggcccggcgtgccactggcaacg

SEQ ID NO: 314082 - DNA, 133 bp, Zea mays
aagcacgtgagcttgatcccagaatacttgaacgtgggcgcatcttgcccaagagaccacctgtgaaaccacccaccgagcctattggctttgatttgggaattgagaacagaatccaggagcgagaatcatc

SEQ ID NO: 314083 - DNA, 295 bp, Zea mays
agcgtgggggactgctattacgaactaagtgtcgagattatcgaagtgtgcctggcgctgaagcatcggaatggagtttagatgagtttggaggaactacatcaacaggtgttgaagggaaggggcaagttcgcccaggatgtcagtcaagatgacctgatcagagccatcgagaaactaaaggcacttggcactggcttcggcatcatccctgtgggcagcacatacctcattcagtctatgccagctgagctcagtaaggatcacaccgtggagctgcagcttgcagagaaga

SEQ ID NO: 314084 - DNA, 243 bp, Zea mays
caccctcacaactgcttacagaatggatcatgtcccccttatgtagaggtgaccacttaattgctttcctgcctccttgaaagagagatagaaagaagactgtgtttttgccactgatttagccatgtgaaactcatctcatcacccttttcttggtttgaagctgctgtctctagaagtgccatctcaattgtgctttgtatttctaagtgctggagaaatcttgaatagcttatgtacaaa

SEQ ID NO: 314085 - DNA, 293 bp, Zea mays
ccaagacctcctcagacccgagaagcgcagtgcggccatggacgccaccggcactggagctggagggaaggcgaagaagggagcggccggtcgcaaggccggcgggccgaggaagaagtcggtgacgaggtccgtgaaggccgggctccagttccccgtcggccgcatcgggcgctacctcaagaagggccgctacgcgcagcgcgtcggcagcggtgcccccgtctacctcgcggccgtcctggagtacctcgccgctgaggtcctggagctcgccggcaacgctgccaagg

SEQ ID NO: 314086 - DNA, 246 bp, Zea mays
ctccagtttcattctttattgacattatccagcttgctacgttgcatgttaccatccttcactggttaatctcatcgttatattcaagacaaattcagacagtagcatcattgtggcgtcttttcagagggcgcaaatggaatcctcttaggcagaggttagatagttatgactacacagttgaacagcacgtggttggttccctgttgtttacaccaatcctacttcttatacctacaacttctg

SEQ ID NO: 314087 - DNA, 263 bp, Zea mays
tgtaaattggggcaagcaattacgccttctggttgtagacataggtgaggccgcacttgctttatccgccaacctatcaagcattcagatgttggttactcaaattgtatctcatttagatctgtctgaggttgaaacttaaatggagcagtagtatctatcatattggtacccctgttactgagtataattttgttttcatatccatccttacagacgattgcagaaaataaataaaatgggtatgcgcgtgaaacttaaat

SEQ ID NO: 314088 - DNA, 322 bp, Zea mays
atcaggccaaaaggacggagaccagcttaggcgaaacgcagacgtagtggagatcctgaggaagaccaggttcccgcacgttcacggagcaggtgaagagaagtcaccggagacgatcctggatcacgatcgtgttatttggcttggggacctgaactaccggatcgcgctttcctaccgctcggtgaaggctttggttgagatgcacaactggaagcagttgctggaaaaggaccagcttcgcatagagcaaaggtttggccgggtcttcgcgggctggagagaagggaggatctacttcccgctcacctacaagtactcg

SEQ ID NO: 314089 - DNA, 282 bp, Zea mays
ccatccgcacctctctccatctccctgctcctccgccttcttcttgatccagccaagccagggatcgccatgtcggactcggaggagcaccacttcgaatcgaaggccgacgccggagcgtccaagacctacccgcagcaggctggcaccgtccgtaagaacggcttcatcgtcatcaagaaccgcccctgcaaggttgtggaggtttctacctcaaagactggtaagcatggtcatgccaaaggccactttgttgccatagatatattcaacgggaaaaag

SEQ ID NO: 314090 - DNA, 308 bp, Zea mays
ccatccgatccccccttcgcaaccaaaaccccaactcgccccgcatcgatcgctttctattttgagtttttatcttctgtgaagattgtggctgaggatgtgcccgctgccgataaggcgcccgccgggaagaagccgaagcgacgaagcgggtccccgctggtaagtccgctgccaaggaatgcggcgatggcaagaggggcaagaagaagggcaagaagagcgtggagacctacaagatctacatcttcaaggtgctgaagcaggtgcacccggacattggcatctcctccaaggccatgtccatc

SEQ ID NO: 314091 - DNA, 293 bp, Zea mays
ggattaacttcatcaaagtgttgacagaacacgaggatgcattcgacgtgctgtactgcatagcgttcgagatgatggacgcccagtggctagcaatgcgagcctcgtacatgcagttcaaagaggtgctggaggccacaaggcagcagctcgagagggagctctccctggaggatctcaatagcatccatgacctccctgcctgcaaccttttgtacaaatagtactaatggtagttagattactgtgatacagtcaaaaggaaatttgtatgatgatcaggttgcatgtaa

SEQ ID NO: 314092 - DNA, 236 bp, Zea mays
agcggtctcctccgcccgttgccttcgtcccctccatctccggctgcgtcgccggcgagcccgacaccgcgaatctgatccgccgacaaggcgcgagggaacagatggggcttacgttcaccaagccgttcagccggctgttcgccatgaaggagatgcggatcctgatggtgggactcgacgccgccggaaagaccaccatcctctacaagctgaagctatgcgatatcgtcacc

SEQ ID NO: 314093 - DNA, 280 bp, Zea mays
cacaaacgccggcgcatactctcgctcgcgaccgacagatctccaattccccattcctcgcaccgctctacccactcgccgttctcggactcttccacagacgtcgagcgcggttgcatgatatgagccgacgattgtaatggatctcatcatcgtctacatcagactagctgatatccatgtcgacaacgcgtgctgatgtctttactacctcgagcactgcatccagcctgttcgccaagtgcctggtgataatgccgcgtgacatcacgttgatgcc

SEQ ID NO: 314094 - DNA, 224 bp, Zea mays
acgttgaactgctgtggtttggactagagtatggaccaatttatctcagacatctgccccaagaaggacgtactcgaaaccttcaccgtgaagtcctgtcctgatgccatcaaagaggtcttcgacaataaattccacatcatcggcgcacccggcatcggcattgccgtggtcatgatatttggcatgatcttcagtatgatcttgtgctgtgctatccgcag

SEQ ID NO: 314095 - DNA, 215 bp, Zea mays
  unsure (1)..(215): unsure at all n locations
acgcgaggcgtacgganagttactgcatccgcggtgttgtgctgtggggaagggagaaggatttgtacactccggagcgaggttctgcttacccgaagccgctgctgtgcggatacccccgggtgaagccaccgtcatcatgtctgaccaggatgcaaaaccttcaactgaggacttgggggataagaaggaaagtgaatatagtaaactcaaag

SEQ ID NO: 314096 - DNA, 285 bp, Zea mays
acgtgcccggttcgaggagctcaacatggacctcttccgcaactgcatggagcccgtggagaagtgactccgcgacgccaacatggacaagagcagcgtgcacgacgtcgttctcgtgggcggctccactcgcatcccccgcgtgcagcagctgctccaggacttcttcaacggcaaggagttgtgcaagagcatcaacccagacgaggctgtcgcgtacggagcggccgtccaggcgccatcctcactggcgagggcaatgagaaggttcaggatctgctcctg

SEQ ID NO: 314097 - DNA, 280 bp, Zea mays
ccgagctttgggagccggagctcgcagcagacatgtgccatttgccttggtggcatgagatcagggcagggtcatgccttgttcactgctgaatgctcccacaagttccattttcattgcatttcttcaaatatcaagcatggcaacctcatctgaccgatatgccgtgctaagtggaaagaactcccaggcgctcaacctgcagatgccagttatggacgagctagagttaacccattaaattgagcccaggatgaagcgtggctgttgttcgcagctt

SEQ ID NO: 314098 - DNA, 276 bp, Zea mays
cgagtctcgtccacccgtcatcctcctagctcctctactcgccagtcgccatgggcaagattaagatcggaatcaacggcttcggaaggatcggcaggctcgtggccagggtcgccctccagagcgaggatgtcgagctcgtcgccgtcaacgaccccttcatcaccacggactacatgacctacatgttcaagtacgacaccgtccacggccactggaagcacagcgacatcacactcaaggactccaagactttcttcggtgacaagccggtca

SEQ ID NO: 314099 - DNA, 273 bp, Zea mays
cacaagatggcgtgcacagacaatgcgacgagagccttgttcctcctggtcctcttctgcatcgtgcatggtgagaaggaagaggaccagggcatcgatgcgaaagcgtccgggcctcgtgggtccttcgacatcaccaagttgggcgcctccggcaatggcaagacagacagcacgaaggctgtgcaggacgcatcggcatcagcgtgcggcggcactgggaagcagacaatcctcataccccagggcgatcctgtcggacaactcaacttc

SEQ ID NO: 314100 - DNA, 270 bp, Zea mays
  unsure (1)..(270): unsure at all n locations
agcgcacgcttgccgactacaacatccacaccgaccgcancctccacttggtgctgcgcctcagaggaggcatgcagatcttcgtgaagaccctgaccggcaagactatcaccctcgaggtagagtcttcagacaccatcgacaacgtcaaagccaagatccaggacaaggagggcattcccccagaccagcagcggctcatctttgctgggaagcagcttgaggatggacgcagcttgccgactacaacatcagaggagagcaccctcc

SEQ ID NO: 314101 - DNA, 169 bp, Zea mays
gatttacatacctgtgatgaattggtttctaatggtcatgtgcatcatcatcgtggcaacttttaggagtaccaatgatattgccaatgcatacggcattgctgaagttggcgtcatgatggttagcactgcactggtgactttggtgatgcttcttatatggcaaacc

SEQ ID NO: 314102 - DNA, 282 bp, Zea mays
ggcagccggcctcggtctccgatccccggtgtggcgtggccagccagcgcggcccaccagcacagacttacaccggcgagccttcttctctgatcgcgattcgtttccaagctttgagaaatcgacggtcaagcttcggcgaccaaatgatcctgttcttcgagttctatgagatcgaagaccctgagcatctatttggtgaaggttgtcagcattgcaaccactgctcaggagaaggtgaagccgtggaaggagacttccaggagttccaagattacgacg

SEQ ID NO: 314103 - DNA, 191 bp, Zea mays
gatatggcgtgtatagacaatgcaatgagagccttgttccttttagcgctcttctgtgtcgtgcatggtgagaaggcaaagtcaaaggacaacgatgcaaaagcgtccgggcccggtgggtccttcgacatcaccaagttgggcgcctccggcaaatggaagacggatagcacgaaagcttgtgcaagaag

SEQ ID NO: 314104 - DNA, 163 bp, Zea mays
ggatataattgccagaaccaggcttgaggttggtgactcttgatagagtttgtttcttcaggcctagatcagaaaattaagtgcagcaatatcatgaattctcagaagcgctttcagggagccagtgagtcatacagtatccacagttgagtcacttaaagat

SEQ ID NO: 314105 - DNA, 284 bp, Zea mays
ggcgatgaatgagtccatcgctttatcagatactgagaagcaactgcgacatgagaagcactatcggtatatctgctcacacgacgttgcctattggtctaagagcctatattcaagatttcgagagaagctgtagggaccattttaggagaaaatgttggggtattggactaggatttggatttagagtggttgcacttgaccgcaatttcaaaaagcttaccgtagattctattgttgcggattacaagaagtcaaagagcaggatcatactactagactat

SEQ ID NO: 314106 - DNA, 267 bp, Zea mays
  unsure (1)..(267): unsure at all n locations
agaaggatgagcagcagcagtcccgagggatagcactgatgcagggcatctgcgccgtggtgtaccgcaangccgataacacgccctgccccatcaagcagcattcaataaggacgctctcaagagtttgaacatcacccatatcttgatcgttgcaaagtcactggatccagtatttccagctgaatttaattacaagaagatcgaagtacttgatatcccagacactgatctgttaaagcattctgatgaatgctttggtttcat

SEQ ID NO: 314107 - DNA, 153 bp, Zea mays
agattctcggccaacttcaccatcccaacttggttttactgcttggattttgtcctgaaattggatgccttgtgtatgaatacatggagaacgggagcttagaagatctacttatcaacgataaagggcagccactccattggtttcttcggt

SEQ ID NO: 314108 - DNA, 279 bp, Zea mays
cctgtgccacctcgccgccgtcatgacaacagggtcaacaccgggttcgcccccctctcaaggctctcagagaaaacgaggttctacaaaagattctgttgccttgtacgcatgcaatgctacaagtgctacaaatggcgtactgttccaaaagaagaattcgagacactccgtgagaacttcaccaaggatccatggttctgcagcagacggccagactgctcctgcgaagacgatgctgacatcgagtacgacagcagccgtatctgggttctggac

SEQ ID NO: 314109 - DNA, 272 bp, Zea mays
tggggagcttcgaccgattcgtcccggcctcccgtcccgccgctggcctcgcctgccccgatggcggcggtggcgatccaccagttcgccgagtgcatcacctgccacgcctggagcccggaccagtcgacatgatcagatggtttcggggatagactggagtaaatcatccaacaaaatcgtaacagtttcacatgatagaaattcatatgtttggacacaagaaggatctgattgggtacctaccctggttattctaaagttaaatcgtg

SEQ ID NO: 314110 - DNA, 261 bp, Zea mays
cacttttactctcctaacatcatggccttggggaggggctcaatggaccacaattccctctgcgcagagcccgaccccacaattaacgtccaccttatggacaagtacacattctatgtcatcgaaattttagaagagattactccagctaaccaaactaacatgcataacctttttcaagtgtgtcccaaaagcctactgtgtgtctacccctggacatcgtactgaccttttccagcgatatcctaaaaacgtcctgat

SEQ ID NO: 314111 - DNA, 266 bp, Zea mays
gttgaagataagctggaattaagacggagacaatttcacgttcttcttagtaccatccattaacttcaacagacattggagaatgacgacaagctgtcagaggtggaagatgatcaagagagcgtcatggaggcagaccctaagccatagatggtgacgtcgctgtccgtccgcccgcaaggacaggcaatagctgcatgggcttcctgggttcgatttcaacttcggcagtgaaatactttgctttcaaatattaattcatgcct

SEQ ID NO: 314112 - DNA, 250 bp, Zea mays
tctggaagcctcggtgtctccccaggatgcttggcgaggttcttgggttgggcgcagggtcttcgcgggcgaagaagcgatcggaggcgccatcaatttctcgccgttagtctgacgccgccgctaatccgctccccaccgttgatagccccagcgttgctacaatcggagcgcgaggacacgtatcatctgaaaagcaagttggtacctggattctcaagtgccagggcctgattttaagtaaggcgct

SEQ ID NO: 314113 - DNA, 233 bp, Zea mays
ctagtcccctgctccattctcagccgccgccaatccctaccggtgctccgcaaccgctgagtgagaagaagagatggccggcaagggcgatggcacggctatcggcatcgatctcggcacgacgtactcttgcgtcggcgtgtggcagcacgaccgcgtcgagatcattgcccacgacccaggtaaacgcaccacgcctcgtacgtcgccttcacgactcgaggactcatcga

SEQ ID NO: 314114 - DNA, 282 bp, Zea mays
atcgatctcgtttcaaatccatccatcctcgtttcctccgtcccgcagcatctcaaccccatggccaagatcaagatcgggatcaatgggttcggcaggatcggacagctggtggccagggtggccctgcagagtgacgatgtcgagctcgtcgccgtgaacgaccccttcatcagcaccgactacatgacctacatgttccagtacgacactgtgcacggacagtggaagcaccatgagtcaaggtgaaagactccaaacccttctcctttgtgagaagga

SEQ ID NO: 314115 - DNA, 269 bp, Zea mays
agcaaacctgcagtcatctcctccaccaccaccaccaagctcaacaacagccagctcgcgaaaataatgaagagccgcagcatggcatcatcggccgcgctcttggtgctagccctcgcgctagtggcggccaccgctccacaggtagcggaggcaaagaagaagagagcggcggagagcggcgaggcggcggaggcgaagaggatccaggacgacttctgctcgacgctgtgcgagggcaaaaaaggggacggacctggtcgtgtgca

SEQ ID NO: 314116 - DNA, 292 bp, Zea mays
gacggtggccaaggacggcagcggcgacttcaggaccatcaacgcggcgctggccaaggtgccgctgaagagcgccaccacgtacgtcatgtacgtgaaggccggcaagtacagggagtacgtgtccgtggcccggaacgtgacgaacctggtgatggtcggcgacggcgccaccaagacggtgatcacgggccacaagagcttcatgatgaacatcaccaccaaggacacggccacgatggaggcgatcgggaacgggttcctgatgcgcggcatcggcgtgaagaacacg

SEQ ID NO: 314117 - DNA, 283 bp, Zea mays
cgcgagttgcttgcctccctagagcagatgcggggtagcagcggaccctccaatacagaagggactactgaggggtgcagctgatttagtggcacctactatggcacctagtgcggaggcgactgtggacgcggaggctgaggaaactgccgtagaactggacgatggagaggagacatcgggagcagacgcttctacagaggaggctgacacacaggctgcgccacggcgtgccatcaggtatcgtcggtccctcacattgaaaccttctaaacccttcgat

SEQ ID NO: 314118 - DNA, 305 bp, Zea mays
gtgacattgtggcagtggacattaaggagaagggctctgacacgtacgagcctctaaagcactcctggggtgccatctggaggaaggacagcgacaagccaatcaagggacccatcaccgtccgactcaccaccgagggaggcactaagactgtctacgacgacgtcatacccaccgactggaagcccaacaccgcctacaccaccaaataaactaaccaaataataatatgtatcaaatgacatacttgatagacctttatttttattttttattcaataaaaggatataaggtgcatgacaac

SEQ ID NO: 314119 - DNA, 302 bp, Zea mays
gtagtgtcattgtcaagaaggtacaggaaaacaattagttgacacttcatggatgatccttgctagctctggaattggtgtttgcattgagttttggaagatcggaaaggcgatgcatattgaagtcgatagaagtggaaaaattcccatgttgaggttccgagatcgtgaatcatatgcacagaataagaccaaagagtacgatgctattgcaatgaagtacctcacctatgtcctcttcctccttgtgatcggtttctctatctattcactaaagtatgaaaagcacaagagctggtact

SEQ ID NO: 314120 - DNA, 99 bp, Zea mays
tcacaaaggatgctggtcgcattgctggccttgatgttgaaaggatcatcaatgaacctacagcagctgctctgtcttatggaatgaacaacaaggaag

SEQ ID NO: 314121 - DNA, 220 bp, Zea mays
ctagttctaagatcgcgagccgccgggcggagaggccatggcgcgggttcacgcgcgtgctgcactcggggaagcccgacgggctcatggacgagatccccaccttcgtcgtcgacccgctgcccgctggcaaggaccacggatatgtggtcctaaataggccgtgggcatttgtgcagtggcttcagaaagcaaagattgaagaagagtatatactaat

SEQ ID NO: 314122 - DNA, 212 bp, Zea mays
agtatggtactagagcatctgtatttataaaaatgaagaaaccagctgctgccattcgtgctttctgagagtggattcagcactattgcattggtaaggtgttcaatccactctcagcaatcatgtatggtactagagcatctgtgtttatacaaatgaagaaaccagctgctgccattcgtgatgccaatgctgctctagagatcaaccca

SEQ ID NO: 314123 - DNA, 246 bp, Zea mays
actcgatcacaacaagatggcgtgcacaaacaatgcgatgagagccttgttcctcctggtcctcttctgcatcgtgcatggtgagaaggaagagtcaaagggcatcgatgcaaaaggatccgggcctggtgggtccttcgacatcgccaagttgggcgcctcctgcaatggcaagacagacagcacgaaggctgtgcatgaagcatgggcatcggcgtgcagcggcactgggaagcagacaatcct

SEQ ID NO: 314124 - DNA, 182 bp, Zea mays
gagccatacagaaacctggagagtttgttgtaacgtttccccgagcttatcattctggtttcagccatggtttcaattgtggtgaggcagtaaattttgctacgggcgaatggtttcctctaggagcagttgccagtcaacattatgcacttcttaagaggataccagtattaccttatgag

SEQ ID NO: 314125 - DNA, 272 bp, Zea mays
attattctcgatttcaggttctgagtttgtggagatgtttgtaggtgttggtgcttccagagtacgtgaacttttcaagacagccaaggagaacgctccttacatagtgtatgtcgatgaaattgatgctgttgtacggcatagaggtacaggtattggtggtggaaatgaatgatagggagcagactctaaatcaataactaactgggatggatggttttgagggcaacaccggaattacggtattgctgccactatccatctgacatctt

SEQ ID NO: 314126 - DNA, 117 bp, Zea mays
cgcacaccagggtcgaggtcacggacgtctccgaagccgttcgcacgcacgccgacgcactgatgctttccggcgagtcggcaatggggaagtacccggacaaggctctcagcgtac

SEQ ID NO: 314127 - DNA, 210 bp, Zea mays
cgcgaggtggcagggcaccggtgccggccaagaagaagacggatatagtgacgaaccctctgttcgagagaatgccgagcagttctgcatcggcggcacgtttcctcccaagaaggacctgcaccggttcgtcaaggggcccaaggtcgtacgcatccagcgccaggtgcgcatcctcaaacagcgcctcaaggtgcctccggcgctcaa

SEQ ID NO: 314128 - DNA, 280 bp, Zea mays
actaaatgccgaggtgatggaacttgacctgctctccctcgactcggtcgtaaaatttgctgatgcttggacagctcgtatggcaccgctgcacgtgttgatcaacaatgctgagctcttcgctataggagaaccccaacatttttccaaggatggacatgaagaacacatgcaagtgaaccatcttgcacctgcattactggcgatgctgcttataccttcccttctccgaggttctcccagcagaattgtaaacgttaattcaatcatgcacagtgta

SEQ ID NO: 314129 - DNA, 258 bp, Zea mays
acaagatcgtgctcatggtgctgcccatcttcttgtccaccatcatgctcaactgctgcctgacgcactgttccaccttctcggtcgagcaatcggccaccatggacacgcgcgtgggcagcctcaccgtgccgccggtgtcgctccccgtcttccctgtcacgttcatcatcatcctcgcgcccgtctacgatcacgtcatcgtcccgttctcgcgccgcgtcactgggaccgagatgggcatcacacacctccagc

SEQ ID NO: 314130 - DNA, 265 bp, Zea mays
gggaaaggaggatctgaacttctcatgcagcatacttgttctatgaaagacttgagttgggtaaagtgcaactatcaattctgtatttagtgaagagaagtccaaaactgatgcttttagctcagcaaccactaatgtgcgggaaatcattggggatgttgatggtgtcaagattaggatcattgatacacctggccttcgtcccaacgttatggaccaaggatcaaacagaaagattcttgctgctgtcaagagatataccaag

SEQ ID NO: 314131 - DNA, 251 bp, Zea mays
cgatcacgacaagatggcatgcacaaacaatgcgatgagagccttgttcctcctgttcctcttctacatcgtgcatgttgaggaggaagagtcaaagggcatcgatgcgaaagcagccgggcctggtgggtccttcgagatcgccaagttgggcgcgtccggcaatggcaagacagacagcacgaaggctgtagcaggaagcatgggcatcggcgtgcagcggcactgggaagcatacaatcctcataccg

SEQ ID NO: 314132 - DNA, 293 bp, Zea mays
tcacaaataaatacatcgctcactagattgccatgagcaatggcctctaggtcatccatcctgctcgtcatggtggcgctggctacgctattcgtggttggttcgtgcaccaccccgctcaccttccaggtcggcaagggctccaagcccggccacttggtcctcacccccaacgttgccaccatctctgacgtggagatcaaggagcacggtggcgacgacttctcctttacgctcaaggagggtccgactggcacttggacgcttgacaccaagaccccgctcaagtaccc

SEQ ID NO: 314133 - DNA, 125 bp, Zea mays
gaaaagctctgacgtgaacatcactaggcatgcctgtctctatgagaccgcccctgcttatttgactgatcagccgcggtttcttaactctgacattcggggcacaactaggctcaggccacatg

SEQ ID NO: 314134 - DNA, 294 bp, Zea mays
ggcgcacggggcgaagatggcggcggacgacaggaggcgctgagggagttcgtgtcggtgacgggcgccgaggaagaccgggcccgcttcattctcgagtcggccggctgggacttgcagatcgcgctacaagcttttatggaggacggaggggatgaagacattgtgaccatttcgcaggcaacgcccagttcagtgtccagaggcacagcccccagtgataatagagtgacatccgtcagagacctcattcatgaccaagatgaagatgaggaggaagaggaaggccagagg

SEQ ID NO: 314135 - DNA, 290 bp, Zea mays
acccgggctgcctgggctgttggcactcacagacctggagcccctgggtgggtggtgtggagaggcgcaggcacagcgcggactctctggcctcccacccgatgctgctttcccctgtggggatctcaggggctgtttgaggatatattttcactttgtgattatttcactttagatgctgatgatttgtttgtgtatttttaatgggggtagcagctggactacccacgttctcacacccaccgtccgccctgctcctccctggctgccctagccctgaggtgtggggg

SEQ ID NO: 314136 - DNA, 306 bp, Zea mays
ccaagctcaacaacagccagctcgcgaaaataatgaagagccgcagcatggcatcatcggccgcgctcttggtgctagccctcgcgctagtggcggccaccgcaccacaggtagcggaggcaaagaagaagagagcggcggagagcggcgaggcggcggaggcgaagaagatccaggacgacttctgctcgacgctgtgcgagggcaagaaggggacggacctggtcgtgtgcaaggagtcctgcgcgctctcccagcagtccaacctggtgctgtacggcaggatccagtgcaagggcaagtgca

SEQ ID NO: 314137 - DNA, 307 bp, Zea mays
aggcgacgaggccgccgagcgcgaggtgtcggtgaccaccttcagctgggaggagattcagaagcataacctgcgcaccgacaggtcgctggtcattgaccgcaaggtttacaacatcaccaaatggtccatccagcacccggggggccagcgggtcatcgggcactacgctggagaagatgcaacggatgccttccgcgccttccacactgacctggaattcgtgggcaagttcttgaaacccctgctgattggtgaactggcccggaggagcccagcaggacacggcaagaactcaagatactga

SEQ ID NO: 314138 - DNA, 157 bp, Zea mays
ggctgcgttcctctcggaacgcgccgcagaaggggtcctggtgacgagtaccgcgttctctccttgaatccactcgccagcacgcagccctctgcagccgcaccctgcacacccgcacctctcatgtgccaggaacttgctactaccagcaccatgc

SEQ ID NO: 314139 - DNA, 230 bp, Zea mays
acagcttccttcagcagcgcaggcagtggtccctgaggaccgtggaaggagtcaaacttgcgggaattttgcagtgtatctgcagggctgttgttatcagcaagacccaaagctagaaaaggaggaggaagaaactgacccgatcagtgccagaagtcattgtattcaaagaagaataagcaagaaagaaaagaaggaaggaagagaggtagacagatacaagatgaaat

SEQ ID NO: 314140 - DNA, 162 bp, Zea mays
atacctctaaaacagggtcagaagctaagtgctcctgagagatttgttcaagttgctgatgcgcgcaagaagcaccttgtttccattcttagggaattcttattgagaaggacaaaagaggagacaattggacatcttatgcttgggaaggaggataatatt

SEQ ID NO: 314141 - DNA, 140 bp, Zea mays
aggtgacgcatgtacactctggcagtctgctgctgtgtccagagtccgactccagctgggctgtaactaggcttggcacccgcattaggccccgccagcaggcaaagcagggagatgtcagactgctacacggagctgga

SEQ ID NO: 314142 - DNA, 289 bp, Zea mays
catgaacgtcgtgccgacggcagccgagatctacaccctcggcgtgggacacggcatcggcatataccacgactggtgtgaggcattctcaacttatccaagaacatacgaactcatacatgccacaggcatcttcacactctacaaggacaggtgcagaatggaggacatcctgctggagatggatcggatcctgcgcccagagggaaccgtgatcctccgcgacgacgtcgaggtcctgctcaaggtgcagaggacggtgaaggggatgcgttggaagacgctgctg

SEQ ID NO: 314143 - DNA, 282 bp, Zea mays
cttattcatgcataggttaattttgatgggacccaataggtcaacctagtgtttaccttgtttacccctgaatcacttgggtagtttgtgctattgctttacatggttttgggataatcgcttattatatctatgttccaattcttttgttattctatttatgttcatgtcaagatcattaatgttaattggaacatagagcttaacttgagtaacatgtgccaccacaagggattaatgggattacttggctgactaattaggaaagctaatggaagacta

SEQ ID NO: 314144 - DNA, 132 bp, Zea mays
cgactataaacacctctactttgaatcggacgctgctaccgtcaatatgccagtaactacatcctggaatcgcgagctagcactgcccgggctgactactttgctcaaaaacaaagaaaactgaacagacgt

SEQ ID NO: 314145 - DNA, 198 bp, Zea mays
atttgtatgatgagaagaaaaatggtgtgatcgagtttgatgttatatcgaagtgtcttccaccccttggcaccaattgaagacaagatcgattcatgcatttcgtatgtttcagttgcatttaggttgtatgacttgagacaaactgggtttattgagcgtgaagaggttaagcaaatggtaattgctatattgatg

SEQ ID NO: 314146 - DNA, 165 bp, Zea mays
gtctcgcgttgcgttgcatgtagatccaatcagacaggcatcgcttgattggaagagacggattaaaatagttgatggtatagcccagggactcctgtacctccacaatctctcgagcgtacgcatcacccacagggactttgcagcgggtaacatcctgttaga

SEQ ID NO: 314147 - DNA, 273 bp, Zea mays
gtgcgcgggcgacaaggtgacgggcctgctcctgcgcaacgtgtactgcgcgctctcccagcagtgcaaactggtgctgtacggcaggatccagtgcaatgtctagtgcaccgagcaccaggtcatcacggcgccggccatgaaggtctgccaggtggagttcgacaaagcgtacgtcgtgaaggagggcgaggtcaccaaggcctacagcttcacctgcggcaatgagaagaacccgcgcctcagcgagaactgcaagatgtcctgcacccc

SEQ ID NO: 314148 - DNA, 209 bp, Zea mays
aagatacatgccttctgttcttcattttggttggtacctacgttgctgtgtgcctgaatggtggtgctaacttgtcagtagatcattatattgaactcgcaactcacgtataataaacagctgccgacgcagagaagatgctgacatggcagatcgtcttcaaaagtagccgaaatttgattccaacttccttgaatcttctgtggcag

SEQ ID NO: 314149 - DNA, 289 bp, Zea mays
gtaattgcagttgtgagtatactggctgcatgtgatgaatctggctcccttgcccttggtaagaggattcaccggcatgtgcgccagaggaagctgagtagatcaaccctggtatgcaatgccctgatggacatgttctgcaagtgtggatgtgttaaccgagccgactacatatttgacactgagattgttgaaaaggatttagtgtcatggaacattataattggagggtttgcaatgcatggcccaggtgaaaaggcgctggaactcttcgcacaaatggagcagc

SEQ ID NO: 314150 - DNA, 284 bp, Zea mays
gaggctcactgtcactgggcctccacccccacctctctctgtggtggtggtggtggtggcgggggagggagaggacgacggaaatgattctggctgggagtcagactcctccgtagcgtcctgcccagccacatagtcatcagaggaacagagacggcctgtcggatctctcccacggccggtaagtctaaacgcgtttgatatcatctcgttctcaaggggattcaatctgtcggggttgttcgaggagcgaggcacatgagtgagattcgtctcggcacatc

SEQ ID NO: 314151 - DNA, 157 bp, Zea mays
ggagccgcaaaccaagcaggataattttctatcgagatggtgtcagtgaggggcagtttagccaggtcttgctttatgaagtggatgcaattcgaaaggcgtgtgccagcttggaagagggctaccttcctcccattacattcattgtggtgcaaaa

SEQ ID NO: 314152 - DNA, 268 bp, Zea mays
cgaaatggtgaagctgaccacggcgatgtgctgggagttggtggcgaagaccagggacaccgtcgacctggtcggactcgtcatctcgaccgatagacaacgtctgctatgataggaggccggagaaggagccggcactgtgcgagccctccgacgatcccaacgctgcatggaacatacagttccgggcgtgtatgcaccgtgttcccgaggaccagtcagtgcgtggcgcccggtggccggtgctctggccggcgaggctgcggaa

SEQ ID NO: 314153 - DNA, 278 bp, Zea mays
gagctgcaggaaacgcctagcggaccacaaccgccgccgccggaagtcaaagccatcggatgctgatgccggagacaagaaaagggcacatgcgataacccgcagctaaagacaaagcagagagtagcagcaagaacatggatatcggagatgggttgggcgcacagatactgggaagtgcactcttgtccaaggaacatgatcaagccatggatcttggagaggtggtgaaagaagcagtggatcccaaggggaaggcatcaatgcaacagcattac

SEQ ID NO: 314154 - DNA, 268 bp, Zea mays
ggcatggagcttctggtgtgctatgcagatgagggggtttatgtaaacacatatggaaggatccccaaggatgtagttctacagtggggatgctacatcagtagcatatattcgatccaatcagacaatgggctggggagagaaggccatagagatccgatctgtggaaactggtctattggatggtgtgttcatgcacaaaagggctcaaagactaaaattcttgtgtgaacgcaatgacaaggtgttctttgcctctgttcggtct

SEQ ID NO: 314155 - DNA, 267 bp, Zea mays
catcgatcacgacaagatggcgtgcacaaacaatgcgatgagaaccttgttcctcctggtcctcttctacatcgtgcatggtgagaatcctaacggcatcgatgcgaacgcgtccgggcctggtgggtccttcgacatcaccaagttgggcgcctccggcaatggcacgacagacagcacgaaggctgtgcaggaggcatgggcatcggcgtgcggcggcactgggaagcagacaatcctcataaccaagggtgacttccttgtcgg

SEQ ID NO: 314156 - DNA, 265 bp, Zea mays
ggcaatgagaggggtcaagcatcttcttgttcggaaaactgttccaaatgggttggtatttgttggggagcttccatttggacgaatgcgtagtcctaaaatggatcacctggtgtgttttcttcctggtacccttgctcttggtgcaactaaaggtatcaccaagagaaaagctcttgagactaatttgttaactgatgaagatatagaaaatctgcagcttgctgaagatcttgccaaaacatgtgttgagatgtacttcgtg

SEQ ID NO: 314157 - DNA, 178 bp, Zea mays
attcacacacgacggcgcacactctcgcacgagcacgacagcacttcaattcgccattccgcgcaccgatcgaacttcacgccagagtcggtctcttccgaaggcgtcgcgcgcggttgtttgagaggagaggaggaagatgacggagtgcatctccgtccacatcgggcaggccggc

SEQ ID NO: 314158 - DNA, 154 bp, Zea mays
  unsure (1)..(154): unsure at all n locations
tgcatgcgatagcgtacgtccatggcgacaagtactacggcgccaaggcgactatcaatgtgtgggcgcncaagatcgaacagctcaacgagttcagcttgtcncagctctggatcttgggcggctcattcggggaggatctgaacagcatcga

SEQ ID NO: 314159 - DNA, 192 bp, Zea mays
tgtctctctggactgatcttgctactacgactggccacgagcttttggacatggttgccagttcgcctgttgttgcgctaacgagcctacacgtatctgacttccacggcgtgtactcttcaactattggcagcagtactctcgagattaatcctgcactgcctgaggctaagaatctgcagtcctggtatg

SEQ ID NO: 314160 - DNA, 282 bp, Zea mays
ggttcatcgtgcaggcccgcgtcggcagggagttcccctgcaagtacatgtccacgctgctggcctgcgtctccggcaccgtccaggcgctcgccatcgcggccgtcatccgcgggggcgaccgggactcgtggctcctctcctgggacctgcgcctcctcaccgtcgtctactcgggggtcttcaacaccgccgccaccttctgcctcatctcctgggccatcgccaggcgagggcccatctacccctccatgttcaactccctctcgctcgtcgccacca

SEQ ID NO: 314161 - DNA, 208 bp, Zea mays
  unsure (1)..(208): unsure at all n locations
agagggtcatcgagtcgcttgggctgcagccggtccgggactcnctggtggggacggtggagcagcgcgtcatctccggcgggcagcggaagagggtcaacgtcggcctggagatggtgatggagccgtcggtgctgatcctggacgagccgacgtctggactggacagcgcatcctcgctgctcctgctccgcgccctccgccgcga

SEQ ID NO: 314162 - DNA, 290 bp, Zea mays
  unsure (1)..(290): unsure at all n locations
ggtcgccggcctgcagggcgacgtcccagcgaacaccccacgggcgtccccttcgtcggcggggcaagaaggtagccggaggtggcagncattcgtcggcgacggcggcaccaccaggggcatcaacgagaacaacacggtgctgagcttccacgacctcatgcggatccacatgccgccctacgacaacgccgtcatcaacggcatatcctccgtcatgatctcctactccagctggaacggggtcaagatgcacgagaacaagttcctcatcaccgacacgctcaaga

SEQ ID NO: 314163 - DNA, 280 bp, Zea mays
  unsure (1)..(280): unsure at all n locations
aattttccagttcaatggttccagctcatgcattcaagaaagagcaaaagctcttgaagttgtacagtatatcaaagatactttccatgacggcaagtgcgaagttgcaggggttgaggatggaaaattgatggccagcgtgganactggtgaattttgggctttgtttggtggttatgctccccttccaagaaaggcaccttctgaagataaagggcgagacaagaaaattgtcatcaaattgatatgcctcaaacaagggaaattgggagccaattaa

SEQ ID NO: 314164 - DNA, 280 bp, Zea mays
tttcctcgttcccaatcatcttgccgcgcgccgcacgtagctagggtttcgtcctgtcgttgcacccgcattactagcattcaatccacgccaatggctgagaagaagatggttacgctcaggagctccgaccacgaggagttcgaggttgaggaggcggtggcgatgaagtcagagatcatccgtctcttgatcgaggacgactgcgccgacaacgccatcccgcttcccaacgtggattccaagactctcgccctggtcatcgagtactgcaacaagc

SEQ ID NO: 314165 - DNA, 307 bp, Zea mays
ggattcggctcacgttgcgcagataggggaggatgggattgtgccgccatatttaatctccatggagggccgccggttcagtctcggtgaccggtccagaaggaagaggagcgagtagggtagacgtgaggtggaagctttgggctcgggatcatgcgaatcgatgggaattcggcgccggagtaaaagcaccgccatggttccacctcgtatcgtggttggcattgcccctgcctccataaacgcggcgagaacacgtgtcacctgaagagcaagttggtacctggaatctcatgtgtcaggtcaa

SEQ ID NO: 314166 - DNA, 295 bp, Zea mays
gcacattattccccacaacttgttgagcgataaacttatgtgagctcacccttgctatactcacattctccgaggtcaagaacaggtactgcaggataaggagcatgaaggatgtcgtaatgcgttcgtgagaggtctaggctgttgcccccagtaaactaaggttgcgggtatcgttgtcttcaaatggtataattatttagctattttgtacagaacccctattatataataaagatgtgacatttgtttaaaaaaaaaaaaaaaaaaaaaaaggggggccccccgcttattg

SEQ ID NO: 314167 - DNA, 282 bp, Zea mays
aatttatagttcatgattgtcgtatggaaaaactatcacgagacacaccaatattcattgtgtcagcaggcagcgagcgacaattttttactagattcttcaattgggactctgcaaaatctcatatgcatggtcagttcatacacgagggatcttgctatcctaaagggtggattacctccatcactagagaaaccaaagcgacgagcaccagcatttacgggaagaggttttggacaagatacatctcgcggtcaagaagcatgtcaactagtccggatc

SEQ ID NO: 314168 - DNA, 159 bp, Zea mays
ctcaagctatcgaaaccatcggaatctatgcctcagtactgaaagcacaggagattgcaaaggggtgaggatactctgatgtcatttatttggatgctgatcatgacaaatgtcttgaagaagtctcttcctgcaatatttttggtgtgcaaagacaat

SEQ ID NO: 314169 - DNA, 132 bp, Zea mays
acacatcgacacgtcacggcacgatcacgacaaggagagcattctaacagaccagcagcgtctcatctatgctggatagcagcttgatgacgcgcgcacgcttgccgactacaacatccagtaggagagcac

SEQ ID NO: 314170 - DNA, 264 bp, Zea mays
  unsure (1)..(264): unsure at all n locations
gctgcaggccatcatgtcgtgccactagtgcggcggcaacgtcggagacgtcgtcaacatcacgatcacgcagtgtgtgcgngacgtcggcatgagcaacaacgacatcttctacagcaaccggacgtgtgtgacgaacatcgagtagctcatgcttggagtggacgaccagcatctcttcactgngagatactgcattcagctgtagtctgattacatgaagagcttcagcgagaccatggcagacttactggatgctggtgt

SEQ ID NO: 314171 - DNA, 157 bp, Zea mays
  unsure (1)..(157): unsure at all n locations
cagacactggtctcgagcacgagaagagctcctaactccatgctatatgtatcaccactantatctcgaggagcagcattgacatcctgagtgatgtgcagctgatcaagactggagacatagtgcgaactagcgaagcacgctgctggacatgctc

SEQ ID NO: 314172 - DNA, 254 bp, Zea mays
  unsure (1)..(254): unsure at all n locations
ctaggtnatgctgctctcacgacacgagctccgacggcgcagcatcaggcgcggcactctcgcgtgtgatcgagatggcgctgccgaatcaggggaccgttgattactacagcttcaagctcgtcatcgtcggcgatggtggaactggtacgactacatgtgtgaagaggcatctcactggagagtatgagaagatatatgcaccaaccattggtgtggaagtcatccgttggatgtcacactaactgtggtag

SEQ ID NO: 314173 - DNA, 272 bp, Zea mays
  unsure (1)..(272): unsure at all n locations
cgacaagatggcgtgcacacacaatgcgatgagagcttgttcctcctggtcctcttctgcatcgtgcatggtgagaaggaagagtcagagggcatcgatgcganagcagtccgcggctggtgcgtccttcgacatcgacaagttgagcgcctccggcaatggcangacagacagcacgaaggctgtcgcagaggcatgagcatcggcgtgcggcggcactgngacgcagacaatcgtcatacgcagggtgacttccttgtcggacaactcaa

SEQ ID NO: 314174 - DNA, 250 bp, Zea mays
  unsure (1)..(250): unsure at all n locations
ctcagntgaggcatgcacatcttcgtgnagacactgaccggcaagactatcacgcttgaggtggagtcttcagacaccatcgacaacgtcaaggccaagatccaggacaaggagngcatcacaccggaccagcagcgtatgatcctcgnctggacacaagtctgaggatggccgcactcttgcggattactacatccagaaggagagcactctgcacctggtgctccgtctcaggagtggcatgcagatc

SEQ ID NO: 314175 - DNA, 244 bp, Zea mays
aacaagatggcgtgcacaaacaatgcgatgagagacttgctcctcatggtcctcttctgcatcgtgcatggtcgagaaggaagagtcaaagggcatcgatgcgaaagcgtccgagccttgtgggtccttcgacatcaccaagttgagcgcctccggcaatgtgaagacagacagcacgaaggctgtacagcaggcatgagcatcagacatgcggcggcacttggaaagcgacaatcctcatacc

SEQ ID NO: 314176 - DNA, 264 bp, Zea mays
cccaacttggggcaggattgagtgctgcagcagggcccattggcaggaccagtgaaaagggatctgggatatgctacacttacagctgcagcaaaggtgccttcgttggtgtttcactggaagggaatgtggtgacaactagaatggaaaccaatctccgcttctacggtgatgcataccagacggcaacccatatcctgtttgggagggtggagcggccccgagctgctcagcccttgtttgctagccgatttagggcttctt

SEQ ID NO: 314177 - DNA, 310 bp, Zea mays
caatgtaaaagcacagcggattaacattctacatcatatactctcttctaagtgcttggaaacaacatcagtattcattttataattcttgagttatagaaatcgccgctcaattaagagggatccgcaataagttaagtgagttatgcaatgagctcaattcaaattccttcaaattctctaacaccccgtttggatcatttgaattgaattacattctaataatagttatttaggcatatatcgattaagataattcgattttatataaacatatattgtatactatcattagcaagatatcggagat

SEQ ID NO: 314178 - DNA, 305 bp, Zea mays
caccgatccaccccccctcggcctcggcctccctccggccatggaggtgttctactacgtcgtgttcggcgcgctggccgccgtcgtggcggggctcgagctcggcaagcgcggcaaggaccgcgccgccaccacctccgcattcaactccttcaagaacaactacgtcctcgtctactccctcatgatgtccggggactggctgcagggcccctacgtctactacctctacagccagtacggcttcgacaagggcgacatcggccgcctcttcatcgccggcttcggatcctccatgctcttcg

SEQ ID NO: 314179 - DNA, 290 bp, Zea mays
gtcatcaccaaatgcgtcatcccggcgaactggagactcgatgccgtctgcacttccaacgtccacttctactagactttggattcccgtcgcgtcatccggcaagcgggctatggaccttcagcagcaagctaattaagttggaagaatgcaccgctagccttatatactactgagacttccaaattctagtagatgtactccttttgttcgggttcatgatcgaagtccaaagcgtggaatacaagctgaaggctatatatacatgccatttttggaggcattttttt

SEQ ID NO: 314180 - DNA, 143 bp, Zea mays
tttttttttttttggcagcaatgctggtttattccccatggccaccggggccgaactggtgcccactcatgcaaccattccggccaaacccaggccgtgggcagccaccctccgagacacctgggccgggggcagggtctcag

SEQ ID NO: 314181 - DNA, 256 bp, Zea mays
agggtctgggcaaaggcggcgccaagcgtcaccgcaaggttctccgcgacaacatccagggcatcacgaagccggcgatccggaggctggcgaggaggggcggcgtgaagcgcatctcggggctcatctacgaggagacccgcggcgtgctcaagatcttcctcgagaacgtcatccgcgacgccgtaacctacacggagcacgcccgccgcaagaccgtcaccgccatggacgtcgtctacgccctcaagcgcca

SEQ ID NO: 314182 - DNA, 286 bp, Zea mays
atcgctccctgcctctgccctctggtcacctcgcttccgctcccggctcccctccggccacccagacatcgtccgttcgctcgccaagagacaggaccggagaccatggcggaccagctcaccgacgaccagatcgccgagttcaaggaggccttcagcctcttcgacaaggacggcgacggttgcatcacaaccaaggagctcggaactgtcatgcgatcactgggtcagaacccaaccgaggctgagctccaggacatgatcaacgaggtcgatgcggacggca

SEQ ID NO: 314183 - DNA, 270 bp, Zea mays
gtgtattcattgggaatctcaacactcttgtggtcaagaaatctgatgtggaggcaatcttttcgaagtatggcaaaattgtgggctgctctgttcataaaggctttgccttcggtcagtatgttaatgagagaaatgcccggactgctgtagcaggagaggatgtcagaatgattgctggccaggtgttagatattaacctggctgcagagccacaagtgtaccgaggaaaagcaggtgtgaaacgatctgcagcggagatgtacggct

SEQ ID NO: 314184 - DNA, 151 bp, Zea mays
taacagatcagaatgttcacactggttaatctccatttaaccatgagcatgaaggcagcagaagctggtgagtttccagatggttcttctagccagactcctttttcactgttgacaagcgcggccagggttgcactggacaacggctgag

SEQ ID NO: 314185 - DNA, 296 bp, Zea mays
gagcgttgtttgctcttaaagtttgtgacaagctgttcacgagctccactgcttggattcaagtacttgcaaccttctttcacaattcataaggttccatgtgatgtaacactttgggcatcaattggaggccaagatgtagatcgtcttccatctgcttccacatgctacaatacgctcaagcttcctacatacaagcggtcaagcacgctaaggagcaagctgctttacgccataagctcaaatactggatttgaactctcgtagaggtatattcagtggttttgtaaccctgc

SEQ ID NO: 314186 - DNA, 291 bp, Zea mays
gaataatactgcttctgatattcttcatcgaatggcatcagtatttgagaggatgcatgcatctattgcatcaaattctgctataggaacaactttgcttcagggtgaagagaacattggccagtttctatacctcgagggcatcgagtattatatgtggaacacatatgatgttcatttttatgcatcattttcactgatcatgttgtttccaaagcttcaactcagcgtccagagagactttgctgctgctgttatgatgcatgatcctgaaaagctgaggatcttgca

SEQ ID NO: 314187 - DNA, 283 bp, Zea mays
atggcgtgcacagacaatgcgatgagagccttgttcctcctggtcctcttctgcatcgtgcatggtgagaaggaagagtcaaagggcatcgatgcgaaagcgtccgggcctggtgggtccttcgacatcaccaagttgggcgcctccggcaatggcaagacagacagcacgaaggctgtgcaggaggcatgggcatcagcgtgcggcggcactgggaagcagacaatcctcatacccaagggcgacttccttgtcggacaactcaacttcacaggcgcttgca

SEQ ID NO: 314188 - DNA, 131 bp, Zea mays
caagcaggttactttccacaggaagaagaatctgcagtactatgaactgtctgcgcagcgcatctacaacgtcgacagaggtttcctggaccttgcgaggaagctggatggcgaaccgaaccatgacattg

SEQ ID NO: 314189 - DNA, 281 bp, Zea mays
cctgtggcacttgggctgtttgaatctgaaagtaaggatagttggaaatggttcatggagaagttgcagacagctataggatcaccccatggtctagtaatatccacagatgcaggaaaaggcatagacagtgcattaaccaatgccttcaacaatggtgttgagcaccgagaatgtgtgagacacctatttaagaattttcagaaaaggtttcatggtgaagtgtttgaaagaaacctttggccagcagcaagagcatataggaggacagtccatgataa

SEQ ID NO: 314190 - DNA, 285 bp, Zea mays
ggagattcatatcgccgaagggtgttcttcaagtacgagaaaaggattaggacgcgcaccccccagagaagatctttgagtacttcgcatccgtccacagcccggaaggtgagatgcacatgttacctacggacctgatgagggcagttgttcccattttccccccatcggagtccaaaattgtcagggaagggagattgaggggggagcgccaccctggcgagctacaatgtgccccgtctgactttttcatgttattcgatacaatgctgatggagtcatctc

SEQ ID NO: 314191 - DNA, 291 bp, Zea mays
gctgcgtcatcagccccgtcgtcttctggatcttctacaaggcgtacgacatcgggatggaggaaggctacccggcgccgtacgccaagatctaccggggcatcgcgctgctaggcgtcaacggctggaaccagctgcccaagtactgcctccgcttctgcctcgccttcttcctgctcgccgtcgccatctgcgcgctcaaggaggtggccaaggcgcggcggtggtgggtgcaggactacatcccgagcgcgctgggaatggcggtgcccttcttcctcggctcgttct

SEQ ID NO: 314192 - DNA, 177 bp, Zea mays
aaacctatgatgagatcaaggctaccctctgcctcgactttgaccgcagccttgatctcatcataggtggcagacttctcaagcctaacagtcagagggtagcctcaagggcaaactgggttatgtcgaggaggaccttgtttccaccgatttccagggtgacagcaggtctagcat

SEQ ID NO: 314193 - DNA, 294 bp, Zea mays
ctcctcgcctttccccacatctcatcttcgtctgtgttcttgcgcgtacgcgtactcagccccgatccgaatcgtcctcctcgcgagcctcgccgatcccccactcccctcccctcgcttcaagatgcagatctttgtgaagaccctcaccggcaagactatcaccctcgaggtggagtcttcttctcccattgacaatgtcaaggctaagatccaggacaaggagggcatccctcctgaccagcagcgccttatcttcgccggcaagcagcttgaggacggccgcacacttgc

SEQ ID NO: 314194 - DNA, 136 bp, Zea mays
cgtcttcgtactcgcatatctccgagactcaaagcttcttccatgtcctaccgccgccgctgcagctccaccccattccgtcgacaccatgagggagatgatctcgatccacatcggcaaagccggtatcgaggtc

SEQ ID NO: 314195 - DNA, 167 bp, Zea mays
gatgacgcctgggcagtgcaacatggtggtggaaaggctgggcgactacctgcttgaacagggcatgtaactactacgtaccagctggaatgcatgtcgacgacgatagtttcgagtttcgacttccaataatagtaacaacaaagcaaaggccttcctcccggcgt

SEQ ID NO: 314196 - DNA, 166 bp, Zea mays
ccggcaagtggtgccttgacgggcattgcccagccgtggagagcaagaactccgacaccagagattaagactgcatgatcgtgtccaactcgctggtgatggacgtcgtgaacaccggggatagatccgggatcacgctgctcaactccaagttcttccacagtac

SEQ ID NO: 314197 - DNA, 180 bp, Zea mays
ggagaaggagtgggtcgcccacgtggaccccggagtgctcatcaccttcctctcgctgccgcggggcggcaatgggctgaagcgcatccgattcagccgtgaaatgttcaacaaatggcaagcacaaagatggtggaccgaaaattacgagaaggtcatggagctttacaacgttcagaa

SEQ ID NO: 314198 - DNA, 181 bp, Zea mays
aaaggagggtacagatggtgaagaagaagccaggagagcgtacaaggctgctagggaggaatcagaccatgctgcagaggcagctgtgggagaaaaggtctcttcagctttgattgatagggttgatgctatgcttcaaaagttagaaaaggagattgatgatgttgatgctcgaattggc

SEQ ID NO: 314199 - DNA, 285 bp, Zea mays
cgatggcatgcacaaacaatgcgatgagagccttgttcctcctggtcctcttctgcatcgtgcatggtgagaaggaagagtcaaagggcatcgatgcgaaagcgtccgggcctggtgggtccttcgacatcaccaagttgggcgcctccggcaatggcaagacagacagcacgaaggctgtgcaggaggcatgggcatcggcgtgcggcggcactgggaagcagacaatcctcatacccaagggcgacttccttgtcggacaactcaacttcacaggcccttgca

SEQ ID NO: 314200 - DNA, 128 bp, Zea mays
ctgtttttataagttgcatgaacacagcaaacccaacaagggctatggtcatcctggttaattgcaatcaaagccctttgatggtttgctgaacttataagttgcatgaacacaacttctgtttggtt

SEQ ID NO: 314201 - DNA, 175 bp, Zea mays
gcggcgctcaagacccggctgggcatccccatcatctacggcatcgacgccgtgcacggcaacaacgacgtctacaacgccaccatcttcccccacaacgtcggcctcggcgccaccagggacccccgcctcgtcaagcgggtcggggaggccacggcgcacgagaccagggcca

SEQ ID NO: 314202 - DNA, 306 bp, Zea mays
gttcaccgacctcaccgaggaggagttcaaggacacatatcttatgaagctcgacgagcagccccctgcagctgaggccatgggaccgaccgtcggcaccatgagcacagcaggcatgtccaacggcaacaacaccggcgaggctcccaacagtgtggactggaggaccaagggagcagtgacgcgggtcaaggaccagcaacaatgtggctcttgctgggcgtttgcaacggtggcgtccatcgaaggtgtgcaccagataaagacaggtcgtctggtgtcgctgtcggagcaagagatcgtgga

SEQ ID NO: 314203 - DNA, 317 bp, Zea mays
gaaacaccggagagcgccgagatgagagagatgggggaccggccgtagcagggctcgaccttgtcgtcgtcccgttccgggcatgcgcccgctcgtgggagccacaccaacgttgaaccaaagcggtgaggtcacgagaatctgaagaccaacttggtacctgggatctcaagtctaaggcaagttgtgcccttgatcacttttctttacctaataatgttcctgttaaccactgtgacatgctcaggttaatttgatggaacccaataggtgtccctagcattatttattccctaccttgcaaacaaaggcactat

SEQ ID NO: 314204 - DNA, 298 bp, Zea mays
tccttctggacgagaatttcgaggctaaggtcgcggatttcggacttgccaagctgaccacagacaccaacacgcacgtctccacgcgtgtcatgggaactttcgggtatttggccccggagtacgcgtcgagcggcaagctcaccgacaagtcggacgtgttctccttcggcgtcatgctcctggagcggatgtgctcctctgccgcggcggccgtccgccactcagccaagcggcggcccaagatgaaacagatcgtccgtgctctggaaggggacgcgtcgctggacgacctgaa

SEQ ID NO: 314205 - DNA, 296 bp, Zea mays
gacacggcctacttactgctctatgtggatgacattgtactcactgcctcctctgctggaatcctcaagtacatcattgaagctctccaacgtgaatttgccatgatggacatgggtcagctacatcactttctgggaatttctgtgacacactctgcagatggcctgttcctttctcagcggcagtacagtcaggatattttggagcgcaccgggatgagtgcgtgcaagccgtgcagcacgcctgttgatctacactccaaactatctgctgatggaccacatgttgctgacgc

SEQ ID NO: 314206 - DNA, 146 bp, Zea mays
atccttcccttgctccagcgtgccacgctggtccagaccttcggacagaagaaccatgtctgcctcaaggacgggtccatcacaatcccgccgttcgcgcctccccagagatgcaggctcaccttatcctgggaacccggtcactc

SEQ ID NO: 314207 - DNA, 163 bp, Zea mays
aaagtacattgctggacacaacgatgttattggaggatgcgtcagtggctgagtgtttggttccaagccgtatttacacatgtgtgtgtgtcaaccgatgtggactatcttcgacagaacatcactcgtgtgatgtcgaaacctgtcttcggtggccatttta

SEQ ID NO: 314208 - DNA, 209 bp, Zea mays
gacatgtgtagttccttataactttgaactaaaatataactcgtaggtaccttcatgaaatatgttctccatccatcatccataagaatttcaagtcgtcaaacattttgctggactcagaattcaatccacacctttcagatgctggacttgcaagcgttattcctgatgctgaattccaggcagcagacacagtgccggatacactg

SEQ ID NO: 314209 - DNA, 275 bp, Zea mays
gcgaccatctcagagagtgcgttcagaagatccttgctgcctcaaaggcaaagaagcgcggatttgtggagtcgattgaactccaggtttcattgaagaactacgacccgcagaaggacaagcgtttctcaggaacataacgtcttccgccaccgactcgcaagatgagatgtgcattctgggcgacgtttcacgttgacatggcgaagaaggaaggattggcatggatggatgtggagatgctcaagaagctcaacaaggacaagaagctggtc

SEQ ID NO: 314210 - DNA, 162 bp, Zea mays
acgaggtattccccgcccgctgtggaacgcagcctcgcaggtcctgatggccgtcggatacatcgtgatggcgctggcgatgccaggctccctcttcatcggctcggtggtcgtcggcatctgctacggcgtgcggctggcggtcaacgtgcccacggcgtc

SEQ ID NO: 314211 - DNA, 162 bp, Zea mays
ttcagaccgcaccacgttcactcaggcgtcacgtggcagcgctacggtcatagtctatacgcaacgctagctcaagtcggggcgcggggtcgctgtttccgtgtactatatgctctcggcacctcggatcagtagtgcctgctacggttggcttgtccccac

SEQ ID NO: 314212 - DNA, 70 bp, Zea mays
aaccaactcttgctcacgcttccatgccactccaatgcggcatccaaaactctgtcggttacgttcgcaa

SEQ ID NO: 314213 - DNA, 110 bp, Zea mays
ctcatccatcgttccaccaccagtctcgcacagatacagcctctatttctgattcgatggatgtgatgttaactcaaacatggtagcctccaaggatagctaaggagtca

SEQ ID NO: 314214 - DNA, 329 bp, Zea mays
ctttgccagactgaaaagaaagagagcagacatgaattgttgcgccgcgtagctgcgggtggaggggtttttagaaccataagaggcctaagtgccaaattcctgaggcaaatcgtaatgacattgcaaatcaagcagatgatctagtagagtcaatggaatctagggacaccattcctgatcgaaaacttcttgcaagattagttatagtaagagaagaagctcggaatatgatgggaggtggcctgttagatgagagaaatgatcgtgggttgactaacctccctgaggcagaggtaaactttttgagcaagctcgttgctcttaaa

SEQ ID NO: 314215 - DNA, 202 bp, Zea mays
atcgggagtacagtaacgattagtgagtggtcctgtattgagcctgggtgcagcctctgccagtataagtgctctacgtgttatacatttttttatgtccatgaaacattgatccactgagaaaatatatcttcaggtgccaatctacgacaaaaaaggaaagaaaaaaagagaaaaaaaagagcaaaaggaaagaaaggag

SEQ ID NO: 314216 - DNA, 355 bp, Zea mays
agctgcatcagcgtatcagcacttagggtctactattgttattggtgtagccaagggattgcaaatgggaaaaatggtgtaaaaacgctgcatatttttttttgcctaagctacagctgtgctacagcaaattttgattaaaaaaaaaaaaaaaaaaaaaaaaaaaaaaaaaaaaaaaaaaaaaaaaaaaaaaaaaaaaaaaaaaaaaaaaaaaaaaaaaaaaaaaaaaaaaaaaaacaaaaaaaaaaaaaaaaaaaaaaaacaaaaaaaaaaaaaaaaaaaaggggggggccccccaaggattccaacgttaagtaccgcagaaggaaagtgaaagacccccaaaaggggcccc

SEQ ID NO: 314217 - DNA, 301 bp, Zea mays
aaaaaaaaaaaacaaaataaaaaaaaaaaaaaaggaagaagaacaagaatgctctacactgaagtaaacatacataaaaacgtcaaagcgcatctatataatcaacgggagcgacttcacaggccgatcatttttacaatgtgctgcgccgggacaccactcgggttatgcaacgttggcggcctctgccacatacgcctttgtcaagttggagtaacacctaagagccgtggacgggtcgtccatcgcgctagttgcgaaacctccgtcgttactctgagtcgccctcgtgccggtccat

SEQ ID NO: 314218 - DNA, 342 bp, Zea mays
gtaactaaaaaacagaaggaccctggcgagagcgagagagggggagaaaaggggaaaaaaagaataataagaaggtgggaagagcgagggagctgcgtgcataacccagagccagagggagggagggaggtcccctgcagcacccagcagtgtcccctgcaactttgtttgaagcaaaacaaaagtaccaggcttttttcgggggaggggcggttagatttcgctcttcccccgaaaaaagcctggtactttttttcttcttctttcttttgtaattttaaccctttctttcatctttttttcctggtgtaaagtaaacgtggactttgtcggtttatggac

SEQ ID NO: 314219 - DNA, 204 bp, Zea mays
gaaatattcttcccgtcgaaagacggagagaggaaaatggacaagggcaaggcaagagagaggcgtcctcgtttgatctgctgccgcagtgcgaacacgaacacgaacatcatcgccggagttttaaagatgttcctcatggactggttcaacggggtactggcattccctgggctttggcaggaggatgctaagatcctctgt

SEQ ID NO: 314220 - DNA, 129 bp, Zea mays
aaaaaaaaaaaaaaaaaaaaaaaaaaaaaaaaaaaaaaaaaaaaagaaaacaaaacaaaaagataaaaaacataaataaacataaataaaaagataggaaatctgcgcgaggggcaccaactttcggtt

SEQ ID NO: 314221 - DNA, 386 bp, Zea mays
agaaaaggtcctcctttctactgtataactgcatgtatatctcttaacttaattttctgtttggatctgcagatcggctggtacgcacactgacaagaagaaataaagcatttcaagttcatgaatgtggcagccagagattatcaactgtgttttttccctacctctagaaactagacatggcaaagtatttttgaccgaaacattgtttgttagtaatgtattgaaccacctcgtggtattttgccccaaaaaaaaaaaagttgagagagaaagggaaacagatggaaaaaaagggaaacgaagctggaagggagaagtcaatagtaccgagcggagaatcaagaaagatgctaccaaaaaaaaggggggggcgccccaaaggg

SEQ ID NO: 314222 - DNA, 341 bp, Zea mays
acggtctagaatccgggtcaacagcgtcagcaccgtcgcacatctagcagcaaccttcgacgtcgtggggaaatggacgcccccccgccgccgagaaaggggtcacccagaaaccggttgtgcgggtaccctccccggggaatggcccaccggtcctcaataatacagctgggcaagatgggcagatcgcgacgactgtccgtaatcattgtcatggtccagcctcccttcaacacgggcgctaccgcgccatacctcgccggcgtctccgcagccaacccggtccatctccttccatcacctgcccaaagtcgagcgcctcccgcccgtcaagaccaagc

SEQ ID NO: 314223 - DNA, 377 bp, Zea mays
cttctccacgccgctcagcctcctctctgtttcagccgtggagcatcagcaatccacatcatctcccttggccgagcggttcccttgcggcgcccaggatccttcccagacgcgctcggctccctggtctgtcaccttgccggcgttcccctccacctagcatgcccgtcaggccctctcttcgccaccctgccatggagctcgtcccatgcccaacgccggccaacctcacttcccatggtcgtcccttcctccttcctccctatggtcgacggcctcaccttccatggcttccaagatctgctcaacatccattctagcgcgcacccctgcttccgtttcctggtggccgacgccccctccctggaactcgcccc

SEQ ID NO: 314224 - DNA, 351 bp, Zea mays
  unsure (1)..(351): unsure at all n locations
gaccacgcgtccgagaatgccaccagcatgcatttacaggctttgaggagattgacggttccanattctacanggccacaccatccaacttggcaatgggtcagttacaaccggcttactggccgggaccggtccaaagaagattaagataacctggcaatcaatccttccgctcacagaggaaaggagatatgaggcatgacctttgatatacaagagaaagaaagaggaagagaggatttgtttcttgacaagctaagcatgacgcctccaggccaactagacaagcgtgagagaagaagttttagtatgacgcggaaggcagcaaaactggatctgaacatcaatgat

SEQ ID NO: 314225 - DNA, 414 bp, Zea mays
gcaagggtggcgacgtctctagcaacaagcctcaggacatcgacgggttggtggactgttcgagaagcagcccgggcagtgctggcaccagcgcagcttcaggaaaggtgcagacgtcgtctccgaagctaccgcacaagcagtactccttcgtgtcggactccggagaggagagcgatccggataagctggtggagagcgtcttggacagcctgcagaaagcacggggcggctcgaagctgcacaactgagcgtctgctgccatcgaattattgtttttgcaacctaacgagtcgtgcttatggtggtggccatggctgactgtcaaggacagcggcgcctgcaagcatcaacccgaaaaaactgttgattaaacctcgtcttttacttggactaggccgtagtacaatcgga

SEQ ID NO: 314226 - DNA, 218 bp, Zea mays
atcaccggatcatcgttcttctcgtccctctatctttctccctaacgacgccttcctcgtagtgatcatttcctagatccttgattcctggggggtgacggtcagcctcggggtctgtcccgggccgatcgtggaacgcaagcccgtattcctgaacctggtcaagttcaccacacctagtgttgatcactaccccctctcgtttcagggagtcctta

SEQ ID NO: 314227 - DNA, 192 bp, Zea mays
atagggttccttacggttttgtggaggggcgatggcggcggctgatgtggagtagcgttgcttcgtcggcgggcttgcctgggccaccagcggggagtcgcgtgagaatgccttcgcctcctacggctagatcctcgactccaaggtcatcaccgatcgggacacggcgacgtctcgcggcttcggcttcgt

SEQ ID NO: 314228 - DNA, 196 bp, Zea mays
accacgagtccgctgcactgcactggctactggctaggtactgctcacgtgggtcgtgggtcttctgttcctgcttgatcttcaacttcaattttagatctcttttaggatctgaaaacagttttgctatttatttaaacaagctgcttaattttattttgatatttagtataattaatatttgttgactgacgtc

SEQ ID NO: 314229 - DNA, 286 bp, Zea mays
acggacgcgtgggcggacgcgtgggcaaggcaccacacctcttcttcttcttcctcctcctcctagcacagctagcgcctgctccccttcgcctgtgatcatgtcttgcagcaacggcaagtgcgactgtggctccagctgctcctgcggcagctcatgcaactgcatgtcccctaacgtggagaccgccgccgccagcaacatcaagaccacggtcctcgccgcgccgaccaacaagggcaacgccgggcggttccaagccgccaccgaaggcggcggctgcgac

SEQ ID NO: 314230 - DNA, 92 bp, Zea mays
aaaaactacagtacgcatatgatgcgtacgtacgtgtgtatagtttgtgctcaataaaaaaaaaaaagaaaaaaaacaacgaaagagagaac

SEQ ID NO: 314231 - DNA, 320 bp, Zea mays
aaaagcaacaatgcagcagcacaagcaagaaccacacctcctcgcttcgcctgtgatcatgtcgtcatgctgcggcggcaagtgcgggtgcggctccagctgctcctgcggcagcggatgcaacggctgcggtatgtaccctgacgtggagaccgccgccaccagcagcgtcaagaccacggtcctcgccgcgccgaccaccaaggccagcgccggcggcttcgacgcggccaccgacggcggcggctgcgactgcaacacctgcaagtgcggcaccagctgccgctgctcctgctgcagctgcaactgaactggcccgg

SEQ ID NO: 314232 - DNA, 124 bp, Zea mays
acccacgcgtccggccaagtgtgcgtgtggtaccgttgcgatagaataatcagcatgggtagtggtgtcgggtcctttccctgaaactgaaagaaagcagcggcgtgcctgtcgccttccggct

SEQ ID NO: 314233 - DNA, 254 bp, Zea mays
atttttgtcccttttataaaaaaaactgttgtataccattatttcgttagttacacttaacggtgttaagtgggtgtttgtcactgctctaggtttcaacttgagtgtgaagatgatgtgtttgcaatacttccatcgttaatatggtatgcttataatacccttataaacttttgtaaacactaccacctccaagcgagaagacatatccacttataaaaaaaaaaaaaaaaaagaacaagaaaaaaaaaaga

SEQ ID NO: 314234 - DNA, 410 bp, Zea mays
agttttgtgaggagaggaatttcatatgtgtgaagagaagcaaggcacgtggcgcttgctaggtgtcaaatagaaagaccgaacccaaaccatcgccgtgttcatggacaccgcgtcgagtttagtcgtggtacgctagatgattgtgcgagctgaaggacatggatcagaatcttgtggatgcatcaagccagcaccagaatggaagatgctcaccaagtggtcgtcaattaacaacactaacatagtgtttatcccaggattataagtttgttctgttgtggatggtgctaagtgtcggtgggctcagccttcttatataagtatatcacatctttagcttctttattgaggactgtcacttaagctagcatgtattttaaaacttataaatgttttatacattcaaa

SEQ ID NO: 314235 - DNA, 391 bp, Zea mays
gtgcctgcgaggtggcggtgcgtgggggacgcgtcgcgggctggccgcggccagcagctagccggcgtcgtccggctcggcgcggcgcggcgtgcagccagcggggctgtccctgtcctccggggcaagcaaactgccgggccccgtgcgggccctcctctccggttccgaggccccggccaaccggccggcggagggcaaggaaaggaagggcccgttaaggctgtccttggccctccccgcggacgcggtggcctccgagggccgcggggtgagccgctccagggccgtctcgggggcgctgcgcgcgctcaagctgctcggcgtcgacggcgtggagctgccggtgtcctgggccgccgtgcaacccgggttcgggggcctgtttcaa

SEQ ID NO: 314236 - DNA, 355 bp, Zea mays
gccacggccaccacagggagcagtcgagcaccctatagcaaccatatgccctccgcgccgtgctctggcccttcccccgacaccgccagaatcccgagacctgccggcgccgccaacaagaaaatggcgtgcctctgctcgccgacgagccacccggggtcgttccgctgcagtcggcaccgaaccgcgccggacggcgccgaggcggtgcccggcgccaccagggcgcggtccgtgcgcgcgctgctgctccagaggatcggcggcatccggcgcgagcccggccgccaccaccgccgccgcggtgtcggagtcggggacttccagccgcgcccctccaggctgcgcctcatga

SEQ ID NO: 314237 - DNA, 337 bp, Zea mays
agcccgtgcaatccgatcccgatggcggcccggccggacgcgcgcagcggctactgcgccgcgacgcgcaccttccgtagcaagcgcgcggacgtcccgctccccgccgacgcggacctggacgtcgtcaggttcctcgcgtcccgccgccacgcgggcgttgtcgcgctcgtcgacgctgccacgggccaccgggtcacgttccaggaactctggcgcgcggtggaaggggcggccaccgcgctcgccgcgccgccgctgtcgctccgcaagggccaggtcgcgctcatcctctccccgaactccgtccacttccccgtcgccgccctcgcagcca

SEQ ID NO: 314238 - DNA, 79 bp, Zea mays
aataaaaacaaaaaaaaaaaaaaaaaaagaaaatgaaaaaatgcaataaaaagaaaaaaaaaaagttacacgtacgcac

SEQ ID NO: 314239 - DNA, 298 bp, Zea mays
ggactatctcagcgatttccgaaccctccccacccccacacccacccgatccaaccgagtcccggcggcgatggcggcggcgacgaacgccgatttggaggtggccgacttcaacctcaatgacaacaacttcagggacaaggaccccggccaagttcaacaacggcccccggcttccggcttcggttcaacaaccgcgggcaacaaccccccccttaggaccaaggcccgcggtttccgcaaggaccttaatctcctcggctacccgagactcgcgctttggcgcgggggagacgcc

SEQ ID NO: 314240 - DNA, 56 bp, Zea mays
cacgcgtctgacacgctgccatgcaaggacgtcctggcctaattagtcatagcacc

SEQ ID NO: 314241 - DNA, 249 bp, Zea mays
aggtaaacccgatcttgattccaacatcatcagcgcattcattaaagtgacgttccatactaatgctccgcacacgcctgccaaatatgaaacaggtgtatctacggtcttcagtgtcatgcgtatcttctcggagaccaatgatgctgctaatgcatacggtcatgagcataaggattaaccgcttgcgatgaatatgtgctcaacgtcgacggtggccgtagcacagtatgagatgtctctccgcac

SEQ ID NO: 314242 - DNA, 79 bp, Zea mays
agactttctcacagtcgccgccgctgtacattgtccactgcgctctgttcaacgactttgacacatcgacgggaaacgg

SEQ ID NO: 314243 - DNA, 118 bp, Zea mays
acgcgtcggacaattgtttaacatgaaagagcacatttgacagatacatctcagtatgtggaccatacagcttattgtgtagcgaagtacgactgtactggatgaagtgacgcagggt

SEQ ID NO: 314244 - DNA, 111 bp, Zea mays
agatccaccatgggaacgatggcgaaatcacgtcactactatccaccgacggacaaagtggccagaagggatgggacactgtcctcgattccctccagttgtcccattcca

SEQ ID NO: 314245 - DNA, 359 bp, Zea mays
  unsure (1)..(359): unsure at all n locations
gacccacacgtcaaccgcnngctatcagcttctgaacccgtcatcaggaccaacgctctcccttcgaaatgcgaacctgcgccatagcgacatctgctgcagtcacgatgtgacgagcagagataccgtggatgaagacttcagggacttcgaggctgcgtggtgatatcatgtatcttgttcatacatcatgttatcgagagtttgtttttctttctactgtcggtattcaatcaactgtggcttctgctggcactctgttcctgttaagatagcttccatctcaaaacctacatacaaatttatagacaattgttgtacctttttttagtattaaatttatttatataataaattta

SEQ ID NO: 314246 - DNA, 93 bp, Zea mays
acgcgtcgacagttttcctcatgaattgcctcgagttttcccagcttcttgagggttacagcttgggtggcactttccggggatgtgtcgtcg

SEQ ID NO: 314247 - DNA, 327 bp, Zea mays
gaaagcaacaaggcagcagcacaagcaagaaccacacctcctcccttcgcctgtgatcatgtcgtcttgctgcggcggcaagtgcgggtgcggctccagctgctcctgcggcagcggatgcaacggctgcggtatgtaccctgacgtggagaccgccgccaccagcagcgtcaagaccacggtcctcgccgcgccgaccaccaaggccagcgccggcggcttcgaggcggccaccgagggcggcggctgcgactgcaacacctgcaagtgcggcaccagctgcggctgctcctgctgcagctgcaactgagctggcccggcccggcg

SEQ ID NO: 314248 - DNA, 286 bp, Zea mays
actgaacatccgtgaagctcatgtcttctcaacgactgatggcttttgtttggatgtatttgttgttgatgactgggatacaaaggaaacagatactttgctacagattctcaaggagacagcggcacgaaatcatgcctcattatcaaacccaaccaattctgcagcctcagaaagagtactggaactacaagagaagattggtgattcaaatattgacaggaatttcattgatattatatatggattagctggttcatatttttaatgctacaatgttattgct

SEQ ID NO: 314249 - DNA, 330 bp, Zea mays
acgcgtcgacagacgcgtgggttaaagcatgtgcgggcggatgggctcacgcgtgtgtccacgaacggtcagatggagcgtgggtacgtcgacgactacgtcgacgtctacatggtccggaacgtgtacgtcgagttccgcagcgtcgagctcggcgaccgcgccctgtaggagctgctcggccgcgtctacgcggggttacgcatcgacgaccatgtcgcgcccgtgatggacgtcctggagggcagctactactcgtgccaagacctcagctgcgacttctggcgggtctgcgacttcatggacgtcacgtgcgtccgcttcgacgtg

SEQ ID NO: 314250 - DNA, 306 bp, Zea mays
ctaatgttgagagatatttcacacccaagatcggcattcgaagtgcaaagttgaaattacatgtgtgcttttgaaacttaaagggcaaatacacaaaccgacacttatctacatggttttccacccatcacagtgcatcttgcttatctacttaaacgcactcgtttggtctcaaataatactgccacagcatgcagggaccatctctttgtttctttgatgtctcatggcacaattattgggctgcttagttgctatattctaaaaaagaatctttttttttttggtgtagtaggaatgtaggat

SEQ ID NO: 314251 - DNA, 123 bp, Zea mays
ggccgacccacgagtcaacttgtcctcaacagccgttagggcgtccacattgtagaagcctcctgggtgtgacaagaatacgttcccattggtttcagtccgggagggatatcgactaacatt

SEQ ID NO: 314252 - DNA, 169 bp, Zea mays
acagcctcgctccccgcctggtcttcgctgctctgttgttcggtctgtttttgccacctgttcgctagcggttctcgcggccctgcgttgtccgtctctgggtacgctgtgtcgccgccggcgctgtgctctggctcctctcgttggtggtccaggtgctgctggtgct

SEQ ID NO: 314253 - DNA, 129 bp, Zea mays
attcccggtcagacccacgaatcaaggctgatgcccggagcgaacttgaatccatcacactgcgctcaccttcatatgatgcaacatccgcgaatgcatctgtattgcaaaaatagacaaatgcttcgc

SEQ ID NO: 314254 - DNA, 247 bp, Zea mays
atcccctccacgctccctttcccttcctctacctcccctaccccgccgccccgcaatggccggcctcctccacctccagtccacgcttctaccctcggcatccgctctccgccgccgcgcgggcgcgccggtgccctgttcgtcccgccgccgatgccgggtcaaggcaagattcgggagattttcatgccggcgctcaactccaccatgaccgaaggcaagattggtccctggaacgccgcccaag

SEQ ID NO: 314255 - DNA, 417 bp, Zea mays
gacccacgagtccgctttgagaaagacagctttttcaggaacatccttatcaggacgcatcacaatatacctgagatacttctgagtaagatactccctgtcatgctgtcctctgtcgagtctgcctcacttgagtttcgatcagtagctgctctatccataactgtttcgtgacatctgagtgcctaacttactatcgacgacttgactatcattgtcatgctatctgctgtcaatcattgtgctaccagtgaatgtcctatgcgacaaagtcatcagtatgagaaatctcagtctgctgaatcagtgtctgctcaaattgttcatcaagtagtatttccacatgtagcaactgaatgtaccgacactgatcgtacattacgttcactgatcatattatcaatgctcatatcacaa

SEQ ID NO: 314256 - DNA, 198 bp, Zea mays
accttccctccattcaagatcttccctctccggattctctctctgcctccagtccatagccactctgactatctgcccgattccgcctcccggttcctcggacaccctcgcctcctcggatagttcgggtcgacggtcggcctagcttcaatttcagggatggtgttctacctgacggcgcggtctcatggcggccac

SEQ ID NO: 314257 - DNA, 229 bp, Zea mays
gcatacactccgttcactctgctatttctctagattccgtctacgcctacaacttttgggtcctctcttctttccacgatatcgtttctagtggcttcggacacaatcgaaggtccggctattgggattgaactctgaaccaactaatcttgcgtcggactgtgacatcactgccggattgagatcatcgccacctatcatgggaatggcatcagtctgtcatatgtcc

SEQ ID NO: 314258 - DNA, 69 bp, Zea mays
gacccacacgtcaggtaacctcaactcagagggaatttgcacaaaccgcttcaatttggtgaaagggtt

SEQ ID NO: 314259 - DNA, 104 bp, Zea mays
gaagctacattcctaaaaccatctgcttcagccttcagcgagccccaagtttagtcggccgatcgattactgaagtagtatggcctcgccaagacggccctcag

SEQ ID NO: 314260 - DNA, 324 bp, Zea mays
aacctacagcagctacacgctggcgctcccacggtcgacacgacggtgacgaccagtgccgcactctacctcggccccgaagtcgaacctgaaaattttggaaacaatggaagaggaagagtatagcgctgaaatatctaatgaacaagatggcgaaacagaatgaaatgctggtgagagtgatgtcttcagaaccagttgatgtagatgcagcatgtttacgaagagtacggatgatatttgactctgaggaagatgcctttcagttttatgtgacatatggttgtcacgcaggttttggtactacaagaacatctaacaata

SEQ ID NO: 314261 - DNA, 188 bp, Zea mays
actccatgtggaactatgtgaacattttggtggatctgctgttgggtctgtgggttcggtctcgatctggctgcagcggtcacctcatcatgtcatctttgattggagtcctgatgcttcacacggtgagagtcttgtacgatagatatcaggtgcacgtggaccatatcgctggttagggacacacg

SEQ ID NO: 314262 - DNA, 87 bp, Zea mays
agggatatatatgtgtttccaggtagttggagattcgaaacgaaccagtgatgtagatttgtttcatctaaatatatgctatagttc

SEQ ID NO: 314263 - DNA, 76 bp, Zea mays
tccagcccatgctgacggtacccgaaccatacaatcagcttccgttggaggaaacgtatcaggatactgtgcccgt

SEQ ID NO: 314264 - DNA, 258 bp, Zea mays
  unsure (1)..(258): unsure at all n locations
gtgcgtgccttgggttgcgtgtggcgtgtngtgggcttgtgcgggtgctgcgcgccggcccgggggccccgctgggcgttgcgtgcttgctgggtgggggggctgtgggggggtttgttgtggggggggcgtttgggcgcgtcggtgcgcctgtgctggtgcgtgtcgtgggtcccttggtgacggccttggctggggctggcgtggctgctggtggtgtgcccgttgttggggttgtcggctctggttctcgtgttc

SEQ ID NO: 314265 - DNA, 243 bp, Zea mays
  unsure (1)..(243): unsure at all n locations
aattcccgggacgttgagctcatctagggacacctgcgttgtcttgttgttgttgtgncttggccttttgttgccttggtgacaatgtttgccgcccggttccgccccgctatgtgtggcctgccggtacttggtggggtggtttcgttgtttccgtccactttatctgttgcctatcatttccttagtggatatttacttgcgccgttagtgttcgatatattcaacaccttctgaattcat

SEQ ID NO: 314266 - DNA, 335 bp, Zea mays
aactagttaaatgtcgagagttaccatccttctaaaaaaaaaaaaaaaaaaaaaagaaaaggtataagaaaaaaaaaaaataagaaaaaaggaaataaaaaatgaaaaatcacaaaaggggtaatcaataaattttggaaaaaaaaaagggggggccgccctaggggttcaaggcttacttgcccttgcatgcaatttcataccccttctagattgtcccctaatttcatttccggggccgtctttttacaacttcgtgccggggaaacccttgggttttcccaatttaacccctttgcagcaaatccccttttcccaattgggggtaataccaa

SEQ ID NO: 314267 - DNA, 366 bp, Zea mays
acccacgcttccagtgagtcagaaccgcctaccaggaaaaaggacaaaggtggtaagggaaacggaacccacggaggaggtggtgtcatttcctgggataaaggggcaattgatgcattgaacggcaacacgggtaatgctattgggactggtggatggtaagatttccgccaatataatatgaactctgtcggtgcgtgtgtctaattcgtatccgttacttctccatgtgtactctacactatctcgaacatggcttgtgaccatttatacatttaaacattaccttattggtggcagtatcaactaagagatatttgtgttcgaagaccgaaacataatgcaaaggtatttcaacaatgtaca

SEQ ID NO: 314268 - DNA, 288 bp, Zea mays
  unsure (1)..(288): unsure at all n locations
ttctttttggttctttgcgttttttttttgtttctgctcccctcgtgctgtcctttgccgggggtggggcttcttgttgtgtgcctcgtctttggcgtgctccttccnttggtctccttccgcgcccttcgtttttctgggtcgctgctgcttgccgctggtgtgcgtcgtgctgcttcgcctcttcttctgtgtcttctcttggcttgccctgttgtttgcgtcccgcgtggtgcgcttcggctctctcgtggtgcgcgtgtttgttcctccggtctctttcctggc

SEQ ID NO: 314269 - DNA, 257 bp, Zea mays
attgctgatagtcaaaatagcatcatcttataagggtgtgcactaggataaatttaatccttttcatgttgctcatacttaattaattaagttgctgcaattttcatccattttgaccgaatgtgaatatacttatcaaggaattctttgtatgatctttaagaacgtgcgcattgtaagatttatgtgacctctgtacggcatagtataaggtagttttgcgtggaaaatcgacagtgcttactcaaaaggtgctg

SEQ ID NO: 314270 - DNA, 406 bp, Zea mays
cccacgcgttccacccaagcgtccgcggacgcgtgggtcggacgcgtggggcgctgcgtccccatccagaaccatcctccgctcgacaccttctctggcagatagcgtcgtcgtgtttaccgcatcgttgctcaccatggcgtcgtagttgttgccggacccattgccaccagatggtcacgacctcttcatagcttcactccgtccatggccgtcgccgctcgtgccaccctcccgcagctgtaactccctctcccttcctcatctcaccgcaggcctcatcacgccctcatcaccgatcgttgctggttctgccctctgttgctggagatcgtgaccatggaactcgcgtcgtcgtcctagcgctcctcacgatgttgctgctctagggcgtcatcctcatgtc

SEQ ID NO: 314271 - DNA, 413 bp, Zea mays
acgcgtccaatcaatatgttcttgttcttgaggatcttgctcgggaaaaggtaccactactgctatgctggaaactatgactgtggccctaaacttcatgttcatcatcattctgtcttcgtgtgcttttacagttcagtatgaatatctggtcaggcttaaacttcacaatgtgtttttatgtaatctcaaagttatggtcttcaaaatagattgttttaatattcttttgcaataaagccatggtattttcagtcgaactcttctcctttaatacatattagacatatatttgttttttaatgtttattcatttccaaacttcaacacttacaagttacaccccacaaaagctcttttgaacaatcatagaaatggtatttgtcatttgatggatcagatatgataacccc

SEQ ID NO: 314272 - DNA, 361 bp, Zea mays
gcgggccgaaccacgcgtcggaccacgcgtccgcccacgcgtccgagcaaatccaatgcacctttttttgtctccgctttactgtgttgctcctatttaaatacgcctaataataaatgaagtaaacaagtaaccaattggatcttttgtccacgcaccttaatttgcatgcacaagtctaaatggacttatataagtctatggaagagtatctactgtcaattttgttataggcgaaaccgcaaaacagactacagtactgcacattgttggtttatcttatcaacaggaagccggaacagaaattgagcctatgggtgacctcaatactgaagctgagaaaaaacttggtcggcttgtc

SEQ ID NO: 314273 - DNA, 269 bp, Zea mays
  unsure (1)..(269): unsure at all n locations
ggcccacgcgtccgattacgccgccgcggacgagtcctcgcttggcctggaagccatggagctgtccgggccaaggtgaccgaccatctggttgccaaggtcggtcatcgcacaggacaggacgcataggaagcctatggttgtattgcattggagtcggttaggtgtagagagcccccccgacacaagggaaggcgtcaaattttctggtgggttgtagggtgtgatctgtctgtataaaagctgtggtaaangtggntaatgttcat

SEQ ID NO: 314274 - DNA, 250 bp, Zea mays
gttctcctgtgggttggtttggttgttgttcgggtctctctcggttttgctcttttggctgttgtcttcgtcgttgttgtgttggccctgccgggtttctttggttgtgcgctcttggctgctttttggggctcctctccttttggtctggtgtcggtggttgttgtctcctcctgtggctgtttgcctcgtcgtgctgggtgtcttgctggtgggctgctggtttcttcctggggccggcctttctctc

SEQ ID NO: 314275 - DNA, 230 bp, Zea mays
acgcgtctagattggcggtcgcttcgttgttctttggtgtctggcggcctttggctcatcgctccctctctgtgctgcgctttgctgtgcggttgctcttgctcttcttggtggacttccccagtctctcccttgccgttttctatcaccttgccggagttttcgtcgtcgtggtcttcggtgcgcgcttgttcatctttctctgctgcttggtagggtgtcatctgtcg

SEQ ID NO: 314276 - DNA, 390 bp, Zea mays
agcacacagaagcacggagagaatagtgtgccgactagagctctcaaaatgctcgaacagaatgtcagaagccacggttagagtgatctgactatggacgagcccattcatgatatgcgtcatgatctccatgtaaactgataaggcgtcccagttcacaatgcgatgccgaagtggttcgcacgaagacccacctgcagcttatgtcaaatcaggtgcagaacaatatgcctgtccatcaccaacaaggtaaacggatctatcagtctcagatgattgtatattagattgacgaagtctgatcctccggctcgcagggctgacttccccttgacgcacacgcacactcagtagatcagtgctgatcccaatgcctccagtaaagtcatc

SEQ ID NO: 314277 - DNA, 304 bp, Zea mays
aaatcaggtgtgccagacgtaatgtcagcatcaaacccgggcgcgaactttcgtcttccacccaccgtgtctaatacctaggcatttcgatcctcgcgatagtgaaactaggtgctgtactatgatgtgctgtgctctgcacttactatgaagtaacatcaattcacaggttcaagaatttagtgctgcgcatgtggaagaccctgtcatcaccattatggcgcacttcgacctcgtcttcgacgcagacgtacaccagcctcaggtccatgtccatgatcacacggcgagacacgagcaccac

SEQ ID NO: 314278 - DNA, 110 bp, Zea mays
acgcgtcggacagagctcgcagatagggtcgacctgcatgagacgatacacaccgcctagctatctcacacacgaggccgtctagattcgaacttcctgctgaccaattt

SEQ ID NO: 314279 - DNA, 333 bp, Zea mays
agcatcaagcgcgggcacgagcactaggacacgcgcactgcatgcagccgccacacacatgctgacacgagacaagctgctagctggcaataggttcgccctggcgcagctctgacgaagatacgtcgcagcgccgttctcgtcaccgtcgtgctccactcggcctcagcttgggctgtctccgcgtttcacctcggaagggacgaaagcggtctcgtgaagggtgtgcgtccggcgctctgctagcgggccaaagctgtgtatgccgctcgctgcgcagtcacgcactacattcagaaccacggcagccgctttggaatttatcaaggtgct

SEQ ID NO: 314280 - DNA, 202 bp, Zea mays
gtccgcccacgcatccgccgttggccgccgaaaacgggaagtccgcaagggttgttccgctggcctcaaacaaggtggtgccccttttaatgggaaccaaatataacccaaccgtggcctccaagctccgaatgaagggcctcaaggccctccccttggagaacttttccccgaaactgaaaacctccggaacaacaatggg

SEQ ID NO: 314281 - DNA, 277 bp, Zea mays
cgcgtccaacacttgcttgccttcgccccttctgtctcgcttcgtccgtccttgtcccggttcgcccgttgcgccttcgtcttcctgctggtgctgctgtgcggctttggtgttctctgtgggtcggcgtgcttgcgtggctcctggctggtgtttgcgggttgtcctgtgccccttgtccttcttcgtggttttcctgtgcctgggctgtttctgccttgcgctgtgttctgcttctctttggctgtggttgtgtgtccgggctggctgtctgttc

SEQ ID NO: 314282 - DNA, 129 bp, Zea mays
acgatagcctcaggcagatggcccgaccactttcacttggattgtatctgggcgctaacatgaacactatggattgcagttgcagtcacttggagcaaccatgagttgatgggtatcatctgcatcaca

SEQ ID NO: 314283 - DNA, 112 bp, Zea mays
agggtctcgtcgggctgtgggcttgtgtcttggctcttggcttgtcgctcggttctgtccttcgcgctctcggttgcgtttgcgggctgtttgtggcgcttggctttgttgg

SEQ ID NO: 314284 - DNA, 299 bp, Zea mays
cacatcgcctgctcaccggtctacgacgcatctccagctacgccagcagagttagatctagggactgggtgtcatcgccagccattctcgccctgttcgacacggccgtatcgatcttcctctatctgacgctggtgctagactcactcgcagtcgcagtcggctatgcgactgtcggacgggcacacaacttatgcacggtgtgcagccatcaatcgcgtcgacgaggctacagcagcgttagcgaggacaccagtggacatcgtgcaagagccacttgcgattacacctgtcatgct

SEQ ID NO: 314285 - DNA, 122 bp, Zea mays
acgcatccgtaattttttttttttttttttttgtattgtttatttttctttttttttttttttttttttttttttttttttttttttttttttttttttttttttttaaagttcaaaatcgc

SEQ ID NO: 314286 - DNA, 252 bp, Zea mays
gctcctgctggtgccgatgctgaggctgctgctcctgctggtcccgatgtgactcacatggccgctcatgacgcacccgccgatgatgatgctgctgctgctcgtcctgctggtgcagatgagcccgccgcggtcgagccggtcgccgaggttcaggctgctgctcacgaagaactcgccgctgacgagccgtgacgctcctgctcatgctggtcaccaagagccctccggttcaggcaagtgacgttgctg

SEQ ID NO: 314287 - DNA, 155 bp, Zea mays
  unsure (1)..(155): unsure at all n locations
cacgcgtccgccacgcatccgcccacgcgtccgcncacgcgtccgcattgttgtaaattgtagtatataggagtggaatcgtcatggataaactgtgtccttttgttcagagtgcacacctctactgtatactgcacacgaacccaccgctgccc

SEQ ID NO: 314288 - DNA, 72 bp, Zea mays
aaaaaaaaaaaaaaaaaaaaaaaaaaaaaaaaaaaaaaaaaaaaaaaaaaaaacaaaaaaaaaaaaaaaaaa

SEQ ID NO: 314289 - DNA, 96 bp, Zea mays
ttacagtggtcggtcagtactcttcgataatgccacggagcttctgttcacagggtttcgttttacgctatcgttacggggagcacgttctctttc

SEQ ID NO: 314290 - DNA, 439 bp, Zea mays
  unsure (1)..(439): unsure at all n locations
ccacgcgaccggatagaggccgaccaactttgacgtggacagaggctgtgaagagagacctgaaggagtggaatattgataaagagctcgccgcagataggaaggggtggaagtgtgcaattcaggtgccagaaccctgattgatagtttcgcttttcctccttaatcgtttgaccttttcttgtgtccattttagatcttgctggtccttgtgggttttatctcttttatgtgtttccccgtttcgttgttttcggttctcctttgcctttgtttcccttttctgttctttgggggttgagctctgaggttttcatacggggtttcatctctagcctaccccaacgtgcttgggacaaaaaggctttgttgttgttgttgttgttgttgttgcatgacacacttgagaatgaatgtgtttctttctgtntgctggtat

SEQ ID NO: 314291 - DNA, 296 bp, Zea mays
cgcgtccggaagtgaactggtgccgtgggccacattcatcaggacggatgagacctgctgtcgtgcgtatgcgagcgtcgataatcagggtgcttgggaatagagcgatatcaatccagctacgacgctacctttcatctttcctgttctgcttcggtccactattttgtcttccatgatcttacatcgtaggtcgttgcaggtggcgccaaagactttggtgtaatcgttgatctgtctggaactggtcctatcgtcggacgtacgagatttttggtgatccaaggtgaacctga

SEQ ID NO: 314292 - DNA, 107 bp, Zea mays
cttgtccctcttggtgctgggtttgtgctggttgtcgcgcttggctgctcgtcgcgtgctctcctccgtggcttcttccgttctgctggctatgtcttggtccctgg

SEQ ID NO: 314293 - DNA, 80 bp, Zea mays
tgtccgccgtttgtttcgttttctctcccttttcggcgtcgtcttcggggtctccgtctggcttcccgggggccttctca

SEQ ID NO: 314294 - DNA, 140 bp, Zea mays
gtccgcaacgctatatcggcgctcacatgggtcctagtcagtgtaggcggtctacacgaatcagcagggtctcacgctgatgtgcggaagcactccggagatgtccttgggtgtaagtctgttcgcgcgctttgactgtc

SEQ ID NO: 314295 - DNA, 72 bp, Zea mays
tgagaggcacgctgtctgtacccatgcatcacgcgcggtgtgtgtggtactcacacccagagtgctagacat

SEQ ID NO: 314296 - DNA, 429 bp, Zea mays
caaactcgtcatcccaagcgtccgctctttctattatcgcttatgcgtcgccctttttttttttttttttttttttttttttttttttttttttttttttttttttttttttttttttttttttttttggtttttttttttttttggtaagggcaaaaagggtttcccggttgaccctcccggggttttgcaattgtccctcccgagagttcaacaaacccgcattttattacgtaggccaccctgtcccagcataggcacgattaaatgtcccttaccaggctgttcacgttgcgcttttcaggggggtacacgtccataatttttgtggggcattcgtccttaattcgatggctgcaatggccaactccatgttcattttggaatcctggtcctctgccctatgaggcgtgcatgtcttcaaaggtt

SEQ ID NO: 314297 - DNA, 287 bp, Zea mays
  unsure (1)..(287): unsure at all n locations
acgcgtccgcaggctcgtccgcccgctcgtccggtcggttgctttcttgggttctggcttggtggcgttctgtcgttctccggctctctgtcgcttcgcgccgctggcttttctgccctgcgcggtggccggttgtgtgcgtcttcggttcctctgcgtgctcgttgggtttctctcgcggcgcggtcctcggttgggtgtccctggcctgtctctcgtgggtctngtcccgtctctcgttccctgttggtgggtgcttgctcctgcgcttgctgggttctgcttcg

SEQ ID NO: 314298 - DNA, 287 bp, Zea mays
cgtccgaaaattaacgtcttcttccccgttcttgtcatcatcctatgtccgccagttctccgaaagcggcggctatcggttcgagccagtcctataatccactgcgtcgtagagcggtgtcgtgcgaggagctcgccgccgtcgctacgcaacaggccgcagtgcacatgggcgctggggccttctcgcgcgcgtgctccaacgtctccgtcgtcttccgctggctcggcagcgctttcaagttcgcggagatgggctacttcgctaaggttggtgatttggttgag

SEQ ID NO: 314299 - DNA, 235 bp, Zea mays
atccggatctgcgtaataatcccccgtcttcctcgtgagtgagacccggtcgtggctcactaggtttagggtgccatctcgtccgttgtctgtgggattcttgacctgactggccctgcccctggctttgcagccttggtcgccgcttcacagtcgttcgtcgtttgatctgtattcgcggttctgggcgcgttcaacgggttccgcaggactccgaaaagttctgcatcgtcgg

SEQ ID NO: 314300 - DNA, 356 bp, Zea mays
ccctgtttgaaggaattggtcttcttcctggagaaaaattagcatacttaattacaatgttttcaaagatgcagggggaaacggcggaggcgttgggcggattcggaggacccggggcggcggacgcggcgcagcaccagcacctggcagcaggggaggccgcggcggctctggtgcagcccgtggaaacgctgcttcgcgcggcaccgctggggctctgcgtggccgccatgaccgtcatgctacgtaaccagcagagcaacgagtatggcgccgtcgcctactccgatctgtgaggcttcaggtacctcgtctacgccaacggcctctgcaccgcctactcgctggtatccgcg

SEQ ID NO: 314301 - DNA, 440 bp, Zea mays
gtccggaatgcatgtctgccctgtctgcatgcacacgtcttcttcctggagagaattccattatccatacaaagagttcgacgatgggggaagataaagggggagcagtatgcggactctgaggatcctgggcggccgacgcggtacagcagcagcagctgggatcatgggaagccgcggcggctcgagtgcagcccgtggaaacgctgcttcacgcggcaccgctggggctctgcctagccgccatgagcgtcatgctacgtaaccaacagagcagcgagtatggcgccgtcgcctactccgacctgtgatgcttcaagtgcctcgtctacgccaacggcctctgcgcctcctactcgctggtatccgcgttctacactgccgtgcccacgggttgccaaccgtgtcgcgctcctggctcgtcttcctcgtcgaacagg

SEQ ID NO: 314302 - DNA, 424 bp, Zea mays
  unsure (1)..(424): unsure at all n locations
ccgtccggaagngcatgaacaaaattatctgtcaataactctcccacacttaaaaagagaagaactcttctgagtttagactgaccagacattctctangggtaccatggcaagatcactctccaccgccctcatgaggggacttatgagatcgtcccgtgcatcgacatcagctgctgtgtcacgaccagctatccagcagtttatgaactattcatcaggtcttagtggcactcctaatgcaaatggggactcagtgacaacacgagtagctgctgatcacgacacccatcaagattttcagccaacaagtaaaagttcagatatgtctttcagtgacattgttgctcaggatgtgaaggagcaccctgttgtcatctatatgaagggttatcctgatgctcctaagtgtggtttcagtgca

SEQ ID NO: 314303 - DNA, 436 bp, Zea mays
ccacgcaaccggatctagatcgcgagcggccgcccttttttttttttttttttttttttttttttttttttttttttttttttttttttttttttttttttttttttttttttttttttttttttttttttttgggggttccaaaactttttaggtcggacggaacttaaccgggctggaacttcccaaaacacccaaaaatatgaaaaatcccgggaccaaaaaccccccccttcgggccccccaaaccccccctttattcaaagccaattaaccaaaaacccccaagcctaaacgcccaaaagcccccaccaccttcaacccagtccctttcagcagcaacgaccgacaccgacaaaccaaaacccaaaaaattcgggggaaataaccgccctctcccccgaggcctgtacccatcagccaacgctattcacaa

SEQ ID NO: 314304 - DNA, 267 bp, Zea mays
gtccgcaagaccatgggttcttgcacagtcgacatggtggttcccatcatcacggttcaatctcagggtccttgcatccggctggaactggcgacactctataggaccccgcggtttcgcttttccgctcacagctaaggttcatatggaggagtttttggactgatgtacacgacttttggtagctaactgttgagaactttggacgagaactcaaatctctggtctctaagtgtggctggacaggccggatgaagttgccaatgg

SEQ ID NO: 314305 - DNA, 391 bp, Zea mays
catccccactcccctctctccaaccggggaacgggcaatcccctggcctcctgaaccgattccgtccccggccggccggcccggcggcgcgccccccgggccgggagccccggccccgggtaatccggttaagccacaaccggggcctcgccaaaaactgcggctcccgcggcttctccggctcccgcggcgcattcaagggcgcctgaaacgcacccgcccaacgcacgaagggcaaccgaaaacccctcgatcgggctctcctcgcgctgtagcttttataacgccgtagacgacaacgaaagagaacggaaagaaataaaacccaccacacctaccgtcgtccgtagaggaaggaaggactcgagatggacaccgtcagcgtccccgt

SEQ ID NO: 314306 - DNA, 396 bp, Zea mays
  unsure (1)..(396): unsure at all n locations
gtccgcaaacacaacattattctaatccaacccccccttccggttgccccccggcggccgaacccggtccccccttggccttttcccccccgccgacctcaaagggtcattgggttggtggcccgttttgttggaaaaagccggcgctggcacccgcggttgctgccggcgacgagcgatgacgactgcccgcggtcggagcgcgcgcgatgatggccgcgcgggttcaccccaaaacaacanacaattcgcgatgctctgctttcctttcatttgttcttttcgaaaaattagaagtattttttaataaaaaagatatctgttgtttgttgaatggctctgtcttctgtntgtgcataatcgttttcttagtgnggtctaattctatatcacatc

SEQ ID NO: 314307 - DNA, 288 bp, Zea mays
acgcgtccgcgaacgcgtgggttggcatgcaatcggaggcctatgcacagtacacccagtatgttggcttctagtagagtatatacatataataagtccgagaaatatattacgaagttgcaatatagagatagatcataggtgagcacataagtttcagtagtacatgtaaactgtaaatgtaaagcagtggatccgtaaagcactggctccgtgtgaataaattgtcagattatttttttgtcaaaaaaaaaaagaaattaaaaagcaaaatccgaaaaaaccaca

SEQ ID NO: 314308 - DNA, 399 bp, Zea mays
aagggccccatttattaattaaaaggcagaacatgggccgaaggtagtttaaggggtcaaagttataaacaaggattacaacattgaattaccaaccaaggtgccccaaggtggttactttgagtcggaatgtcgccgctcctaacctcctccgacgccccctaagaagactgctgaatataacggcaccatggagtacactgaggtgctgaagctccgtgggcttccctactctgcgacgactgaggacatcatcaagttcttcctgaagtatgagctgacataggacaatgtgcatattgcgatccgctcagatgggaaatctaccggtgaatcctttgttgagttctcaatagctgaagttgccaagacggcgatgtgcaaggataagatgactat

SEQ ID NO: 314309 - DNA, 456 bp, Zea mays
aaccgcacgtttcaaatccatccatcctcgtttcctccgtcccgcagcatctcaaccccatggccaagatcaagatcgggatcaatgggttcggcaggatcggaaggctggtggccagggtggccctgcagagtgacgatgtcgagctcgtcgccgtgaacgaccccttcatcagcaccgactacatgacctacatgttcaagtacgacactgtgcacggacagtggaagcaccatgaagtcaaggtgaaggactccaaaacccttctctttggtgagaaggatgttgctgtgtttggctgcaggaaccctgaggagatcccgtggggttcggttggtgctgaataggttgttgagtccactggtgttttcactgacaaggagaaggctgcagctcacttgaagggtggtgccaagaaggttgtcatctctgctcctagcaaggatgcccccatgt

SEQ ID NO: 314310 - DNA, 457 bp, Zea mays
atccgaagaaagaaagaaagggaaggcggggggaggccggccaaggcaccaccacaccaccacccgacgaattcaagcatgaggccgcagagcgcagagcagggctgccgccgctgccgctgaggagcggctacagagtgctatacctattacacagcggcaacaggcaggcaggtgcgtgcaggcacaccgctcctcgctgttccgcgcccacccgcacaagcaagcgccgccaccaccaccaccaccaccaccgagaaggaaccgcctcgcgcccccagatctcgccgccaggggtcgcgcgagtaggtacatgagggcggcgcccttcagtgccgacgggaacggggcggggaccatagaggcgctgctttggccgcacgggaagggcggcggcggaggccacctgctgttggagccgacgtcggtgctggactgcagacggagcccgagcccg

SEQ ID NO: 314311 - DNA, 421 bp, Zea mays
gtccgacaagttatagatcgcgagcggctgcccttttttttgtttgttttgttttagactgcacacacatgtatttatcagaggagtttctagtcacactgcgcagtatcgatgtgatgcattgacttgtaggaagactaataaacctcctctgctggtgaccctgacaagtctaaacaacagtaactaataggctactaaagttaactagatgttttagactaccacatgcattgaacattcaacctccagaagttcattgtttcagccctacagggctcacaggagtcccagccatacaggactatggctgctccgtgttgtcctcctcttcccactccacgttcttcccatcctcgccatacagccagcagcaccaagcgaagtacacgaagttcgccacgccgtatcccgtgagcag

SEQ ID NO: 314312 - DNA, 236 bp, Zea mays
ttccggggccaccacgcgtccgaatactgcgccatcacaatcccaacagctaccagccgcctcctcgccaagcacttctcctctcaatctcgccacaacatcctcctccggtccaaactccgtcatcttcatctgagcgtctgggacgacaacaacgcagcgaagaccatcatggcgatctgtgccggacgaagcagtggacacatcgatcacaccaagggtgagcgcgctgcggc

SEQ ID NO: 314313 - DNA, 409 bp, Zea mays
ccgggtccacccacgaatcgcgaacggttggcttctcctccccctccggttcgggttcgggttcgtgaggttctccggggttcggtttcgtgggtgggcggatcgagatggcggcgtcggatgttgagtaccgctgcttcgtcggcggcctcgcctgggccacggacgaccactccctccacaacgccttcagcacctacggcgaggtcctcgagtccaagatcatcctcgatcgggagacgcagaggtcccgcggcttcggcttcgtcaacttctccacggatgatgcaataccgaacgccatcgacggcatgaacggcaaggagctggacggccgcaacatcaccgtcaacgaggcccagtcccgcagcggccgtggaagcagcagtcggtgctacggtggtggccg

SEQ ID NO: 314314 - DNA, 91 bp, Zea mays
acgcatccggaaacacagaaaaatgataaagcaaaatctacaaaagaaaaatgatttccctgactttgaagcaagtcagaaaaacaaaaag

SEQ ID NO: 314315 - DNA, 222 bp, Zea mays
gtgtgtggtggtggggggccgttttgtgtggtttaaagctggcggtggctcgggctgggcgtgggctcgcgggtgttgcggttgctctggcggtgcgtgggctctcggctgccgttgcgggtgtgcggtcgtttgtgttcgcgggccgtcgtttttggctggttgtgcttggtcggggccttgtgttgcccgtgttggaccgctttctgcgcttcgcgcttt

SEQ ID NO: 314316 - DNA, 370 bp, Zea mays
ctccaccaccccgccgagctccgcccccatcgtgccgacggatctccaacccagccaggagcttcccctctcgctggcggatcccccaccctagcaggagctcccctctcccgtcggcggatcccccatcccgctaggagctcagtccgggccactgacggcttcaccaacgaagccgccaccacgctgccagcgccaggttcacccccacctgcgcatcccgctagtagtggaccccacggccaggatctcggcacgcccccgacactgccagccccccacccacccatgctggacggtcgaaggattcgaccccacgcaatcatgcattgctttgacttatcaatgcaacgtttaatcctaatgcatg

SEQ ID NO: 314317 - DNA, 80 bp, Zea mays
agtcgcattaagcaggacgactcaatagtgggacgcgtcagaagtgggactaacctatagtgcgtcatatgagtggatag

SEQ ID NO: 314318 - DNA, 276 bp, Zea mays
ttgagtcgtactacacgacgcagtaatatgtatcactttgggatcttcatagatactataacaatggcgaacctaacgattcttttggcttaatggccggctatgttcaggatgagggctaaagttgctttgcgataaaaaagtgttgaatttggatagccagaagattcatttctcgtacaggagacctttacccctccagagtattcccattcacatgacaatcccggttctggtctaaaacggtacactcgtatttgaatctcgatacattgt

SEQ ID NO: 314319 - DNA, 157 bp, Zea mays
agtcgcattaagtagtacgactcactcgcgggtctcgtcaccagctgtctcactcgcacagtgagccggtctgagcggacttgatggcacaggcaccggggcaggggatctcccgcaggccgatttctgcgacccgcaacgaattcgtcagcgcccc

SEQ ID NO: 314320 - DNA, 384 bp, Zea mays
tacaagtctctataatgagtcatattagccggttggcccagcggtccgggcaagtccatctgctcgctcgcgccgcaactcaagcaggcagatcagtgtgagctatccattcgcagacagggagtcatcatcatgaatggaatcggttgtaatatgagcggaatggcggtttcatgctcacgtaacccaggtgcgctgctcgtcaggcagggagcgctgctggatgtggaggagttcttacagcactggtgagatggcattactacgagggactgtttcggagagcaatgcttccgcgaacatggccacctggatgagatggacgatcagatcgaagcaggcgggctgcaccgcgacgagcaggatctcttctatcaagaccat

SEQ ID NO: 314321 - DNA, 367 bp, Zea mays
aatcatggttgagcttgtccagaaaacatggataagtgaggtctcatgcagaaacggatcaaaatacaggatgtaaggcactaacaaagcattaagaaggacggccatactggaggttctagtcatagatatagttgtctccagtgaacaaggcacttctaagatcgtctgcttatttcacttcagtgagctccttatgcaatcttcatcacaggtgttacctcggtgttaccagactttgccttctggaaaagcatgctcctttctgtagtgggtatactgcgcgacgcgctagaatttttaccacgtctgatgtctttcccatcttcacggatcactggtccgcaccatgtacagcttcttcaac

SEQ ID NO: 314322 - DNA, 257 bp, Zea mays
aaatacgcactaccaagatccgtgcagcacacacacaaacacagaggccagccccgttgtactcactgtctgtgtgtatgtaaatgttgtgttgattgcggccgtgttggtcctgtgaatggcgtcgtgagtcgtcggttgtcagtgatgtttgatttccagggattaatcttttgtctctttattttcattttatttaataatttacatattaccatacaatagaatatatgaactaaaacgagttagacaagaaa

SEQ ID NO: 314323 - DNA, 356 bp, Zea mays
aggcgtcggcccacgcgtccggcttttgtggctggcgtcggtggcgggtgcgtcgcggtctggtgctgcgtggtgggggcgggggtggctggtgggggcgtggcggcggggggggggggggccggggcttggggggggctggggggcggctgggcgccgcggggcgggggcccttggggttcgggccgtcggtgcgcgtggtcggggggtggtgcggcttcgtggtggtcgcgctggtccgcttccggggccggcgttttgggcggtcttggcggggagacgcgggggggtggccggtttgcccgcctgggggcgcggccccctttggccgcggggggtgttggcgggggggcggc

SEQ ID NO: 314324 - DNA, 188 bp, Zea mays
  unsure (1)..(188): unsure at all n locations
aaacgntgtgactcagtatgcggagtcgcaaccccgggtgtgaggcgatacagcgccgcgagcctgccaccagcaggacgcctgcacgagtttcgggcactggcgcaaccacgccggcggggcgagccggggctcagtcggagggcctggtgggatagggcggagacgctgaggcctgagggggagac

SEQ ID NO: 314325 - DNA, 385 bp, Zea mays
atcgcgtccgcccacgcgtccgcggtcgcgtgggttggctgccacgggggcccattcctcgtcgtcgtcattggcgcctacgaggaagatactctcaggtgggcgagcgtctactcatcggagactggcgtatggactacgtcatcctccattcaaattgatgcctacgtcgagcaaaggcccagcctccttgccggtgacgcgctctactttagcgcacaggaaggcaaaataattgtcaaatacgacctcaatggacagagcctacatgtgatcaatgcgccggatatgtttgagccaacagagggcattgctgtgaccgtggaggacggtggtttgggactcgccggagtgaaggatggcaacctccacctgtggtcatggc

SEQ ID NO: 314326 - DNA, 379 bp, Zea mays
attgtgtttcttctccgtccagccatatggtatggatcctagtgggcggcggtgcttcttcttctcttctgtcgtagccaaaactaatcatctgaggctagtgaggaagaagggtttcctcgcaggcaattgagttctgtcgtcgtgtacgtggagtctgattagcagcagtccagtatgcttggttggcgagtcaaactaactttttttaggggggagggcgcaaattatgtagtgacctgcctgtgggtggtcctggccgcggggtggtccgtccggtcaggctgtgtaccctttttccttcacatctctctttatttattaatacgatgagatggtgtggttatgttctaaaaaaaaaaaaaaagggcggccgctc

SEQ ID NO: 314327 - DNA, 331 bp, Zea mays
agagatatggtgatatgagctgatgatttttattaaaaaaaacaaaaaaaaaaaaaaaaaaaaaaaaaaaaaaaaaaaacaaaatatagataaaatataagattaaagttacatggggtgggcttcaagtggttccaaggttacgttcgctttcttcacagttcatacttcttcaatgtggtcacgtgaattcccttcagcgtccgtagttttacctcttcttgctggggaacaccttggtttctacgaattttatcgccttgcactagatcctatttttgctaattgggttgctattgatgagggctatatggattggccttccgaaaag

SEQ ID NO: 314328 - DNA, 424 bp, Zea mays
atacacgcctctaaaccgagtcagtttatccgtcagatctgtgacagctggcgatatagatatcacacacattcgttattcgttgaactacagccactggcgaggccgtccgtccaaagcgtccacgtcctccttctcccactcgccacgcatggccacatcaacccgctgctccagttccgcaagctgctcgccggacgctctggcgtccggtgcacgctcgcggcgacccgcttcgtcgtcagctcgacgaagccgaccccgagctcggtccacgtcaccgtgatctccgacggctgcgacgagggcagtccctccgaggtgggagggatgggcgcgcgctacttcgagcgcctcgaggcggtcgggtccgagacgctggacgacgtcctccggtcggagtcggcgctggggccgcccgtgc

SEQ ID NO: 314329 - DNA, 314 bp, Zea mays
acctacttctagatcgcgagcgccgccctttttgtttttttttctattgaccaccacgtatagatggttacaaagtttgatcacgggacgttatacagctgactgttattaagacgaccagatctgatgtctccatgacttatggccacagacctttcggacctacatgcggcatgcccagctggacaccatatcttggtatcatccctaatgtcttgagtaatcttagagatgtcaggggtagtcccatcagtgacacaagagtttctgtgtttgcagaacagcaagccactacgatcacaactgacatgagt

SEQ ID NO: 314330 - DNA, 330 bp, Zea mays
atattcttggggtcaaatcagtagcatctcatggctgtgaagtcgatgatgttcaacgagtagcagtgcaggatgaatttacccgcatctcagttccacaaaaacatattggcaacaagggatcacgtgattcttccccggataatgtttgcaatgctgcgattccgtctgctatggagcaaggatatacattgatgactggcacacataatccttctgttaatgtcgttaccgtcacagtccatggtgttggtgttctagtctttgcttcagggttggtatcgcgaacatatacagtgggaactgtgatgagtggatgcattccacaag

SEQ ID NO: 314331 - DNA, 309 bp, Zea mays
aaaatggaaagcgtgataagagaagagacattaaacgccttagttgtttcgaactatctcaaaatccgactgtcactcgcggtgtccatcacatatgctggtcttgcatatccagttgacttcaataccaatcatattatcaagagtgtccagtatgtgaaaccgtggtacaataacaatcaccatggactcgttacggctgaggaaagaagacatacagaacatagatcaagacgttatcaaggtttacggagtcgaaaacgagcatcaggtcaaagtcgtcaccctgaagtcgctggacaacaaccc

SEQ ID NO: 314332 - DNA, 73 bp, Zea mays
acagcgtcgtatcatctcctccactggtttcgggtctctaaggatatgcggctgcgtaatgtgggcagctgac

SEQ ID NO: 314333 - DNA, 291 bp, Zea mays
aaacataaggggtgcagatgacgacgatattggggatgatgaagatgatgtggttgatagtgctaacatggatggataaggtggtaagacagattacagcaaggaggaggaagcagctccggcagcggcaaaggaagttgtaccatgaacaagcatttccgtatgctcgatgccaaacgtgtcgacggcatctaggtaggctacacgtatccttggctttttggagttaaatctgtcagtcgaatcactcaatgcctacgtcaagtatacgatacaacaggagttgtgctg

SEQ ID NO: 314334 - DNA, 398 bp, Zea mays
tataaatgagtcatattaggacatcggatacggtgctgtaaagcgtgtgcgtgacaggcgctggcagtatcgacgcgtctagagctggtgcagctcctcctctcccggggcctattgccggtcagcagcatcgtgcacgagtctgatgtgcacaagagggtgcaactgactgtgccggcaagatttgaggaatcgttgcagattctcatggctgatttgatggcatatgacagcagtgcatcagcagttgctagctgtgacggtgtcgtccatgtacctattgctgtcctttcggatcaactctccatccctgaggtgtatgtcatacactcccgctgttatacgtactgccgattgtattaaatgcttgctattctgcaggagttatgcaatttatg

SEQ ID NO: 314335 - DNA, 87 bp, Zea mays
attcgtcgtctcggtgtcgtgcgggcttggcccgggtcttcgtctcctggggttggctgggttgctttggccgtgcgtttgcggctg

SEQ ID NO: 314336 - DNA, 210 bp, Zea mays
agttctctcaaacgtgccgctacctctcttcattcagcaatgattacagccgctccttcacgtgatgtccatcaccaattagacatgcacgtgggaaattcaatgcggtcagacacatcacctgctttgtccatctgatcgaacaatggtgaccgcgataacatcacgggaactgatactgcatctggccagctttgcaggattttcaca

SEQ ID NO: 314337 - DNA, 337 bp, Zea mays
acgcgaccgcggacgcgtgggcggacgcgtgggctgtggcctcccggccaccaccaccacagcgtcgccgccgccgcttcctcggcgtgctcgtctcctcccaccatatgcgccaccaccagcaccacctccatggccgcctccgccgcttcttcttacccttgttgcctcacccaccaaagccattacaatggcggcggatctgcagggagcagcagccacagtagctgcttcctgttccaccacgagcaccagcagcaggaggagcccgccgatgtgagcatatcgctgtccatagccccgccgcgcagcaacaacgacgcggcttcctgtggtg

SEQ ID NO: 314338 - DNA, 161 bp, Zea mays
aaaaaaaaaaaaaagaaaaaaaaaaaaataaaaaaaaaaaaaaaaaaaaaaaaaaaatcaaaaaaggcggattctcgaaaggttacaacgttttcctactctataaggtaacactcagggctcttccaatgggtgacttagcttcattttcttagccttgt

SEQ ID NO: 314339 - DNA, 90 bp, Zea mays
gcattcgcgcgtcgacacacgcgaccgaaaaaaaaaaaaaaaaaaaaaaaaaaaaaaaaaaaaaaaagggaggacgcacaaaaggataaa

SEQ ID NO: 314340 - DNA, 325 bp, Zea mays
caggcaacaaggcaccacacctcttcttcttcttcctcctcctcctagcacagctagcgcctgctccccttcgcctgtgatcatgtcttgcagcagcggcaagtgcgactgtggctccagctgctcctgcggcagctcatgcaactgcatgtcccctaacgtggagaccgccgccgccagcagcatcaagaccacggtcctcgccgcgccgaccaccaaggccagcgccggcggcttcgaggcggccaccgagggcggcggctgcgactgcaacacctgcaactgcggcaccagctgcggctgctcctgctgcagctgcaactga

SEQ ID NO: 314341 - DNA, 319 bp, Zea mays
ccgtattgtcgtccctctgtagggcattagcaccggccgacgatattactaagtgcttaatttaagtactggcccttggcgtgaaacttcaccagctccgcgactgcgcatggctaacggccttcctgatcctcgctgcgtcgtcctcatggctgacactgcacgctctctcgacaaatccgtcgaagccgtcctcttcgactgctatgatttcatgtgtgacggagatatgctcagtggatgggtcccatcaacgaatgaacgacgtaggaatctgggatcaaacttaatttttgtgtcaaatgactctagaccagtc

SEQ ID NO: 314342 - DNA, 247 bp, Zea mays
gcgtccgaaactaataatgagtcgtagtaaaaagaaaaaaggggggaaaaatcaagggcattgggccgatactctacaggctttaagtcttcattaatcctacatgagaggctcttaaatcttctgtcctggcctcaattttcagttcattggacgtcgtattcccccgtcggtgaacagcgaaaagcctgccattgccaaacctttgcaccttgcaccacattgtcacattcggaggttggcctaa

SEQ ID NO: 314343 - DNA, 307 bp, Zea mays
agtcgtaccatctgtagggaattagcaccggccgaggatattactaagtgcttagtttaagtactggcccgtggcgtgaaacttcaccaggtccgcgactgcgcatggccaacggccttcctgatcctcgctgcgtcgtcctcatcgctgacacagcccgctctgtcgtcgaatctgtcgacactgtcgtcttccactgagatgatgtcacgtgggcagggtatccgcgcaggtcacggtcatcgacctcgcccggctgtgccagccgggcggcggcgccgacgaggcctcgaagcaaatgactcta

SEQ ID NO: 314344 - DNA, 323 bp, Zea mays
caacaaggcagcagcacaagcaagaaccacacctcctcccttcgcctgtgatcatgtcgtcttgctgcggcggcaagtgcgggtgcggctccagctgctcctgcggcagcggatgcaacggctgcggtatgtaccctgacgtggagaccgccgccaccagcagcgtcaagaccacggtcctcgccgcgccgaccaccaaggccagcgccggcggcttcgatgcggccaccgagggcggcggctgcgactgcaacacctgcaagtgcggcaccagctgcggctgctcctgctgcagctgcaactgagctggcccggcccggcga

SEQ ID NO: 314345 - DNA, 387 bp, Zea mays
ggcagctgatgtggagtaccgttgcttcgtcggcgggcttgcctgggccaccagcaacgagtcgctggagaatgccttcgcctcctacggcgagatcctcgactccaaggtcatcaccgaccgggagacggggaggtctcgcggcttcggcttcgttaccttctcctccgagaactccatgctcgacgctatcgagaacatgaacggcaaggagctcgacggccgtaacatcaccgttaaccaggcccagtcccgtggcggtggcggtggcggcggtggctacggcggcggtcgcggcggcggcggctatggtggcgggcgccgtgacggcggttatggcggccgtggcggctacggcggtcggcgcgagggtggtggcggcggcta

SEQ ID NO: 314346 - DNA, 157 bp, Zea mays
ggtcgacgacgcgtccgatgcctagcggctgacgtgctgtatccacacgggacgcctgtcacggccagtacgaataatctcatcaccgagaacaacataatgccggcaatggacatcgaccaggaactcgcaacgctgtcgacacgacttacgctcg

SEQ ID NO: 314347 - DNA, 345 bp, Zea mays
tcggcccacgcgaccgctcatttcaaatccatccatcctcgtttcctccgtcccgcagcatctcaaccccatggccaagatcaagatcgggatcaatgggttcggcaggatcggaaggctggtggccagggtggccctgcagagtgacgatgtcgagctcgtcgccgtgaacgaccccttcatcagcaccgactacatgacctacatgttcaagtacgacactgtgcacggacagtggaagcaccatgaagtcaaggtgaaggactccaaaacccttctctttggtgagaaggaggttgctgtgtttggctgcaggaaccctgaggagatcccgtggggttcggt

SEQ ID NO: 314348 - DNA, 324 bp, Zea mays
ctcactctccgctggtcgctcactcttgcagctccacccttcactcagtcttagtctcttattagctctaggctctagctagccgcgccactccttcgtgtagccatcagccttctcatcgccaccaatggccactgccgaggtccagaccccgaccgtcgtggcggccgaggaagcgcccgtggtggagaccccgccgccggccgtcgtgcccgaggagtctgcccccgccgaggccgaggccgaggccgaggctgctgctcctgctgatcccgaggagcttcccgcggccgagcagcaggcagccgccgaggcggaggccgc

SEQ ID NO: 314349 - DNA, 329 bp, Zea mays
ccacgcgaccgctaattctagatcgcgagcggccgccctttttttttttttttttttttttttttttttccactaagcagtgcacaaataatcgactagtgacatatgctgaactggaatccagtaagcataacagttagtatcggaggttgctaagatatcgttttgacatggtagatggcaaaaagggaaatgcaaaacatcctacggcatagagttgacaaaccaataacttcatgtggagttatctccatcctcaacaatcttctagaccaagcaaacacgacaaacaaataagtaacgacttattttgcccatcttttcagaac

SEQ ID NO: 314350 - DNA, 97 bp, Zea mays
cgtccaaaataaaaaaaaataaataaaaaaaaaaaaaaaaaaaaaaaaaaaaaaaaaaaaaaggacggaaaaacaaaaggttaaaaaaattaaataa

SEQ ID NO: 314351 - DNA, 325 bp, Zea mays
ctcactctccgctggtcgctcactcttgcagctccacccttcactcagtcttagtctcttattagctctaggctctagctagccgcgccactccttcgtgtagccatcagccttctcatcgccaccaatggccactgccgaggtccagaccccgaccgtcgtggcggccgaggaagcgcccgtggtggagaccccgccgccggccgtcgtgcccgaggagtctggccccgccgaaggccgaggccgaggccgaggctgctgctcctgctgatcccgaggagcttcccgcggccgagcagcaggcagccgccgaggcggaggccgc

SEQ ID NO: 314352 - DNA, 326 bp, Zea mays
cgagagaggcacacgcagacgaacagaaatcaccgcactggatgggtcaagaagaggcgagattttttcctgcttctcatcgacgtatatatatactatgcaccagagagaaaaaaacagagagtaatatgtgaacaggaaacgcgagaagtggggctgcacgaaccagagtggagcgcgggcctctggaagtggcgaggagcattgaaggcccccggcccgggatgcgcggcgcagaatggcagcgcgacgagaagcagcagcgccaggcggatggggggagccggcaatgccatggctgggggtcggctcaccggcgcggcggc

SEQ ID NO: 314353 - DNA, 397 bp, Zea mays
  unsure (1)..(397): unsure at all n locations
agcagcagcacaagcaggagccacacctcctcccttcgcctgtgatcatgtcgtcttgctgcggcggcaagtgcgggtgcggctccagctgctcctgcggcagcggatgcaacggctgcggtatgtaccctgacgtggagaccgccgccaccagcagcgtcaagaccacggtcctcgccgcgccgaccaccaaggccagcgccggcggcttcgacgcggccaccganggcggcggctgcgactgcaacacctgcaagtgcggcaccagctgcggctgctcctgctgcagctgcaactgagctggcccggcccggcgatggcgcacgagagtcgagaggaggaggacgacgacgaggcgtataaatataatagcggcgtccagtaaataagatcctgt

SEQ ID NO: 314354 - DNA, 307 bp, Zea mays
cgcgaccgggaacgcgttgtttgggctgcgtactgagggctttccagggggtttgtctttgcccggtttggcgtctgtgtctgcgtgtcgcgtgtgatgtcgtacatgcatggtggggattgctcggcgaggggggttctggcggggtgtggggctcccagtggcttctgaggcgcttctgggtcggcggtggttgtggttgtcgacggtgattcatctctggtaactgtcgatcttgctgggcttgtgtcggggctagctccgccggccaccattggctcggtcgagcacctcatgcccacgatgg

SEQ ID NO: 314355 - DNA, 324 bp, Zea mays
cccacgcgtccgaatccacgttcctcgccccctgcccctccggagagtcatggccaccgccgtttccacccccgcggacctgtcgcccacgcctgccccgagacggcggggccggccgccgaagaaccccgccccagccgaggccccaggcagcccggctgaccaagcggaggtgattggggactacgagcgcgagagggacgcgaggatccgggagaacatggagcggatgcagaagctcggcatcctcgacctcgcgcacaccctcagccactgcgccgccgcctcgggtcggggtaccggcagtgggcggtggcgccggaa

SEQ ID NO: 314356 - DNA, 330 bp, Zea mays
aaccggctgtccccacgcggttgctccaaggaaggaaactctgatcccgctatccccgcccccgctctctctcgccatctccgtgcggctgctccaaggaaggaaggtccgaccccgccatcgccatccccgcgtggctgccttcccctctcgccatccccgcgcggctgctccaaggaaggaaggtccgaccccgccatcgccatccccgcgcgcccggtcgagcgccaccagccgcataagtctgggctagcgccgccggccaccattggctcggtcgagcacctcatgcccacgacggtcagtcgccgccttcatggctcagagtcg

SEQ ID NO: 314357 - DNA, 358 bp, Zea mays
gtacggaagtacccgggtcggccacgcgaccggttatagatcgcgagcggccgcccttttttttttctttttgatcgaaaaggtcaggatcacaccccatcacatctacattcatggtacagtctagattgcgatcacttaacgccgcagtaccgcctacatcaacacacatcacgtcggctcactgcagacacacccatcgcgctgccagcaaagccactgtcgatcactccaccaatgctgcaggcggtggcggcgaccgccacactactgcctcagcagctgctatcaccgtcgagcacgcagccgcattcgtccccggctgtcgcgccgggccacacatccgggaccgggatcg

SEQ ID NO: 314358 - DNA, 102 bp, Zea mays
acaagggcacgccctacttgattgtccccgagaacgacatgcacaacattaacattataattgatgagcgggggtctcttgcagtattcagtccgattcgtg

SEQ ID NO: 314359 - DNA, 348 bp, Zea mays
gcgtcgacccacgcgacaggccaaagcgcaatgactcctccatgcttacctacgtacctctgcagctacccgccatagcaagctaggccggagcaaaggatcaaacacatcggggaacggaagagacgattaatggccaaagtccatcccaacgccgcggggtccgtcgttgccacagcagcagcactaggccgggccacgacggaggccgatgaagagccgtcgactgtgctgacggtgtggcgcaagtcgctgctcttcacctgcaacagcttcactgtcaacgacgcgagcagcgacctgtccttcagcgtgcactgctacgccggatccactcggagctggcgc

SEQ ID NO: 314360 - DNA, 94 bp, Zea mays
ggtccaggcgacgcgtccgaataccaatcagtttcaaactggctctaaagcgatgatccttgggcgtgactctggccgctttacacgagcttca

SEQ ID NO: 314361 - DNA, 116 bp, Zea mays
acaagttggctcgccggcgctgatccttgggcgtgactctggccgcgttacaggagcttcactcggtccctcactgccgcgccggtcgaggcagcgcgcgtcgagggcgcaggggg

SEQ ID NO: 314362 - DNA, 371 bp, Zea mays
cgtctaaaaggttgtaaaaaccaggaagttcacagtgataaccggaactagggttaaccgaggacatcctggaaaaggattttccacaggctggattcaccgattacagaatcacgccgacagcgctgggtttccaatcggtcatctacgtcttcccctgacgaagaagcatatttatatatatatacatagatatgatcacactgtgtacgatgtgtcaagtgtgccctgtgcgtaaggaaatctacataccattattactaagttattaataagacagacatgatgatgagcgtatgggcaaatatacatgagatgcatatcaatgctaaagatttaacgttgtactactgccgtctggattttcacga

SEQ ID NO: 314363 - DNA, 378 bp, Zea mays
ccacccacgcgtacgtattttgtcccagtcatctgatctgagtgtctgacgatatgtactactaataatgtgactaagggggtgtttgtttgaaaaaaaaaaaaaaaaaaaaaaaaaaaaaaaaaaaaaaaaaaaaaaaaaaaaaaaaaaaaaaaaaaaaaaaaaaaaaacaaaacacaaaaaactccccaaacaatacaacacaataaaaaccaccaacaaaacccacaacaaaccaaaaaacacccaaaacacaaaatccaacgtcaacaaccataaaaaaccaaaaccacgcaaaaacacaaacataaaacaacaacaccattaccaaaacacccaccaatacgaaacagcacaaaatcaaaaaaccaccccaac

SEQ ID NO: 314364 - DNA, 218 bp, Zea mays
aagcgtgtgcgagacacaccgtcaaacggacccgagagagtcactgaccagaggctatggcatcgacgcgcggcacgcatggggctcccgccgaggcgggcgtggagcgcgccgtacgtgagctagctcgggggcgggacgggacgtggactaaggcggtgatgaacgcccggcacggccgcggaggagatcgcgcgctcgcacgccaaccgtgctgc

SEQ ID NO: 314365 - DNA, 392 bp, Zea mays
cggggccagcacgcgtccggacttatttgcacgaccgcgatgcagccgcagccgcggatctcgctgccagcgactgatcggggacaccgcgcaagggctcagccccgcaacccacgttaagtccgccttcgggatgagtcgtctccgggccggcgcgggccggccatcgccctcgactgcaactgcgactggcgcatagacctgtcatcaccacgagatcgttccgccctatgtcggtaaagatgctctgttgcacacctcaagctgcactctgacggactctgatgactcgaagtttggctatggcgcaacgtagctcactggtgcagtcgatttggtgggccactacaagctgctgtcaaatcatgatttcttttgcaagaaacctttgc

SEQ ID NO: 314366 - DNA, 413 bp, Zea mays
ccaattagctagcttcttctagctctagctaggctcgtctgctgcaagaaggtaacagtaacagcaggcatggaggggaaggaggaggacgtccgcctgggcgccaacaagttctcggagcgccagcccatcggcacggcggcgcagggcacggacgacaaggactacaaggagcccccgccggcgccgctcttcgagcccggggagctcaagtcctggtccttctaccgcgccggcatcgccgagttcgtcgccaccttcctcttcctctaaatctccatcctcaccgtcatgggcgtctccaagtccacctccaagtgcgccaccgtcggcatccagggcatcgcctggtccttcggcggcatgatcttcgccctcgtctactgcaccgccggcatctccggcgggcacat

SEQ ID NO: 314367 - DNA, 440 bp, Zea mays
aatgctactccgtacctatttctctcgccggcgacgagcctccgcggaaaccagtgccaagccagaggtgcttctttctccgccagactgctgctccgcgcgagaagagccaccacggagtctgcgtgactagggacagtggagaaaatcagcggcacagcgtgggtctcgcgacctccagcgaacggtgagtcggtgagtttatctccttccggtcttacctattctcgatctgctctgctcccttagttcttgttcctttattttccttgttccccactgtctcttcctgattagtgttatttcgcttgagtcagagatccctaagtttcgatccactgtcccagtggatttgggactgcgatggaggagcagttcatcctccgcgtgccgccatccgtcgcagagcggatcgagcgcctcatgaatgaatccgccgc

SEQ ID NO: 314368 - DNA, 228 bp, Zea mays
ggtcactttcgtaacatggtgcatcatctaggaggtttgcaacgttcgcctttcgtaccagttacttatcccttctggatcctaggacgcactgtgtatcggatcattatgagcagttagtgtggtggtcacgctcaatcttgctcactaacatgactacgtatcaccgccagtaccattgatggtcataccgtcccggtgcatcataatgggcgagatggcagggga

SEQ ID NO: 314369 - DNA, 417 bp, Zea mays
gatttgatttatttttgtggaggagagaaccccgtgttttgcgtggagaagaaggcaagccgctcgacgctcgtcgatgtgcggagcgatgcacaaagccgaatcgccatcatcctcacaaacaccgtttggttttgtttatggaccgagagatgctgaccgtgcaagtgatgtggtgccacccacaagatgcagtcggtggacgacccaaggaaggatggacataaccagtggatgctcgccaagcgagtacccccccagcaaacactatctaagtgttaaaataaaggaccgagagatgctgaccgtgcaagtgatgtggtgccacccacaagatgcagtcggtggacgacccaagtaaggatggacataaccagtggatgctcgccaagcgagtaccccccagcaaacactatc

SEQ ID NO: 314370 - DNA, 448 bp, Zea mays
  unsure (1)..(448): unsure at all n locations
aatatttgttatttccatgtatggtaaccgatttctccaaagggatacatttgtagaactaatcatttactcttgatggtttgtaggcatttcgtttgttactcatccatcggacatgcatttggtcncaaaaaaagggtcaagctcctatcactgttcatcatttggaatctttgagaactacaagtttgtagcggctcatttatctcttcaaaatcctaccagcacgtggtagtaaaatatagatgataatttagttgtttgtcaggatgaagcttgctaacgaacaaaactagatatctccgccactagcactgatggcgagaccgccccggtgcatcttaaggggcgagagggcaagggaaaagcagcagcagcaaaactggtcaagggccagcacaccgagattcaagcatttcactatcgagcaacggagaaggacaacgat

SEQ ID NO: 314371 - DNA, 149 bp, Zea mays
ttaccctgacaatcggaaaagttaaccaatatgggaaggatgcaaccaaacctaacaggaaacggtccaccagcacaaacatcatccccatatcgataaactgttgcttagcctgacaatcggaagagtttaaatgttaaagatttgat

SEQ ID NO: 314372 - DNA, 436 bp, Zea mays
gccaccgacggccgacgtcgagcctccgcggccgagcctccgcctagcaccaactccgtcgtcgatcgtcctatgcgaccacgcccccgtccgccttccgtctcctgcctccactgagtcgcgggcgcgacatcggggaacgccaaggctgagcttcgcccatacgcctaccgccctgttatgccccgaaccgccgtgctgaggtccgcccaggccgggccaggagcttctcccggcagacccacccccgcccaacggagctccatgcctccgcccagggccattgtccgagctacgccccacgctcctgtccagtgccctggccacttagatggttctgctcagtcatgtttagtgtctggttcaacaacttcaacttcaaccaagggacgcatctatcacaagacgtatggttgccaaatgaatataagtgaca

SEQ ID NO: 314373 - DNA, 66 bp, Zea mays
cgtccgaaatgaaacgtattaaaaaaaaaaaaaaaaaaaaaaaaaaaaaaaacaagaaaaaggaaa

SEQ ID NO: 314374 - DNA, 440 bp, Zea mays
cacccacgcgtacgcacaccccaccaacccatacccataccagaggctcgctgatcttacttctcaacggtagatcggatgatcgaccgaacgaacgatgcagacggcgctagcttcacagagcacactgctagctcagcagcatgtcggacggtacggcgacctgcatcttcatcatcctcaccattatcctgccaccgctcggagtcatcctcgtgttcagctgctcggtgctgtaactaccacatcggctgccgctttctgacttccttgctgcagtgcactgccaatcgacagataactgttgttgcttactcgcatgctgcaggctgatcttcggatctgtcttatcactcagcttcttcggctacctcgccagcatcatctacgctgtcagggccatcagcatctagcaggccggtgcgtaagcatccaatgca

SEQ ID NO: 314375 - DNA, 442 bp, Zea mays
caaacgcgtccgcccacgcgtccgcccacgcgtccgatgggctgtgataagcaaggttattttaccttggatgaatggagaactggcttgaaagctcttcgagctgacagtattagtaaactgaagaaagcatttccagaactggtccaagaggtgattctgtctccccaaatattatcttatgttcaagtgagccatgcatatcagagatttaatttatggagtgaagaacttccatctaacagatatatcatgatatattgccaccttgtgactgtaatggacaatgagctatcattaattgttgatatttttttgttgaagtgtaaccttgctgaccacttcatgtgtttataaatccaggttacaaggccatccaatttccaggatttctacatatatgcatttcgttattgcctcacaagagataagaagaaatgta

SEQ ID NO: 314376 - DNA, 295 bp, Zea mays
cacgcgtccggatacgcatcggcttacgagtctgcccacacatctcatgggtcgtgataaacaatgttatgttaccttgggtgctcgcacaactgctttacaggcgcctccagctgccagtagcagcagacgtaagaaagcatttcgagaactgggcgagaacgtgattcagtctctccagagctgagcctaggttcatgtgaaccatacatatgagatactgaagttattggctgaagtccttccagctaacatatatatcatgatatagtgccactctgagactgtcatgttc

SEQ ID NO: 314377 - DNA, 289 bp, Zea mays
ttcgccggtccacccacgcgaccgcacacgcgtccgcggacgcgtggggaatttcttcaatctgctggtcaatgacgctaatcccaacgccgcttagcccattgcatccatcgccgtccccaagccgaatcccttgatcaaggtcaatgtcaagaccgttgcaatacccaatgcggcgtcctcaatgtcaaggtcatcgtcaacgtcaaggtcatggtcaagcctatcgctcctgcctcctcgtcatccatgccccgcctgcgcaatctcaacgttgccaatatctccg

SEQ ID NO: 314378 - DNA, 303 bp, Zea mays
ccacgcgtccgcatcgcatcccatcccactaccacccatctcgtcgtccgccgattcgatccggttcttccaacccagggtgagtctccggatccgtcgccgtctggtatccgtgtgctctcgtcgccgtcgccgtcgccgccgtctgactgcccccctcgcctcccgcggcgtcgggtctctggtgctgctgctgctgctgctgctgctgcgtgcagggcagtgatggcgacgaagaggagcgtgggcaccctcggcgaggcggatctgaaggggaagaaggtgttcgtgcgcgccgacctc

SEQ ID NO: 314379 - DNA, 438 bp, Zea mays
cgtccgtactgaaattaacatatatggcgctgctcattatacacttatgtaagtcgtataatctctcataaattaccttcatggacttggatcgtttaagggaatactgatcagcttttgatattaacagattcggattttacatttctataaatcctataatctctcttaaatcacctccatggacttggatcgttagcgatggtatcattttgtttgtcatggtaatgtcataaaatgttttttagaattcaatttggatgcctcttatagatcacataatttgtttgtgcacatttctatagcctcgttattttggtcttttaattggcttactcttcgatataagaaaaacaaacggatacattttttgaaacattagctaaccttttggcttcgtcaaatatagacatcacattacacctacgactgatgtta

SEQ ID NO: 314380 - DNA, 318 bp, Zea mays
cagacgcgtgtgcgggcgcgtgggtcgacttaatacagtcatacacagtcatatcagcaggccatgcattcacaatgcgagcttatctgcagcactatttggttgattttttaatcattgcctgcggccgaacatattgccgttgactcattcgatctcgtcatcactagctacgatgatgtgctgcgacgcctggctgatgacgatgccatgattgacctcaagaccggtatggtcgatcaggactatgtgccaccgacaattaatgttgcagaggagaaggagatcgggatcgatgtgctcatgaataatcttgtc

SEQ ID NO: 314381 - DNA, 412 bp, Zea mays
gcacgcgtccgcaagttatagatcgcgagcggccgcccgcgatctagacttctcctccccctccggttcgggttcgggttcgtgaggttctccggggttcggtttcgtgggtgagcggatcgagatggcggcgtcggatgttgagtaccgctgcttcgtcggcggcctcgcctgggccacggacgaccactccctccacaacgccttcagcacctacggcgaggtcctcgagtccaagatcatcctcgatcgggagacgcagaggtcccgcggcttcggcttcgtcaccttctccacggaggaggcgatgcggaacgccatcgagggcatgaacggcaatgagctggaccgccgcaacatcaccgtcaacgaggcccagtcccccggcggccgtggaagcggcggcggcggc

SEQ ID NO: 314382 - DNA, 135 bp, Zea mays
cacctcgatccagacagcaggcagcagccatgtccaaggtcttcaccctcgacgcggtcgccaagcacaactccaaggaggattgctggctcatcatcggcgggaaagggtttgatggtgacaaattttttggaa

SEQ ID NO: 314383 - DNA, 454 bp, Zea mays
  unsure (1)..(454): unsure at all n locations
ggggccacgcacgcgtccggaaatttgcgtaatacctcccatttgtgttttttataatccacattttttgctgttataacaccatgtacaccaatctttcatgtgcacaagatatgttctcttattatttatcagcaacttttttattcatgaaatactcaatgctatgttaccttgttctttatcttagtttgccttcgtagcgtaaatcattttgttctagagaccctgtatcatgcanagtcaaacgttgcagaaattgaaattctgaagagtttcacatagagtatgttaaaaaagttggttttataaataatggaacatttttttgcccagttgcctttcacttgaggtgttagtaatcatttcttattccagtattggtgtacanacaattgacagaaatattatttggcatggaaatattttgatggcacagtacgctttttctgcc

SEQ ID NO: 314384 - DNA, 64 bp, Zea mays
gattcatttttgactacgtcagtatgaaacttattgcagacactatcagctacttctacaatca

SEQ ID NO: 314385 - DNA, 290 bp, Zea mays
atcctggaaaaggagaacttacgccgcagcccttcgccctccttccgtcggcttcgacgggcgccttaccacgcaagcgcgggaccataggagcttggccagcagaggattgggacatttgggaagggtgagcaaaggccctgttccattcgcgaacattgggaagagagcaactgatcgcgtgtacaaggactacaactttgatgaagacgttttggtggcgacatgttctaactctggcttgattctcacagccactgggcgtgaaggatcagttaagacttcattgg

SEQ ID NO: 314386 - DNA, 213 bp, Zea mays
atagtgcattgatagtcatacctctttgaaagtagtcaggtaattgtatttcaagggccatagtgtgaaaacttcgggattgggaaaattagggcgttagcaaaacaaaacgctttgaagaacaggccctttacggaagatgtcgtaatggataggaggtcgaaactgttggccaatctcaagagttaaggaggaaggaaagggtaaggggac

SEQ ID NO: 314387 - DNA, 122 bp, Zea mays
aactcttccttcctcggtccagctctctctctttccctctctctctcgcggccctctatctccttagctgctgggatcacgctgttcgatcgtctggtgctagcttggtagtctggaagcgt

SEQ ID NO: 314388 - DNA, 92 bp, Zea mays
caaagttttgttatgcttaactagtgactgagtgaaggtctacatgtaattgatttgaattctgtgttgccagtcatggatttgcagctttt

SEQ ID NO: 314389 - DNA, 87 bp, Zea mays
ggtcctcatgggcatgttgttgcgcacaagcgagtctggatttcgcgcgcataacgtcatcgtcctcctcgctctcttcggagttgc

SEQ ID NO: 314390 - DNA, 445 bp, Zea mays
cccacgcgaccgcagtcatcgatctcgtttcaaatccatccatcctcgtttcctccgtcccgcagcatctcaaccccatggccaagatcaagatcgggatcaatgggttcggcaggatcggaaggctggtggccagggtggccctgcagagtgacgatgtcgagctcgtcgccgtgaacgaccccttcatcagcaccgactacatgacctacatgttcaagtacgacactgtgcacggacagtggaagcaccatgaagtcaaggtgaaggactccaaaacccttctctttggtgagaaggaggttgctgtgtttggctgcaggaaccctgaggagatcccgtggggttcggttggtgctgaatatgttgttgagtctactggtgttttcactgaccaggagaaggctgcagctcacttgaagggtggtgcaaagaaggttgtcat

SEQ ID NO: 314391 - DNA, 330 bp, Zea mays
  unsure (1)..(330): unsure at all n locations
acgcgtccgcagacgcatgggtttgggacataattgtctgcaccttctattttaggttgtaagttcaaatgggaaacgggtcaagaggttacatccattgccacacaaagaattganagattcaaagaaaagcactgttttggtcgaaaatctacctccagatttctcaatggagagtattcaagaaaaattcgcaacagtgggcaaagttgtgaacataacaattaatgatccagaatcagtgaaagaattttcaactgctaagaagcctgacttcaatttaagttttaaggctcatgtacttgttgaatatgaagcaatggaggctgc

SEQ ID NO: 314392 - DNA, 202 bp, Zea mays
ccacgcgatccgcacatccgcacctctctccagctccctgctcctccgcctacgtcgtgagttcaaatgggaaacgggtcaagggggtaaaaccaatggcaaacaaagaaatgcaaggatccaaggaaaacatggtttggccaaaaatcaactccaggattcccaaaggggaagtatcagaaaaaatcccaaaatgggcaaa

SEQ ID NO: 314393 - DNA, 413 bp, Zea mays
cccacgcgatccgcacacgcgtccgcccacgcgtccgcccacgcgtcaggaacaactccaactcccatctctcactacggcaacacattgccagctcagccatcatcggtctcggcggatagcggggcagccggagatcactatggactgggtgcaagcggcgggagactcagcatcgtggagcttggcgctgtcgctggaggagatgctggtggtggtgtgcactctgggcacggctgaaggacggggcggagctcctgtggtggtgatacgcggagctgcgctgtcagcgcggacgtgcgatgaaatctacctagtggttcgaggcgacacactgctcagttatcaggacatctgcagtgagcctctcatcctgtagcggcacttgcatgtacacgatcccaacgaagtct

SEQ ID NO: 314394 - DNA, 113 bp, Zea mays
acgacatggatcttcccatcatcacaagcgacaactcgctgtatcaccacaatctgctctctctgtgacgtgaaggtgtcacatactaggccacgcattctgacccctgtgat

SEQ ID NO: 314395 - DNA, 154 bp, Zea mays
accacgcgtccgcaactcagctccgccgcttgcccgcttttgctctctcgcacccgggtctcggcgtcgtcgacacgctagcgtctcacaggcgtggacgcccctcacggttcgcgcgatgtcgccagcggctcacgcccgctcgccgttcacc

SEQ ID NO: 314396 - DNA, 264 bp, Zea mays
aaaaaaaataaaaaaaaaaaaaaaaaaaaaaaaaaaaaaaaaaaacaaaaaaaaaataaaaaaaaaaaaaaaaaaaaaaaaaaaaataaaaaaaaagggggggcccccctaagggttcaacccttacttccgcgtgaatgcaacttcaaacctcttcaaagctgtccccaaatttcacttcatgggccttcgttttacaccttcctgactggaaaaacccggcgcttacccagcttagtccccttccagcaaacccccctttcg

SEQ ID NO: 314397 - DNA, 124 bp, Zea mays
aaaaaaagaaaaaaaaaaaaaaaaataaaaaaaaaaataaaaaaaaaagaaaaaaataaaaaaaaaacaaaaagattattggtggcggaactagaagttccaggcttggttccccatataggca

SEQ ID NO: 314398 - DNA, 84 bp, Zea mays
aaatatatatgttacttcatgtagaagagcttctcaactgtccatattgttgaaactgaagcttggttgcacctttttttcttt

SEQ ID NO: 314399 - DNA, 394 bp, Zea mays
agtgcccacctcccgttccgtcgcgctcgggtccctctcctcctctcccctcctcctccttcgcttcgtagtaatcgtaaacccggaccgccccggcaggcacccccccgctccacgcgtgcgagagagagagatagagcgcgcgccatgggagaagagaccctcgttgccatgccgcccgcgttcccccaccaccacgcccccacgccgccacagccaccgtcggggccagttgctgcggacaagggggaggaaggggaccatcgtcgtcccgcagagggcgtcgccgggccgccgcaagtccagccgcggtcggtggccccgcacgggctcggcggcgaggaaggggacgtatactacgcgcgcaagatgctccagggcgcggtgcctgcgg

SEQ ID NO: 314400 - DNA, 403 bp, Zea mays
  unsure (1)..(403): unsure at all n locations
attcacggggccatgcacttggcataattctgacgataaganaccatctgtatgtgaacaacgtgatccttgtgcaaacagggtgtcgtctactgaccagacagtgcaacagaatgactcttggtcaaacatcatgatttctggtggagctgacgataccaatggtggctgggacaccagagtgaaatactcatcctgcactgatgggggtgtctgactacattgtgatacatggacacacaagattggttctaatgaaggtgtataacaagaaactgatccttgagccagctacatgtcttctactgtgtgtgccagatacaataaaggtagctggaacactacaccacaagtcattccatccatggaaaaggctgatgatccatcgaagagtaacgcgggt

SEQ ID NO: 314401 - DNA, 283 bp, Zea mays
agacgcctcagccccatcacaataacatcaaaggcacatcggatccatctcgacagtgaggcttgagagaccagatcaaattgaaatcatccgcgactcaccaacgcacgtttgttctctgatctctctggttcttctttgaacagcaaggattgcacagcacaatacaatgtctggttcaaaatgctcttctatatgatatttttatgaatcctcatgagaagcttgttcttgggttaggatttttttctcacctcatcatatcacacctatcgaggaacag

SEQ ID NO: 314402 - DNA, 277 bp, Zea mays
cccacacttcagcggacgcctgggtgcacccaggcggcgcgcctccttgcgctgcagtgagtctgagagcccccgtcctgcatctgtcggcgatgaacagctctcggcgacaggaccaccgatagctgcaattccgtctctgctgccgctggtggtggccacggcgatgacgttctccgccgccgctgctcgcatccccgtcgtgtacggcagcggtagctggcatatcgcgcatgccatctactacggcggcagctacacctcttgcaccatgggc

SEQ ID NO: 314403 - DNA, 57 bp, Zea mays
acacacagttccgcgaacgcctgctgtctcccacacggcgagtctccgtgcgctaca

SEQ ID NO: 314404 - DNA, 344 bp, Zea mays
agttcgatatagcgagcggccgccctttttgtatcctgttgtcaatgaatgggtatataatttgcccaatgaaaaaagtacagcatactgcatacaactccaccacgtaatcgagatgacctgcaaggtacgacaagaaccggaagaaactgtagcatttactactatactatagtacgtactagctgtagctgtatcgactaccgagtacaagacagtagcaagacggctacaccctgcacctcggaagaagtacatctgagacatatgaggagcacacgacagcaggctatctagccgaaacacggcggcgatcaccaaccacaggccgctcttcgcccgtt

SEQ ID NO: 314405 - DNA, 311 bp, Zea mays
gggatatatatgtgtttccaggtagttggagattcgaaacgaaccagtgatgtagatttgtttcatctaaatatatgctatagttcaaaaaaaaaaaaaaaaaaaaaaaaaaaaagaagaaaaaaaaaaaagaataaagcacatgaagaaaaaaaaatgaaaaaacaaaaacacggaaagaaagacaccaaaaagcaagaacaccgaaaaatgaattcaaaaaatgtcgactgagaaaaaaatggggggaaaaaccataggctcagacaaataaatcggccattcgcaacatggacgtttcgccgggtaga

SEQ ID NO: 314406 - DNA, 279 bp, Zea mays
aagtcgcgcctgtgcctcgtcctccccctttcccctccgagtccagcccggcgccacccactcagccgcggatccgaggcgcagatccgatccggcgagcgcgtccaccgccgcgaggcggctgcgggagctgcacgcgcagactgggaacacgagcagcgtggacggcgcgcagcgcaacccggagtgggccagcgtctccgacgcggtgtgcaggtgccgcgattgctccggcaagcacgggggccccggcggtgcacaccaggcgtcgcgcgctcg

SEQ ID NO: 314407 - DNA, 170 bp, Zea mays
gcgtcgtttaaccgggcgacgatatcagtgttggagccatacgagaagctacagtcgagacctggattgacgcagcgtttgtcgacctgctcgccttcaggcagaccgagaccgcgttgtgcggcacctgcgctccgcactttcaccagacgccctacaaggatctgtca

SEQ ID NO: 314408 - DNA, 380 bp, Zea mays
cgcagagacaggcgtcttcgtactcgcctatctccgcgactcaaagctttccccaattcccccccttctcccatttctcaccaccgccgccgctccccccgttcaacaacaccatgagggagtgcatctcgatccacatcggccaggctggtatccaggtcggaaacgcgtgctgggagctgtactgcctcgagcatggcattcaggctgatggccagatgcccggtgacaagaccattgggggaggtgatgatgctttcaacaccttcttcagtgagactggcgctgggaagcacgtcccccgtgctgtttttgttgaccttgagcccactgtcatcgatgaggtgaggactggcacctaccgccagctcttccatcct

SEQ ID NO: 314409 - DNA, 396 bp, Zea mays
actccagcatcctcccgtctccgtcgtctcgtctccgctcctcacctcgccagccatgggcaagatcaagatcggaatcaacggtttcggaaggatcggcaggctcgtggccagggtcgccctgcagagcgaggatgtcgagctcgtcgccgtcaacgaccccttcatcaccacggattacatgacgtacatgttcaagtacgacaccgtgcacggccaatggaagcacagcgacatcgccctcaaggactccaagacgcttctcttcggcgagaagccggtcaccgtctttggcatcaggaaccccgaggagatcccgtggggtgaggctggtgctgagtatgtcgtggagtccaccggtgtcttcactgacaaggacaagctgctgcacatctg

SEQ ID NO: 314410 - DNA, 66 bp, Zea mays
acgaagtcacactcctgacgctctgtggttgcatgtcatctccagctcttgtctatgacgcgcagg

SEQ ID NO: 314411 - DNA, 403 bp, Zea mays
aatgaagtgtgggcaacatgttgacagcagatggggacatcaagggatgagacttgggttactttagccaccctgtgaggagacacacgtcccagtatgcgatttcatgcctgctcctgcagtgccgtgacataacagtttcagctgatggaccgacgtgatacgtaagactgctctatgtctatgtactattgcaactttttgcactttcgtaggctgcactattgccatagccctgtgattgttgttgtgttgcaatgctgctttgcaaatgggcgtcttgttcaatatctactccctagatactaagttgcaagatgctttgacttcgcgagattagtagctttgactatgcacttagatatacaccacgtcaagagtaatcagtaatgtatctgggaaa

SEQ ID NO: 314412 - DNA, 354 bp, Zea mays
agcctgcagtcacgaattcacgttctccatgtccagccatggcggtgtcgatatagctcaacaatgagtatcgatatctcgtgctggtgctggaggcctatgtcttcatcaacctttggatgggcttccacgtcagcatcgtttgcagaatcaacaaggtgttctacgccaccatgtacgccatcgactcggacaatagtgacatcaagctcttcaactgacatcagaaggggcatcagaactcactacactggatacctgttttcatcgtcatactgcaactggtcggtctgcaacacctgaccatcgacatcggtcaggccgtcatctacatcgtcacgaggttcgtctact

SEQ ID NO: 314413 - DNA, 366 bp, Zea mays
  unsure (1)..(366): unsure at all n locations
aaattagcttcatcatgctatggggtgacagacagatatcaactgtcatcaataggttcaagtaggtaactttgtggcatttttatttcaccaggatcgtgagagtacatgcggtaacagtgcgctttagtaccagaaggacctcatgggtgtagtcaggaaaacgctatcccactagatnactgtgctacatttttccgcagacatcagttttcgcacgttaccggatatgatcgttgaattccatacagctgcgcaatctttactagactcaaataatccatctgctcatcagcgacaggtcttacatcgtttgagaaaagatattattcctctacttgcggtttcagaaccacctttgccaac

SEQ ID NO: 314414 - DNA, 75 bp, Zea mays
tcgaaagtatacaactaaggcccacgttgaactttttggcgccggaatttccgcaatggggttcaaaaaccaaaa

SEQ ID NO: 314415 - DNA, 83 bp, Zea mays
ccgggccgacacacgcgtctacatacgcgtggacgatactgcattctgcgtacatgatctaatcgcatatgatgacgacggtc

SEQ ID NO: 314416 - DNA, 235 bp, Zea mays
cggacgcgtggggtttcctttagaaaccaaactctggtaaataaatcatttgtatcttgtgttgcctttccttgtgatttatttctcccttccctcttctaagtttgcttgctcgtgtttgattgaaaatcatttgtgttgctactgaagtaattctgtaaccattaagagcaacactagcaagaagaacacctctccctcaaaaaaagattgaaaggggagtaaacaagcaggg

SEQ ID NO: 314417 - DNA, 331 bp, Zea mays
attctagatcgcgagcggccgccctttttttttttttttttttgtttttttttttttttttttttttttagcatgttatatgcatgtatatagccagcccaagcccccacacgccggatcgagtactggcactggatgcgatgcaaatacgtgcggacgacgaatactgtataatataatggtacaggcagaggaggcagtacgtacagtacaatagtacaattaatatactagtagtagtgtatagacgaggaggatctgacgacgagaatggaatggaatgatgatggcatcatggataggatggatcatgatgggttaactcccctgc

SEQ ID NO: 314418 - DNA, 382 bp, Zea mays
gacaagcctcagcctagccaacgatgcacgaacaagacgcagtatggctagagagtcgggtgatgtatccaccgatttttaggagtgcgctcaggttacgctaattgacgcacatggggtttctcgctaggagcgaactagacgaagctcctaaagatacagatcctcgggacaggagtcagtatagtggtgctatagtattggcttaggtaggcttattcggtctgagccccttgtgggtgctgctcaagcagctcacgacgcgtgatgctcaaagacataggtagaacgagtaccatgtgcggcgtccacatcaaggactactggtacgtcatgttcggatctaaaggaaagatgatcaacgttactcaaacagtgggga

SEQ ID NO: 314419 - DNA, 153 bp, Zea mays
attaaacatacccagctctcgccatgcgaactcagttacatccagggagtaaatgagatttagagcgatgacggagctgttcgacactgccgtcaccagcctccgccatctgccggaggtgcagtactgcctcgccaccccagactgctaccg

SEQ ID NO: 314420 - DNA, 199 bp, Zea mays
gatccaagcgtccagacgaagccgtggtgcctgtagacgacattggcagtatgaggaggtataacgagacgttgagcggatgccaaacaccactcggttggatatgcgacctcgcgagatccatcgagtcgctgacgacatagacatcggatcatcaggggttatcacgatgaatcagtgcatacgctgcgaatgcaga

SEQ ID NO: 314421 - DNA, 149 bp, Zea mays
aggggctccctcgtgaagcggatgcccttcttccgccgcagcaggtcgcgtcctcgctcaagggcggcgtcgtccaaagatggcctcatcgtcgtcggtgacggaaaagagagcgacggcggcagcgcagcagcggatccagcgccgcc

SEQ ID NO: 314422 - DNA, 381 bp, Zea mays
atttcattttttaatcgtgccaaggtcgggctcaaacctgatggtttttttgttctgaaagaaaacaattcaagaaaagggtttgtgttagaataaggggaaaacaatggccctagattaaacccctaccttaaggaaccaattaaaaagtgttgaataaaaaaccctaatgttaaagacccaaagaggaatccccaaaggaacaatttccggccaaaatgtatccactggtaacaattcacccaaaaatccaaaatagtggaaagagaacacggcctagaaatacacctcgtaagatccgctcttgaaaaatgcccggtacaaggtgcccattgacctgctgggcctgtcgggccatgtatccccacgggattgcccaaa

SEQ ID NO: 314423 - DNA, 73 bp, Zea mays
agtgtcggtgtgcactgtgttgtcatctccatctccagctccagcgccgccttacgcggtctgcgtccgctcg

SEQ ID NO: 314424 - DNA, 405 bp, Zea mays
  unsure (1)..(405): unsure at all n locations
cggacgcgtgggtggaaaccacaaagagcttcaagctacaacgagtgattcctatagtgtttgtagagctgagaaagttgtaaccaatttcatataaggagagattcctatataagtgttgtgtgtattgagtgtttgtgataatcacttacgtgagagggagagatttccaacaattggtatcagagcctgttgatcttggaggagatttttgctgcccggtgcgatgtanagattggcgacgtcggttgtcaaggcagcggtgcaacgctacagcaatattgcaagttttgcgtgacgagatgctatggtgttatggcaatgcccagccataagaagatgttgccatgaactatggtgtgaagccgtgttcatgcaaattgttgtgtgaagctgcatggtgat

SEQ ID NO: 314425 - DNA, 203 bp, Zea mays
tatagtttgagttggagcatgatggagttattgtcctggagtaccactcctcggcgcttgccataacctgggtcagcgtacagtgcacgcctgcgtaatcgatatctttgcaaattgtctagaatcagtttactcaacgtcaggttgagacgtcatgctccagctaatgcgttcatcaattggacacctcgttgtcagttcca

SEQ ID NO: 314426 - DNA, 233 bp, Zea mays
agaagtgtctctggtaacgctgtccggttggatgtggtctacaggcttttgttgtgaccatggatgaagtctcattcacatgaccgcagatcattctcagctcgggaaacgttgtagcgttctaaatgattaccttaatcagcaggaccatcccaaatgtccagctgtccagaagcacgttacggctagtgatgcaaccttccaactggatcaccatgggtctgacagatgca

SEQ ID NO: 314427 - DNA, 171 bp, Zea mays
acacagattcatacaagtcgaactaatagagacaggagatctggagattagatcagctcgcatccaagccaattgcacacgaaatatactgagcacatagagtggacgcggcctgcatcacgtggatctgactcccgacgtctccgatcacattgccgtggatgacatgta

SEQ ID NO: 314428 - DNA, 106 bp, Zea mays
cggaactctctaatctgagtcgtagtactcgtgcatgctacctcatcactcttccacagtgtcacctatgttcacttcactggctgtctattgccaacctcgctga

SEQ ID NO: 314429 - DNA, 350 bp, Zea mays
ccctccggttggcatggtaaggccgccacctcctcacactggtatgtcagcaccacctatgtggatgccacccccacccccaccacatcaaggtggtggtatgcctccgcctcccatgtctatgccaccaccgcctccagcaccatctagttgaacacatgcaaaggacagtaccgtctggtcaatgtgtaagctgtaactgtagactaaggatgctggttcctttcatgtctccatgtaacttcgtcaacactaagttaacatgacgtttgagagttaacctgacagatacactcaagatttacagctatttattcatgttctgttgaagataacaaagatggtaaaat

SEQ ID NO: 314430 - DNA, 77 bp, Zea mays
agtacagcagcccttgagctccagcactactggccgcgactggcgtcaatgtgttggggatgtcggcgatcccgcat

SEQ ID NO: 314431 - DNA, 432 bp, Zea mays
acttctctaacttggaccaagttttctgaaaaaagatgttcacatctacaagttcaaataaatgcaactatcaaaaactcggccaaggagggtaagaccatccttgtggtatttcattaatagaacgttgcggcaacggtcccgactgagaaacccccgaaccctgtcctcctatcactaatgggccgattcaagctactcactctgcaaaggcccacctatgcccgagggtggcgcacagccgagttgtagcctgagagcggatgacgaatagcaatgagaattttttgtgtagagccagggtttgaacccgtgacctggtgaaagggaccctgctgccttcaccagtgaggtattacaccatctgcgaatgcaactatcaacactttgttcttttttgcttacagtgattacatcttattatttaatgaa

SEQ ID NO: 314432 - DNA, 339 bp, Zea mays
acattgctattcgttgcatcgttcctgtacatgtccatacaagtcttgcatacattgaccgcatcacaccactcaagctagcatgaatgtcagtagcagctggccaaacagatgggttgttacttacagagcttgacacacccgatagacaggcatccgtatacgctcaagagtttggattggtgaagaaaattctcatttcatccctagaacagagataccatgatgctgcatcatggaacgaccaactgatgcggctgacgtctaagcggaacaacagagcctgatagcgttgcatgtctggatcgtgtacatattgatgatgcccacctgaactcc

SEQ ID NO: 314433 - DNA, 269 bp, Zea mays
gagggaggactcagcgggcgctcgtcccgacgaggatagagacgacccgcgctccgcacactggagccagaggatcgctcgcgctacgattcggcgcgcaaccagcctggcgtccgcctgggcgggccgcagccacacgccatgcacttcggcgggctcggccgtatcctccgccccagctccgtcgcatatggcgaggtctaccctgcctcgctcagcgacgttgtcgtgcgccacgagttcaccacacgggacgtcgtcaacatcgc

SEQ ID NO: 314434 - DNA, 426 bp, Zea mays
accaaacagcagttgctgctcaatgtttgaaagaagtatttttctagattgtgtaatctaatctttgttgcaaatgcttctgtccagatcagtttgtcagtaacttaaatgcttccgtcaactagttgccactgtctgttagtacagtagcttgacaactcttcgtgttcatctgggttcatcattcacatgacaggattataggatccatgggtgtggatatgctcctagtgcacatttcaggaccaatctctgtgaccccttcgtcctgtgttattatagttccactgatcaacaaccttgttctggagaaatcatagatcaattaaatgaaaggaaagaggtagcgaaatgaaaacacaggtcatgcctttgcaaggttcctgaagtaaattgttgtgtagttccccgttgggaagacaattt

SEQ ID NO: 314435 - DNA, 230 bp, Zea mays
cccgggtcgacgtacgagtcggagacacacctcttcatcttcttcctcctcctcctagcacagctagcgcctgctccccttcgcctgtgatcatgtcttgcagcagcggcaagtgcgactgtggctccagctgctcctgcggcagctcatgcaactgcatgtcccctaacgtggagaccgccgccgccagcagcatcaagaccacggtcctcgccgcgccgaccaccaag

SEQ ID NO: 314436 - DNA, 225 bp, Zea mays
acgccactctgacctgctgttgcatcgcgaccgtcagcaaatcccttcgactcttccgcaccatctccactgagaaggctgtctactgactgcgcagacctgctcggtggagccatccaccagcatgcccattatgtcgacggaaggcgcaacacacgcgcctgctacttggcggagaggaggacagctctgctaccttttcatccactagaatcatcagcgctg

SEQ ID NO: 314437 - DNA, 323 bp, Zea mays
acatcgaaacatacctcttctgcttcttccacatcctcctaacacagctaccaccagatccccttcgcctgtgatcatctcctgccggagcgagaagtaccaccgtagggtctaatacgcctgacggaaaatcagaaaaggtacatgtcgcctaagcttccagaccgccgacgacaacaggatcaatatcagggtcctcgccggggccatcatcccacgccaactttccgcagcttcaaagcccgcaccaaaggctacagctcggacttcaacaactggcaatacgagttccacctgagttggaccctaatcagcagctactg

SEQ ID NO: 314438 - DNA, 232 bp, Zea mays
agatgatggtggtgatcagggatcagatgacaatgacaatgacgaagatgaccatgcacatgatgatgatcctgcagccaatggcgaagggggaagccatgaccacgaacatcatggtggagatgatcaacacgatgatgacgacgactacgatgatggggaccatggcaatgaagaagacgatgaagaatctgaacaggatgatgatgatcatcaaatccccaaccaccta

SEQ ID NO: 314439 - DNA, 267 bp, Zea mays
gatagaagcgaacattctcgcgtatgcgacctcaggaatccgctcattcgtaacccagatgcacttcacggggcctcgatgaacacagacgtcaacggcgcgacgttggggccagttaagttaaaccgtgtgaagtctatcatggtttcgacatctcgaggactcgggcttaagtacgaaatgttcgcgctgccaagcgattgcacagactagtcgacgctcgggacactctcctgtagcggaacgctatgcccagcgggtatcgcg

SEQ ID NO: 314440 - DNA, 409 bp, Zea mays
actcaggagagatgacgctctaccgtcgtgtcctgctcctccgtcgcctctcccacctccacccctcgcccgttccggccatctgctcctcacgaccacccagcctcgcggggctgctcacccccatggggcgccgccacttctccttctcgtccgctgaggatgccgccgccgagtgccgccgccgcaagcgccgtctccgcatcaaacctccaatcaacgccctccgccgcgggccaactctcccacgggacgtcaacgcgccccgcctcccagacaccagctccgcgctcactggcccgcacctcagcctccacaaccgcgtccagtcactcatccgctctggtgatctagaccgtgcctcagccgctgcacgctccgccgtctcctcgcgagtcaggcccaccgt

SEQ ID NO: 314441 - DNA, 74 bp, Zea mays
actagtccttaataataaacgaatatagaataaaacaccaaagaaaccaaaaaacaaaaaaaaaaaacaaaaat

SEQ ID NO: 314442 - DNA, 282 bp, Zea mays
tccaagcgtccagctgggcacgttcgggcactataattcagctgttttgtgctgacggataaccacgacataaatggggatcacacggtcatacaccttaaagtgtgctgatgtggcatctacagacttgaagattgtggatgactcagttgatcagacatatccaggccggctattcatggtagcattcagatgaggaggtgtcaccagcttgtggggaaatttgaattagggtcaaaggtcggatgccataggatctgtagagaatcaggttttcaccag

SEQ ID NO: 314443 - DNA, 243 bp, Zea mays
ctttgaacacgtcttattgctctccccgtggcctcgatcacaagcagtctccttgggtagtcagggcacgccccttatctggaaccgcttcatctctcagtgtgggaccgttggaaaacatcaatgcgatgcaagtgcacgaatgcagcaactagcactgagcataggactgctctcgcatggcgatcgaagctctgcttcccgtgccaggggacaatagcatcatgcctcctgctcggttca

SEQ ID NO: 314444 - DNA, 196 bp, Zea mays
agctgggcagcagactccgcatagccttcacgtgtggtgatataacatctagggccctgacgattgcatatagctctattggtatgatatttccatggtggctaggcatgcgcctttcgaatgacgaggtccaacagcttgtgaggaaaatggcaaattggctgaaggtcggatgccatattttctttacagaatc

SEQ ID NO: 314445 - DNA, 298 bp, Zea mays
aaattcccacctcccatccgtcaatgcctcaatcccgagacgcatgctgccagcttcagcttccatcactcaaggttcaatccccgatcagcaaaggagctcttctcctttcatgctgacatgctggaggtgctcgcacacgatcaggctagtttccatgcgacgacggaggatgccgtacggaagctcacttcgactgctgcagctgcgtatgcacaagtcacgtttcagcgccctactgaacagcgcaagccagatgcgcatccacatctgttcaaccacattgcgcgagtccaag

SEQ ID NO: 314446 - DNA, 258 bp, Zea mays
aggcagccaccatgccaccgcacgcaaccaaggatcccgtcgccgcgcctgcagcagccacagctgcagcgctgtcgcgggccctggcagcggcgcgccctttcctgcacggggaggacgcggaagttgacccggcgctgcctggcctcaccgccgtgatgtgcggggccggcaccggggaatgctgagcaaagccgcggacgttcctggcacaactgccgggcgttccaccggttatccgcccgttgggcgcgcccc

SEQ ID NO: 314447 - DNA, 397 bp, Zea mays
attctagggtctaccgacccgtccaatccggaaccatacactctatctctcctcagacgcccccagtgctacatctgatgggtcatcaccagaattgcgatcatatcaacatcaaatcgccacgcattctcatagacactatccatcttttcttccatactcatggacaccatattaaattggaactgtacagattcaagcagattcaatcacctagacatactaaaggctgcctaacattatatttgcatgcacactctatcagccattttcacgttacatatttgcggttcactacggtggcgatgaaacaaactgttgaacttgcatggcgctttactgcttgacctgtgtatttacgcccgcattttctcactctacgttccgtcacgttgaa

SEQ ID NO: 314448 - DNA, 398 bp, Zea mays
accaaattcaacgaatttctagcgatttttcgttttcgcagacgaccaccggaaaaatgcgttcaaaacctgcacgtactaattcatcaaagaagattactacgtacgtgcatcgcttttgagaaacgagcagagcaacctgcattgtatgaaactggaaaccgttggccatggctactcagaagatcaaaacggtggcaagcttggccagtagctccttgagaacagcagggcagctggcgttgagcacctcgaagccatccgtcgtctgagtgaaggagccaaggttgccgctagaagagaggaaacggaagcacgcctccttgagcgcagggcaatggtgtcggtcagctaaaaccagcatcgtggccaccgagtccgcgcgtatgtgcttgcac

SEQ ID NO: 314449 - DNA, 151 bp, Zea mays
agaaaaaaaaaaaaaaaaaaaaaaaaaaaaaaaaaaaaaaaaaaaaaaagaaaaaggcacaaaaagaaaaggatcaaaaattaaacataaacgtgaatacaaaggcaggtcgtcctagaggttgaaacctaacttacggttactggcgagt

SEQ ID NO: 314450 - DNA, 307 bp, Zea mays
ggcacgccacatgataagcgcacgggaggacttacagctgcaatacaggatgactcagaaatcggcaatgacatggtgacggaatcgccgtagtcgctggcaaagctgccacgcctctcgtgcgccgatactacctcaggttaacacgcgcgggcaggcaatagtacgttctaaccccggttgggtaattgaagtactagctggtagctgatcactctgtgtttggcgtttctgtcctgttcgcaggaaatgtgaccatggcggcctcgtcgccgctggttcttgggctgaggctgggcctcagcgg

SEQ ID NO: 314451 - DNA, 322 bp, Zea mays
ccgggccgacccaaacgtccacccactcgtccgggccaggcagctcggcaccgttgtggctgtgcggaactgcacaagagcgtttcgcctcggccaccacgaacggagaacgcggtagccatggccatggaggaagcggtgaagatgacgtgcaggaagaagggtggtctgagaacagtgcccttcatcttcgccaacgaggtggccgagaacctcgccgtggtgggtttctcgaccaacatgctgacgtacctgaccagtcagctgcacatgccgctggggaaagccgccagtacgctcacgaacttcggggggacctccg

SEQ ID NO: 314452 - DNA, 413 bp, Zea mays
ggtctagggttgacgggcccgtcagacatgcatccgctataaataaacatcacagcacaaacgatgaaatcaaatgctctttcgcttctattagtgataatatctgtgcagatcttgtacctttcacccgagctgaatacctctttcagaacactgagtgtggcttaaatttacaatacactgggtgtggcttaaatttaaaacgttattttatgtatcccttaaaacacactgtttactatcctctagtgaacctacaattggccaattgtgggaccaggtaaaaacggatttgacaaacaattgtctgacactgtcaactttacatttgatttagagagtacaaaaaactaggggtgagattatagggttgacaacctgaagaaaaaaagatgttaaattactgacacaaa

SEQ ID NO: 314453 - DNA, 123 bp, Zea mays
actgtggccatcacagcataatcgatgccctcagatgctctttcgcttccattactgataatatctgtgcagatcttgtccctttcacccgagctgactacctctttcagagcactgattgtg

SEQ ID NO: 314454 - DNA, 422 bp, Zea mays
agcgcccgtctcggactgcgcgtccgccatggcacatgccgcattcctcgtccgcgcgccgactcgcgcctcggctccgcgccgcctgcagacgccgaaccatcgcctccagcccaggcgcggctaccacgtcgagcttggggctcgcgaaaaagcgcttttggaggaggatgttgctttgaagaggttcaaatcatacaaaaacagtgtgaaacaggtctccaagatcgggaatgctctcactttagctgttgtacttgcttgcagctacgagcttgctgtgttggcgactagcacaaaatgaaggaaaactcagtcatgtggcggcacggttattccgggaagtgatccatcagcatgaactggcactctctctcttcgtgtttttttagccccgtttgttgatcactcgtaccgtgtaa

SEQ ID NO: 314455 - DNA, 380 bp, Zea mays
aaacacacttctgctagatgattcaatattaaacaaatgtagcaagtcaaccagacatgggctgtcgctgaatggatcatttgatctgatacagctaaaggctattattgaacgtgtgtctaagaaatgaattggatagaagattgtcgtgtatgggacaatgccaatcgttgtctccgctgtccctgcaagcgttgtagcttccttgtgtgatgcttatttgagaacatatctgttgtgctcagatcatatcctgagtgcctgtcatgacagctacttttggcgacatcataccatcatactcactgtcaagctttaaagagtgaagatacgcccatggtcctggcaaactagtacatgtgactttgaactttgccaat

SEQ ID NO: 314456 - DNA, 401 bp, Zea mays
ctcgcatttcctcccaatcaatcccgcctcaaaacccgaactccaagtcgccccgcatcgatggcgcccaaggccgatgaagaagcccgcggcgaagaagccggcggaggaggagcccgctgccgagaaggcgccggccgggaagaagcccaaggcggagaagcgtgtcccagcaggcaagtccgccggcaaggagggcggcgagggaaagaggggccggaagaagggcaagaagagcgtggagacctacaagatctacatcttcaaggtgctgaagcaggtgcacccggacatcggcatctcctctaaggccatgtccatcatgaactccttcatcaacgacatcttcgagaagctcgccgccgaggccgccaagctcgcgcggtacaacaagaagccca

SEQ ID NO: 314457 - DNA, 369 bp, Zea mays
cccacgcgtctacccacgcttctgataaaaaaaaaaaaaaaaaagaaaaaaaaaaaaaaaaaaaaaaaaaaatggaggatgctcaaacgggtaaaaggctaagatagcagtgcaagcaatgtcgtggctcttcattagtatcaccatcatttcaggtggtttggcgtctggttatgatgcgttgactgggacctgccggctttcatggtccttaacctactcctagtcgaactcccattccatcagcctgattcgtccacgctagtggttttgtcatgtcgatttgccacctgagacaactatgcagcgcttgggcattggcctcgatggcgtggtatagatcaggcggctattcttctcatgcgctac

SEQ ID NO: 314458 - DNA, 400 bp, Zea mays
acggcaaaaagaagctggtgctgcccgggactggtgacccgggcgtcaaggtgtacgatgaggtggtggcctgcaggctgggtctcgaggggaaacaacccgagtttgcagtgctcacagcacaaggcatacgttggatacgtctcattaggcccttgaacagctacgaggaaatgatcacgactgtgttgatcacagcgcagatgctgcattttctaaagaggaagcctcatgagccagaaaaaaccttgtggaaccacctttgcaaagtttttaacaagtttgacgttccaccctcagaggacgatttcaggaaccactgctcactgattcaacactttgcggcaaaagatcctgtcttagcagaatcagacattttgcgagtatttattgaaggaaa

SEQ ID NO: 314459 - DNA, 104 bp, Zea mays
acgcgcagttcgacgcaagcctctagatcgagtcgtcgtacgcccgcccgtttttgttttttttttttttttttttttggttgtctttggtagttttgtttatt

SEQ ID NO: 314460 - DNA, 171 bp, Zea mays
attctctcgtgcacgtgcatgcatcgtcgactgtctcaggccgccgctgcgccggcgccgctcgcatcgtttgcttccttggaccagcagtcgtcgccgtcaggctgaactgcttgtaaccgtgaattccggacccgtttgcttctgtaagatttgtgcatttgcctgagt

SEQ ID NO: 314461 - DNA, 246 bp, Zea mays
agaatgggatcggcaaaggtacatgctacgacagcacgcgcaccacacccatctctagcttacttataagaacattcatgtcgttggggataaactactcgttagtgtgatctacgtgatccattagcgtcagtgctatggatgcatgatcatgagttgatcttttagcatctacagtacaggaataatatgacaatgtggcacgtttcctggaagcatgtggactgttcgacgaagggctcgaga

SEQ ID NO: 314462 - DNA, 413 bp, Zea mays
cggacgcgtggggccgccgccaatcccttcccgtgctccgcaaccgctgagtgagaagaagagatggccggcaagggcgatggcccggctatcggcatcgatctcggcacgacgtactcttgcgtcggcgtgtggcagcacgaccgcgtcgagatcattgccaacgaccagggtaaccgcaccacgccctcgtacgtcgccttcaccgactccgagcgcctcatcggagatgcggccaagaaccaggtcgccatgaaccccatcaacaccgtctttgatgccaagcgtctcatcggcaggaggttcagtgatgcgtctgtccagagtgatatcaagttgtggcccttcaaggtcatttctgggcctggtgagaagccaatgattgttgtccagcacaagggtgaggagaagca

SEQ ID NO: 314463 - DNA, 414 bp, Zea mays
  unsure (1)..(414): unsure at all n locations
acaaccacgttacgcaccatagaacatacccgtgagaagctaaaacccggccgtttgctcaccacagcatcatcgccgcgccttgctagctcaaggatggagaacaacaggcagcagcagcaggcgccgccgccgccaggctacccgactgcggctgcaggcttggagcatgagcanggaggcaggaatggacgacgccgggagaagacgacctcgcgcggggataaaggcttcatcgaacgatggtaactacttactactagactagaagctcttttttttttggcgccaaaaaacctgatcgatggatgagctgacctgtggtatttaatttattcggttcttaattaatgatctgtttcagcatcgcggcgctctgctgctgctggatctgccagatgtgctgcgactacg

SEQ ID NO: 314464 - DNA, 256 bp, Zea mays
agagttttgtactaaaagcttaatcagaagagattataatttgtacaattaagaattagttaaaatatgatcaatgatcaatggcaacaccagaaaaggcaacataagttgtacagcataaaatcttgtacacgaaatctctaggcaactcagaagtaagtgttgtcgataatatctgtacaagatggggtatattgtatacgtgcatacggtaactcaacgatgcattggaagagattttgtttatgccgtatcc

SEQ ID NO: 314465 - DNA, 56 bp, Zea mays
aaaaacaaaaagaaacaaacaaaaaaataaaacaccaatcaaaaaagacgaacaaa

SEQ ID NO: 314466 - DNA, 405 bp, Zea mays
gaaatatattcgataggcttattctgatgcgttataatttgttcacttatgatttgttcacttatgatcttgttcattaacagctcctgcaaagcaacataatttgttcacttatgatcttgtactcaaatatttatgcagctcaaaacgactactgtctatatttatgtacaatttccttatattgcatcatgcttatcaaaagaaaaaaatgcaaagcaatagattttgcttatgccttatcctgttcccaagtgtttatgtgactcaacaattttatacatgttcatgtatactttctttacaataagacatgttaaaggacctaacatgcgcgcatgggcgcgcccagtacactagtattgtacaagaattatcaaagatgttggacgagcagaatccctt

SEQ ID NO: 314467 - DNA, 166 bp, Zea mays
aaaataagtcctaaaaaaacaaaaaagaaaaaaaaaaaaaagaaaagaaggaaaataaaacatgatcaataaattaaaggggcggctcttcaatgggctgtatgcctgcattcatttcttccggtccttgtcagtgtggccgttctgttgggtacatccttgtagg

SEQ ID NO: 314468 - DNA, 415 bp, Zea mays
  unsure (1)..(415): unsure at all n locations
ccgcgcgctgcctctcccttccactccataccataccgccacgacaacgtcgacaagcgcaataccggagccctccgaaatggccgaggacaaggagaccgactcgccgcagccgccggccaagctgccccgcctctcccgcgccgacacgagcgccggtaagcacgcgcgggcaggcagtagtacgttctagccccggttggttagttgaagtactagctggtagctgatcgctctgtgtttggcgtttctgtcctgttcgcangagaggtgaccatggcggcctcgtcgccgctggttcttgggctggggctgggcctcggcggggcgcggcggcggcggcgagcgagacgcggatgtgtcccccgcgacggtgactcccaagaggccgtcggcgctgacgttcatgcagcag

SEQ ID NO: 314469 - DNA, 402 bp, Zea mays
actggagctcgtccaccacgcaatagtgtatttgaagtgctcctgattaactgtttattaggttccgtgcttgggtcatgggtatggttcagagtctccgtagagttgcttcacgcaagcactacacagtcggaggttcttgttgcgtggtacactgtaaacttagtagtagtctttgtcgacaacaagctgcgagaaatgccggatcggacgagtggactacatttgcttccattaagctccaaagaaaaagagggcaggcagaaggaggagaaagacagtagactgaaggacgagttccacaagttactgaatgggaaccatgcggatcctactgatcggcgacagcgggcacagatgaacgggacgcacgacgaagacatcaatcacgcgctctccgag

SEQ ID NO: 314470 - DNA, 103 bp, Zea mays
cccacacgtccaaggacgcttgtgcgaacgcgtagagcaccttggtgggaatacaaatcaacggtggacaatgaatacgtcattagcctcatgtaccggaaga

SEQ ID NO: 314471 - DNA, 412 bp, Zea mays
ggatgacatgctgatgtttgactataatgttgaagaatgagttaatgatttttgttgctgcagccatagaacaggtaaactttcaatattgttgccacagactgtagttcactagagcaattaactatgcttcgttcaaagtaagaaaattggatttaattaacttgtgatgatcaggcaaactttacgcgtacaaaccacataatttggaccatgggagataattttagttacaatatatagaatcttggttccggaatatggacaaacttatctatcgcgtgaacaaggtattgctgattttaaactgaagctctcaagttttgatacacagttttcttgtttagctgtcattttaatttacctttctgcaatgatactactacatacaaaatcttttttctatgagatg

SEQ ID NO: 314472 - DNA, 406 bp, Zea mays
cggaaatgataacacattaaacctttggacacccgatccaaatgcaaaatcaagggttgctggacaaaaacttgatgtattaagtgccatagagaataaccagcggacgttatgtcggaagcgtcaaattgtactgccttttgaatttttggaacgagttcggatgcgagagttttcagaaagtttcgagtgtaaccagagctgatttactatcgctggagttgctgaggaaaagggtaatagttggaagaatgatatcatccaagctacaagcagcctatgtttgaagtagtgaaatcgcaaggccttgctacgaatagagtgtagacacacctggatagataagcaggtgtgctggtgctgaaactattacttgagatgtcaataaacattggaattatgttgt

SEQ ID NO: 314473 - DNA, 192 bp, Zea mays
aaaattcaacagtcatcactcgcattacgccttcaccaggaggaaaatgtcaaaagacaaagccgaagacgcacaaggactcatcacctcgcgcgccagcgagacagactgtagtgcccaaagttgacatgtcatgggagaggctgtgttggaggctgtagagccgatccgcgggtgtagggaaggcgtcaa

SEQ ID NO: 314474 - DNA, 89 bp, Zea mays
ccaaacgtccgaatgcaaaaccgtgtgacacaattaaccccgacaaaaaaggaatttgagggaacaaccccaaaacaggttccgaaaaa

SEQ ID NO: 314475 - DNA, 352 bp, Zea mays
cgcacccggttccacatgcctttccccacctattctcgcagatctcgccagccagtctagggtttccgtcccgagatgcttatccgccctgcgccggtcatgtcgaatcaaggacggaacgccatgccgctgaatgcgcccaaagccgacacgcaagagtaccacgacacagatgttgcatatctgcataataagaatgatgaggaaaaagcactgaaggagcttaatgcccatgcacagagaggcgcaattgagggctccggtctgacgatgcgtggtctgaaatgagactggtcacacgtctccaatacctaaaggatgagaatgcatctgtctatctgtgttgcgcttc

SEQ ID NO: 314476 - DNA, 91 bp, Zea mays
attgtttatggacacctagaggggatgaacgttacaaacagatctcacaaaaaagtcaaaagaaaaaggaccacgcatgagaagaataaaa

SEQ ID NO: 314477 - DNA, 298 bp, Zea mays
ataaaaagggatgggcgttattggacaagtatttcttttatttctgccccccattttgtaagactcatctttgttaaagtataaagcaaagtaaatcctccaaaaaaaaaaaaaaaaaaaaaaaaaaaaaaaaaaaaaaaaaaaaaaaaaaaaaaaaaaagaaaaaaaaaaagaaaaaaaaaaagaaaaagaaaaatcaaaatcaatgaccggtatactaaatgtaacatgaatggggaaaaaggtgaagaaaaacaatttaatgacccaaaaaaaaaagcacaattttgacacaaat

SEQ ID NO: 314478 - DNA, 132 bp, Zea mays
aatttccttgggctctggactccaaaatcccagccttttgtttgcttctctgtctcctgctgattggtgtccccgggtccaagactcttgatttgctcctcgcgggggttcggtcccatggcggcagctgcg

SEQ ID NO: 314479 - DNA, 384 bp, Zea mays
gttccttctctctcggcttggagctcacccgtatctgggatataaaggcaggcacccacgataccctggctatcaatcccggtgcctccaagttttgccgagagggtcagcagcaacaagaaaccggagcttgaaactcgctaccgctcgcaccatgatcagtggcggaggagaaccattgccatctgcccagccgatgccctcatcccctagaaccgagcaagcaaccacgtcatagcagaaacagagagggtgagagaaagttgggaaggcgggcggctgcgttgagctgtagccgcgccgtgcccagaacctcgggttcatcctcatcggtcgctgcggtgcttctacaggacacagggagctcttgctacgaattctgcg

SEQ ID NO: 314480 - DNA, 382 bp, Zea mays
gccgagacggttgaccaacgctgccacgattccgtccacacgccgacgcggcgggctcctggccgacgagcactcccctccgaacgccgcgttggacggccccgccccacgaggccacgatgcagtagcagcgttcacaccatctgtctgtctcaagtgtcacggtgtccgtcattcgattcaacccccaaccccccatgggcctggccgtataaatcaaccgccggtgaagtctagtcgtctcgtcgctcggtccagcacctcagctccgccgcttgcccgcgtttgctctctccctcccgggtctcggcttcatcgacacgctaacgtcccaaaaccgtaaacgcccctcccggattccggtaattcgccaacggcgccc

SEQ ID NO: 314481 - DNA, 103 bp, Zea mays
agcctagttttcagtccttattcgcctcttggttttgagatctatatctggactagcagtgctttcttgtctcacctatttgtgttaagaagacgtagttttt

SEQ ID NO: 314482 - DNA, 181 bp, Zea mays
acgcgtctaaactgagtcgtagtacgcatcgatgatatggtgggcattccccttcaccagcagctggacatcgttggttggaagcagcttgaggacgtgctcacgcctgccgacttgaggctcccggaggatcagtcaccgcgtcttggtgctacgcttcaggcgatgcactggtcatcct

SEQ ID NO: 314483 - DNA, 352 bp, Zea mays
cgccgcccagcccccgcccacacaggttggaggtgcgagcgatagccccggcacccccactgccatcatgcccgccgcgatgctcgcgttcgtgaggcgtctcgcgcacatcgtcgcaaccaacccccttcctccatcgcggcagaacgacatcctccaactccggcagtgtccatgtccccatcctcttcaacgcgcggcacaacgagctcctcctccctcaacggcggtctccatcagacgaccatcccaacggtcgtcgacctcaaccgtctgttgacccacaacgtccagcagaccagctcacctcctccaactcccgcgcccgcgcctgatatggaatgtccgccgg

SEQ ID NO: 314484 - DNA, 140 bp, Zea mays
gatgtcactgtgccgctcgtgtttaacaactgtcactgaacgtggcgataaagcccatgagtcgttacaccagactgtaaatccacctatgcgaggcacatacgctcactttctgcgagactgtgcgtacatagcgagtt

SEQ ID NO: 314485 - DNA, 278 bp, Zea mays
gtacctggtacgtcgcagctcatccatcttctcagccaccattcattgcactggtcgtcgtgacacagagtcgtgatggggaaagccctggtgttacacagcttcatcccattgcgtgacacagtcctttcgcggcctggacgtcctgtcagcacagggacagcgatgtcacgaccgcacacattcgcgatccggttgtcccactgggactctccttgtcacggcggactagactagcaagatgatggttctaaacccagagtgccagagctgcatgc

SEQ ID NO: 314486 - DNA, 401 bp, Zea mays
aggccgcccttttttgtttttttttttttttttttttttttgttttattttttatttttatatattttattcatttgtattttttacttactcccaaagatactcttaagcaatgccaatgtaactcatgaccacatctactcaatccgcatttgagcttacacgataactatcgcatgaactaaatgctctgattgtcttaaccgatgggaaaaaaaaacatacaatcttagactataaattcacgtaacaatatgatcgactgcgtcactcctccgtatgatatggtaatgactaaagcggaggctttgattcggtgcataaataatcacaacctgaattaaaatttgtacatattggggattggatgccagcaacaatgtagcactttgcactaaaaa

SEQ ID NO: 314487 - DNA, 304 bp, Zea mays
aacacgcatagggccacctacatcctccgctaacgcctgcacctacatcgatgtccctcgtcatcgagtgttgcatactgatgtctgatcgatgccgtcgtacagtgagggagctcgtcttcccaaggcggcgtcgaatgtcgtgggagtctcatcgaaagagtagtggagtgccgaaggcgcagcatcccagcacacctcttacgctacactcacgtgcattgcgcctcaccaagtctcctcatcaagtctcacaacccaagctactccagatgactactgcgtgacacagatggaattcgcg

SEQ ID NO: 314488 - DNA, 255 bp, Zea mays
cgtcgcggtgccgtgcgccggtgctggccagtctagggttttcggccctcgcgcgccgatccgtcccgcccggcgggccatgtcgaaacaaggagggaaggacaagccgctgaaagcgcccaatgtcgaaaggaatgagtacgacgacagtgatcttgcctaattgcagaagaaaacagatgaggaaaaggcgctgaatgagctgaatgccacagcacataaaggcgcaattggaggctctggtctcaagagaag

SEQ ID NO: 314489 - DNA, 370 bp, Zea mays
  unsure (1)..(370): unsure at all n locations
agcgtgctttgtgctgcgcgcgcgtgcagcactgcggagacggccgggagcagggggcgcgggagggatagtggcggcctctgctgctgctggtcgaggcttcgattccgggcgggggctggtggtctcgagaatcccggagggaagggagcgagcgcaaagatagatacctaagcgggccgcttccgctgcacagccacaggcatggggtgcggggcgtcgagccacaaggacgccggggcgcgccggagacggccggggagcgtcggcgacgtggtcgttttcctcccgggcctccgggtgccganggccgtcgacttcgcccaggcgctcggcggctgcctggccagggctatagtcgagcggctgt

SEQ ID NO: 314490 - DNA, 350 bp, Zea mays
aggtgggctggcttctcctccccctcttaccaagtcctcctcgggttagggttccttagggttttgtggaggggcgatggcggcggctgatgtggagtaccgttgcttcgtcggcgggcttgcctgggccaccagcaacgagtcgctggagaatgccttcgcctcctacggcgagatcctcgactccaaggtcatcaccgaccgggagacggggaggtctcgcggcttcggcttcgttaccttctcctccgagaactccatgctcgacgctatcgagaacatgaacggcaatgagctcgacggccgtaacatcaccgttaaccaggcccagtcccgtggcggtggccgtg

SEQ ID NO: 314491 - DNA, 90 bp, Zea mays
acgattctacatcgccagccgcctgcccgtgtgtatgcaacataggaaaaagaccagtcccttatttgcacgcagagataggcatcgatt

SEQ ID NO: 314492 - DNA, 175 bp, Zea mays
acgcgtccgagaaaaaaaaaaaaaaaaaaaaaaaaaaaaaaaaaaaaaaaaaaaaaaaaaaaaagaaggaaggacgaacgagcaaaaaaggggcttacgtacgaatggatgcaagggaaagctgcccttgaaggtgacagcttaattcatctggctggccgattaaattcatttc

SEQ ID NO: 314493 - DNA, 265 bp, Zea mays
aggagaagctattgtacaaaatgagccatgcactttgattgcctacaacctgtaacctaataccacgctcagctaatctgggtgaggtagcatgtgcccagcgcattagtgaagccgtgaagaatctgttgttgcaggggatcggttcagtcattgacactaaggacatcattggagtctatacgactccattaatggatgactatgcatcaatctgtgacaatcatcacgaaatgcatgtacacgtaaccagatgtcaacgtgg

SEQ ID NO: 314494 - DNA, 306 bp, Zea mays
cccacgcgtccgatcagaccatatttggtagtgtcagccgagctctatatagtctaaaggatgtaacccactatggagcccatctcatcgaggtgaggtatcatgtgcactggacacgattgaagccgtggagaaacggttcttggagggcatgggttcagtaatgggcttcaccgacatcaatagaggcttcacgacctcatgaatgggtgactcctcatgcatccgtgacgacgcatgcacaatatgagtggtcgcacccagatgacaacctctacaatcgtggatgtatccatcatggctccc

SEQ ID NO: 314495 - DNA, 163 bp, Zea mays
actgtcaccagttccccattcgaatcgtgccgtctctgctgttcagttgcgttctcatgtggaagtgcagtttgacgaccatagtcctgtgttccacgttaacctcgctattcccgtgtatggatctcgcgatggtcgttgagtagcttcaactcccgacatc

SEQ ID NO: 314496 - DNA, 102 bp, Zea mays
gttaactccgagcaccggggcttcgtgcatcgtcgaattgccaccgccgcagctgcagctcaatcccattccgtcggcatgatgacggagtccatctcgatc

SEQ ID NO: 314497 - DNA, 162 bp, Zea mays
gcgtccggactcatacgacaaacgataacgtgccagactataagtctggattatctgttatgtttacacgttttaagcatcttgtcgttattattcatactggcacaacagtgtcatacatttgtaccattacgagtaagaacgagactgatgttgaatatg

SEQ ID NO: 314498 - DNA, 426 bp, Zea mays
gtttcttgcaactagaactgactttacctactgtttgcttttagcacatgttggtctatgattgtaaggctatcttctgcagttacccatccttatcccgatattcaaacttcactttgcgaacagtgcggcctacagtgcaaaacagtgttttgggtgaccatatgggtgaaccgctcgagacggtctaagataaaagaaagaagaaaagcaggtaacgactattgtgtaatcaggccttatgtgcaagcgagccttatggtctgttagatcatgatccaaccgtatgtcacctttaacacttatatctatagttggatcataatctaacggactaagatgttttgtttgcacgcttgcacacaaggtttgattgaacaatagtcattgtcagaaaagcatgggagagaattgatatactctgtt

SEQ ID NO: 314499 - DNA, 168 bp, Zea mays
ggccagcaggacaaccgataacgtgccaggctataagtctggtttatctgttatgtttactctttttaacatcttgtcgttattattcgtaatggcacaacatgtactacatttttaccattacgaataataacgacaagatgttaaaaatgtagtacatgttgtgcc

SEQ ID NO: 314500 - DNA, 275 bp, Zea mays
ttgctgcaactgacgatgaccagcaccggcgcatcgtccgcggcgcggcggaagatgatcgacttggcgatctgcgccacctcgcaccccagccccgccgcggcttccgccgaggtcttgccggtctgcggcaggaccaacaccggcttgtcgtggcccagatcggccagcaggccggcgacgcgctgggcggactcgggaagatcggctggcgtggctacggacatccggcgactccgttcacgacctgtgagatcaggttaccacttgatcag

SEQ ID NO: 314501 - DNA, 111 bp, Zea mays
aggatagcatataacgagtccatgtacaccatgtacaaggtcgtcgagctggacactgaaagtcggttcatcaggtgtctctgtacaaggctgtgagtgcgagttttcggt

SEQ ID NO: 314502 - DNA, 321 bp, Zea mays
ggtccatccacgcgatccgataacacaataacagtaaaaaaagtcaaataaataaatcaaatgtattgcaatgaatttcgctcaaataagtcaggcagtagctcaacgtgattacaaatgtatcctgctgctagagtatcattgggactcacatcgcgggacttaacttgaaatcaccgggcttgggattgccgggccctcaaggggatcaaccggtatttacccaaggaagccaccttaaagcagttctatattgtaaaagctggtgtatttacgacttgtcctttttggatcacctttccgagaaaatgctagggttaa

SEQ ID NO: 314503 - DNA, 349 bp, Zea mays
  unsure (1)..(349): unsure at all n locations
gggtcgtggttttggatccttttgctggagatgtgcatagtgtgagcagagagagagagagacgggtggaggatggtcagagccttcataagggcttcaggtggggcactgctggagacgacgaccgccgccgccgccgccaccaccatcgccaggcatctgagctcccccaaattctctgctggagcgcccctagcttcccaccgccgacgatgatggcggcctcttccaccatgagcaaggangaatcagcagcaagctacgacatggcggaatttgaccagtcagcaatcttcctctacctcgaggatggccacgatcaagaacaacaacgacagactctgaacat

SEQ ID NO: 314504 - DNA, 371 bp, Zea mays
  unsure (1)..(371): unsure at all n locations
aattctcaactccgctactatatatcttactatgcattgatgatgattgtagccttttgttttatttatctagttttctgattacttgatgatatgtgagatatagtgtattgtacaagatgttaatccttatggtacctgagagtgtacacctatggtgtatgatggacaacgttgctaagttttgccactgtttanagatccattgctgctttgacgaggttgcatatgtgatgattgattaagttgattttaagattgctatttgatgaagttgtactgtgtaggacatgttgggtacttttttctttcaaattctcattaaattaaccccactgggggtgtaacatgaatattagacagtatacatg

SEQ ID NO: 314505 - DNA, 248 bp, Zea mays
aactcatcactgcactggtggtgcgcgtggagctcaagagagtgaagcgatagctaggagaggcgacgatgctcaagtaggcgttctcttccgcgctcctcctcgactttctcctcaataaagtccacgttgcagctataaaggatggaatgaatgccgttgatagcaccgatgatttggctaacgcaccgtatgtagaagagagatttggtgctgtcgctcatggcacgtgtaagagaatctgaggt

SEQ ID NO: 314506 - DNA, 305 bp, Zea mays
cgacccatgggcccggaaacttcaataaccgctttgatggtgttaagtgcacgttcatgtacatagatgtttagtacggaatcatacttctcaacatcttcaaagttcagaatatgacagttttactcatgtatgcaatggagctgcgtaacattacagtaagagtacagggcaagaatccttactaaacaggcacattcatacagattgcaacatagacatttatgtgtttatccagatgtcgaatttgtgtactctcgtcatattgataaacagaactatacaattttctgttgatgtttgta

SEQ ID NO: 314507 - DNA, 282 bp, Zea mays
tcagaagacagtttgatggtgttaagtgcaagttcatgtacttatatgtttagtacggattcatatttctcaacatcgtcaaagttcagaataagacagttttactcaaatatggaagggagctgcgtaacattatagtaagaaaaaagggcaagaacccttacgaaacaggcacattcacacagattgcaacatagacatttatgtgtttatccagatttcgagtttgtttagtctcgtcatattgataaacacaacgagaaaattttctgttgaagtttg

SEQ ID NO: 314508 - DNA, 101 bp, Zea mays
gacaatgccaccagctgtgaaagttcaggacatgatgaacattccgacgtctagagaactcgagctgacgtgcttggactgctcatcgtcgaacttgctcc

SEQ ID NO: 314509 - DNA, 134 bp, Zea mays
gaattatcaacgcattggcatatcggcgtcgacatcaagcacatcagcgacattgtatatggacgcgaggatgttcaggttggagactccctcgctcgccgcggcgcctttttcgtgggaagtgtcccagggcc

SEQ ID NO: 314510 - DNA, 57 bp, Zea mays
accacgcgcccgaatacatcgagacgaccaccgagcacggttagggcggctgggctc

SEQ ID NO: 314511 - DNA, 126 bp, Zea mays
cgaccacgcgcccggagaaggaccaatatccccaaaccctagctcccgatctcgatggcgaagcctcgcgtcttcttcgacatgaccgtcggcggcgccccggcgggccggatcgtgatggagctg

SEQ ID NO: 314512 - DNA, 438 bp, Zea mays
cgaagcacgatggactcggttatttcttaaaattgggaagaatataatggatatggtgagattacattttcaggcaaactatatatatatagtatttagagccctgagctctctctaactattggaagacccgaccagcaaaccactatgtgcgcggaccgcaccgtactgaccatgtgcgcagactttttggctcactgtaccacctacttaattataactacgtgttatgctcaattgtggtttacacacttttttggtatgcgcatgttgtacacaagtttacgcttattttgtcatactgtctgaaagcacttcctgtactatcatataaaatcgaccgcgactactgctttgcccgaaaggactacggtttcagcggcagcggctgccgagccccattccccgatctgaagcacctcaaaccacggctctgcc

SEQ ID NO: 314513 - DNA, 97 bp, Zea mays
agcactcgttgcaatccactagagttcagtttgttgagacgcagacagctaggtgcgatcgtcgacaatgtcactcgtgaggcacatcaacgttttc

SEQ ID NO: 314514 - DNA, 354 bp, Zea mays
gtgggttggcttctcctccccctccggttcgggttcgggttcgtgaggttctccggggttcggtttcgtgggtgagcggatcgagatggcggcgtcggatgttgagtaccgctgcttcgtcggcggcctcgcctgggccacggacgaccactccctccacaacgccttcagcacctacggcgaggtcctcgagtccaagatcatcctcgatcgggagacgcagaggtcccgcggcttcggcttcgtcaccttctccacggaggaggcgatgcggaacgccatcgagggcatgaacggcaaggagctggacggccgcaacatcaccgtcaacgaggcccagtcccgcggcggccg

SEQ ID NO: 314515 - DNA, 124 bp, Zea mays
acgcgaccggccaatctagcccccagtcctcgaattgttcccatggccgccgccattcgcggaagccctagccgcgccgccgcgccgacgcagcgtcgagcggtgatgcgggtggtgtcatggg

SEQ ID NO: 314516 - DNA, 442 bp, Zea mays
  unsure (1)..(442): unsure at all n locations
aaggcagcagcacaagcaagaaccacacctcctcccttcgcctgtgatcatgtcgtcttgctgcggcggcaagtgcgggtgcggctccagctgctcctgcggcagcggatgcaacggctgcggtatgtaccctgacgtggagaccgccgccaccagcagcgtcaagaccacggtcctcgccgcgccgaccaccaaggccagcgccggcggcttcgaggcggccaccgagggcggcggctgcgactgcaacacctgcaagtgcggcaccagctgcggctgctcctgctgcagctgcaactgagctggcccggcccggcgatggcgcacgagagtcgagaggangangacgacgacgaggcgtataaatataatagcggcgtccagtaaatangatcctgtccactgcaaccgccattatccatggtcgctcgctcctcgcctg

SEQ ID NO: 314517 - DNA, 313 bp, Zea mays
ccggaatcaaaagcaggggtgctcgacgcggctgaagacatcgatccaccgggtcaccgcgccggagtgaaacccggttaacgcgtctgacgcggcggtggggcgcatctacttccgcaaccgcgccgcgtacgtggacgcggacgcgttcgactcggaccatgagatccggcagcacgtcatcggctccgacgactacaccgcagacaagactctccgcatggacggcatcactcagaaggcgcgcgccatctgtggcgatgccatgtccgacaccgtcatgcgcagcctgaagccctccgaggtcgacgtc

SEQ ID NO: 314518 - DNA, 315 bp, Zea mays
acgaagccctgactccaagctggcacctgcattcctcgcgctcactgtcgcacccgccctatgtactaccgcccacagctgcagctgctgcgcccataggcgctgttcgcaagacaccgtcactcccctaggactaatcatctctgaccaaacgaacttccagtggacttggcatctgacgataatctatctaatgctaatgattcagaatctgcgccctcaagctatgagtatatcccaccttctgtagtcgacaggaatgaaacttctgagatataagatcctgctgaacatccagaagaacgtcaactagca

SEQ ID NO: 314519 - DNA, 172 bp, Zea mays
cacgcgtccgttagtaacatcgtacaactatgaagtgaggattgttcttattaagctgaatatttctcagacgctaagatgttgatgtaggcgttctcatccgcgcatctcctagtctttctcctggatgaagtccacgttgtggcttcaaaggatggagtcatcgcagttg

SEQ ID NO: 314520 - DNA, 341 bp, Zea mays
tgactcaactcctccccaaacttctccctctccatcgactccctactccgcgccacgttttgcaccaaaccctcctatcatggccatggccgccgacggaggcgattgataccttcatcagcataacgggggcggacaagagcgtcgccgtacgcagacccgagcaagatggtcgtgatcgtaagccatcaatatattcacatttcaatgacggacatagcatattgaacggcatcactcaaaacgccatgcatgctactcgtgatgatatgacggagctttatggaccacctgatcattcatttcaaagatctttggtgccagagagtttccgtgcccct

SEQ ID NO: 314521 - DNA, 386 bp, Zea mays
gtgtgatgataaattcacatatcatacatcagaagcaatcatctgctatttccatgtatgtcatagatgcagagtcagacgagacacaaacccaattatcagaggacaaaattccaagtcaaggtcagacacggaaagatggcaatgatcttgacaaaatacaaacccaaggaattgaaaagcacctgaaaaatgcgtcccagctttcgcaaaatggtggttcagattcactccttgtggtgtgctgcgaggatgttttgcttttgttatccctggcgtcattgattcacggaagcagcaagcatctacagaagacgaaacttgcaaaaccttgttgctggtcagcacttttcagacacatggatgacagagtctgtgggctgata

SEQ ID NO: 314522 - DNA, 422 bp, Zea mays
  unsure (1)..(422): unsure at all n locations
gtcatatcagtcactacacgcacgagtgagtacacggtagccaaaccacattatcatggagaactactgcgaaagcatcgactactatcagaagccttcccatgctcccaacaagccaacgaccatggacgaagccaaggacgacaacaatgacacgggcaagggcaaggccgtcctgngcgccggtccttaccaccaccaccaccatgctaccgccgctgaccagcaggaacccgaaagccaggaggagttcttcagcgactccgagtcgggctccgagtccatcgagatcgccgacctcaagaagcgcatgtggaaggaccagctgctgctcatgaagctcgagggccgctcgggccgcgaccgcgaggcccagctcncgctccatctccatccctttgctgacgaacacccgccggcga

SEQ ID NO: 314523 - DNA, 165 bp, Zea mays
acaagactctatactcagtcgtgctatggttttgcccgtggtgctccacacagtgcccctcattctatcagtagaacacgatgctcaagtgggcgctctcatccgcgctcctcctcgtctttctcatgactacagtccacgttgtagctatctaagctgggggtc

SEQ ID NO: 314524 - DNA, 297 bp, Zea mays
acgcacgcgtccgaattgaatgcatatactatggacgacgatcaggcgtctcacatagcagcggattcgacgtatgtattcgcgctcggcccggatcgatgtcgagagaactagccaggagctagtgcagattatagcgaggcgttcgagaaggccagccggaagatcctctctggtcagtcaccgaggacgatctgtgctccactcaggtgtagtctcacatgtgtctcagcgatgacgttcgacatctcgtcgtggactggaggtcatcttcggtagtatgaattgcgcagcgga

SEQ ID NO: 314525 - DNA, 258 bp, Zea mays
gacttctcatcgccctcgggttcggcttcgggttcatgaggttctccggagttcggttacatgcgtggatggctcgtgatggctgtctccgacgctgcttatcgccgcttccttggcggcagcgcctgagccagcgacgaaggttcgcttcatagcagctgcaacaactaatgagatgtcatcgagtccaagattatacgcgatctgtagagtcatcggtcatgcagtgtccacttcctcagatgctgcacagaggaa

SEQ ID NO: 314526 - DNA, 106 bp, Zea mays
aaaccgctgacgtcgctgctgtggtcggcagatgcccggagcactcagacgacctcttcagcgtcgtcacgaagcagcagttagtccacatccacctgctcttcgt

SEQ ID NO: 314527 - DNA, 155 bp, Zea mays
agcggcacacgcggaggacagcccaagcctacacatggtaatcgtcagcagatcagcagcgaagtactatggtctgatctccgccatggtgtcaacaaaggagcagtacacacagtgggatgatgtgatggtgtccacagatctccgcagcctcc

SEQ ID NO: 314528 - DNA, 314 bp, Zea mays
aacagaacacgcagacatcagcccaagcgcatccaaggttagcgtcccacttcggccgccatggactacgcaccgacagccgtcctggtcgccgcgatggcgccgttgatgcagtgggaggacgtggtggtgtccaccgatggcggcagccgcctcgtgcacgtctacctcggcggcaagagctaggagatgcagctgtccgtcattgggtcggagccgatctcgtctcacaagtcgttcgtcgtgcatgggctgttcctctgcacgctcgccgtctgccacctgagcggtcaccgtctccccgtcgacatcag

SEQ ID NO: 314529 - DNA, 429 bp, Zea mays
caatacggcgagcatcggcggcggcgacccaagcaggttgacctcgccccttcaccgaccagcgggtcgtacagcaagccgatccaattcctccggtgagttctcctgttactacaccccttccggctttggttctcggcgctgtgttatgtgatgtcggtctgctcgagagcagggatagatacaccatccgcccatacgcctgaaatcgaacttgctactaaattgccagtaacactgagcgcgattatcgcacccacctacgtacatagaaattgatttcacgtactgttcagggcctcggcgtttcacttcgccatttcgttgaactgctggaagacacgtcggtgcacactagatttggattggggagaggagaagcgacagctttcggatgtgcaaatgtgcctaagttggtttcaaacatag

SEQ ID NO: 314530 - DNA, 414 bp, Zea mays
gaagggtttgatactacgactggcatccactggcagaaataataagagaattttccactgaacgcaatcatacatggagcatatatgctgttagctggagtcctgacaataaacaggttcgaatagtttctgctgataaatctgcagaagtatgggatatcatcggaagatgcaagtgggaaattgactcgaactttgtcttgccctggtacaggacgtgtgtatgatatgcttgttggttgtctctggaagaataaccacctcatgacactctctcttggtgggacatttaatgtgtactctgcacgcaacccagaccagagaaccagttacatttgcaggacatttgaatactgttacttctttggtctactatcctcaaagtagcccaacaactatacgatctactagcta

SEQ ID NO: 314531 - DNA, 434 bp, Zea mays
  unsure (1)..(434): unsure at all n locations
cactccttttgctcggaacgcacacaccgcccgtccccgatctccgatcccctcgtcgatccaaagatgcagatcttcgtcaagaccctcactggaaagactatcaccctcgaggtggagtcttctgacaccattgacaacgtcaaggccaagatccaggacaaggagggcatccccccggaccagcagcggctcatctttgctggcaagcagctcgaggacgggcgcacacttgccgactacaacatccagaaggagagcaccctccaccttgttctccgcctcaggggaggcatgcagatcttcgtcaagaccctcactggaaagactatcaccctcgaggtggagtcttctgacaccatcgacaacgtcaaggccaagattcaggacaagganggcatccctccagaccagcagcggctcatttttgccgg

SEQ ID NO: 314532 - DNA, 415 bp, Zea mays
aaaaattttagtggagactccagtgaggcttcatgggctcggcagcggtagagggtgttgagtttgtgatctaaattctgcatatggagccccccgtggtatatattagtgaccctaattagggtttgctgtgcatcgtctttttttactcctcttgtaagccatcgtctatgaacaacgttctgtaaacactccacatatagtggaggtttcgcttggctggtaccgtggtttttcccttcacattgaagggttttccacgtaaatctatgtgtcgtgctctgtgaaatgttggttgatctacttcgtttttcctgtcatttctgctaacagagggggctcaagccccacccaccccaccattggctccgtccctgcctcaacatttttttttaaaaaaataatagggtgacta

SEQ ID NO: 314533 - DNA, 318 bp, Zea mays
acgcgtccgctagtccaaggtctcagcctcgtcctcatccaagtcctatagctgaagttccggtgcatagccagctcatgctgtcgtccccatgtctcggtggtcgtggctagcgatgctgtgccgcctgtgatagcgacgacaacagagagttagtcggtggcatctacgtcaactagcacagtgacagctgcgacaaccgcgactacgccttccgcgcactctgcaatcgttgcaagcaggcacacctcctcgtcgacgctaacacccctcgcgactccaagtagctagcccgtgccgggggactggatctgcagc

SEQ ID NO: 314534 - DNA, 419 bp, Zea mays
agctgaacttcgttgtattagacgagaatttgcttcgcatgttgtttggtctaactttgtaatgtctgtatttgctaattgatgctgacatatgcagaactttgctatgcatcatgctttgtgccaagacaaaagttgccacagttcgacttgcatcttactttgctgaaggtgctaaagatgctgcaaagaaattggataaatcagagttcactcaagagcgaataatttcagaattttatctagccttagtgactggcatacttgatgatgatgacgttgttgttacccaagctacagggttagttcattatcctggagttgcatacggactttatgacacatgttcctcaggacagccatcaatgagcaaactatatattcttaacagacttgcacatcagaatcacacactggtc

SEQ ID NO: 314535 - DNA, 403 bp, Zea mays
caaaggagagatgacgctctaccgtcgtgtcctgctcctccgtcgcctctcccacctccacccctcgcccgttccggccatctgctcctcaccaccacccaccctcgcggggctgctcacccccatggggcgccgccacttcgccttctcgtccgccgaggaggccgccgccgagcgccgccgccgcaagcgccgtctccgcatcgagcctccaatcaacgccctccgccgcgggccacctcccccacgggaccccaacgcgccccgcctcccagacaccacctccgcgctcactggcccgcgcctcagcctccacaaccgcgtccagtccctcatccgctctggtgatctagacggcgcctcagccgctgcccgcgccgccgtctcctcgcgcgtccggccc

SEQ ID NO: 314536 - DNA, 223 bp, Zea mays
acgcgtccgcatgggaatattgctcccaaccttccatcgaaatgaaggtctggagacacctaatggcatttctcatattgacaacatgtcttcagtgatatctcaagcagtgcacggggagagttaccaagttgatgagttttctctagaaatttcactaccgccggttatagccgccaatgagcgtgcagttagattatatatgaaacaaaagatatagcag

SEQ ID NO: 314537 - DNA, 280 bp, Zea mays
gcgtccgaaaagaggctgtgggtgcaccggtttctcaccagcgatgtgatgctctggaagagacgaaagacgcttttgttcctcaaaaagaagacataaacgagctggacgcaccgagacaagatcaagatgaagacatggttatcattgatggtgagaatctgatggaatagactccagcagaagatccacctgtgaccgattatgaactcacgggtaaatcagaattccaagagcagcaagtggacgattacgagaagtgtttagcaaccctggatga

SEQ ID NO: 314538 - DNA, 365 bp, Zea mays
aaaaaaaaaaaaaaaaaaaaaaaaaaaaaaaaaaaaaaaaaaaaaaaaaaaaaaaaaaaaaaaacaaaaaagaaaaaaaattaaataaacatacaaaaaaaaatgggaggccgtccaaaaggttccatgctttcatatcaatggggggggcccctcaaaggtttcaaactttccttcccctttcatttcactggcagcctttttaaaaggtccccctagtttcattcccggggttcccattttaaacccccttgccgggaaaccccctggttttacccgctttatcccccttgaaccaaacccccttttcccttcctggcttttccccaaaggggcccccaattttcccccttcccaaaatttgc

SEQ ID NO: 314539 - DNA, 58 bp, Zea mays
gtagccgtcgtagaatcagagtcgacggacgcatcaaaccacgaagtggcggacgcgt

SEQ ID NO: 314540 - DNA, 81 bp, Zea mays
gtcgaggacgcgtccgaaaccaaaaatgttgagcagatcaggtgacccggaaatgcagtacttggaaattacacaaaaatg

SEQ ID NO: 314541 - DNA, 413 bp, Zea mays
atggcatcagacactgcaacattgaccaacgtcgtacgaactatgtgacttcttacaacaacaacatcatctacaaatgcctttatatgtctcaagcactttggggtacgctatcgatgaaaccccgtatgataccctcaaagctcaacccccacttgaacatataagggatacataggcattcgagaaccgattccaactaaacggggaaacacataaaagatatacaacccacattgaccatcaagatgcatcatgatcacagaacgacacggtctaacaactgtgcatgatatacatgactagatacgtattctgaagtaataacttgcatatattattggtaataccgttaccgttcaatcacatgttgtgcacgtgcattttgtgtgaggatccaaacccccgacgat

SEQ ID NO: 314542 - DNA, 363 bp, Zea mays
cgcgtctgctggtctgccaagaggaggaaaggaaggagagagatggcttgccctgcgcagtccatgctctccgccagcggctgcatcttcctgaggagcaagcctcaggcggcatcccaagtgcgagggggcatcatcggcggtggccgcaacagcaggccgttcctgctcacctgcaacgcttcctcttctccgtcaccttcctcgccggcgccggcgcatgaagaccccgactgcaacgaggatgagtgcgccccggagaaggaggtaccgctctcctcctcctcccttcgccagctgtcttggaactctgcgtgcctcgttgcggcagcagtagtagatagatgcttacgccgttacagc

SEQ ID NO: 314543 - DNA, 360 bp, Zea mays
actcacaccgagacatctactcggatcagatctccaccgggcataagctccccatccatgaccaccttcaccgcgacctccctgctcgtactgacgcccgcggctgtgtccgtatcacagtttccaagaggcatcaacagatgtatgaacaacagaaggacgttccgtctcaggaacatcacttcctcttctcagtctccttccatgccagcgacttcccattaagacttcaaatgcaacgttgacgactgcacttcagaaacagatgtacttctcgcgtccttcatccatctccaactgtctcgggactctgcatgcctcattgctgcaacactgatacataaatgcttacgccgttac

SEQ ID NO: 314544 - DNA, 359 bp, Zea mays
atcgcccatgcagccggcctaagcccacagaccattctccatcatctactctcatccccacgatggtcgccgccgccacgacgccgcactcactcctcctccaacgcgccgcgattccgggcgcgccgtcgagggcgtcagccgacgccgctcccgtccgcctcccggtatgcgccgcaaggatctcgtgcgcggcggtggcggcgccatccacggccgcagccgccgcagatgactaagtggagcgcggcgtctataacttcgcagcgggtctagcgacgctcgctctctcagtgctcacgcgggcgcatgcggagctggtggacgacaacggctaccggatcagcatcgaggagatg

SEQ ID NO: 314545 - DNA, 107 bp, Zea mays
tgcacctgttccaaataattcctacgatggattcgaggcttgtgctgaatttgtgctaccctgttataagatctatggtaaggatgactgcacagctcaaaagaaaa

SEQ ID NO: 314546 - DNA, 395 bp, Zea mays
atacctagccgccgccgcaggcggccccccatcgccgccaagatgcagatccttgtgaagactctgacggggaagaccatcactttggaggtggagtcctccgacaccattgacaatgtgaaggccaagatccaggacaaggagggcatccccccggaccagcagcggctcatcttcgccggcaagcagctcgaggacggtctcaccctcgccgactacaacattcagaaggagtctaccctccacctggtgctccgcctccgcggtggcgccaagaagcgtacgatgaacacgtacaccaagcccaagatgatcaagcacaagcacaagaaggtgaagctctccgtgctgcagttcgataaagtggacgacgccactggcaacgtgatccgcct

SEQ ID NO: 314547 - DNA, 95 bp, Zea mays
aaaaaaaaaacaaaaaaaaaaaaaaaaaaacaaaaaaaaaaaaaaaaaaaaaaaaacaaaagaaaaaaaatcaaaaaaaaagaagaaaaaaaaaa

SEQ ID NO: 314548 - DNA, 286 bp, Zea mays
cactcgtccgccctctcatctggtccactacattaaagcttccatagactgagatagcagactatcatcgccgagagtgactgactgctcctgtggtcatcgtaatgggactcgaactcattaacgttttgtgtctgacggttaattcgtatagttagcattaggaactgggggaatgtgtaacaactatgaaaccagggagcaacatccagttgatgtgaatcattcatggcacattaggcaatagtagcagtggggtactatacttacacacttaggggacgca

SEQ ID NO: 314549 - DNA, 423 bp, Zea mays
atcaggacccctcgtcccctccagttgtggaggccgccactgcgccagcgccacagtgcccgtcgaccgccacctgcactctgcgccgcgcctgccgcctgcgccgctgcgcgcagcgcgcaagcaacgccgccggccgcccccacgcacgcaagcagctttgcgccctcgctttgcagcttgctccggcaatggcgctgatctctggcgctcccaacgaagacggtatcatcgtcgccggcttgtccaggcgtaaggtctgtgtctcacgccagaagcctactactgccactgctgcatcacccaagaaccagcgccccctgtgtctctgcctgttcctgcagctgccaaccgtaacactcggcgatcacctcttggttgtaagctaatttatttatgttctacatagttgatgacaaaact

SEQ ID NO: 314550 - DNA, 255 bp, Zea mays
tcagaagtccaatgcagacagcgatggtaggagcgacggagctctagatcctatgcatgaatttagggtgcttcatcgcagctctgtcggacgccaaaatctccgacaagggctgtctggtcacgctcatcgcgaaactgttctggtagtcgaacgtcgtgagatccaccagggtggaacttcgatacgtattgctcagtttgaaggatagactggttacaggactaagtgtggtagcctttgagtttgacgttg

SEQ ID NO: 314551 - DNA, 303 bp, Zea mays
agcgaccggagcacgaccgacggtccgttcgacgtgacggtatcgggcacgctcgatcacttcgtgtggcccgacggcacgaccgcgttgcccgcgctgtcgagcctcacgggcgggatcgcgacgcaggtcgaaagctggctggccgaacccgtgcgcacgcagccgtggggctgtatcggcggcacgttcgacgagaccggccagatcgcgctgccggccgacgtcgtcgtgaccgacctgccggccgatgcggccgtgcacgaccgcttcgtcgatttcacgtcgcattacgtgttcgac

SEQ ID NO: 314552 - DNA, 388 bp, Zea mays
accggggattgcttctctagtttatataaatctcaacgggaacgattctggatgtaattctacacaaacgaacaaggcccaaagaagaaatatgggatgccacgcgctttggtgcctagctccttgatgacttgatgacatagctacgaaggaaatagctttacatctcgctgttctaggcagcagaagtttttgtttgcactttgcaaaactgtatatccttctcagctgtctcattgtaacccattctttttctggtttctttcctttattttccagcttggagttcagattctttctttatattaactgtgaatagatagtacacatctgaggttctttgcatgcgaacagtattcgtatagtcaatataaaattgtccttataa

SEQ ID NO: 314553 - DNA, 218 bp, Zea mays
gtccgaatagcaccctgccattagtagcacgcaggagagcagtggtagtaggtgccactcacacggttttcacggttgccggctgggagcgaccgacgagatcgtcgtcacgctcgatggaggccctgatggcgacgtactggtgtctggggggaccgcagtgcggggcgtgcggctggtcgccggcggctgcacactgccggacgtgtccgggcggc

SEQ ID NO: 314554 - DNA, 71 bp, Zea mays
tagcgctgtatttgtaagatcgagcagttgtttgttcacttctttgcatatataataatcatataatgcgc

SEQ ID NO: 314555 - DNA, 211 bp, Zea mays
agtggctctccagtagcagcctaccagatctacggaatgcgatatggcagtataggcgctcaaggactccgtccaggatctactgcacggcatcccgctacgacaagtccacagtcgcgtcgtactgacggacctatcttggggtcacgtaactctggaagctgtccaacgtctcgcaggcccccgccgtgctggaactcgtgtccgtcta

SEQ ID NO: 314556 - DNA, 271 bp, Zea mays
agcgaggacaatacacagtgcgctactgacatgtctatggtcaccagtatactgggccgtatgcatcatcacccgcagcagtatcatcattaccattaagggctgcggctcgcgcactgtcaccagagcctgttccggcatggacgctgtcgcattggacccgttgagcatagatatcgcggagctggggcagctagtggatactatcacgcttgtggtgtacatgttccagtgctctaggcgtgcagatgttcatgacggcattcatgta

SEQ ID NO: 314557 - DNA, 424 bp, Zea mays
attcccacgcccgatcgatggccagtggcggcggcaacgcggcggcggacgccaagcacgtcgatgcggaggtcgtcatcgtgggcggcggcatcgcggggctggcggcggcgctggcgctccggcgggcgggcgcggcgcgccgcgtgctggtgctggagcgccacgcggggcatcgtgccaccggcgccgcgctcaccatcttccccaacggctggttcgcgctgcgcgcgctcggcgtcgcgcacaagctcgcctcccgctacgacgcctacgaaacgtgcgtgcgccccgtcgccgtcgccgtcgcccatgcttgatctcgactgacctgctgaatcgcatggctgcgcacagattccaggtgaccaatctcgagaccggggcgacgcaggtgtttcgctttgccgggatcaaggaacag

SEQ ID NO: 314558 - DNA, 342 bp, Zea mays
ggcgacaagacgctcgtcttctcttcggcgtggcaatagaagcttgcttgtactattgcctatctgagcactttccagcgtttttaggagcatctggggcaagggctgtaaagagatttctgtcgccgtattgttgacctaccatataagtacactcgtagctaaccttagcgtgctgcctgcctgtaggcttgtgacttgtgaggtctacggtttacctagtttcttagatgaaagtatgttgtgcattgtacacctaaaaaaaaaaaaaaagaaaaaaaaaaaaaaacacatgcaaaaaaaaacaagaaagaaaaaaaaaaatccaatataggaggatag

SEQ ID NO: 314559 - DNA, 384 bp, Zea mays
agttggggatgggtctcggtgcagtatttgtgaaccagctggtaaaatttgacgagaagctcaaggaggacctcgacaagatgcttgagcgcgccaggctagccaacgagcaacgctacattgatgatgatgaatagctgttcagatttgtttgtcagtgacctgtattttttgcaacatgttgtcagtacacatggtcaggactgtggatcccccatgacttagttgttgcctcagcttccacatttcaactgtggccttgtaataaaatgtcgttgcccaatggatctgatgcatcagagaaagtaagcgatcatattcaaagcccataatttgtagcttacaattgtggccccgagcacctcgtccgcaacccgtttggtc

SEQ ID NO: 314560 - DNA, 381 bp, Zea mays
gttggagcgagtgcaacgcacccccacccagctgctaagacccgagaacgaagctcgtatcgtccagcttaaccgcacccagctttcgcgactgggatttgtctcgagatcgatcgatcgcgttccatcagagagcatgatcaccttcgtgccttgctcacgcgccaggtaaagctcaatctcagctcgctggttttccagtcgcttcatggttctagcggtcgatccgattcctggggcttgtcctcacccgtgccttgccgcgtacggttcttcgtgatgtcaatgattgcttcgtcctgagaactttcctcggctcgaattcatgcgatttcagttctctccgtgcagaattggtcacgactttacagcataataccg

SEQ ID NO: 314561 - DNA, 146 bp, Zea mays
aaaaaaaatacaaaaaaaaaataaaaaaaaaagagaaaaaagaaaaaaatttatgcaaaaaaaaaaaagcaatgggacattggaaatcagggcggaaggccgacaagatgcagacatacatcggcggcgtgtcaagctcatacatc

SEQ ID NO: 314562 - DNA, 326 bp, Zea mays
agtgcctcatgggcggacgcgtcggcggtgccctggtcaccgcgacatggggatactgctccccgaggtggtgcagctgtcgtaggagcaccacgcgactcgcgcccatatggacgccatggccaagcgcattaccaatgtggagtagactcagaatcagatgacggtgttcctcacgcgtgccatgaacaccccgagcttcaacccgatgctggtcgaccgggacggccttggcagctgcagcaaggagctctacgacgcgctctccacaaagcgcctgcgtgccatcgactaactctcgcgcgacggtcatatatgccgcactg

SEQ ID NO: 314563 - DNA, 423 bp, Zea mays
cagctcaagatgtttcaatttgccgaaacagtaaagatggatcgtcacctgttaatgccagtgggttatcaaccaagcttccatgcacaggtgacgatccatctttgcaaatttttcttccaagtcaaccttccactgttccccttcagcaagaattgagtgagcgttctgatactccaaatggagtccaccctaacgattggaggatatcgcttacgcttgccgctggtggagggggcaatgaagagtctacaagtgttggcggtctaaaatcacaaccaaaagtttcatcgaaagaggcaggagttgaacctttacttgatgctgcttctgctcttggaagcatgaacaatgacagatgcactggatctaatctaaatcctaaaaggattgaaaatataatttctcatcctcgccaaacgc

SEQ ID NO: 314564 - DNA, 207 bp, Zea mays
ccagccctcaacgttcctaccagctgccaccgcctgttacccgtgatgtctcccgcccttgccgctggcgtggagcccatggccgtcgacgattccgcctccaagaaggccaagcgcaagcagctcaaggccgccgccgccgccgcggaggcagaggcggaggccgcttcggtcaaaaaaaaaagaaaaaatagaaagaaagaaaag

SEQ ID NO: 314565 - DNA, 289 bp, Zea mays
gggtccacgtacgcgacccctcgggtccacacttgcaccgatctagcagccaacatggggaccaaacacttggctctttgcctccttgttctccttagcataggcatgggcatggacatccctgctgcaaaccgcatactgggttaaggcccccggggaggaggtggcggtggtgttaccggtggccgcagtggttacggtggaccatgcgtatggtccggatcacggtatagtcatggcggtgagtgtgcaagtgctgctggagggtatggacatggtggcggcggcg

SEQ ID NO: 314566 - DNA, 403 bp, Zea mays
cgtcagggcaaggaggcgggccagagcgccatcgacgctgtcagggcgagggtcggcgcggactgcctcgtcgtgggcgaggagccccggccgccgcgcgtgttccgggaggccgggcctggcgaccgtgaccacggcggcggccttgggctggtctacctcggcaacctcgtgaagcggaacctgtacaacctcggcctcatcaagtcgtgctcgtgaagcgggatgctcggctcggctcggccccaagaaaaagacacgggcggtttctcaaggagacccacccgccattgacgtactgtgtacgtacaagatcgaggaaccggcgccgacggcatcaactaaacaccgcgacatgtagcgccgcgcaagcagggtgaaattcgggtcgggcatgatgttg

SEQ ID NO: 314567 - DNA, 426 bp, Zea mays
  unsure (1)..(426): unsure at all n locations
catcacatagcttttgagatgcacaattcttattggacgagtataatatcatcaacggctacaatacaagcttgtaccattttgaatgctgatttagcatatctcttgcatatgctgcattgctacttgcaatggtagcgcaatatgcagcanaccagtgagatatttatttgctgcatgatgctccaatgttaccaacatgctacttctaacagtagcactatatgcttttctcatgtgcaaatcttattggctaggtagcatgtaattctgctgatgtacatcaatgttcttgttttacatactgcatgtactttataacctcgtgcagttgtctgttttctttatcatagagtgatgtcctcacacagttgcaaaatgtcctgctgaaaattgcaactacccaaattatggatttggtactac

SEQ ID NO: 314568 - DNA, 132 bp, Zea mays
cacgcgtccgcatgaaataagcttttaggagaaccatccgtcctccgctcttgaatatggtctggtatcgatgccaacctttgaacggcgtgtttattaatacaaacttatatatcaaaaaaaaaacaaaac

SEQ ID NO: 314569 - DNA, 416 bp, Zea mays
agactcccgacccgatctcccaccgcgtcgggaactcgggatcctcctgcccgcctacccgcccgcgcgccgccgtcccgttcgccagaaccatggacggcatcgagggcctgctggcccgcgacttcggcgtccggccgcagggcaaggccgcccccatggccggcgcctcccgctccaccggatccagcgccggcgccgacgcatgggccagctacggcagatccaccccggccccctccgcggccccgtcctacgacgacctcttcggcgcctcgctcttcgactcgttcaagggccccaccaccaccacaaccaccaagcccgccgcgccttcgcctgcccccgcgtacgacgacgacatcttcgacgcggtcccgggggctgcgccctccagctcccggttcaacaacggc

SEQ ID NO: 314570 - DNA, 107 bp, Zea mays
aggagatagatgcgatcgtagtcatgcaccctcctatgggttcattcagaaacactgggctcattgatttcatcattatataaattattccctgacatgtatactca

SEQ ID NO: 314571 - DNA, 363 bp, Zea mays
aacccgcattaggtgtgattgcaactgttgtattattctacccaaatatctgttaaaaaaatgtaaacaaaatgattgcaaccgatggtgtgttgtaattgcaactgctggtgtagtgtggatgcaactgctgagttgctctgatgtgattgcaacttctatataactatgtccaaaaatctgttaaacaaacaatgattgcaactgctggtctcgtgtaattgcaactgctggtctggtgtgattgtaacttctatataactatgtccaaaaatctgttaaacaaacaatgattgcaactgctgtctggtgtaattgcaactgctggtctggtatgattgcaacttctatataactatgtcc

SEQ ID NO: 314572 - DNA, 325 bp, Zea mays
  unsure (1)..(325): unsure at all n locations
gaatttctagtttgaaggaattatgctgggctcttcatatgagatggttgtggctacataaaactgatccagcaggccttgggcaaacctccctatacaagttcctaaaaaggcaagatctttcttctccactgttttggtctcagaagtgggaaatggagcacgcactctgttctggacagataaatggctcttggctcctaggttattcgccatcattcctaaaaggattgctaatangagaactgtcctcgaggctctttccaacagaaaatggatatctgatataaaaggtgccttgtcggttggacctaaattggaaaac

SEQ ID NO: 314573 - DNA, 355 bp, Zea mays
gagaacccgccgccgacgcagcagcaggagacgcgccaatgagagcccacaaggaggcgactatgacggccaactggaaaaagaatcgcatgaggaggctgaagatgaatcgccaatagatgatgcatagatccaagtacgctgatggggattgtggatggtggtgtcagcataattgtgtaacctctcttcgatgcatgagttcaaggacagatgtcacatcctagttcgtcgtcaatgtttgccatgggtccaatggcacgtcttggtaacctgcacttcattaggccatctatcctggtttcgatctatatccatagttctgtgctaacacaaatcagtcagtcgttttgtg

SEQ ID NO: 314574 - DNA, 396 bp, Zea mays
gacatggccgcgcgcgccaaggccgccgccgtcgacgaccacgaccccatgccgccaccgctgccgctcccatggccgcgcccagcgccgctcctcgtcatgctgtccctgctcgccacggcctcctacctggccctcacgcgctttcccgccgcgctcctcccgatcgcccctcgctctcgcccccacgacgcgcccgcgcacgcgcccggggacagctgcgcggggttctacgcgggcgcggggccggcgcgcgaggtgtgggcgtccgtcgaggagttcggggccgtgggcgacggggccacgctcaacaccgcggcgttccggcgcgccgtcgcggagctgggcgcgagggccgtcggtgggggaggggccaggctcgacgtgccccccggg

SEQ ID NO: 314575 - DNA, 380 bp, Zea mays
gggtccacgcacgcgtccggataaatccctgccattagtagcacgcacaaaacaattggaataaggtgcaaccaaaacggttttccacggttcccggttggaaccaaccgaggagattgtcgtcacgctcgattggaggcctgattgggacgtactggggtctggggggaccgctgtgctgggcgtgcagcgggtcgccggcagcggcgcactgccggacgtgcccgggcggcgcgtacctgtgcccggggtgcgacactgggcacgctcgggcggtgcacgaacgggtgtgggtctgcgaagtgtgcgagtgcgcgccggccgccgtgacgtgccgcgccgacgccgccgcgctctgcgccgcgtgcgacgccgacatc

SEQ ID NO: 314576 - DNA, 154 bp, Zea mays
aaaagaaaaaattaagatatagtcaaaaaagataaaaaaaaaaaaaaaaaaaaaaaaaaaaaaaaatttaaaaaaaaaagtaaaaaagataagaaaaaaaaaaaaaagggcggccgtccaataggttcaagtcttagatatgcttgaagggaag

SEQ ID NO: 314577 - DNA, 222 bp, Zea mays
gatcgtggtttatccgtggtttctgaaaaaataaaaaaaaaaaaaaaaaaaaaaaaaaaaaaaaaaaagacaaaaggtcaaaaagttaaaaaacttaaataaacgtgcacccgtcctaaggagttccactcttctttcaccgtgacttctatatccgatccctcatctgtagtcctcctaattcgtataacgcgccgtctttctaagttatccgccttggaa

SEQ ID NO: 314578 - DNA, 419 bp, Zea mays
  unsure (1)..(419): unsure at all n locations
caggttgatatgaggccgcagctggcagctggcagcaacaaaaaggttccggtatcagttagacaggcacaatttcaccgaattgctgagcattatttgcagaaagcaaatttggatgtcattcgcagatgtgcagatactgaattggccattgctgatgctgtcaatgttgaaaagggtatttatgaaaggtcaaatagcanatcaatttatgtgaatctttgctctcaggctactcgccagcatgccaaggcaaaatctgataatgacacttcaactctaaccaaaaggactgaatcaggcagtgatcagatatcacaggaagctacatctgagggtaccaatgttagtggcagtgatatggaagaggatctanacagagcagctatctccaatcaaaagaatgaactagaggatga

SEQ ID NO: 314579 - DNA, 182 bp, Zea mays
cagacgcatgggcggacgcgtgggcggacgcgtgggaaaaaaaaaaaaaaaaaaaaaaaaaaaaagaaagaaacacaaaaagataaaaaaattaaataaacataaaaacaaaaataataaatcttcaaaaaagtaaaaaaaaattcaattcacaggacaatcaattttaaaaaatcatagaa

SEQ ID NO: 314580 - DNA, 252 bp, Zea mays
aaaaacatcaaaaaaaaaaaaaaataaaaaaaaaacatgacaaattaaaaaagaaaactaaaaccaatgcaagaatgcatcaggtggaaacgcgcatatcgatgggtgatcgtgccatcagagctgcacctttggcccttcaaagggtcgctcaatgtaacacctcatggatcaatgattctattcagtactagcagattctcaacatcaacgtgggtgtacacacggaatatccaatgtttgttccagtaa

SEQ ID NO: 314581 - DNA, 241 bp, Zea mays
cgacccacacgtccgattcccgctgcagcccgtgggcgacctgatcctcaacccatacatgatctcttatgcgcagtcgtgcaataccagtcttgtgcatggtctttggatcgactacgatccaatgaagggttgtcctacacatcatacgcgggatctagaatcgtttagtgagatggttttggttgagcaatcccaaaaagcaggaaccgatgaggatggatggaaatgcagactggat

SEQ ID NO: 314582 - DNA, 436 bp, Zea mays
  unsure (1)..(436): unsure at all n locations
aaccgaatcagcacagaaggccttgacatcccaattgacctaacaaataacctggggggggacccttaacaaggttaaaaggaatctaaaaaaggccgcccccaatattccaatccaattgcggataaatgcaaaattatcacaatctacgggacacgtgaccggagagataaatgagaagcttcaagagcgcagtcagattgccttggcagagattgctgcccagttacatattggatccgagcttgtcatcagtatcctcgagccgcggcttggaactattgtgaaaggaaggctanaaggcggacagctatacactccagcgtatgtctcacggattactgctatggttcgcggtgctgcagggggtataacagtngcaacaaacctggcatctgtttggaactccttgcaacaacagcttcatgagatgcat

SEQ ID NO: 314583 - DNA, 232 bp, Zea mays
cccacgcgatccggatcgccacccggatcactgaagttgggcagaggaggtccgaacatggtgtgtctggtacgatacattctgcccgatcgcaccaagatgtgtaagctgaagctttaacccctgaatgccatgtcaacttctcagttaaaggctcagttgacttgcgccatcaatatgatattcaaccatttgatgccgtgaatgtggaggatgacccaccaactatatg

SEQ ID NO: 314584 - DNA, 434 bp, Zea mays
acgcgaccgcatctgctccgaatcgcgcgcgtcacagcaatagcacgctgcactcctgcacgcagctacctgaccacaccttatccggacggcgcgggcgccatggagcggaggctgtcggcgacgtccaggcggtccgcgccgtcggccatccaacggctgtcccacctggcgcagcgcgtcggcgccgtcaacctcaccgagggcttccccgacttccccgcaccgcctcacgtcacggccgccgccgtcgccgccattgccgcggacctcaaccagtacaggtttccttctccacgagacgtctttctccccgcgcagtcgcgtggttttgtcggagccaacgggaactgttcccattccacttccacttcactgcgactgactgcagctagcgtcgtgcaggcatgtgcaggggatctgcgaaatcctcg

SEQ ID NO: 314585 - DNA, 394 bp, Zea mays
aaaacatagctggatcctccttttagcagggaactgtcagccccaaataaatgatctctcatgctcattctttctttgtcatgcttttgtatgacctttggagcgagcatagaccactgaggggttgtcctaaatatgttaccctgcagccatagtcttttagtgacatgattttggatgagcaaaaccacaaaaaggagagcgagggggagggagggaaatgcaagctggtggacaatgtactgttgcaaagaggacgggtctacgttgtcaaatctgtgcttatattttttaccccgagctgtagaaagcaggaatgagcccttttcagaaaatagtgctggtccagacttgaagcttactgttgcatgaaagaggtcttgtataagcaata

SEQ ID NO: 314586 - DNA, 304 bp, Zea mays
cattacgcgcccacaacccaccacaccagtgtcagtcatctcatcatggcgcaggcgtacgaggggtcctcctcgcagacgatccggtagccgccgccgccgccgaataacaaggaggagccggccccgccgccgccggcgaaggtcgagccgccaccgaaggagaatccaccgccaccggcaccgaaggaggagccaaaacccgccccggcgccggcgccgccgcacaatgtggtggaggtcccctagccgtggccgtacacgtgcccgtacccgtacccggcgtggccgtcagccgactgct

SEQ ID NO: 314587 - DNA, 362 bp, Zea mays
tcttcccttcgtcctccacgccccacccctcgcgtcgccgctatggccgacgaggccctggaccagccgccagacgcggccccgtctccgtctctggccccagcgacgccgccggcccccgccacctcgtcccccgcggcgctgctccgcccgcgtcgggaggcgttcgagcatgggctcctgcccatccccaagctcatcttcccggagggcatgctagcgcagaccctcgcccagctcaaggagaagctcgccgcctcagtccccgacgggcgctgcgcgctgcggccctggctgaggcgctgcagatcccgcaggagcaggcggcgctcgccctcggcacgctcgcggcggtgctcccg

SEQ ID NO: 314588 - DNA, 194 bp, Zea mays
taagataacttttgagatgcacaattcttattgggcgagtataatatcatcaacgggtacaatacaagcctgtaccattttgaatgctgaattagcatatctcttgcagaggctgcattgctacatgcaatggtagcgcactatgcagcagaccagttacatatttatttgcagcatgatgctctattgttacg

SEQ ID NO: 314589 - DNA, 287 bp, Zea mays
tgcccgtgatcgcgtcgggggtgtgagttcgcgtcggcgcaaggcgaggagtgcgcgcgcctgtcgcggtggaccgtggccatcatgagcgggctgctcctgatggccgcgctggcgggcttcgtgggcgcgtactggatcaggcgcggactgctggccttcaatctcgtcgcgatgacttcgcgcgtggtactcatcatctcactcctcgccatctccgacacagtcatgcgcgggtccggcgcctacaacgtgcacagctgcacatacaactactatagcatcga

SEQ ID NO: 314590 - DNA, 424 bp, Zea mays
cagatgcgtgggtccacttgtgcggttcggctgtgtccttgtttctaaggatgcggggccataggagttctgtcaatatcgtggttttagcggtaaagagtgactgttctatgcgtttttgcaggatggatcatcacattatctgaagggactgctgcttgtgttttgctacattgtcatctccttatgctttttcgttttgagacagcatggaaatggaagcaacgatgatcagctgggtgtagcaagcaagccatggacgatttagggcgcctgagctggcagtagtttctcaacaagtagcgtggactttggtttgcacgattttgcatggaacactggatgggagacccgtgaagtttgactaaagtatgtagactgcgggaagatgctgttcagctgatgtgtgaatgtaagtacatac

SEQ ID NO: 314591 - DNA, 246 bp, Zea mays
cggtcctagtatcccgggtccaaccaagccttcggatacggaacccgccaacctcctcccctccgctcccttgtgcctcctcctcctcccaacttttttccccccaaagaaccaatccgaaggcctcaaacctttaacacaagggtcaaccggtaacaaccccaagattaagttttaacaaaccccgccttccaatttccaaaccccggaataaaggcttggaaccaaaccttaacctgcaaaagg

SEQ ID NO: 314592 - DNA, 297 bp, Zea mays
cggacgcgtgggcggacgcgtgggcccgcctctatcctttctctccgcacaaggtgcccctgccgcctagccgccatgaggaagccgacccgacgacgaggaacctcagcgaaaggcagctccggcggcggtatcattaaggcggcaacactgccggcgaagcagatggtcttgtccggctaccgtggcaccgtagacgcgtttgactgcctccccgacgacctcgtgctcgccgtgttagccggcatcgcggcgcgcgcccggtgccccgccgatctcgctgcagccgcgctaccg

SEQ ID NO: 314593 - DNA, 127 bp, Zea mays
atcgggattagactaggatgacgcaacgctcaccgttgtcttccaatccgcagtacgccctacttcgcagttggtaaacgctctcgcaggcagccggtatcacgagacaggaaatgtcgctcgtgag

SEQ ID NO: 314594 - DNA, 188 bp, Zea mays
accagtctcaatcgaagcagcatgtcggaacgcacatcgatgtcgtcccatctacttgtctcgcgacttcgcagtaggactatttgctcggaggtagcgtctttcgatagggtgcaatgtcgctagtgatgctccacgtcgaggggggcgtactccctgtggatctctaggtcttcttcgacagggtg

SEQ ID NO: 314595 - DNA, 387 bp, Zea mays
  unsure (1)..(387): unsure at all n locations
tgagcttcaaagaaaccttggcgtcctaccggagcgtatattatgttggcacaattgttcccattgtgtgtcttctgctgggcaatgttatcaagccagcaaggaaggcgaaggctcggaagaccgagtgaggaaatactcaatcaagtgacctttacatagaataaataaattgaaaactagaatgtccttatcttcgttgaagcttcaccatctttctttttgtacggtatcaaatttagcataaggataatgtggtgaccccggttctcctacctcggaactcgaatgccaatggattaatcattaaaacgtgacacaaccactggattttcctttacttaatgactactcatacgtgtgtgcgataaanagataaataaaaac

SEQ ID NO: 314596 - DNA, 66 bp, Zea mays
cgggaagagatcaactattaaccgagtgaaagtgtttggagaatatcgtgaagtacggccgcagaa

SEQ ID NO: 314597 - DNA, 300 bp, Zea mays
agtttcactctaatcaactgatctgcttccggacgacatggccatgtccatcaacctcactgcgcaaaaccattcgttcatggcacacaagaacggcattaagacagttaagctccatcgccatacctctagtaaagggatggacaccaaattcctgaagaatctgtagtagtctacgatgggcatcacaatgattcttgatgctgacactgaggagtatgaatgacagcatggttttgtttcctcagtttttatcacagttccaactttacgacatggggttttgcgaaagatcgacat

SEQ ID NO: 314598 - DNA, 360 bp, Zea mays
atccactcctactccttggctacacacagtgcgtatatgttcctcctaattcgccttcctgtttttgcaaaactaactctgaacggtgttctgttagaatcatgtgcacacaaaaaaaaaaaaaaaaaaaaaaaaaaaaaaaaaaaaaaaaaaaaaaagaaaaaaacacaatacaaaaaaaaaaaaaaaaaaacataaaagaaaaaaaaaaataacatccataatatcaaaaaacagcaactcaaatgctactcaaataaaacagctagtgtgatcaaaatcaatgacaccatgtaccataagaccattgatggcaaaccttttgttgatatcttcaatgatggagacgtcgtccctagc

SEQ ID NO: 314599 - DNA, 388 bp, Zea mays
cacacgcgtccgaaagcaacaaggcagcagcacaagcaagaaccacacctcctcccttcgcctgtgatcatgtcgtcttgctgcggcggcaagtgcgggtgcggctccagctgctcctgcggcagcggatgcaacggctgcggtatgtaccctgacgtggagaccgccgccaccagcagcgtcaagaccacggtcctcgccgcgccgaccaccaaggccagcgccggcggcttcgaggcggccaccgagggcggcggctgcgactgcaacacctgcaagtgcggcaccagctgcggctgctcctgctgcagctgcaactgaactggcccggcccggcgatggcgcacgagagtcgagaggaggaagacgactacgacgcgtataaata

SEQ ID NO: 314600 - DNA, 284 bp, Zea mays
aggcgggccctgttccccccgctggccaacctgcacacgtcgcgcgcgtcgcacaaggccgagctccggggcgtgtagtccgaggccgcgcggctctcggcgctcgtatcgtccgtggccgccgagcgggacaagctccggcgccagtgccactcgctcctgctcctcctgcacgaccaggcccaggcggcggcggcggctgtggcgcctgctccgagcctccacgctgcagcaagcgtcctgtcggcatgacggggatgatgctctgcctctgcctctgctac

SEQ ID NO: 314601 - DNA, 277 bp, Zea mays
aaagaggctgctcacatggacaccatcgccctacctgggctgctttcagaagtagtcccggtgcttctcgtcgatgggtgcatgctcgatataacctaccatcacatgacagagcagcaagcccggaccatttttggaactgcgagaacactaccaaccgaagtgttcacgtatgctcagacagactggttcctcttgttgggacaacataagaactgcgacatcaaatgacgcttacaccctcactttctcgaaagatgatcgccaatgtgggcaa

SEQ ID NO: 314602 - DNA, 279 bp, Zea mays
cgaccgtacgcgtccggcggtccggttccgtttccttggataagcacgacgtccgtccgccagccggcaagcgaaagctaagcgagccaagacatccatggagaacgcaatcgatagggagcgggtcttcctggcgcagctcctcgcagcgggctcctccgcctcctcgtagcctcagcttgcggcgtcggcgtccacggccggggatatcgctgcataccagacgtcctcatccttcagggaggatgtcgtcttcgtcgctgcgtacatgacgccgat

SEQ ID NO: 314603 - DNA, 196 bp, Zea mays
tcatccgagagactcgagaacggctggatgcagccagagcgctccacagatgtcgtccgctgatttgccattggaactggacgagctgcggctgttggacggcctcgccaagcgcccccgcgtgtagacgctcttcggggatctagatgcgcacgattgagtctaagatggctaaggctacttaaccgtcatcgga

SEQ ID NO: 314604 - DNA, 287 bp, Zea mays
cgtattacgccggctctgacctcgcatggcctcattatcatgcgcggccctgctcttgtgttacctagatggctctcttgacgtaagggagctttgattaaccgagcttcatgctcgtcatcgttctctataggggagctggtaatgctacatttgtgaacaggcatctcactggagtactttgacaccaattatgaaccaaccattggtgtggaagttcatccgtctcatttcaccactatctgtggtaagattaggttctacggctggaataccgcagggtaaga

SEQ ID NO: 314605 - DNA, 308 bp, Zea mays
taaagagagtcgtattacgaggtgtcgtctcgatccctcacggtcactgtcgaagccgtcatcttccgcaacgacgaggctgatgttactgcgcgaatgggagctacatgtcggagggagtaggacatggaggtgtttatccttccggtattcgacttttgaatccgaatggccactgccgaggagcactcggtggctccagacttctactctgatgcgttaagcagtgatgaagcttctcaatcgctcaaagtggagcatcgcctttctcagatcattgctgctactcagtttgtggaggaaccaca

SEQ ID NO: 314606 - DNA, 252 bp, Zea mays
tcgccgggacacgcacgcatctgtattgagtccccgtagcgtctcgcctgttcagtttccgtctcttcccgcagctcggtttgccgaccagattccaccgttccatggtaaccacgcgaatcccgtgtctggttgcggcgattgccgtcgagcagtccaacgcggagcaccatcaagcggtggagatggaggttatcgtggagcagcagcacttcaggtcggccccgcggctgaggtacgtggacttcgtcc

SEQ ID NO: 314607 - DNA, 363 bp, Zea mays
cctcagctcccatatccgctcccctacctctccagcatcctcccgtctccgtcgtctcgtctccgctcctcacctcgccagccatgggcaagatcaagatcggaatcaacggtttcggaaggatcggcaggctcgtggccagggtcgccctgcagagcgaggatgtcgagctcgtcgccgtcaacgaccccttcatcaccacggattacatgacgtacatgttcaagtacgacaccgtgcacggccaatggaagcacagcgacatcgccctcaaggactccaagacgcttctcttcggcgagaagccggtcaccgtctttggcatcaggaaccccgaggagatcccgtggggtgaggctggtg

SEQ ID NO: 314608 - DNA, 270 bp, Zea mays
actatgtcgtctgtgcaggaggagcttaatcatacacatgacatgatccacagttacgtggagctctacagttacagtcacgtcgacgtgaggacgatggcgatacggtgtcctatccagctaggcaggcctagcggcatccagcgccgtggtgtggcatgaagaatctcgggcatgatgagtgagaccggcgtcgacccgtcgaagcggccgtatctctgacggatcatgcccttgcttaccgtctacgagatcttggacatcataggt

SEQ ID NO: 314609 - DNA, 374 bp, Zea mays
acccacgcgtcggggccatcgtatgtggacctgaagccattgacgtcgcactcagtgaccctgcggcctaaccgccataagtaacccaagtcgacaactaggatcctcagccaaaggcatctccggccgccgtatcagtaaggcggcaacgctgcccgctatgcagatagtcttgtctggctaccgtgtcaccgtagacacgtttgactgcctccccgacgacctcttactcgccgtgttagccggcatcgctgctctcgcccggtgccccgccgacctcgctgcagccgcactaccgtgcaagatgttccgagacctcgcggagcactccgccgtgctgtcgcgtacgtcggcagcggccgtctccgtgccct

SEQ ID NO: 314610 - DNA, 388 bp, Zea mays
gaagcgtagtaaacttcgagcgggaccggcgatatccgccatggacatgaccactgccgccgctcgctggagcttccccgcccgtctccagctcctcacgagacgtcgcctttgcctcaccgcctcatctgcagcaccacttacttctgtatcagggttcagttgggcggacgtactccgcatcgctgtggaacgactgcgcagccacgagtcctacctcacagggaagatggcattcgttctcaggtgcaaatgcgatctggatcgtggagagcactacgtgaagatcactgtcgacgatgacgccctctggtacatctacatgggatttacaatgcacatcattgcacctccattattcaggataaatggttaagtttagaccatg

SEQ ID NO: 314611 - DNA, 291 bp, Zea mays
accacgacgtccggccaagcctccgaaacgaatccagaacaacgcaacaaaaccccgggttcaatgggacaatggaacggaactccccgccgggggctccccgccgggcttgaaccgaaggggagctacggctacgacatctagagcatggacggctccggggccgggggcccggtgccgtggagcgcacatcacaacggctcctccgaggcctgcctctcctaccaagactggtgtgcagactgctggatcacacatcaggcgctgcagctataaacccagcttgaacag

SEQ ID NO: 314612 - DNA, 229 bp, Zea mays
acccacgcgtccgcccacgcgtccgcccacgcgtccggcatgtttgagtatgtgttgcttctctgtggtgccggcgacgatggctgctactactgttaatgtgatcgggtctccttgaacaatggcataaatatgttgcttgtttactttttcctctaatggcacgtaaagttcatgatttgcgaaaaaatgaaaggtcaaactgaacttaaagataaaatgaccttat

SEQ ID NO: 314613 - DNA, 404 bp, Zea mays
gcgtccgaacaccagtggcgtcgcggtacgagggctttagtgacgtgtcttgttgattcgatggcgctggcactgatcaccagggctgctcgtactcgagccttcaacgccccgagtagtcctaccagcccgccccttcttttcttcgatctccgcagtcgagagatttgcttcgccagggtcgagcggctagggtttcaggagtgcgcggtgagacggcatgataccgcggggagctaagcgcgcggacaactcagaccccgccgcagccgatttaccaagtaacagagtaatggacggacactcttttgatgttcacagggcggagtcttcccatcagcatgtgatggcaggacccgctagtttagatcctcggcgggcggaagctgctaacaaacatgtta

SEQ ID NO: 314614 - DNA, 103 bp, Zea mays
gtccgagattcacgggctactaatgttttccggatcggctagtgctgacatgcaaaaaaaatgttccatatttatacattggttccagtatagtagtctttgc

SEQ ID NO: 314615 - DNA, 356 bp, Zea mays
attgacgaggacgatgaggctccggaggctgacaccgacatgccccctctggaggatgacgctggcgatcagcaagatggaggacgtcgactaagctgggtttattcttatggaggacagagagagaacatctggtcagttctgtgggtcttaccacttacgctattatgcactctgttgttggtatgctagtgcgagcattgtctctgctgtcttacagttaaatgtgtagttgttttgcctagtcagtatcttcaacgattcagtttcagaaaacatctcatctgtgagatgatttgggagttcgactgagagttggaacacattgcctagttcttctgtcttctgttgatgaa

SEQ ID NO: 314616 - DNA, 112 bp, Zea mays
ggtcagttttatatatgccagctgctcatcgcagcattcgccatgtgcacaacgccaaaatgcgggaagagatcaattattaaccgagtgaaagtgtttggagaatatcgtg

SEQ ID NO: 314617 - DNA, 191 bp, Zea mays
gcgtccaaatggaccaaccatagcatccgagctgcgagtccgtggaagccggtcatactgatgagaagcgcacaggcatcgctcgccggcgataccgacgacggatgggcctcctgtaagacgccctggaggctttcaccatctgcccgcagtacgttgaaatcgtccgtggctacgccgtcattgtcctc

SEQ ID NO: 314618 - DNA, 418 bp, Zea mays
attttattgaaaagtgcagcgttcctccgtttcgcttctcccgctcccttccgcaacggcgtactccctccgccgcccgccgaccgccgactcccgccgcaaaatcctgcgtcagaagcgccgattctcggacgtcctccggatctgagacaccgagcgcactacgagctgtagctgtagtgacctaaaaatgagtgagggggatgctactcagcttgcccttgagaaaggattaccgcaagtgtctaatgatgatggttcgagtagtcctgcaactatgcacaagttgaaagttgacacagaagatgctggaagcaaaattgaatcacccactccagagaagcttgaatctagaagcaaaggggttgttgtgagttcgttggcaaggaatttacttgcagagaggtacaaagataga

SEQ ID NO: 314619 - DNA, 364 bp, Zea mays
aagagattggcagagttaatgaagcaattcaggattatgttcaggcagcaacaatctctttgaatgtgttccctctattaactagtgcatcagctgctgtaggatctatacggagtacttcagtgtaacatgtgatagcatcagcatactttcgctgttgcttgtatatcacagcgaagttggtaattgcggaagatcaccaagatgtcacagagatagctgctttgtaaaatgaattagcagagatgatcaagttccaatcaatgtgcaagtatcgtagtcagtacttctgggtgtgcatactttccatgagggtgcttatcctgatgctacaatgcgtgcttcggaagtacgccgtatagat

SEQ ID NO: 314620 - DNA, 287 bp, Zea mays
acccacgcgtccggcctcactgctagccacacacctgagctcgccgcccgtcagacgcgacaccactcagcgcggtgcggcagcaccgcaacaaccattggagcccgcggcgatggaccgcatctccacccgcttctccgccgtcgatgacctctacttcccgtcgtccttcctcggcccgtctaccgccggtaccggggctgcgcccgttcctatcgcagccgctgcgcatggcggtgctccgctctctcatctctcgcgacacgccgctcttcatggaacggtac

SEQ ID NO: 314621 - DNA, 84 bp, Zea mays
aagttacggaggggcagcggctgaccacggggtttccctcgcggactgatcggtctggggtttttaacataccggggttgtacc

SEQ ID NO: 314622 - DNA, 315 bp, Zea mays
agtaaggcctctccagtctcgactgctcggccgcctcctgccgcaacccggcgtccactattcacgcctgcctgcgttcgctcaactactcgtggcgtcagctccattgggaccatcgtccggtgttctgctcatgtgcccggcctttgatgcgttgctagttgtagtgtccggtcacgtttcagctacggcagcaagcaacgattgacgatgcgtgcgttcccagtctcatcaccatgcgctacacagctgattgacatccactcctctgggagcggtaagctacgtgagggagtgacatactgccgactacgg

SEQ ID NO: 314623 - DNA, 146 bp, Zea mays
aggaaccgcatcggcccgcggccgtacgctcccgagctccatccgtcgcgcctcgaccgagatcgtccccggcgattgcttccgctgtggccgcttcatccactacgcggtgcctgccgcggcctccgaaccgctgctgtatccgt

SEQ ID NO: 314624 - DNA, 306 bp, Zea mays
gacataatttctctcgcttaaaataattattagctaaaatgctcaaacagttcaagtttgtgacagaatgcatggctgaagtaacgcaaagaacttaacactgcaatggaagtggctaagtcgacctattgttcacaaagggcggcgatcctacaggatcaaatcttgcttccacgtgctatgcaatcttaaagatctcttctatgagtgtcagtcaacataagttcatgggcagtcgttttaaaacgtcgtaaggggaaaaaccctggtctatcccaacgtaaacgctttacattaaagccccct

SEQ ID NO: 314625 - DNA, 152 bp, Zea mays
cataaccggattatggcggatgctccgcacatgctgcggctattgcacgtgctcacctgcctcgtcgtcttcgacctcgacaatactctccggttcttccattgcgagtgccgcttcaatagggattcgccgagccttttcaggcatgccaa

SEQ ID NO: 314626 - DNA, 182 bp, Zea mays
cccacgcgtccgcccacgcgtccgcccacgcgtccggtcgcctccctttccccttccctccctccctctccccgcgggccgccagaggcaatttcgccctcgattcgaccccgattcgtccgcccgcgaccgggattccctccgccaagcgcggatctgaacgctgcgctccgtgtcgccgc

SEQ ID NO: 314627 - DNA, 204 bp, Zea mays
cccgggccgacccacacgtccaagctcccactcctcccttcctcgcttcccaatctccaaacctctcacttgcacgggagcacgtacagccgtacaggcggagccaaagcgatcggcgccgcggcggcaagacgtcgtcggcggcgacgatgacgtggcacgaggacctggccactcacgtggggaacacgggcgttcgcctcc

SEQ ID NO: 314628 - DNA, 262 bp, Zea mays
ggttgccctggcggtactagtctagaagtcccgggccgacccaaacgtcaggcccggggcaacaagcgaaccgacggcggcgatggggatcggtgagcacttcgagggcgtcaagcagcactgggcgagcaacttcgccttcctcgactacttcaagaaggtctacggccgcgccgagcccctccccaagtggtccgacgccgacgtcgacgagttcatcgcatccgacccggtctacgggccccagctcaaggccctgcgg

SEQ ID NO: 314629 - DNA, 75 bp, Zea mays
cccacgcgtccgcccacgcatccgaggtcgcatggccggaagcgtgtgatatatctacatctcagtgatggtcaa

SEQ ID NO: 314630 - DNA, 221 bp, Zea mays
aacgtcaggcttctgcttgctctggggggaaggagagagagagagcgagagagatctagtagagaggctagctaggtggtcctcgaacgaagatgttggcggtgttcagcgggcaggtggtggaggtgccggcggagctggtggcggcgggcagccggacgccgtcgcccaagacgaaggcgtcgcagctggtggggcgcttcctggccgcctccgagccg

SEQ ID NO: 314631 - DNA, 112 bp, Zea mays
cgtcgattcctttggaagggcagagcttactgttctgaactcagttgcagagtttcattaactttttcaaatgtgactaaagataataaagcaactgaactggtagttacct

SEQ ID NO: 314632 - DNA, 196 bp, Zea mays
aggcaaacgtcaacgtacgcatagatgtatgcatccgcggattcaatctgcgagatcactttgggcccaacaggaaggagtttagagtcactcctccgtccggtgggagaatgggagtcctcaggtacgatatgatatccatttcgaaggtatacattgatcaagaaggcctcatccattgctgggtttcgtttgt

SEQ ID NO: 314633 - DNA, 233 bp, Zea mays
ccgggccgacccacacgtcaggaatagattaaaattattctgtctttttttcatgttcttctgtgggtcagtcttcttagagaacttcgtgatctgagagacagctcctgttgtatgcagtactccgttcaaatttcaatttattctgtcttttttccctaaaaacatggaagcttaaaaaaacacatcttgttaaaaacctataagattttcccaataaaaaagggcggccg

SEQ ID NO: 314634 - DNA, 183 bp, Zea mays
  unsure (1)..(183): unsure at all n locations
gcagcttctgcttgctctggggggaaggagagagagagagcgagagagatctagtagagaggctagctaggtggtcctcgaacgaagatgttggcggtgttcagcgggcaggtggtggaggtgccggcgngagctggtggcggcgggcagccggacgccgtcgcccaagacgaaggcgtcgca

SEQ ID NO: 314635 - DNA, 206 bp, Zea mays
gtcagtgtcaccacgggatcctagcacatcctccactggctaagggaccattagggttttgtggaggggcgatggcggcggctgatgtggagtaccgttgcttcgtcggcgggcttgcctgggccaccagcaacgagtcgctggagaatgccttcgcctcctacggcgagatcctcgactccaaggtcatcaccgaccgggagacg

SEQ ID NO: 314636 - DNA, 87 bp, Zea mays
agactctaagactgtgtgtcagtgtgttcgagtttgttccgtgcagagagtgcacgtcaactccgctttaattaatctgcttttgtt

SEQ ID NO: 314637 - DNA, 207 bp, Zea mays
caattaactagcttcttctagctctagctaggctcgtctgctgcaagaaggtaacagcgcaggcatggaggggaaggaggaggacgtccgcctgggcgccaacaagttctcggagcgccagcccatcggcacggcggcgcagggcacggacgacaaggactacaaggagcccccgccggcgccgctcttcgagcccggggagctcaa

SEQ ID NO: 314638 - DNA, 218 bp, Zea mays
aacgtcagtgcttgttccgagcagaataaatttctggcgagtaccatcgaagagtgactttgaacgaagtgattcgacacagtaaaaaaaaaaaaaaaaaaaaaaaaaaaaaaaaaaaaaaaaaaaaaaaaaaaaaaaaaaaaaaagaaaaaaaaagggggggggcgctaaaggggataaacttaaatgtacgtgaaaatgagatgaaagagctccta

SEQ ID NO: 314639 - DNA, 138 bp, Zea mays
ctcacacgtcaggtccacgcatatgtcgcgacgccacggtagtgcacattgacggagtcagttagagtgggaaccctgcgagtcgcgctcgactggggtgtggtcagtctcggtcactctgctctatgctctggacct

SEQ ID NO: 314640 - DNA, 182 bp, Zea mays
acggagcacgacgcacgcagagccgcagagatccgtcacactgcaagttttgaaaactgaactgtaagatggcatcagcagagctttcccgtgaggaaaatgtgtacatggcgaagctcgccgagcaggcagagaggtacgaggaaatggttgagttcatggagaaggtagcgaaaactgtt

SEQ ID NO: 314641 - DNA, 213 bp, Zea mays
agcccacgcgtccgcttcctcaagggcaacttttatcgattctttgaagggtcatgtatgctcacattgcaggagtagtaaactactgtgttcctgccggcgacgcttatcaaaaggctcttgaacttgcgcgggagataaaccagaaagtaagaaaccgctgaacagcctacatgctttattttgacagaagaatcagcaaagttattcgcc

SEQ ID NO: 314642 - DNA, 263 bp, Zea mays
tttttttttttttttttttttttttttttttgtttgttttttttttttgttttttttttttttttttttttttttttttttttttttttttttttttttttttttgttgtttttttttttttgttgtttgttttttttttttgttttttatttttttttttttttttttttttttttttttttttttattttttttttttttgtttttttgtttttttgtttttttgttttgttttttttttttttttttttttttttttttt

SEQ ID NO: 314643 - DNA, 208 bp, Zea mays
ggtaaaggtcccgacgacgcggtatcgccgtatacccgcctcaagtacaaagggaaagctgcgactcgctcggaagtggggtactgtacttcccgctcgctcgctctctgctctggtccttcacgctctaaccttcagttgaggttctctaatcgggcccgctaaagtcgagagacagccaaaggtcgcgttcttttggacctgctct

SEQ ID NO: 314644 - DNA, 152 bp, Zea mays
gaaacaaccacaatcttcttcatcgcgtggtcgctcgacatcgagcgcgtcacgagtacgacgctctacgccatctccaaggcaaggttcaccctggagctggtccgcattcaggtcaatctccacgggattaactccgttgaggttggcct

SEQ ID NO: 314645 - DNA, 223 bp, Zea mays
aaaaaaaaaaaaaaaaaaaaaaaaaaaaaaaaaaaaaaaaaaaaaaaaaaaaaaaaaaaaataaaagggaagaaaaaaaaaaatgataaataaaaaagagggaggggttgaaggggtgttaatggattgagattggtggtgggtgtttggtgagtgtttggggggtttttgttgggttttttttggttgtttttttttttttgtgtgtgtttttttttttttt

SEQ ID NO: 314646 - DNA, 184 bp, Zea mays
cccacgcgtccgcgcgggcggacaaggagcaggcggaggaggagctgtgccaagccacaatgggtatctcgcgtgactcgatgcacaagcgccgggccaccggtggaaagcagaaggcctggaggaagaagcgaaagtatgagcttggtcgccagccagccaacaccaagttgtcaagcaataa

SEQ ID NO: 314647 - DNA, 218 bp, Zea mays
ctcactcacagtcgccgccgctgcccagtgcccactgctcgccgctagaggaatctgagagagagaggggaaagggcgaaggaggcgcaggcaggcatgggctccccttcctccctccccgccgcggcggcgctcgtgctcctggccctgctcgccggagcccagtgccgcgaggcccagttcgacgccgcggacgccggcgcggagaacttcaacac

SEQ ID NO: 314648 - DNA, 176 bp, Zea mays
ccccgctccgcctccactcctcgcgccgctgccgcatctcctctacaggtaataaggagagaaatttggcgatctggtgcaacacaggaatcgtcagtcgcgaacgggcacttcaggaagcactggcagggactatgtcaagacatggttcaaccagcccgccctcaagcaggggc

SEQ ID NO: 314649 - DNA, 179 bp, Zea mays
gtatgtactaatcaactatatatatatatatatatatatatatagtagtcatgatatacagcaggtctgcctctcaaattaaatatgtacataataacgataacaacatctagcagtaatgttatggcgaaaattatggtccaggattagaatttgctacctaaagtccatatggggct

SEQ ID NO: 314650 - DNA, 185 bp, Zea mays
cgcctctgaccagttcggtaccgccggatcgtcagcgtcactccccgcctcctctccccaatgacagtaggtttcacctcggaatggcggatcatgctaaccaatgtcactgtccttcagtaagcacggatcgccagattccattctggcgctcgagtcacactcgtgcaaggatgtggcggtgc

SEQ ID NO: 314651 - DNA, 215 bp, Zea mays
aaaaaaaaaaaaaaaaaaaaaaaaaaaaaaaaaaaaaaacaaaaaaaaaagaaagtagaccaaaatgaatagaaggctgaattatacgtacgggggcatatgtttcctcggtttcaatgtgtccggtcttcaattgagtgaccgtctttctattttgtcttgatcgtgttccctcttgcttttcgctgtcttcttgcctttctgcgacttccccg

SEQ ID NO: 314652 - DNA, 182 bp, Zea mays
ggcatctagcatcaccactggcgtgaacagcaacactgaaagcagcacaagcattgagatctcaggcgctgctgcagcctctacctcgatgaccgctactaccgcagatacccaccgtgggtaccctatcacccgtgacccaaaacactaagaaccatgatgaagggttcgtatatcagggc

SEQ ID NO: 314653 - DNA, 184 bp, Zea mays
agctctgtcttcccgatctcttctctctctctcgtctcccacatctccagcccttcgccctcttctcggcccgaccttgacggtgttccaccatctcctaccctcttcttttcccgcccgcgccatccctttctccgctgtagccactgcaagccccgcgcgacgcacacggcagtggtccacg

SEQ ID NO: 314654 - DNA, 119 bp, Zea mays
catgaactcaaaaataaaccaaacaaacagccaaaaggacatggccggctctccgtctcctctctctctcacacacacctctttttgtttgcaaactgtgttacgcatgcgctgcaggc

SEQ ID NO: 314655 - DNA, 206 bp, Zea mays
actcactcactcacagtcgccgccgctgcccagtgcccactgctcgccgctagaggaatctgagagagagaggggaaagggcgaaggaggcgcaggcaggcatgggctccccttcctccctccccgccgcggcggcgctcgtgctcctggccctgctcgccggagcccagtgccgcgaggcccagttcgacgccgcggacgccggc

SEQ ID NO: 314656 - DNA, 200 bp, Zea mays
cccacgcgtccgcccacgcgtccgcccacgcgtccgcccacgcgtccgcggacgcgtgggtgggttggcttctcctccccctccggttcgggttcgggttcgtgaggttctccggggttcggtttcgtgggtgagcggatcgagatggcggcgtcggatgttgagtaccgctgcttcgtcggcggcctcgcctgggccac

SEQ ID NO: 314657 - DNA, 178 bp, Zea mays
gcagcttctgcttgctctggggggaaggagagagagagagcgagagagatctagtagagaggctagctaggtggtcctcgaacgaagatgttggcggtgttcagcgggcaggtggtggaggtgccggcggagctggtggcggcgggcagccggacgccgtcgcccaagacgaaggcgt

SEQ ID NO: 314658 - DNA, 178 bp, Zea mays
ctctgttcgacatgcattagctccgtacctggagtacagaggaatcttcagcgttgccctcatctcctgagagcactccttcagatgctggaaaaacattgtgattcgatctcccagagattatcacctgagcagaatggttaaatcgtccagttagcagcctttgatgccgcatttg

SEQ ID NO: 314659 - DNA, 179 bp, Zea mays
cggacgcgtgggtgcgcctccatttcggcctctgtcccttgcaagttcaatctcacctccaaccatgggtaaagagaagtcccacatcaacattgtggttattggccacgttgactctggcaagtcgaccaccacaggacacctgatctacaagcttggaggcattgacaagcgtgtga

SEQ ID NO: 314660 - DNA, 176 bp, Zea mays
cgagcgagcgagcgagccaccgcccgagagagagagagagggagagggagagtggggattcaagtttcaaactcactatcgaggggggataggaaggtggtcactcatcggtccacagctagctcgtcgccccccatggctgactggggccccgtggtgatcgcgacggtgctgtt

SEQ ID NO: 314661 - DNA, 179 bp, Zea mays
aagcaacaaggcagcagcacaagcaagaaccacacctcctcccttcgcctgtgatcatgtcgtcttgctgcggcggcaagtgcgggtgcggctccagctgctcctgcggcagcggatgcaacggctgcggtatgtaccctgacgtggagaccgccgccaccagcagcgtcaagaccacg

SEQ ID NO: 314662 - DNA, 121 bp, Zea mays
gggtcaaaccaaacttccgatactacgtgcatgcccttgactatcggtatctatgatgaaccactcacaccatcgaacaggtatctcgcggtcaacacgatcgggcgagcagggacggcgg

SEQ ID NO: 314663 - DNA, 198 bp, Zea mays
cagataaggaagaggaggagggcaggatgtcgcaccgtaagttcgagcacccgaggcacggctccctcggcttccttcccaggaagcgctcctcccgtcaccgcggcaaggtgaagtcattccctagggatgaccccaagaagccttgccatctcactgccttccttggctacaaggctggcatgactcacattgtcc

SEQ ID NO: 314664 - DNA, 181 bp, Zea mays
aagcaacaaggcagcagcacaagcaagaaccacacctcctcccttcgcctgtgatcatgtcgtcttgctgcggcggcaagtgcgggtgcggctccagctgctcctgcggcagcggatgcaacggctggcggtatgtaccctgacgtggagaccgccgccaccagcagcgtcaagaccacgg

SEQ ID NO: 314665 - DNA, 195 bp, Zea mays
gacccctggttggttttagtgattaatgacaacgtaatattatatgcgactaacgtgtgttttgcagagacaaatggtaagttaggtcgcatgacaggtagaagtactacaacggtgaaaacaatcccggagataagaactcgaagcgacggctaaaacgacggaacaaaaggtgaaggtctacggagtccgaga

SEQ ID NO: 314666 - DNA, 180 bp, Zea mays
ccccgctccgcctccactcctcgcgccgctgccgcatctcctctacaggtaagaaggagagaaagagggcgaaatggtgaagcacaacaacgtcatccccaacgggcacttcaagaagcactggcaggaactatgtcaagacatggttcaaccagcccgcccgcaagcagaggcgccgca

SEQ ID NO: 314667 - DNA, 177 bp, Zea mays
gtccaccgcgccaaccccaacaagcaccaccagccactcgaggcaccgaatcacgatggagcccgcgggcacgatcgtgttcgcctccgtcggcgtcaccaacttcggcttcgacgtgttctctgcaaccgtccctgcggcaacgtccgtggaggcaggcgtctccgcggaggacct

SEQ ID NO: 314668 - DNA, 198 bp, Zea mays
cgagaagagcggcggcgcgggcggacaaggagcaggcggaggaggagctgtgccaagccacaatgggtatctcacgcgactcgatgcacaagcgccgtgccaccggtggaaagcagaaggcctggaggaagaagcgaaagtatgagcttggtcgccagccggccaacaccaagttgtcaagcaataagacagtgagga

SEQ ID NO: 314669 - DNA, 198 bp, Zea mays
cggacgcgtgggacaaggcagcagcacaagcaagaaccacacctcctcccttcgcctgtgatcatgtcgtcttgctgcggcggcaagtgcgggtgcggctccagctgctcctgcggcagcggatgcaacggctgcggtatgtaccctgacgtggagaccgccgccaccagcagcgtcaagaccacggtcctcgccgcg

SEQ ID NO: 314670 - DNA, 177 bp, Zea mays
cttctcctccccctcttaccaagtcctcctcgggttagggttccttagggttttgtggaggggcgatggcggcggctgatgtggagtaccgttgcttcgtcggcgggcttgcctgggccaccagcaacgagtcgctggagaatgccttcgcctcctacggcgagatcctcgactcca

SEQ ID NO: 314671 - DNA, 179 bp, Zea mays
aagaccaccccctttttctgcttaatatataatggggcgtagttttcatgcgttttcgagaaaaaaaataaactaaagcattggcccaccacctcgacgctcatgcgagctctctctgtccctcagtattctcttctccacgtccattggtacgggttcaaagtctgcatcttcatcga

SEQ ID NO: 314672 - DNA, 200 bp, Zea mays
acccacgcgtccgcggacgcgtgggtcggacgcgtggggcgctgcgtccccatccagaaccatcctccgctcgacaccttctctggcagatagcgtcgtcgtgtttaccgcatccgttgctcaccatggcgtcgtagttgttgccggacccattgccaccagatggtcacgacctcttcatagcttcactccgtccatgg

SEQ ID NO: 314673 - DNA, 202 bp, Zea mays
accaccgtcactcaacacagcacaggcagctcgagagagagagagagagaaagatgtcgtggttcgggcaccaccaccacaaccagccggctcccccggcgtcgggccccaaccaggtgttcaagatcttctgccgcgccaacgagaactactgcctggccgtccgcgacggcgccgtcgtgctggccccggtcaaccccaa

SEQ ID NO: 314674 - DNA, 198 bp, Zea mays
cccacgcgtccggaccaattagctagcttcttctagctctagctaggctcgtctgctgcaagaaggtaacagtaacagcaggcatggaggggaaggaggaggacgtccgcctgggcgccaacaagttctcggagcgccagcccatcggcacggcggcgcagggcacggacgacaaggactacaaggagcccccgccgg

SEQ ID NO: 314675 - DNA, 52 bp, Zea mays
gggtcaacccacacgtccgctcgatctttcgaccgggcggccgtcctagggg

SEQ ID NO: 314676 - DNA, 196 bp, Zea mays
tctccctctctcgctggtgcgagagcgcgcgcgcaagcaagcaagcaagcaaggagcgtcgtgtctagctagctgagcacctggttttggagcatggaggacaacggtgccgccgccgccgccgccgctcccgcgacgagcatgcctgccgagaagcgtgtggcggtcatccagggggacgcgccgccggagccgg

SEQ ID NO: 314677 - DNA, 316 bp, Zea mays
aggcaccacacctcttcctcctcttcctcctcctagcacagctagcgcctgctccccttcgtctgtgatcatgtcttgcagcagcggcaagtgcaactgcggctccagctgctcctgcggcagctcatgcaactgcatgtcccctgacgtggagaccgccgccgccagcagcatcaagaccatggtcctcgctgcgccgaccaccaaggccagcgccggcggcttcgaggcggccaccgagggcggcggctgcgactgcaacacctgcaactgcggcaccagctgcggctgctcctgctgcagctgcaactgagcc

SEQ ID NO: 314678 - DNA, 149 bp, Zea mays
cacgcatccgaaacactgcaacagcgctgtgcaggcgtttcagctcgtgccttctctccaggctcaatgcaaacatcatgtggatgatagtgcacgtcgctactcccattcccatttaggacgcggaggccatatcgacagatgaggtc

SEQ ID NO: 314679 - DNA, 295 bp, Zea mays
actggacagcggcggaggcgccgttgcggaggatgcatccctggagtgtgacgcttgatgccatatgtgagacagtgtttgcgaagcagtggacaagtgatgcagctctcaggacttagatttaatctcaccgcacgaaatttcacggtcgcaattcacagtccatatcccacatgatacattggtgactactacacatcgtagagcatctctacatactcatgagcctcaccccataactgagttgtcaactcacacagtgttgtcatccagcaaatcttccttccaaaagatc

SEQ ID NO: 314680 - DNA, 205 bp, Zea mays
cattaccgggttcttattcattgcaagttgtacattcaaaacaattggcatagaagtcagtttggaatcgtgtgggtctaatgcggcaagcgtagcaatgtcaaatagccggaccacgtcagcaattagtttttcaaggatacaaatcagcaacacatgacgactgatgcttcccgcaagagtacatgatctccaggacatatct

SEQ ID NO: 314681 - DNA, 240 bp, Zea mays
gcgtctgagggccagtcgacctctctgctcgccatcaatggtcgccgtagcggcaggtttggctgcctacatggcggtgctgcgggcagcgccgcggacattcgagggcgaccagctgatgctgaacgactctgcggtggagatctggctccgctttgatgaccaacgatggtctaacgccatgctccaaccatgcaccgcctgcactcgccgacgcccgctaagtagcacacttcatca

SEQ ID NO: 314682 - DNA, 257 bp, Zea mays
acacgatggagacggtgagaccgctgcccatgcactggagctgggtgaagtcacgcaggttcctatgcacgtgtccagcgtgttgtaggtggagcccatgcacgtgtccagcgtgttgccctgcaggacaaacatggcctcgttgccaattggcaacccatgaagttggccatgcagacagtgacctaggtcgggtcaaagcagcagggcctggatgtgctcgtgcatgggtacgcacgctgcgctgagccaccaat

SEQ ID NO: 314683 - DNA, 194 bp, Zea mays
gggactccggcgtcgacgcacgcgaacgggctgactggtgctaggccgacgatctgtagatgacggatacggtgcagatcgggaacatgttctagtttctggcgtttacctcacttagacctcttacctggcgccaatggcaagtcttcaggagactctgtgcactatggagctcctggtgcggaaggaggtcc

SEQ ID NO: 314684 - DNA, 96 bp, Zea mays
gaggaaatgagcataccgcaagcaggttgtcccatcgcgctctcacacctccacagtgcctctcgatcaactccgtcatgtgtgtgctcagttcgg

SEQ ID NO: 314685 - DNA, 199 bp, Zea mays
ggggaaacaagaggttactccacattcgtgtgccacgcagcgcaccgactaaaccagcgggtcttgtctcgtaggacgcaccatgaccatcaggacttcaagccaccaccaaaggggccttctaggcctgcagaagaagatgtgcgcttaaacaaatccccgtttaaacgggagccagtgaatgcaatggatgggaaac

SEQ ID NO: 314686 - DNA, 185 bp, Zea mays
cccaatcgtctgcccactcgtccacgctggtcatgtgttcagcgccatgggcatccaatgtagatatgagaccgtcatcgtgtggaaaagaagattatatggtcatgtccgctttgatgctctagtggcctctggaggcatgtgtgggctgtcaacgttcacccatgtggaacacgtctgcagaa

SEQ ID NO: 314687 - DNA, 257 bp, Zea mays
gacagcagcttctgcttgctctggggggaaggagagagagagagcgagagagagagagagatctagtagagaggctagtaggtggtcctcgaacgaagatgttggcggtgttcagcgggcaggtggtggaggtgccggcggagctggtggcggcgggcagccggacgccgtcgcccaagacgaaggcgtcgcagctcgtggggcgcttcctggccgcgtccgagccggccgtgtccgtgcagctcggcgaccacggc

SEQ ID NO: 314688 - DNA, 153 bp, Zea mays
ggtcgatcaggagtccgcaggaaaggagatgagcagttcactcaggaaggcagcctcccttgccactccttttccttgagatgacgattacgagcgatgaagatgcatcagcagctcctggtcatcgtttctctcatgtttctcgttgcggtg

SEQ ID NO: 314689 - DNA, 252 bp, Zea mays
cccacgcgtccgcggacgcgtggagacgacttgtttcattgattcttgaagagatcgagcttcttttgcaccacaaggtcgaggatgtcttgcaactgcggatcaagctgcagcagcagctcaagctgcaagtgcggcaagaagtaccctgacctggaggagacgagcaccgccgcgcaggccaccgtcgtcctcggcgtggccccggagaagaaggccgcgcccgagttcgtcgaggccgcggcggagtcc

SEQ ID NO: 314690 - DNA, 311 bp, Zea mays
tataaatacgcgccaccgcgtaaaccgcgaagaaaaagtaaaagggaggaaaagggtccggtgcggcgacgatggagaggggcggcggcggcggcggggacgagatgatgatgacctcgggcgcgacgggccggatcgtgccggtgttccgctccgtgctgtcgcggcgcgcgctgctccgcgtcgctgtggcgctgcactcgctcttcctctggctgctgctcctcgcccgcggcctccgccggcaccgggcggggaccggcgccgacgcctcggcgtcagaggcgggggctggggccgggacctggagc

SEQ ID NO: 314691 - DNA, 244 bp, Zea mays
cagctctcatctcgcaaccgcagctagttacaattcagagagaagaaagagaccgatatctcgccgatagctatcatcatggcgtccaatgcgctcctcgtgctaacgctcctgctcgccgccaccttcctcgccgcctccgctaacttccaatccaaggcggacacataggagaataacgtagcggtcctttactggcatcgcggtttcagcctaccggtttaaggaagcttacgaggcggat

SEQ ID NO: 314692 - DNA, 98 bp, Zea mays
aaaaaaaaaaaaaaaaaaaaaaaaaaaaaaaaaaaaaaaaaaaaaaaaaaaaaaaaaaaaaaaaaaaaaaaaaaaaaaaaaaaaaaaaaaaaaaaaaa

SEQ ID NO: 314693 - DNA, 281 bp, Zea mays
acacctgtgatcacaaaatggtccgcatattatgcaacgactgcagggcaggatcagatttgcatgtccatttagatgcggagcattaaggtccgctgacgtgccggcttacctgaagccgcgcttgacctgagacaacgtccagaagagcgcctaccatgccgtcgaccgctacatctagaagtacatcgacacgagctcgccggatcctctctatcaggtctgcatcgcgatggatgatcttctcctacttcgtcaatctgccctgggagcgcgctcac

SEQ ID NO: 314694 - DNA, 102 bp, Zea mays
actcgtgggccaatacaagacccaagactgagtcgtactatctgcttttcattattctcagctaattcttagaaatgaagtattggtttgttattgtgagtc

SEQ ID NO: 314695 - DNA, 362 bp, Zea mays
acgcgtggtccgacgcacgcgtcaagacaactctgtctgactcctgtgatcaagcgatagaccccggagccgacagaccatgcagccatggcgctgcgtgccctgtacaacgagatccggagcatgaaggtccgctgacgtgccggcttacctgaagccgcgcttgacctgggacaacgtcaagaagagcgccgaccatgccgtcgaccgctacatcgagaagtacatcgacacgagctcgccggatcctctctagcacgtctgcatcggatggatgatcatctcctacttcgtcaatctgccctgcgagcgcgctcacctcgcccatctctaggacatggacaggacccgtgggaagcact

SEQ ID NO: 314696 - DNA, 352 bp, Zea mays
cgggccgacccacgcgtcaactacctctcccatctcaggctcccaccccccactgccttctagaaccttccgccgtccgcgatgccgacaccgcctctgcggaagaagcgcctggtccgcgcaggcctcctcgccgccgcggccggttacttcgccttcgtcctcctcttcgagctacccctgctaccctttctggcgtcgtcccccgccgccaccacctcctcctcgctccccttccagcacccgcgccggcgggagctggaggccgcggcggcggcgttcacgtccccgttctcgcccgcccgcccctccaagcgggccttctccgccgccgccgccgcagcgggcccgg

SEQ ID NO: 314697 - DNA, 292 bp, Zea mays
aatgcgtccgcgccgcgcgcacacaagcacaagtggattgtggcttgtctagtgttcttccggtacagtcaaacagatatggacgctcctgcggcggaggcccaaggttgcggcggctcgcagatcgtgctcatccacggcgcgtgcctgggcagctggtcctggttcacggtggccccggcgctcagcgctgcggggtaccgcaaggacacgccggacctttcggcgtctggcgtggacccttcggtcactgccggaggtgccgacgttccgggaatacacggggccgctg

SEQ ID NO: 314698 - DNA, 131 bp, Zea mays
aagcctgttcgggaggtcataggtggctgtgcaggctgttcactatggagcttcacggccatactatggcatccagactacacttaacgagcaggggtgcggcgtattaatcgtcaagttctcgggggatg

SEQ ID NO: 314699 - DNA, 141 bp, Zea mays
acttcgtcgtcctcctcctccgtagcacagctagcgcctgctcaccttcgcctgtgatcatgtcatgcagcaacggcaagtgcgactgtggcgccagctgctcctgcggcagctcatgcaagtgcatgtcacctaacgtgg

SEQ ID NO: 314700 - DNA, 58 bp, Zea mays
aaaaaaaaatcaaaaaaaaaaaaaaaaaaaaaaaaaaaaaaaaaaaaaaaaaaaaaaa

SEQ ID NO: 314701 - DNA, 181 bp, Zea mays
agcccacgcgtccgcgggaccccttggccccattgttaataaattgcattaccaacaccaattgtgcacataaaatttggcgcattatatgcaatttgccaaggacattacaaccaaaattgaaaaaaaccttggtgtgacggtaacagataatgggaacccagaggtaaaaccaccacct

SEQ ID NO: 314702 - DNA, 79 bp, Zea mays
aaaatggatcctgcacatttttttcgttagggtgtatcagtagttctgtacaatatgtttttaatgagaccattcggcc

SEQ ID NO: 314703 - DNA, 185 bp, Zea mays
atcaaattctgatagtactattctgaacttcccatttgtggttaaaaaaaaaaaaaaaaaaaaaaaaaaaaaaaaaaaaaaaaaaaaaaaaaaaaaaaaaaaaaaaaaaaaaaaaaggctgcccccccaaagggttcaagcttacattacccttcatgctaagtccaatcccctccaaaatgttc

SEQ ID NO: 314704 - DNA, 418 bp, Zea mays
agcaattagctagcttcttctagctctagctaggctcgtctgctgcaagaaggtaacagtaacagcaggcatggaggggaaggaggaggacgtccgcctgggcgccaacaagttctcggagcgccagcccatcggcacggcggcgcagggcacggacgacaaggactacaaggagcccccgccggcgccgctcttcgagcccggggagctcaagtcctggtccttctaccgcgccggcatcgccgagttcgtcgccaccttcctcttcctctacatctccatcctcaccgtcatgggcgtctccaagtccacctccaagtgcgccaccgtcggcatccagggcatcgcctggtccttcggcggcatgatcttcgccctcgtctactgcaccgccggcatctccggcgggcacatcaac

SEQ ID NO: 314705 - DNA, 246 bp, Zea mays
cacgcgtcaggagacttcatccattcgcggtgtgcctctctgcttgactgtctcaaatttccactaagactgccatggcggaccagcgcagcaagcaggatcttccccagttgaagggtgtattcagtctctacgtttttgatagacaacgcagcatcgtcatgagtgcagttgtcatcgtcaggcactgattcgagtgaagatttcgaggagctcagcctcaggacctcatcccgcacgttgatg

SEQ ID NO: 314706 - DNA, 267 bp, Zea mays
ctctatagtgaaacatattaatcgtccgtgtagtgcttgcgctacacaagatacaaggctgaccaacaccaatggcagccgcctactcatctccagttttccagatgctcctgctcgcagccttagctggtattatcacgaacacagcgaccttcatcatcacgaacatctgctggttcaccgtgtggcacctggacacactcggtggtcagcggcacccagctcatgccggtcgggaccttgacggtcaacgtgccggctggcaac

SEQ ID NO: 314707 - DNA, 383 bp, Zea mays
actcgcgggccgacacaagcctcaacacacgcgttctggaacactgcctcgccaagatagccgaggccggccgctcgtcggagggagccaagtcgccgatctcgctcgtctcccgccactcccgccgctcctcctcgtcctccgaagatggcagcgtgaagtccgcggggagcaagaaggtggatccaaggtgcccgaacgctggcaatctgttccatgaatgcggtgagcattgcgccgccaagatgcagcggtcggagcagcagcagaagggggtcaatctcaagtcaccgcgcaggaaaggggggaagaacgctacagcgatcccaaagtggaacgttgatccgaggtgccctaacgcgtccaatccggtccacatgtgc

SEQ ID NO: 314708 - DNA, 223 bp, Zea mays
aatgcgcgggaggatggtacacctgtatggtcaccagtggagatagactacttcctgaatggtactcagataggggcattcaagtgatcttacctggtgatattgtcacagccgaccttgcttccgtacactggacagtgcatctgccgacagcttcacatatgagaccccactcggtgctacgggtgccacgctcatcgggcacgccgtcgtgggtgctgaa

SEQ ID NO: 314709 - DNA, 224 bp, Zea mays
cgggtcgatacaagcctctaaattaagtcataataattgggccgtcgggagaacatctgcacgcgggaccgggcaacatttcccgctgctgccaacaagcaaaaggggcgacgatatataaccaactgcagccgttactggattcggcaacctcctcgattgggaagtcagaccatagatggggttccacctgctggcgttcgtggctgccacgggcctcatgc

SEQ ID NO: 314710 - DNA, 300 bp, Zea mays
ctccggtcctcatcaatcactaagcaaaacacacttgcaagatggagctggtctcgaagacacatctccttgcggttctggtgtccgtgtcgtctggagctgtggtaatgtgacccgcgatccaattcaacgagcgggacatgtgcgtcagacgaggctctgtgggacgtgttcaagcggtggcaaacggactgacacgatgaaacagggtcacagttaaatgggcatgcggttcaggacgtacatggagatcattggcttgaacttggcgcaagagcaaactacgtcatgctggaactg

SEQ ID NO: 314711 - DNA, 364 bp, Zea mays
gtgggtcgatacaagactctagactgagtcgtaatatggaggtaccacgactgacgactacatggcggtcagcagcatcaattcgtcttcgacctcgagttcagagcagcgggtaacaattggagccctgctcgtggtcgtgtccgtcatggtggtgggcgcggccgtggtgtccgacatgatcatctaacacttcatgttctgccagaccacggctgacatagagatggggatgccagtcgccccgtcgcacgtgttctgcaacttcctggtcagggcggatctcaagtgcctgtgcggctacaacatctcgacgtggatgggcctctacaacatcgaccccaagctcgctatggagcttccg

SEQ ID NO: 314712 - DNA, 343 bp, Zea mays
agtgtaattcctggaacacgcccaagtcatgcatcccaagacagacgtgtactaatgcttcccccatctgaagaagtataaggcctgaacttagcacccagtgctggtttggtcacgacgatctggccacggggcgttccttgtgttgagggtgtacattccgtgttaacttccagtcagtcatgcgtcctgtcctatgttaacctacataacaaagtcatgtgctgtccacttctaatgaacctactgtctgcagtgaacacctgtttggtttcataacgatgaatttcgtgtgcacaacacattactggtccgtgggaattgggccaatttgcattgtctt

SEQ ID NO: 314713 - DNA, 335 bp, Zea mays
tgagtcgtattagtctgtcgcgactatccttgctccctacagtggcggaagcagatattacgcgcgctcaaaaagatacctgcttaggttatcttatgaggaatgcctcttcgggaggatacattgcgcgaaacggcactttgcagtcgtcgatggaatgggtggtcaatgagaagctcctggccgtcaggaccctgtggctcatcggcatcatcggctttatcacctacggtctggtctacgcctgggatcataacgatcgtgaatctcatcaatgcgcatgctgtatgctcacgctcgtcacctcgctgttgtggctcagtacgcgctggtgg

SEQ ID NO: 314714 - DNA, 103 bp, Zea mays
  unsure (1)..(103): unsure at all n locations
aggganggggagacgcacgcgagacgtcacgggagcagtgcatagcattgcctgagatctccattgctggccagacgccgatccgccgcgaggctcccgggaa

SEQ ID NO: 314715 - DNA, 400 bp, Zea mays
cgggtcgacacaagcctctagaatgagtgcatcatacacaagcaagaaccacacctcctcccttcgcctgtgatcatgtcgtcttgctgcggcggcaagtgcgggtgcggctccagctgctcctgcggcagcggatgcaacggctgcggtatgtaccctgacgtggagaccgccgccaccagcagcgtcaagaccacggtcctcgccgcgccgaccaccaaggccagcgccggcggcttcgaggcggccaccgagggcggcggctgcgactgcaacacctgcaagtgcggcaccagctgcggctgctcctgctgcagctgcaactgagctggcccggcccggcgatggcgcacgagagtcgagaggaggaggacgacgacgaggcgtataaatataatag

SEQ ID NO: 314716 - DNA, 368 bp, Zea mays
attcttctagctctagctaggctcgtctgctgcaagaaggtaacagcgcaggcatggaggggaaggaggaggacgtccgcctgggcgccaacaagttctcggagcgccagcccatcggcacggcggcgcagggcacggacgacaaggactacaaggagcccccgccggcgccgctcttcgagcccggggagctcaagtcctggtccttctaccgcgccggcatcgccgagttcgtcgccaccttcctcttcctctacatctccatcctcaccgtcatgggcgtctccaagtccacctccaagtgcgccaccgtcggcatccagggcatcgcctggtccttcggcggcatgatcttcgccctcgtctac

SEQ ID NO: 314717 - DNA, 375 bp, Zea mays
cgggatgctcggagggatggcggtggccgtcctcccgttggtgctccgcgggcaagcgccggtgccgggcaagtactaaccgaacccgtatcaactgatgaaccccaagcaaagaccgtggcaagttgaaggaaaaaaattcctggaacaaataagggtcctcctccgcctgttccttgggccttgccttgccctggtccgaatttcgaaagaaggaaacaatcctgcgcctgcgggcacgagacgtgctctgtacatagcaaagggtgagatatggatatggtgctggtgcggcagtgacctatatttggtgattgcatgacggggcgttcaagatgttaaattgagaagcagctgagttgtggttctagaaag

SEQ ID NO: 314718 - DNA, 203 bp, Zea mays
  unsure (1)..(203): unsure at all n locations
aganaaaaaaaaaaaaaaaaaagaaagaagaaaaaaagagaagaaaaaaaagaaagataagaaagagaaagaaatgcgacggcagaagagacaatacggcgtaaatgtcacgtgggcagtgggttaacggggacgtgaatgagaaagccgaggcgagtgggaactgagtcgttctggagtacatcgttgtgacggtagatggc

SEQ ID NO: 314719 - DNA, 204 bp, Zea mays
  unsure (1)..(204): unsure at all n locations
tgagtcgtattaaacggagggngcgctggtggcgtcgttggcgatacagcgttttttgagcatcagatgatacgtgaggagactggtgctcaaaagctatccagatggggtgatctggattcaatgtatgcgaaatcaaatcgccgaggattgacttcattgccgatgggcgcacaggtttggagattccaaggagttgtgcat

SEQ ID NO: 314720 - DNA, 359 bp, Zea mays
atctgtggataattcatgctttgtttctgattgttaagagaacaccgtcagcaggattcttttcagcaaaaccacattgtaggccacgctgcgttctgatcatcctcattatatggttcctttcaagacagccgaccttgtatttaagaagccacaggatgatggagagaaattcatagaactcttacgagcattggaagcatatgcagaaggttcctcagtaaatccaatcatcacaagagcagcgtatctttggaacaaacttaaatcatgatgacactgatgttttcagcgttgactaaacaagaattttgtcaatgctgacagtttgggttcaaagcttggtgtcgtaatgctca

SEQ ID NO: 314721 - DNA, 126 bp, Zea mays
taaaataagtcatattatgtaaaaaaaaaaaacataaatcaacaaaaaaaaacaataaaattaaacaaaaaaaattaagtggactgccgcaccatcggttcaaagcgtcgctcgtcatgtcaggct

SEQ ID NO: 314722 - DNA, 75 bp, Zea mays
ataccatttcacgtttaataccgaaaacaagccccctctcgatgtactcgtttcatatcgttctgtggttgattg

SEQ ID NO: 314723 - DNA, 243 bp, Zea mays
aaagtgcgcgggagcccaggcgtggcaacagagagtacactcctcggtcgacgcggaggccccgttcctgaaggtcccgtcagctgccggcccgtctgccgggctgcagataggagttggtcatggcgtcgaagcacacccgtgaacgagctgacggacgtgtagaaggacggctcgacatcagacactgtaggtcatgatggtgaggacatgtttaattggcacaccagacgtatgggagga

SEQ ID NO: 314724 - DNA, 207 bp, Zea mays
aaattggcgctgctgcacgcgttgtagtcttcgagcatgacacttccaaggccttaaggtcatctccgtcaactgggccaccgatctctcagcagcactacgcagcagccggtgtatcgacagcatcgtcaagggcagcaccccgggctcgtgcctcgactgaggccggcacatgattggctgctacgactcgatgtcctcggactg

SEQ ID NO: 314725 - DNA, 253 bp, Zea mays
aaacacgtgcggcgtctgtgcccgcgtctcgagcctcacggtccggatcgctctcccttccacaacattagggatcatgtcgggggccgacccctgcgagatccgatcggaggcagtcagctaaggtcaccctgatcatctatgaggctgggggtcacggggaggtccggattctcggctcgcgcatgacgcggaagcgtcggttgcttatggtcacggggccctctcgccggtggagctaggggcgccggga

SEQ ID NO: 314726 - DNA, 137 bp, Zea mays
aaacacacggaagtaaaccgtagctacttcccaagttaggtataatagtctttctgatagatgtgtcgcgatcggcctagaatgatttgttccagaagacagaggattttgctctagcacgtgcggcgatgtatgag

SEQ ID NO: 314727 - DNA, 189 bp, Zea mays
aaattcactcaattcactgaaatctcctaatcagctctcatcttacagtacacgttaaagagcatacgacactccatcatgaacagttcactgatcagcctgcggaaccgtgttcgatacctacgccgtccatctctgtgacgccattgatggcatctccttcgggtcccataacatcatcagtctcat

SEQ ID NO: 314728 - DNA, 357 bp, Zea mays
atcctcgtcttcctcatcctatcacagctagcgcctgcgccccttcatctgggatcatgtcctgcaacagcggaaatgtgcaactgcggctccaactgctcctgtccgcggcacatgcatacgcatgtcgcctgacgctgcacacggtcgccgctagcatcatcaatagcatgggccgcgctgcgccgactacgaacggcaactcctgccgcttccaggcggacatcgacggctgtggctgcgactgcaacaccgtgcaactgcggatccacctgcggctgctcgtgctgcatctgacaactgacacggctcgccctgcccggcgatggcacgcgaaactctaaaggaccaccacga

SEQ ID NO: 314729 - DNA, 70 bp, Zea mays; identical to SEQ ID NO: 76672

SEQ ID NO: 314730 - DNA, 410 bp, Zea mays
acgggtcgataacgcgtctagtatgactggagctagccatgattgtggatcttccatggtatgaaaaatgtgtctacgtctaaaaagatccgtgtgccaggatttgtgcatacacttgcactgtcagtcatcgtgaggatgaccagtctatgccaccatcgtgatgcatacagtacttcgaagtatagccagtttgctctcgcgggacacgctggacgcaacggacaacctctggcgagcttgatgtatgaatctacagctttatactgtaaatggacactatagaatcaacatgctactcagtgtgtgcaacgctaggtatgctcgtgcggcgtcatcacttagattcaatttacgcactacttaacgtgtcacacgcttccattaaccgtacctccatggggattcag

SEQ ID NO: 314731 - DNA, 308 bp, Zea mays
gtcgacacacgcgtccaggaagcaaggcgttatagaagtttctaggctccgcgcctggggccgctgatctgagtggtccctgatctaatggcgccatcactcctcggagccatgtcaagatcaccattcgtagccaacaacgggaggagtcacaggacactaggtgctgctgatacccaagaggctggacggcgcgtagacgcgcttacgtgcgagcctgacagagttgcgccgcagaatgagcgtgttctcgtccgtcgtgagcatatcgctgaaaaatctgctggcggtgtgttacaacaaaaatc

SEQ ID NO: 314732 - DNA, 71 bp, Zea mays
aaggggacctcgtcactgtcgagcgcaagagaggcgaggtcgaacgcgggtcgatggggtagtgcgaggag

SEQ ID NO: 314733 - DNA, 371 bp, Zea mays
acaagactctagactgagtcgtattaaccctgcacggctcgccgagacttcagtttaactgaagcaagcaacgcaaacttcccccccttcggccaatcttcgttccttccttcgaaagggttgcgccaaaggaacattccttcgttcggccgttccttccaacggaactccgtttggttcctccgtccccgggaagaaaagttaacggaccgtgaaaaaaaggcgttggtatattttttatgtgccacataaaactttaggaaaatatccccacccaaaggaacagcccaacgctcagcacattaacagagactcaacacaaatctctaaagccccctggagtcaacaacaggcacagttttcccccccta

SEQ ID NO: 314734 - DNA, 103 bp, Zea mays
aacgcgtgggtgtttttgtgcgccaggacgtatatttttactgagatgatactccgaagagcacgtatggtgtcttaaaaaacgaacgagggaagagagggaa

SEQ ID NO: 314735 - DNA, 372 bp, Zea mays
acacatccgcgcccgtcgaggttccacgggaagctctgccaagccctgactcacatgctgcgcgtagggccaatgttgactggttactatctatcatatcagcaatgtgtcctcgttttcgtcagatcacgtccttgtcacctccggttctaccatcaccctcattgccagagggtagtgacatgagatcattcacaccgtcatattgatgactgacgtcataactctcactgcgctgggattccgcactgcattgtctactgcggtcgcgttcactcataatcgtattactgcgcacatatatcgtgctgtcggtcttccgtgtaccatggggaagagagcacattataaaggtttccaagtgtacagttt

SEQ ID NO: 314736 - DNA, 332 bp, Zea mays
ggtcgacacacgcctctagactgactcgtatgaccacagtctccatcacccgcctgcctgagcccgctgcaacgactcagaaagcgcacgatcagcttcctgtaacggcaggggatgcagaggacccaaggaatgtgatagtaggcatgcacggcaccactttcggatctgcttctgctgatcagtgacatccggactgatctctctgacgtagctgcacgtaatcactgtgtgtacagcgatcgagttgatggctccgtgtacaaccagcacggcatcttctaccgctgcagcgatgcttcaggaatgatgtgccgtgcatgcggatacgg

SEQ ID NO: 314737 - DNA, 440 bp, Zea mays
ctcacgggccgacacaagcctcaagaggacatctgagcatcgcttctgatgaccactctaactctgtaaggttacaaagctgcagcagcagttcaacagcttgtgtaaacctgctcgctaaggctaaaaaaaaaaaaaaaaaaaaaaaaaaaaaaaaaaaaaaaaaaaaaaaaaaaaaaaaaaaaaaaaaaaaaaaaaaaaaaaaaaaaaaaaaaaaaaaaaaaaaaaaaaaaaaaaaaaaaaaagggggggccccccaaaaggttcaaacttaagttacccttaaatgaaatttaaaacccctccaaaagggccaccaaatttaatttaaggggccttcttttaaaaagtcctaaacgggaaaaacccggggttaaccaaattaaacccctttgaagaaaaaccccttttcccaaacgggggtaaaaacaaaaaggccc

SEQ ID NO: 314738 - DNA, 125 bp, Zea mays
aaaggcggctgggcatggatgacgctccctgcagttatcgccatgggagttgatttcacgggacctgtaggtgcggaaggattgggagagtttggcgcgtacgtgcagtcaggtccagccgcttc

SEQ ID NO: 314739 - DNA, 417 bp, Zea mays
catatcaagtcctcctcgggttagggttccttagggttttgtggaggggcgatggcggcggctgatgtggagtaccgttgcttcgtcggcggacttgcctgggccaccagcaacgagtcgctggagaatgccttcgcctcctacggcgagatcctcgactccaaggtcatcaccgaccgggagacggggaggtcccgcggcttcggcttcgttaccttctcctccgagaactccatgctcgacgctatcgagaacatgaacggcaaggagctcgacggccgtaacatcaccgttaaccaggcccagtcccgtggcggcggcggcggcggcggcggcggtggctactgcagcggtcgcggcggcggccgctatggttgctggcgccgtgacggcggttatggcggcggttgcggctac

SEQ ID NO: 314740 - DNA, 165 bp, Zea mays
aaacacgtgggcaattctcaggtctctcggcgacttactcgtcgatcacatcgtgcgcagtgcaacaatgaggacagggtcaactcagcgataagggtatgtttcacaggcttagtcgcattgttttagcggactaatgtggtgtgtcgaagtgcgggcaatagg

SEQ ID NO: 314741 - DNA, 392 bp, Zea mays
aaattctttcagtcaaggatctttgactattaacaagctacctgaaaaaatattagaaaacaattagaaatgaaaaaggcaaaaaaaatacataaaatacagtgaaaatttagtagaggtaacaagataacttgcttgatattttgtctgtttcaactttcaacttctcatgctggcagcctatagtatctccttgtgctcaaggtggctgatggcatcagtgtctaatgtcacattgtggacagtgttgcaaatcattggattagttttttgtataaacgtctagaatgcatcctcttggatatagtttttgttcttttttaacataagaaaggttgaggcgtgatgcttgattgattcgtttgcgtaatgtgccagaaaaagtggttttg

SEQ ID NO: 314742 - DNA, 351 bp, Zea mays
ggtcgatacacaactctacaatgagtcgtactacgcctgggatcacggattcacatccatcagcacagaatcgatcacatatgactgcatttgtccagaacctccttgggaagatgcaaacaacgttcaagtcgatgtcacatgacattgtgtcaaagataaatgatatgggaaccaatattgatgagctcgatgagagcatcaacgatctgaacgctgagatgggcaaggatactccggtcaagaagcctgatgagccaacgcctgctgacgctgcctaacatgggtgtaaccctgagattgttgtgttaggatttgataatcgtgtgacgaatttcagcaggacgtgat

SEQ ID NO: 314743 - DNA, 125 bp, Zea mays
aaagagtttgaggcaggccgcgtgcgctttcagtgggtgagctgaagcagtcagctggagaggaggaatccgcaggacttcaataagggaagtcgggaggtctgggtgaggtggccgtttcgtca

SEQ ID NO: 314744 - DNA, 182 bp, Zea mays
agacagaaccgagcgtaagctgctgaggtaatgagcgaacccattcgtgatccgggcgctcatcgcgctcatcctcaagcgccgcaactcaccgtaagccgaggagaagcacatgcagaaagtgactgatcgcgaagctcgagccttctgctaaaaaaagatggggtgcagctgcagcacca

SEQ ID NO: 314745 - DNA, 402 bp, Zea mays
ctcgcgggccgacacacgcctctagactccatccaactagttttccccaccccgcttgcgcttccatccgtgagctcatccgcccagctggaaaacaagaatcctcatgagttctagaagggaagtcgcgatctctgggtgaggtgtccgtttcctcccgttgctggatccgctgactgaccgatcggcagagccgccatggcgtcgtcgtgcatcccggccggcggcatccggctgccggacctggagatggtcaaggccgcgccgccggcgcactccgcggcgtcctccacgctctcggagtcgtccagcgcgtccgcagtctcctcgtcggccacctcgtcatcggtggcgtcgctgtcgctcaagcgcccgcgcacgccgcggaagcggtccagccag

SEQ ID NO: 314746 - DNA, 111 bp, Zea mays
aaaaagttgcgaaaaaaaaaaaaaaaaaaaaaaaaaaaaaaaggcagaagcacaaaaggataaaaaaaataaataaacatgcaagaaaaagatcaataaatcttcgggagg

SEQ ID NO: 314747 - DNA, 151 bp, Zea mays
agggcttcgactacagcatcagccatcgccatcgcgtctcctcgctttccctcgcttcctcggggccggttccgcgtcgtcgtcctcgagtgttctccgtctcgttcgggcgtgcgcgctcgcgcgggctggcgggtgccagatggggtct

SEQ ID NO: 314748 - DNA, 332 bp, Zea mays
cttaaaacccaaccgcacaagcgcgcgaggcaggagagagagagaggcggggagcaaaacaatggaggggaaagaggaggacgtgcgcctgggcgccaacaagttctcggagcgccagcccatcgggacggcggcgcagggcgccgctgacgacaaggactacaatgagcccccgccggcgccgctgttcgagcccggggagctcaactcctggtccttctaccgcgcgggcatcgccgagttcgtcgccaccttcctcttcctctacatcaccatcctcaccgtcatgggcgtctccaagtccacctccaagtgcgccaccgtccgcatcc

SEQ ID NO: 314749 - DNA, 334 bp, Zea mays
actctatagggactcaatataatcatcctccactgcctcatgatgtcacacctaacactgggacaccatctcttgtggtaatatccagcagtatcgtcacatgacattgtagatcaaacagcgcatagcgaacctcacgcacttggaaatcccctaaggtcgaggttcgtcacgtcaacaatgatcaagttacagtcctcgccgtctcacagcatattggtactacttcagaggacgatgttgccatcgaaggttgaggataccactttaataactgcacatgcggcactaccgttggttgctcctgctgaacctctgtgtcaaaccctcaagc

SEQ ID NO: 314750 - DNA, 277 bp, Zea mays
ccgggtcaatacaataccctagactgattcgtaatacgtgaatgccacctcaaagatcttctacagtatgatcgaggttatcttcagcgtcggtctgtttacatagtcgaaagagtagggaacgtcgcgtctacataacttatgcggtctagcacacaacggcatttctcgatctggcttataaggtcaggtgccagctgagattgaccctgctctcagttactcagattgaaagtgaaatgagacgtgtcctgtagcagagcattatgctcaaggg

SEQ ID NO: 314751 - DNA, 133 bp, Zea mays
aaggcatggcagcgtttgtgatcgaattcctgcttgctatctgtgctgaaacgggcgccaccgcatcgcgcgccacggggtcgtaaggcacgaagtttaagccggcgctccggaggcggctgtggtcgagcag

SEQ ID NO: 314752 - DNA, 343 bp, Zea mays
ctcgcgggtcgacacacgcctctacaattcgtcttctaaacctcgacctctatccgtccgacccttattccgcacccttctctctcgcacctccgcactcgaatgccgccggctcacaatgatcattctcgacagaagcaccggatgaaccaggatggaagatgacaccccgctcacaagaaccatcaacggtacagtcaccagcatcaccaccagggacatctggggcacagtcatcaccattatattcaaactttgattgtattgaacacaacatctcgctccctgttgtcaacacgtggcccgatacctgctgcatctatggcaccagtatcaccaccat

SEQ ID NO: 314753 - DNA, 386 bp, Zea mays
acccacgcgtccggccccctggaaccttcctgctgcctcagctacgtcccgccggagtccacggagcggccggcggcgtttgcgccggccgacctcaggcttctgctggacgggcacgacctgcccacgcgggactggctcttccgcgccatggaggagagcccccttttccgcagccggagttcgcggacgggatccagggtgttcgtggcgccggacttcaacgacggcaaggaatggcagcgggaggccaccatgcggcggatcgcgtacctgaatcggcgcggcgtgttccgcgggtggctcaccgaggacggcgctgccgccgagctccgcaaactagcgctcctcgactgcatcgccatctatgaccactctctcgccat

SEQ ID NO: 314754 - DNA, 241 bp, Zea mays
cactcgcagttgcacctgtaacagccatggtccccagcgatggctgtcacatggcgaagtctggggcggacggtcgcaatgcatgcggccctcaaaataagtcattgactcgcccctcaggccgggctgcacttcacggtcccgccgtcttcatctcatctcacaaacggccgatactcacagcgcctgtggactggctcacgcgtctacctctcacccctgctggagtagttcgccacct

SEQ ID NO: 314755 - DNA, 230 bp, Zea mays
aatcaaaatggactcactccgagtcaacatcaagcccaccgtaaccggggcctcagcgtatccatgtccatcaacctagtagagcagcccctcacacatctaccgaagctgtcgggcaacaattagccaaccaccgcgagtttgagcaaacgtgtctaggactgcctgaaaaagtatgactatctgagggacaaagtgttccgcttcctgttgaacaggttaccactgga

SEQ ID NO: 314756 - DNA, 92 bp, Zea mays
aattacgtgacccgacacaaggggggaaacttctcctcgtgcagtcctacatccagtgaggtcagtaccaccgccggccggccgcggcgcca

SEQ ID NO: 314757 - DNA, 381 bp, Zea mays
atctagatcgcgagcggccgccctttttttttttttttacactacatatgtatatggaatctatatctatgtgtaatgtgtgtccattgcagcagtaccatgtacttcagcggttcagccagctatgcttgtttgtatttgtccactaatataaatccatcaatctcctaataaccgtaacatatcattattagtcgacacgtaatgtccctacggtcggccacgtgtcgggccggccaggcgcggcaacggcgacggccttgtccgcgcgctgctgctgctgcggcttcttgtacccgcggctgctgggagacacgcgcttggactcgccccacttgtggaagtcgtcgcgttccgaaccgtcggcgtcgcactcgggga

SEQ ID NO: 314758 - DNA, 351 bp, Zea mays
ggccgacccacgagtccacggtcgcgtgggctgccactgcagcgtgctcctgtccgcgattctctacacctgtcaccgtctgtcgatccatggcgaagggaacggcacaggcatcttcgctacccacccaccaacttaccctcatgggtgtcctatccgtttccgttctcctcccgctgctcttgccgtcggcagctactgtagctgtagcgtctcctgcggggggctggaagcagttggcggtcggaaaggacgagggaagactggtcccggatggggatgctggtgaacgcgggttagtggtcgagaatgagttcgcgggtggcttcggcgccctcaacagcatgctgc

SEQ ID NO: 314759 - DNA, 256 bp, Zea mays
ggtcgatacacgcctctaaactgagtcatattatgagaggccgcattattatttgttttttcactcttgtagttctattatctttatctagactagctctatgtctattcaaaatcaaacaactcggtcaagtttacaacatgcatcagatcgtcgcacatagatacagctgcagtccagtctccatgcgtagtcgttatcgcggacccgtttgtcgaggcaactgcgggtctggatgcagccgtgccctcggaag

SEQ ID NO: 314760 - DNA, 334 bp, Zea mays
agttcaagatctcgaccggccgccctttattatttctatctttaagtcataacacaaaccgcgccaagcttacttagcttgggtttgagcacagccacctactaacagtactggagtgtgtgtgtatgcactaacaacagtacatgggtaaaaagcaccaacacgcacgcacatacacacatgggtacacaagtcacggcaagtacacagtgcacacaggccggccggaaccgactgggacagtgcagctcataagcaccacaatgtccgcgccagagccggctccggccgcaccatcatggcctgctgtggataccggagcaccggcaccgcg

SEQ ID NO: 314761 - DNA, 309 bp, Zea mays
gcccgcgtccaccacaatctgccgcctcttcctctgcgctgcgctaacaacgattcccgattccatggccgcgaccgccatgattaggattaccactttacgttgccgccacgacccgctctcctcccttccccgcaccacgtcggccgcctgctcctgtacccttccgcctcgatgtcgccaatgcagactgctccctccccattcttctggctgttccccttcctcctccatctttccgcgccgggtccgggtccgcccagcagcagcactgaagcgcatcggtggcggcaacaccagcttcatggg

SEQ ID NO: 314762 - DNA, 305 bp, Zea mays
gcccacgcgtcaaatccccagcagcagggatggagacaggacaatcaccggagcacgccgagtgcggtgcagcagcgctgcgagtctgcagcgatcaggacatcacgggacatgacctacgatctgcgactgcgaagcggagatggcaacacccgagatgcaacatctgctgcagggcttcaaacgggtacagcatgaccctccggcagggatcagtggtgctcggcaccacaacaacatgatactctgaccagcagtgatatacggacatgctcatcagcagtcagatcaaggcacatgcaggc

SEQ ID NO: 314763 - DNA, 221 bp, Zea mays
gcttgttgtgttttttttttgtttttttttttctggtgggtttgttgttggttttgttttttgttgttttgtttggttgttttgtttttgtttttttttttttttgtttttttttgtttttttttttttttttttttttttttttttttgtttgtttttgtttttttttgttttttggttttttttttgtttttttgtgtttttgttttgttgttttttgt

SEQ ID NO: 314764 - DNA, 385 bp, Zea mays
  unsure (1)..(385): unsure at all n locations
acgcaagcgaccccagtaatggcgaccaaggcgctatccgtctcctcgctcacctccacggcctttgcctccttttccttgccgcggccccgcaggccttcaccttcgcctcccctcctccgccttctcggccctcgcccccgcgcctccactctctccgccgccgctcccggcgacgaggacggcgtcgacaccgtggagcagctcctccacccacgcccgcctgagacctcagcccccgccggatcccgcggccggatcgaccgcctcatgaagctccagcgccgcgccgacggcgacgccgtgcccgggggccggaggaggtggttcccttacctggacgcgttccggcccgcggncgggggcgcggagctgtccagcgggg

SEQ ID NO: 314765 - DNA, 98 bp, Zea mays
agataaaaggaaagttaacgaacaatgtgacaaaaggtcagctttgagtttaatcaattgtattgcggcttgaggttaatcggttcaaggtgggggtt

SEQ ID NO: 314766 - DNA, 136 bp, Zea mays
aggctcggagaagcatatcaagacgcaacatgatctcctgcggtcacacggctgtatgagcgacagcagatgatgcgtgcgaagatcgcgacacctgagaatgtctacgctttgtctcgctgaaactccggatcat

SEQ ID NO: 314767 - DNA, 382 bp, Zea mays
aaaaagcaacaaggcaacagcacaagcaagaaccacacctcctcccttcgcctgtgatcatgtcgtcttgctgcggcggcaagtgcgggtgcggctccagctgctcctgcggcagcggatgcaacggctgcggtatgtaccctgacgtggagaccgccgccaccagcagcgtcaagaccacggtcctcgccgcgccgaccaccaaggccagcgccggcggcttcgaggcggccaccgagggcggcggctgcgactgcaacacctgcaagtgcggcaccagctgcggctgctcctgctgcagctgcaactgagctggcccggcccggcgatggcgcacgagagtcgagaggaggaggacgacgacgaggcgtataaatataat

SEQ ID NO: 314768 - DNA, 306 bp, Zea mays
cgcagctcctaactggtacacgactgtcctgagcgtcaatcaatttacaatatatgggacatcagtccgttctgggccgttgtcacgtgagattccctcaagtccatgtcgatttaggaaggatatcagatcacccaagtggactgcacacgtgatgcgatgtcgcagctccacgcggacagagtactcctcaccgcccatgactcatagtatgagttgccccactggtacttgcacagattgagcaccattgactgcgtctaaaacacgagctgggccacactgagcctgatcaatgaccgaaaa

SEQ ID NO: 314769 - DNA, 339 bp, Zea mays
tctacactgagtcgtactagtaccctgactgtccttagcttcaatcagtttacaatatatgggacatcagacgtttctgggcggtggtcacgtcagattacctcaagtccatgtcgagttgcgaaggacatcagttcacgcaagtagactgcgcacgtgacgcgaagtcgcagctgcaggcagacggagtggtcctcaaggcccataatccatcttgtgagtagacccagaagttgttcaacggattggtgcacgagtgtctgcgtcgaaagagggaccgtgggacagactgtggctgatcagtgacgggaaagactggctggtctgcctctaaagttc

SEQ ID NO: 314770 - DNA, 399 bp, Zea mays
acacgcacatcagaggcagtcgaatcctttgccgtaacgtctcttgcggcgatagggcgctgacatgcagagtcggtctggatctggcggcccgaacattacggcagaggaaatgcttccacatcagagatatggtggctttagtctccttctagggagccttagtttttcttttaccaataatttcagatggcgctcagtgaagagatgtcacacatgagtctcaagaccgacaaggatgctgccgacgagatgagctcaacttcgtcgtacggaagagaaatgccctaaatacacgttgggtctttggggttaacaatagcttaactgtttgtgatttcagcgtgtcaccgttggcttgacaccttttcccctttaactccatcaccaatgtcctgt

SEQ ID NO: 314771 - DNA, 349 bp, Zea mays
acaagactctagagtgaatcgtaggatctgttccacctgccatcctggaattgacaacaacttcttcacctacctggttgcatgcaacagatctgaaattctgaaatgctgtgactgtgactgtgaggtatgaaaaaacagtgtaaataacgcggttgcctccgtacatgtgtgacattttatacacgtgcaagaaagcatcggtgtccaccgttgtccgtgaaaaaaaacaaactgatgagaaaacacctgcagcaaaaacctgatagcagcagtcacattgcagcaaggggttaccacccaaaccaataactaccacaaaggacgacagtcagaacaccaggaaact

SEQ ID NO: 314772 - DNA, 131 bp, Zea mays
agagatgctacgacctctatactcgtgagataatcagttctctccagagtttcctgttcctttattgcaaacattgacacagctcttctaacgaacttggttctgaaccgggatgatagatgtctaatctt

SEQ ID NO: 314773 - DNA, 427 bp, Zea mays
  unsure (1)..(427): unsure at all n locations
caacgcatccgccaacgcgtccggttctaaatcccaaccggccgcccttttttttttttttttccccaataaggattctgctcattcttaatttggacggatcagaatagaattgccaacatttggacgacggattctcaataaggattctaaacgatcacttaaatatcctgtgacattcctcccattaaccagcatattagtactacagcaaatgggcgcgtttttacagggaattataataatccttccatcatccatccatccacgaagaagaaaaataaatctaggcacggttccggctggccggaggaggggagcaagctaggcgaggagcgcatcggattccgacactgnggttggggccccggcggcccgagcccgatgacgatccgtcaccgcgtgtgcttgcaggggcccgcggcgg

SEQ ID NO: 314774 - DNA, 285 bp, Zea mays
aaaccgttcatccttcgttcacccgtccactcccatcttccttcacccgcttgtttatcagccgagtcagcacgtacgtcggcagtggttaggagagccctggcgcagtgcttcacgtcatgctctctgtcatcgaccgcgacctgcaggtctctgagatctcgtgcctgaagcagcctggtgccaacagggtcttcggcgcaagcgggccacgtctacgcgggagtcgtacacgaattcactcgccggaagcaagagtctgtgggcaaagcccaattccaacgc

SEQ ID NO: 314775 - DNA, 165 bp, Zea mays
ccgtccgcactgatagcggagcccagtcttcacccgaccgtggtcctgcactcttgcctcagcgtggagcaactgactaccattgttgagctggcagcttgtcttcattgaccctcagtttgggtgatatgaactgtcaacagtccacagtcagcctatcttgac

SEQ ID NO: 314776 - DNA, 286 bp, Zea mays
gtggatcatattgaaaggcgtgctgcaggtgcacgacggctctgatatacgggcgctcgtgtggatgaagtcagtgttcacgaagttcgtcttgctcatcgctcagaaagactcgacgctggatcgacacggcatgctgtctgtgagattagctccatccagccatcacttgcatcgctactgtaccctactgtccatatgatgctcttcgatctacggatcgataactacatcgtagtcgccatgtacttcactcgcaggtatcatgagatcgtgtccaagacct

SEQ ID NO: 314777 - DNA, 400 bp, Zea mays
agcgccgtccgccgcgtgcgccgccccgcgcgcagcccctggctggactgcatcgaccagtacccggcgcgcatggacgcctagcacgtacctgcaatgcagtggctgctatctatctatcgctcgcttcgctagctaccagtgcagtgctgcacttcaccgatggatggatcggatatttgatatggtataggacgcggtcggtcgatttgcatgcatgcaccaagtgttactataccgttctgaaggtacgtttgaactttgttcgtgtgtattgcactattgcttgttgtttaagtagcggttaagggagggaagtactactccggtcctgtcctgtgtgagccttatgtacgtgcaattttaatgtgttttgatattacaagacttgacggttggc

SEQ ID NO: 314778 - DNA, 438 bp, Zea mays
actcgcgggtcgatacaagcctctagctgtcgcctcatcacttctatcgagaagctgcccgcgcgctccctccgtagagtccaaaccgccacaggaagcgcaacagcggagtctccaaaatggccgccgaggacaaggagaccgactcgccgcagccgccggcgaagctgccccgtctctcctgcgccgacacgagcgccggagtggcggcctcgtcgcctctggttctcgggctgggcctggggctcggcgggggcggcgagcgagacgcggatgcgtccccggcaacggcgacgcccaagaggccgtcagcgctgacgttcatgcagcagcaggaactggagcaccaggtgctcatctaccgctacttcgcagcgggcgcgccggtgccggcgcaccttgtgctccctatctggaagagcgtcgccgcgtcctcct

SEQ ID NO: 314779 - DNA, 422 bp, Zea mays
gacgcgtgggccgacacaagcctctacagtgactcgtgctaacgcgtggggtgccaacgaagaacaaaggatccatccgcggatcggcgatcgcgatggagatcgagcaggcgatgcgcggcagcagcgacgtccggctgcgcgccaagtacgacgccgctgtctacatcgtccgccgcgcctacgccttgtacccgttcgaggagctggctttcagtttcaacgggggcaaagattcaactgtgctgctgcatttgcttcgggccggctactacctccacagagcaagttcaggtggtgacgtggacgacgacagcacggtcctccagaccgtgaagaactgccccatgcggaccatctacttcgaggaccccgatgctttccccgaaatcgactgcttcacgtacgagacggcatcgacg

SEQ ID NO: 314780 - DNA, 170 bp, Zea mays
aaggtgtcagccagcgacagatccaggagggattgaactaagctcgtttcctccgtccacatgcatcgctgcacatcgacaatgacatgatcggaggcacgactggtgacacacactgcggataataggaccgtccttaggtcggttctcaaggagcagacacaggtcag

SEQ ID NO: 314781 - DNA, 380 bp, Zea mays
cggacgcgtgggctgctactagcgtaccacctttttttaatcgaaagtactgtacaagtcgccatgtcgagtacaaaattcagtgtactccaatccaacagaagcgcggggacccagcaaatttgggtcttggtgcccagcgtggcatggttgaactgtaaaactaaaaaaaggtggtacgctagtagcagtgctgtagaaatgaatggatcgcacgcactatcataaaagttagtataaatagtaggcaaggcattagtggggctgaatagaactgtagcctaagctaagcagtgatgctcgtgccttgccacgcacgagacaacgtaacagattacatcagcgctatagtgatctatcctcaataggaagaaagtttg

SEQ ID NO: 314782 - DNA, 60 bp, Zea mays
actactagcgtaccacctttttttaatcgagagtactgtacacgtcgccatatcgactag

SEQ ID NO: 314783 - DNA, 176 bp, Zea mays
aaagcagtaccgtcttacgcaatcaacagaaatacgcggagtgacaaactgtacgaaaggcacactacactgtgtgtcttgctaaatcaggagcgtgcgacatataccagacccgtatccaaatctagagcgcgcgagtgcgagctctccagacgctacgagcttatctaccccta

SEQ ID NO: 314784 - DNA, 61 bp, Zea mays
aaataaatcttaacaaacatggaataactgtatgaatcaatgaagaactgacgattcacac

SEQ ID NO: 314785 - DNA, 437 bp, Zea mays
cgggccgacccaagcgtccatgattcgtgaagagatcgagcttcttttgcaccacaaggtcgaggatgtcttgcaactgcggatcaagctgcggctgcggctcaagctgcaagtgcggcaagaagtagcctgacctggaggagacgagcaccgccgcgcaggccaccgtcgtcctcggcgtggccccggagaagaaggccgcgcccgagttcgtcgaggccgcggcggagtccggcgaggccgcccacggctgcagctgcggtggcaactgcaagtgcgacccctgcaactgctgatcacatcgatcgacgaccatggatatgattattatctatctagcttgtggtggtggttgaacaataataagcgaggccgagctggctgccatacatatgtattgtgtggtgtgtgtgagagagagagaaacagagttcttc

SEQ ID NO: 314786 - DNA, 180 bp, Zea mays
ctcaaatgtccatacaacactctaaagtgaatcgtattatactgggacaagtgtcaccatatacagcaacggcatgtccacctatgatgacactcgttctttgcaatacgcacctatcgtattaccatatctcgggccgtgggagtatctctcgctcctgttatggatctaattattcaa

SEQ ID NO: 314787 - DNA, 80 bp, Zea mays
agcaaagaccgaggcgcgtgctctgctcaaggctacgttcccccccccgcccatcgctgaccacagtgcacaccggcacg

SEQ ID NO: 314788 - DNA, 398 bp, Zea mays
  unsure (1)..(398): unsure at all n locations
acgaccgcgactgatgggaaggaccggcggcaaaaccccgggaaaccggaacaattccggaacaatgaagaattccgggggctccaacctgaaccaacaatcaagcccgggcacgcggcngtggcacttcctcggcacgctggcctcgctcgcctgcgcggtgctcgcggccgccactggccgcgccgcggtcctcctcgtgggccccgttctcggggtacggcatggcgtggtacagccacttcttcgtggagggcaaccgccccgccacgttcggccaccccgtgtggtccttcctctgcgacctccgcatgttcctgctcatcctcaccggccgtatcgacgccgagctcgcacgcctccgcgtccggccggcggcctctgcgcaacatgactga

SEQ ID NO: 314789 - DNA, 402 bp, Zea mays
aatgctagtacaattcagtttagtaggaatggcaatgggtcgggtggagaaaaaacctgctaaatccgcccgtgatcacacgcgtgggtgcaattccaaacccacacgcgaacccgttaggtttcgggtgggtttcgagtcacctgtgtgttttaaaccataattcagctataaacaattaagtaccaataataatgaagttatatctacggattttaaacgttgagcagcgataaaacatttcatgaaccattagccaagttacttattcagaataactactattgtatcttaatcattttttaacataataaggatgaatcaaatttcggatcacattgggccctactataatctggagcagtttttaatgcaagtcacattcgtgctcaaaagaaagaa

SEQ ID NO: 314790 - DNA, 376 bp, Zea mays
  unsure (1)..(376): unsure at all n locations
aattcaactctcagctcctctcctggcaaccagacaacctccgtacactcgcaagaaaacatgaccggagaccatggcggacgaactcagagaataccacatcgccgattccagagacgtcatcagactcttcataaaggacacggactgttgcgacgaactcaaggaagccgtgaacgtcatcgaatcagagagtcagagtttcatcgcaggctgaccaccaccgacatgatcatgagaagtctatgcggacaagctcagtgacaacgacgtcnacgagatcctcagtcacatcgacctcaacatggacgaccacgtcaccgacgaggagctcatcgaggcgatcatggtgttctacagagacgacaacggcatc

SEQ ID NO: 314791 - DNA, 212 bp, Zea mays
aaaaaaaaaaaaaaaaaaaaaaaaaaaaaaaaaaaaaaaaaaaaaaaaaaaaaaaaaaaaaaaataaaaaaaaaaaaaaaaataaataaaggaaagatattcataagattaaaaagtttgattgaacgtaggtggaaattattttttctttgttggtgttacttattttggttttaagatgactttcttttttgtcattgatttttggttta

SEQ ID NO: 314792 - DNA, 415 bp, Zea mays
atggcggggagggataacgatgcgcgacaagcggcgccgctcaaaggcgacaagcagcagttgcggcggaggctgaaggaagcggcgctcctcatccgcacgatcaaagggcatgtgcgctggatcttcgaagaggttgccgccggccgcaccacgtctagagtgcaccaccggtaccggaactattgctcctccgccgactctgcgtccacgtccccatgtgcatgcagctactacatcctcgtccacacggacgtcctcactctgctctacaacgacgaccacacttccagcctcaatgtgctcatgaggatgctgttcgtggagcagcatctcctgcagcaaagcaagcactgctccaatagggacatctatcacatgtacgcctccagcgtcgtagaagtagcagttgttg

SEQ ID NO: 314793 - DNA, 398 bp, Zea mays
ctggcttctcctccccctcttaccaagtcctcctcgggttagggttccttagggttttgtggaggggcgatggcggcggctgatgtggagtaccgttgcttcgtcggcgggcttgcctgggccaccagcaacgagtcgctggagaatgccttcgcctcctacggcgagatcctcgactccaaggtcatcaccgaccgggagacggggaggtctcgcggcttcggcttcgttaccttctcctccgagaactccatgctcgacgctatcgagaacatgaacggcaaggagctcgacggccgtaacatcaccgttaaccaggcccagtcccgtggcggtggcggtggcggcggtggctacggcggcggtcgcggcggccgccgctatggtggcgggcgccg

SEQ ID NO: 314794 - DNA, 96 bp, Zea mays
aaaaaaaaaaaaaaaaaaaaaaaaaaaaaaaaaaaaaaaaaaaaaaaaaaaaaaaaaaaaaaaaaaaaaaaaaaaaaaaaaaaaaaataaaaaaaa

SEQ ID NO: 314795 - DNA, 405 bp, Zea mays
atggcttctcctcgccctcttactaggtcctcctcgggttacggctccttacggttttgtggaagggcgatggcggcggctgatgtggagtaccgttgcttcgtcggcgggcttgcctgggccaccagcaacgagtcgctggagaatgccttcgcctcctacggcgagatcctcgactccaaggtcatcaccgaccgggagacggggagggctcgcggcctcggcttcgttaccttcgcctccgagaactccatgctcgacgctatcgagaacatgaacggcaaggagctcgacggccgtaacatcaccgttaaccaggcccagtcccgtggcggtggcagtagcggccgtggctacggcggcggtcgcggcggctgccgctatggtggcgggcgccgtgacggc

SEQ ID NO: 314796 - DNA, 197 bp, Zea mays
gcctcatagggtaagatcctcaactccaagatcataatggagcagtatactcttacgtcacgctgcttcagcttcattaacttctactccgaaaactccatactcaattccatcgacaacataaactgtaatgaaatcaactttcttataatcagatttatatacacccaataacgttgcgatagcatttgcagcag

SEQ ID NO: 314797 - DNA, 434 bp, Zea mays
tttccaagccgcaaccttctttcttccctgcttcttcttcttcacggaagcaccagccactagcgacgccctccctgctcaatgggcgcgggtctctctgctcaaaccatggccacccagcaacagcgccattcttccccctcggctccctgggatgcagcaccacgccatcgcgggagcatgcccccatgggagcgccccttatccacgacgtcggcatcatggagctttttcttcaccgtgcgcaggagctccatggccgagctcatccaggccccaatgcctctgctcggtcgcagctctgcaggctctctccatcgcgcctgctccttcctcggcgcgctgaagctcctcagccatggcgcccaagcccttcttcttcctctgcgcaacgccccctcttctccactgcgttaagagcaaggagccttttt

SEQ ID NO: 314798 - DNA, 283 bp, Zea mays
tggatgggattagtcatctgattcgtgagagagctgatgctctagatgttgcatggcataccatggcggtttcttgggaatggttttgctagtggctcggtaaccttgggttccgggaaaataagtgtgtgcgtctgtgcgtcaggctgataacggcactggttacgttctgattcatagattgctcatctagtttattttctgttcgatgctcctgtaccggttctcggctatgatcattaacagtgtgggtagtgctgctctcaagattatgtcagatgtt

SEQ ID NO: 314799 - DNA, 75 bp, Zea mays
aaaaaaaaacatacaagaaaaaaaaaaaaaaataaaaaaaaatagaacatcacatgtaaataaaaaaaataacaa

SEQ ID NO: 314800 - DNA, 229 bp, Zea mays
cgtccagcggcatggtgtgtttgggtacggatcgcaggccgaggagggtcgccatcgtcgtcgccggcgacgcccgtgaagctggtttgggtacacatgagccgttcatcattccgcgcggatgtcggctcgtgcctgatcggggtgccgtgcgagctgatctgataagacgtgttcggtaacaatagcgagctcctgcgccaccacaaccccgtgcacgggaacgtgc

SEQ ID NO: 314801 - DNA, 417 bp, Zea mays
  unsure (1)..(417): unsure at all n locations
acgcactctgacccccgcccccgccgcagcgagacgagagcgcccgcaccaaggcaagccgaggcggcgagcgggacaggtagcggctgcctaccaccgccagcctccgcccacccaacaacagcaccaccaccacagtccggtcccgtgccttccaattcggtcgtcccacgcatcgattgcgcccgcgcacgcgcccgtcgctttgccgtcttcgaccacccgcaagcaacctatatagcgcgccgcgaattccgcccggcttcctcgtcgcccgccgcagtgagtgagaggaggaggtcgatggatctcaaggacggcgagaggangggagcggcggggccggagccggggccgctgtcgaggcacgggtcgatctactcgctcacgttcgacgagttccagaacacgctcggc

SEQ ID NO: 314802 - DNA, 412 bp, Zea mays
actcatggtgtatgctgttgaagcctgtgaaattgttgtccaggtaatatgttattcgatgtagtttccttttcagttcaagttgctcaggcacacgttcattttggagtcatatgggagcaaatagaacccacattcctaccattgactccagtacagtgtgctgtcgtggggtgaataaaagcagctaaacagacaatgttttgtaagatctaagttggtaagatctgcggcttcaagtggattgcaccacaagttctaaatggaacaatctaatgcctccatctttacagtatcgtttgtattctgatgagaagaagaaaaaggcttgcacacctgacaacagatgaagttaggttacctcagaagtcatcaacctgtgcatcagggtttcttatgtccgctgctgatt

SEQ ID NO: 314803 - DNA, 321 bp, Zea mays
atatatgcatagctctcgcgactgctctaatggacgacgccctaaaacggtgggacatgaatgtcacagttatgcacaaggtcatgctcacaagaaagttcgcattagcagaagaactgagtaaacatacgctccatatcacgaaggataacagtggagacaataccgacagaacatgattcagggaagtaactatccaaggtgtgaccacaggtgtacagaccaccagcatcatggctgcgcagcacccagacatgtagaacaaatgacttcgcacgatgcaccacagtaccgggtaatcgatactcatgaacacacatg

SEQ ID NO: 314804 - DNA, 330 bp, Zea mays
ggtatcacaattcacaattaaccaacagttttgccactttcatttgttttctttttcaaggcacactgcttacttccttgttgctggcaatgagatgacaaggcaacagggccatggagtagcctgcaaacatgcaacaagtaaaccagctgagtaaccattttagccgtggagctggtaaccattggaataattactgataagccttttatccagtgtgcctttatagcattccgtatacaatggagttgaaacaacctccacattcaaagaaacaatggtactgactctttgtaggctttatagccattcttgagcagaaaatgtact

SEQ ID NO: 314805 - DNA, 413 bp, Zea mays
aagacaatcacccttgaggtggagtcctcggacaccattgacaacgtcaaggccaagatccaggacaaggagggcatcccaccggaccaacagcgcctgatcttcgccggcaagcagctggaggatggtcgcactcttgcggattacaacatccagaaggagagcaccctccacctggtgctccgcctcaggggtggcatgcagatctttgtgaagacattgactggcaagaccatcaccttggaggtggagtcgtctgacacaatcgataatgtcaaagccaagatccaggacaaggagggcattccaccggaccagcagcgcctgatctttgctggcaagcagctggaggatggccgtaccctcgccgactacaacatccagaaggagaagcacctccacctggtgctccg

SEQ ID NO: 314806 - DNA, 407 bp, Zea mays
agcttcatctagctctagctaggctcgtctgctgcaagaaggtaacagtaacagcaggcatggaggggaaggaggaggacgtccgcctgggcgccaacaagttctcggagcgccagcccatcggcacggcggcgcagggcacggacgacaaggactacaaggagcccccgccggcgccgctcttcgagcccggggagctcaagtcctggtccttctaccgcgccggcatcgccgagttcgtcgccaccttcctcttcctctacatctccatcctcaccgtcatgggcgtctccaagtccacctccaagtgcgccaccgtcggcatccagggcatcgcctggtccttcggcggcatgatcttcgccctcgtctactgcaccgccggcatctccggcgggcacatcaac

SEQ ID NO: 314807 - DNA, 186 bp, Zea mays
atacgggtgattgcctaaatctccgctggctctcacagatttgaattcacctctctgtcgtgtcatgctgtccagttgggtttgctaagtggagcttcatcttactcacggttgacttctgtattcattaggcagctattcgagttttcacacttgacggcgtcgtaatcaagaacacacattcag

SEQ ID NO: 314808 - DNA, 296 bp, Zea mays
  unsure (1)..(296): unsure at all n locations
cgctcaatgacagagtagattattacatcttgatcaggtcgtcggggagtacctgctcggtgaagttccatcttccgtagactggcgcgggaagaaggtcctctctaaaaagccgccggcgttgacgagcagctggcgcgcgctggagtattgacatcagttcgaggtcctgtatgaatgcactactcgtacgatatatcttgggcgagtgcttgctgaaataatcggacatggncggtggggctctctancgcgacctggtacaagagcgactctcctctgtgtacgtccggacg

SEQ ID NO: 314809 - DNA, 351 bp, Zea mays
  unsure (1)..(351): unsure at all n locations
acccaaacgtccaganataaaatgtaaaaaaaaaaaaaacaaacaaaaaaaaaagataaaaaaaataaaaaaaataagaatgaaatgaaatcaaaataacagcaataagctaaaatatgtaaatagcttccatcttgctacagtacttcatggaatgctggtgaagttcttgtgcctatggtttgtttcggtgcatgattagaatcttccttcttggtcaatctggaggatactgaacattattatcctgccacatgagcgtgtgtacttgggtgtcgagacctcgatgcttagtcacagtgatatgtaagttctaagttcgggttggttattgcaaaaatgggatgccac

SEQ ID NO: 314810 - DNA, 368 bp, Zea mays
  unsure (1)..(368): unsure at all n locations
ttcnttctcttacgatgttccatatgtatgcaaattacaaggcagtgcagtcactttcactcactacgctaaactatgagagagcttccatcttgctacaatacttcaaggaatgtggtgaagttcttgtgccacggaaggtttcccagcaggaacatattcttccttcttggtcaaactggaggaaactgaacagaattaaactgccacatgagcgtgtgcacttgggtgctaaagcctcgatgcttacacacagtgacatgtaagttctaagttctggttggtgattgcaaaaacaagataccactatgaaaacgcgaactactttttgctggataaacaaggcatcgtttacgttttcatccaca

SEQ ID NO: 314811 - DNA, 280 bp, Zea mays
acccacacgtccagtcagatgcgccacacgagatacataagcctacacccattccgcggttgaggatgacgagaataagatgaagaaaatgggttcctcggcatacgccgcatggtccaggcggtggatccgtcgcgaggtgtagccactggtcgtgccgatagtcgtgggcctgggtagctgctcgttacagcgtgtgcgcaacatcacgggaaaccatgaggtgcgggtgacaaatgagaataaggcggacggcgtcgtggataaccagcacgagggc

SEQ ID NO: 314812 - DNA, 101 bp, Zea mays
aactgagtctggacatgttttgcacttttgtttcccttcctgctaccatctgtgacagatccgctcgctaatatgggacctgagattagctttttgctgct

SEQ ID NO: 314813 - DNA, 343 bp, Zea mays
cgagatggcacagcagcaggagccaaacacgtccgcaatgccgccctccttcctcctggcgcttgcgcctgcgagcgccactcgcatttcctcccactgccttctccacccataatcttctccgcttcggcgccaaccccaaccaccttgtacagtctccatacacactacgtcaccgctcggctccatggccgccatccccgcgcggctccaccacctcgtcgtcgtcatcctcctcctcgtgtcgtccctcaccgctgctcagtcacgcgcattcgaacgggcgccgccggcgtacacgcggtacctggtcgacgcggcggctatgccggcggtggacctg

SEQ ID NO: 314814 - DNA, 412 bp, Zea mays
  unsure (1)..(412): unsure at all n locations
catctctgagccggtctcccggcagcagcagtccctcgggttgtccacgcggagcgccagccgatggccggccacagtatgtcggttcacccgaagcctataaattcctcgccgccccgcctctcgccgcccatttccctccgccgcctcctaatcctcaacacccgcgcccccaaccgcgcccgtcgtatgccaccatgcaccgcgcccgccccaccgcgcacgctaatgaccccgatgctccgtacgccgccgccgtcgcgatgctgctggagcccaaactcgaggacgaggagttgccgctgcagcagctggcgtcnccgggccccttcgtgtcnctggaccagctgatgccggcggtggccgtgccggccgaaccgcgcccgctggaggcgctgctgcaaggcccgca

SEQ ID NO: 314815 - DNA, 367 bp, Zea mays
acacacgtcaccagcgtgtcaggcgtcttccgtcaccgtttgtcttgaaggttctggaccccgcgagcgtcttctcctctgctccttggtgcttcgtcctcctcccacgtgtgtgcgcctggacgacacaagcttaggggtcaacggctaccagcgctacgatcatgtgtgaccaatcgctgcttgcgatttgcaaaccgccggatcaaggcgtgtgagcatacctttagatggcaaagggacggaagccgaagagggcatcatattctgtagtctctatccatttgttggcaacataaatgagccaatcgtatcagaaactttatccagagcaatctaaagccacctctcgagtgtaaggatgtca

SEQ ID NO: 314816 - DNA, 126 bp, Zea mays
gggccgactcaggcgtcgacgacagctatcgagacgcggagggagtgctaacttgtgaatacgtcaatcgacggatgaacatattgaacttgagcagcttcacgggcgtcacaggagtgttccttg

SEQ ID NO: 314817 - DNA, 408 bp, Zea mays
  unsure (1)..(408): unsure at all n locations
actaaaatcagccctcctctagtcctctttcatcgtgatgttgaccctccttcatcgtcagcttacaagtaacaaactgaccataaaaatgcaaggacagctgataactgccaagaaagaaaggggtcgaatttctcacccctttacggccaatgtactcggccatctgcccgctggcgatcgccccgaccatgccgccgacgttggacagcgatccgaacgccgagaactgcagagcgcgcgcggtgagtattcacgctcaagcacggttcttcaacanagaaaaaaaaaaagaatctaagagaggacggcctattggttacttcgttacctcggagatagagaggttgaggtcncgaaccatggcgtcctgngtcggggaggagaagccgctggtgaagccgaact

SEQ ID NO: 314818 - DNA, 198 bp, Zea mays
cgggcgtccgctgtaacgcgctaatacggggccgctctgatgagggtctctgctctgccgatacgcgctgatcgccggcgatcgtgatgagcatgtcacggctatgctatcacgttctccacagtccaaatagctcgcctacggatgagcacgatatggcatcagtccgtctgagttcgccgatatctcattgatcta

SEQ ID NO: 314819 - DNA, 396 bp, Zea mays
cccacgcgtccgttcacacctcaaatatcttcaatctcgatgtaacatgtaagtttaacacctgtgtttgagcatttgaaaagatttggtttgctcagtttactttcatctgagctactgctgatatccatattcattttgtactaaatatatttttcacaattgaaacctctgtatacaagaatgcatgttcaatctcttgagtaatgtgcagttctgcatggaagatgatgggcaataaactgggttactttgatgcaatgggttgtgcgatgctttgcaagggagcatcttttattgtctaggtggttaggatgcttgctattcaattcttacctaagagacctgtctatgagttctggcaaggcgatggcattatgttttttccttgtgcat

SEQ ID NO: 314820 - DNA, 415 bp, Zea mays
ggtcaatcctccccctacccacaccaacgcgcacacggaccgggagccgcagcggaaaccacaaaaccagcgtgaaggcgcccgaaccaccgcgagccccgcccaccactccacgaaacccaaacgcacctccgcagcgagggatatcccccatcaccccctaccagtttcaattttcaaaagggcgtggaggcgccgcaccaccgccgccgccaccactgacgagggaggaaacgccacctccccgagccagtccgatgttgtccgaccaggagctggcccagtacgtggagtccctcgtccagcacaccgctgcgcagggtggcaccgggatatcggcggatgccgtggtgcgccagctcggggcgcagctcggcgttgacctctcccccaatgcgcagctcatccgcagcgt

SEQ ID NO: 314821 - DNA, 390 bp, Zea mays
caagcgtcaagtccggaccctcgctcacacggtcacatgaccgcataattctgccgacaatggatccgcatcagttggattcagatttgataaacagatccccgggggcattaatcttggctgcagttgagagcttgatcatgccccaatctgttcacttgattctctatgcctcgatggtccagtatgggaagatacagccaaacattcatttgatgttgtgtttgagtttgcctctgaagaaagtcaacacgtgcctgtaatcctatttctgaacgatgttgagaaaatatgtggaaataactacacctaccatggtctaaagaataagcttgaaagtttcccagctggagtttttattgttgggtcccagattcagacagatgctcg

SEQ ID NO: 314822 - DNA, 328 bp, Zea mays
agcagagcatccttccatttcagggagattcgactccgggtacgtgctctactcacaggaaatcatgcgacgagacccgcgcaaagcataccccgttccgcggatagcgtgatcgactgcgctatcagccgtctaggcgcgctgtctacgatcgcacggtcacgtcctcgctcagctatgtctgcatccggggctccgtctacgatctctgctctggccgtggattctattgccccatgagggggaagcccgctattctctgccgctacgccagtcggacccccggagtgatgtgcagagatgacatcgacgtctcgtgagaccttgc

SEQ ID NO: 314823 - DNA, 323 bp, Zea mays
gtcagcaagtcaatattttattttattttgctagtcattgaattttggcgagatcggacgacttttgtgatgcatggctggctccagtcatgtttgacacgtaactaaaagacccaccgcacgggttagggagtactagtacctactactcctaaacaacaacttgtagttgtccacaacaggttaacagatcaaagaaggatacgtgagcggcactactcaactcgtggcttccggtgacagatgatcagcccacgaatgagaaagaaaaatggactcgcttgatttgcgtggctttgctttccgcgcaaggccgaaagctt

SEQ ID NO: 314824 - DNA, 376 bp, Zea mays
gcgggtcgatacaagcctctacagtgcgtcttattattttttttttaaataaagtcggcctgctttattaacaatatatataaacccataaacatctcgtagacacttgaatgtgacacctaaccccacatgcccatcccatctgtacgtaccggcattatcggtccatgataaccaccgtccaccgccaaataattcatacagacattaacaaatggaaggagatatattccagagatcacaaagtctgctgctcttaatataactaatcaattaatcatgtcccccttgatcgcgagtgcctgatcttccgatcaatcgtccatctccgccgtcttggtcttgggaggaggcccgaacctcttctggagccggc

SEQ ID NO: 314825 - DNA, 90 bp, Zea mays
tcgcaatagccgccgccgccgcgctcctccgcctcctgtgcgccgcgtctctcgcgtccgcagccgccgacgaccggttgacgaccttcg

SEQ ID NO: 314826 - DNA, 217 bp, Zea mays
gtcgatacaagcctctagattgagtcttactacaagctttgaaaaggtctaggtcctactgggcacaacccgaagatggatggccaaaatggaactttcctctttagtatctgtgcccttcgcatgttttggcttcacctattctggcaatttcacttatactgcttgtaactaccattaacccagtgtgtaaccgagaaaagtagtatcatgtgtt

SEQ ID NO: 314827 - DNA, 365 bp, Zea mays
agctcacacgcccaccggggcgtgcactctcacacaccgaaccatcaatctgtacagtggttcagcatctccatgctcaacattcgcgaggcacaccgtacttgcacgatgacgcatgtcaccaagacgcttcgccatgggggacggatgctagtgtcctcgggtgctgtgggcctgtgaagcgcgagtggagttcgacgacgcgggacctgcgtctcggacgagggagtcgtgcggacgtgtacgaccagtggcaggcgcacgactgaggtggatgggcatgacggatacaaggacctgcggttcgggacgtacaaggaaaacgtgcacttcatcgacgctgataatactcgcggcgacgagcc

SEQ ID NO: 314828 - DNA, 384 bp, Zea mays
aagggagtacataccgaaaaaatttaacatttttctgtttcatgtttcttggataaattagttattagctggctgaaattggatagcagttatgttcagctttcattagtttttttttctctcgtacagcattatcgtttctcatggcagaaaattaccactctgccagtaacgaggcagatggttctgtaggctccgaatgaatctggtttatataataacatttgaaatggcaacgtggaatatggattaacagtgtggtttgacctggtttccaccctttttttgtaactgaaaccttcgaactttctcaattggtgctatattctgtttactcctcccgtttgttttccattttcctgtgttttcaatcaaaaaaaacac

SEQ ID NO: 314829 - DNA, 366 bp, Zea mays
ctcgcgggccgacacacgcgtcaacccacacgtccgggcagcagcacaagcaagaaccacacctcctcccttcgcctgtgatcatgtcgtcttgctgcggcggcaagtgcgggtgcggctccagctgctcctgcggcagcggatgcaacggctgcggtatgtaccctgacgtggagaccgccgccaccagcagcgtcaagaccacggtcctcgccgcgccgaccaccaaggccagcgccggcggcttcgaggcggccaccgagggcggcggctgcgactgcaacacctgcaagtgcggcaccagctgcggctgctcctgctgcagctgcaactgagctggcccggcccggcgatggcgcacgagag

SEQ ID NO: 314830 - DNA, 301 bp, Zea mays
gaccgacccgtcagaaaaaaaaaaaaaaaaaaaaaaaaaaaaaaaaaaagaaaaaaaaacaaaaaagaaaaaaaaaaaaataaacaaaaaaaaaaaaaaaaaaaaacaacaaaaaaaacaaaaaaaataaaagggagggcccccaaaaggatcaaactttacataggcataaatctaacgtcaaaccccttcaaaagtgtcaccaaaattcatttcatgggccgtctttttaaaacctctgaaggggaaaaaccttggctttcccaaatttaaccccctttaaaaaaatccccctttcccc

SEQ ID NO: 314831 - DNA, 104 bp, Zea mays
aaccatgtttacttctcaatcgaatatttatgcgagggatgtttgtcaacgcaaaaaaaaaaaaaaaaaaaaaggcgggcgcacaaaaagataaaaaacttaaa

SEQ ID NO: 314832 - DNA, 404 bp, Zea mays
ctcgcgggtcgttacaagcctctagactgagtcgtactacgatcccctctcgttcctccctcgtcgcctcatcaattcaagatccaatctttgctgctgccactcggcgatccgatcgttctcgagcaaggtcggtggccatggcacgctgccgccatcacctcctcctcctttccgtcttacttgccttggctgctgctgctgcgcggcaggcgcagagtcatggaaaagcctccgccgtcttcatcgatgcctcgtcgcaccgctaccttcgggaccagcaagccgaccaccaggacgcttcaatgtcgttaaatgaagtttctgcggttgtttctgtcttgcttggtttcgcaccgtcaacatccctaccagctatttcttcttcgaagttgaacaaagtt

SEQ ID NO: 314833 - DNA, 402 bp, Zea mays
ctcgcgggtcgatacaagcctctagagtgagtcgtctgtatccgctcactctcctcgccgacaggacgagatccatcgctaacagaggatcctagcccacccaggccacgtgaccgacggtggtgccggcgatggcaacacgctactggataggctctcgcgacctggaatctcccggcgccaccgggacatcacgtcggtcacgcctacaggatggaatctcccgccagaccttcgacaccccgcagtgccggtgcaacgtcgcgaacgtccgacgtctgcagacgcgagacactccgcgcgcacagcgatgagatcgtcaactcaaacctgttcgtcaacggcttttcgcagatcatgcggaggcacatacatgacctcgatcgcatcggaggcatcgac

SEQ ID NO: 314834 - DNA, 333 bp, Zea mays
aatccggctggccgcgactgtggatcttccacggtcgcagagatgggtctacgtatccaaggtcccgtatgctaggatctgtgcatccacttgcactgccactcatcgtgcggctgacctgtcaaggctaccagtcgtgatgcatacagcacatcgaattacggccagtttgcgctcgcgggacacgctggatgtcaaggacgagctctggcgagcatcatgtatgaatctgaagctttttactgtgaatggacgatctagaatcaagatgctgctcagtgggtgcaacgttaggtatgcccgtgcggcgtcctcacttgaggtcaatttagg

SEQ ID NO: 314835 - DNA, 383 bp, Zea mays
tcgatacaagcctctagatagtgtcatcgaactgattgcttagccgtcgaaactgcacaacccgcagatcgaagtctttgcaaaggtgttctacggcgacccggcaaagaagctgtacgaagcagccgacatggtcccgcttagctgcatggtggtcgggagcagaggactaagcacgctcaagagggctctgatggggagcgtgagcacgtatgttgtgaaccacgcggcctgccccgtgacggttgtgaaggagatggtgtagcgtgttgaacaccgctggttacaagcttcaccctagccagattgaataagcgtgcttgataagcactgatcaggggggatcttgctacttatacgacattttgtgcttgaaatttggg

SEQ ID NO: 314836 - DNA, 218 bp, Zea mays
aacagctcccatctaacactacctgtcaagctacccagcccatcgatcacaccgcgcactgcaatggcgcttggcgacagtccagtcacagcctcagcagcgggagtatcctgtcgtgccgcaaccgagtcgcattgcacggcaacgtccgttcagcagccgatgcacaccatcacaggcatccacgcagccgacttgtcaatggttaacgggcccga

SEQ ID NO: 314837 - DNA, 366 bp, Zea mays
atattttcggcacagagccgtgttttttcctcatttcgagcactaggactcgcctgtcggctaactgaaccgcttaaccaagtgtgagttgcctcgtgcgaaggtgacgagtgaggtatccgtatcccggaggcgtaggagtccctcggctcggtcggccttgctgcccgaggcttctcttgcttagttaaaggaaccctcggccgctcttcgatgagccgaagccggaggcagcggtgtcagtgtggacagaggctgagttggctcgaaaagaagacttcgtcggccggagcctggccgggccgtccactagtgggaccggcgccgaagttgagttgccgaggccatgagccgggctgatgtcct

SEQ ID NO: 314838 - DNA, 220 bp, Zea mays
ggtcgatacaagcctctaaaatttttctgacaagtattcatccgagcagatacatggtcctacaagtaacacatatatgtaactaaaaatagtgaggactgttccatgtatgtactctctgactcctaacttttaattggtatcgactaaaaaaaaaaaaaaaaataaagaataaaaaataaaaaaaaaaaaaaaaaaaaaaaaaaaaacaatcatttag

SEQ ID NO: 314839 - DNA, 70 bp, Zea mays
aaaacgcagcggacgactaatgcgatcgaacgatcaacacagcagaggggctgtggaggatgaggactgc

SEQ ID NO: 314840 - DNA, 51 bp, Zea mays
aaacactgcggaacgacggacgaccgaagctgcagcggccgaagccaccgt

SEQ ID NO: 314841 - DNA, 70 bp, Zea mays
aaacagctcgcgatggcaccgacaccgaggaagaggagatgaatggagtcggagcagggagtccggatcg

SEQ ID NO: 314842 - DNA, 54 bp, Zea mays
  unsure (1)..(54): unsure at all n locations
aaacantgcngcncgcggcgcaccggcgcggggcggccgcccggcggcggctcg

SEQ ID NO: 314843 - DNA, 358 bp, Zea mays
aaaaccctctagcttcccactccgctcggccaccagctttgaccgcctcccctcccctccgctcctgttcctccataccccacccccccgcaggagcggcgcggcggcggcggcggcaaagccaaaggcaagatgttcgggcgcgcgccgaagaagagcgacaacaccaagtactacgagatcctcggggtgcccaagtcggcgtcccaggacgacctcaagaaggcctaccgcaaggcagctatcaagaaccaccccgacaagggcggtgaccccgagaagttcaaggagctcgcacaagcctatgaggttttgagtgatccagagaaacgtgagatttatgatcagtatggtgaag

SEQ ID NO: 314844 - DNA, 342 bp, Zea mays
cacacgcgtccgcccacgcgtccgacgcgccatcctgtgaaccagacacctaacgcggagcggcgcgggccggccgccgggagaggtgcgcatacctgccgtcgatcgtcgccgggtccatccaccaggggcagtggcaaccgccagaagtccaagatggaccgcgagcgcaacttggagatgaccaagggggccaaggggagccagctcgagaccatcaagaaggccatgagcatcgcagtgcacagtgtgcatgcagacattcatgtgtgacacgactgaagtgaagtgcccggagcacgccgaggcgatgcatcccaatacagacgtgtatcagtgctt

SEQ ID NO: 314845 - DNA, 149 bp, Zea mays
cgatgcaagtctctagatggattcatattaaaaaaaaaaaaaaaaaaaaaaaaaaaaaaaaaaaaaaaaaaaggaaaaaaaacaaaaggataaaaaacttaaataagaatgcaataaaacgggaggaagcttggagggtttcaccgtga

SEQ ID NO: 314846 - DNA, 68 bp, Zea mays
aaagagggcgacggcgaggggcggacggggtgccggcggggctccaggtaggaggcggcggtggacaa

SEQ ID NO: 314847 - DNA, 282 bp, Zea mays
aacagctcccgaaggcccggctgagtgacccacccgaagatgataaccgccgcgtacaaccatcgtgaagaggatgcgcaccctgcagcagtaggatgcaacacttgccatgcgtcacaggtgctctcgaaggaggatcaatgacaggctggactggtctggccaacgtagccccgttttgggtagccgtggtggctgcagcgcaagcatgcaatggcatcatgtctctgctgagcatcggatggagaatgatcagatgaccaatactgttgccacgaatga

SEQ ID NO: 314848 - DNA, 356 bp, Zea mays
agagttttcatctgcactttgtatctacagaattatcatcacttattggaggattgcgtgtgtgacatcaaaaacaatgtatcatctgtgtatttgctatgttgataagtgtgttactgcgttgttggcaaggatgaatatgatgagcttgctttggctgaggtgatctttgcaattacatcagcagtcaaggatgtttgtgcgaaacctcctaccgagcgcctcttccttgacaaatacgggaggatctgcttgtgccttgatgagattgtttggaaggggttgcttgaaaacacggagaaagacagagtgaggaggttgattagactaaagccccctgtggagccataatttgc

SEQ ID NO: 314849 - DNA, 440 bp, Zea mays
ctcgcgaggtcgacacacgcgtctacacacgcgcctggcatcaccggcgcactggactgcagcctcctcgacacgtttgcttgcggttcggacgccgtcgtcgtcgccgaggagcccgccgcgcagcccaccgcgtcgagcaacgccttctccggatacagcagcaccacgggcggcaattacggcaacatctcctccggcgagtccaacacgtacggcggcagcggcggaggccatgacacggaggttgcgtcgccgacctgcgcctcgaagcggaagctggccggcaagtaccctgcaatagccgcgtcggcctcggccacagccacgacgacaacggcggaggggcaggttgcagccccgcggcgtggcacgaagcgcgactccgcgacgtcgtcttcgtcgaacagaacaacggtcgcggggcatggcggcggcaa

SEQ ID NO: 314850 - DNA, 206 bp, Zea mays
acctcctcctatcacagctagcgcctgctccccttcgtctgtgatcatgtcttgcagcatcggcaagtgcaactgcggctccagctgctcctgcggcagctcatgcaactgcatgtcacctgacgtggagaccgccgccgccagcagcatcaagaccatggtcctcgctgcgccgaccaccaaggccagcgcctgcggcttcgacg

SEQ ID NO: 314851 - DNA, 360 bp, Zea mays
ggctcaggaaaaacaacggcggacagcccgcctccaccgccgtggcgccgttcaccccgccccgcgttctctctccctcggcgacggctcgacgaccgccgcgccgccctacgctccagcctccatgtgcttcgcggggcccttcgccgtcgactaacacaccaccaccaccatgtacgaccgccccatctcttcccttcctgctctacgaagcctagcaccaaaccctaactgtttgttttattcggatttgttccaaactacaaatgtggtgtatgtagtattgtgtccactaactttgctctcttttttttccctttttctttttgcaaaaaaacatcgggtgtacatgtgttcacc

SEQ ID NO: 314852 - DNA, 384 bp, Zea mays
acgcgggtcctcgtcagccggccccttcaccggtggcgagcatccaccagaccaccagtggatgcgcccctgccccccatgccccaggtcgagtcggccactgcctcggaggcgccgccgccgcaggacgcatggctcgtcgagctcggcagtcgcctcccgcagtgggagtcgctgcgggattcctccaaggtcattatcccgatttcaatatctagggtgaaccagtttgatgctgcaaggctagatgttgagatgtcggccatgttgaaagagcagctagtcaaagtgttctctttgatgaagttttgatgccttcttttcatatcagccaggactcttattccaatatgagcctgaacttgatgctttccttgagttcct

SEQ ID NO: 314853 - DNA, 212 bp, Zea mays
aatcgtactatcgccctcatgctgttcgtcggttgcgcgttagtggatgtagctagctcgttctcgacggtacagtcgggaacgtactcgcatgggagcgttgccgggctggcgggcggctacgtggcggataacatgctcggcctggctggatgccaagtcctctcctcgagatcatggccttcaagctcccgtccatctgcccttaatcg

SEQ ID NO: 314854 - DNA, 132 bp, Zea mays
aaaattgcgcggcgacttctgtgcatgttgttcagagtgcggtcctggcagtgattcttgcataaggatgcgtccagatacgacgggagagtcgaggtccactaggagtgaagttatcgcgggagccggggg

SEQ ID NO: 314855 - DNA, 94 bp, Zea mays
  unsure (1)..(94): unsure at all n locations
agaaaaaaaacaaaaaaaaaaaaaaaaaaaaaaaaaagaaagaagaacaaaaagataaaaaaattaaataagggggggcgngcacaatcaggtt

SEQ ID NO: 314856 - DNA, 410 bp, Zea mays
gacacacccctctaaaatcactcctgatatctcgtccctctcattcgtaacactactacagcaagaacacaagctaggcgcggtgggtacggtgcaagtgagctagcagctctaccgccatgaggccagcagcagagttcccgaccatgagccacggcgcgcccatgggtgcgaacgcgaacgtgcctcactccccgtggcagtcgccggtgccgtacctgttcggcgggctggcggcgatgctggggctcatagccttggcgctgctcatcctggcctgctcctactggaagctgtccgggtacctcgacgccgaccgcggccagcgggccggctcgtccggagaagcgggcgccgacggggataaagggctcggcggccggcgcggccaaggccccggcggcggggtt

SEQ ID NO: 314857 - DNA, 77 bp, Zea mays
ataggagggcgcggatgcgtcgtgaagccgttttaaggtcgctagaccgcttgctgtgccacttatgtttcggatgt

SEQ ID NO: 314858 - DNA, 98 bp, Zea mays
attcaccgcacctcacgtgtgaaggaaaggggacgcagatgccgattgggctcgcgttctggaacctcttcagccgggtcttcgacaggaaggagatg

SEQ ID NO: 314859 - DNA, 174 bp, Zea mays
aatcgtattaacggcgggttccacgacgccatctccaggaacatcaggctggggatccgcaaggactcgcagcgagggggccaagctcgacgagcgtcaggggctatagtccaccaggagcgggggggagaggacgagccacatcgactgggtggcgcggaggggagaagggca

SEQ ID NO: 314860 - DNA, 126 bp, Zea mays
cgcgtcaacacacacaacctgcctctctcgtcccctggcggcgtctgcagcaggatggcggattcaacggcgaggaccgttaccgcggccaagccgtgccattcccgcgtgggcgagtccccacac

SEQ ID NO: 314861 - DNA, 365 bp, Zea mays
tgaaataagtcaaaaataaaaaaaaaaaaaaaaaaaaaaaaagaaaaaaaaaaaaaaagataaaaaaaaaaaataaacgaaaaaaaaacgaaaaaaatacttcataaaagacagggggggcccccctaaaggttcgtcgcttaagtacgtttgaatgcaacataatatcccttttatggtgcttcctcactttgcttcacggcccgtttttttaaactgtcgtaatgggaaaaacgctggctttcctcaccttacccaccttttaccaaacccccttttcgcaaggtgcggtacctgtaacggggccttaaccgttgccgcttccgaagttttgcgcagcgtgactgccaaaggggccaccccct

SEQ ID NO: 314862 - DNA, 306 bp, Zea mays
aagcagcaacgcactcacaaaggaaaaaaacatcatgctcctgcccacaacatgatcgatactaatctcaatacaccagcatcgcaaactagacaggggtcgaagctctcgcgggtccttccattgcttgagcctgcgcgttatgtcagtgcgcttggaaattctcacatcgttttacatttaatgcgcatctttttagagctccctgtcggtaaaacgcgtggcgttagctacttcaacccctttgcggtatacccccctttcggcaacttctgttggcgctgtcaggccccccctttttgccca

SEQ ID NO: 314863 - DNA, 357 bp, Zea mays
gcaagaaccacacctcctcccttcgcctgtgatcatgtcgtcttgctgcggcggcaagtgcgggtgcggctccagctgctcctgcggcagcggatgcaacggctgcggtatgtaccctgacgtggagaccgccgccaccagcagcgtcaagaccacggtcctcgccgcgccgaccaccaaggccagcgccggcggcttcgaggcggccaccgagggcggcggctgcgactgcaacacctgcaagtgcggcaccagctgcggctgctcctgctgcagctgcaactgagctggcccggcccggcgatggcgcacgagagtcgagaggaggaggacgacgacgaggcgtataaatataat

SEQ ID NO: 314864 - DNA, 202 bp, Zea mays
agccacgcttccggtttgttttcctgtaacatgtgtcacaagctgtgctatgtaccagtaaaccagtgttgtgcgatatgtagtgcctcagaatctagtcaagggaaagcagatgtaatagcatacttgtcgtctcacttgtgtgaatgtacaactaccaccaacagaccatagttgcgagtgccaaaaggcagcagaagca

SEQ ID NO: 314865 - DNA, 183 bp, Zea mays
aaactattagcgcgtcgatccacctctccgaggtcccctgctgcgccctgtcccgcctgtggcttattcgtcgacgtgggggactatgtccagggtgatggctgccatgctgctcggattgcggggcgtcgccagcgctgcaagcctcaccggtaagggcaacgccgtcggcatgccggctct

SEQ ID NO: 314866 - DNA, 289 bp, Zea mays
cataataatgcaaaacgaaccgtgaaaaaagaactaagtcggtagaacatgaaagaagcggaacacaaagaagtcggaaacaacaggacataaggctaggcctgcggtgaaagtttacaggtggagcaatcgcaccgttcagtcatcgcgggaacaacagggggggcccccatgagggtgttcgcttttagctcgtggggatgagccgccaggaccgccacaagcggcgccacggattcatttttcgggggagtcttttttaaaacgttccggtggggaaacatcgggg

SEQ ID NO: 314867 - DNA, 102 bp, Zea mays
aaaataagtcaaaataaaaaaaaaaaaaaaaaaaaaaaaaaaaaaaagaaaaagaaaaaaaaaagggcggatgctcaataaagataaatgcgtaggtcttcc

SEQ ID NO: 314868 - DNA, 106 bp, Zea mays
accgagcgatcgagctctccggtcgctagcacagccggcgactgcacacaacggtgctgctaggttgcaagcacttgcatgattgcgcaggtcgcgaagacgcttc

SEQ ID NO: 314869 - DNA, 174 bp, Zea mays
aagtacggcgtggcggtcgtctgctacggcatcaggaagacgggcgcgcacgagtgcatgctgcagacatcgcggggccggtcgcggggagagggcgcgggtcgcccggatgcagaccgccggcggcatccgcggccccggccgattccccctgcaggctgctgctcacgtggt

SEQ ID NO: 314870 - DNA, 206 bp, Zea mays
ctcgcaggtcaatacaacactctagagtgagtcgtactaccgtctggttcataaatggtaatgtaaatggtaacactaatgatttagactgtgcatgaattgtctcttggcttcaacttttgtccaatatcagccaaaccataggtctagacattgaagtacctttttcaaacaatcaactttttgacaccatcttcttcacccaa

SEQ ID NO: 314871 - DNA, 304 bp, Zea mays
acacaacgtcttcagatccagatacatcgcgaacgtcaggctggtccacaggctcagtgtacgcgggttcaccttatcacgggagacgtaacgatatggcgacgtcgatccggcttgcgctgatcgagatgaaccgcgccaccaactgcggaactgcgtatacgacgacgacagctgctgagctcgtgcgctcacagagcaattaccatgtgcgatcacgttacctcaagcagtctgcgtgtacgacgcacaactgggaccgcgctgtgtccagcttgtgagaagctcactgggaagacgatca

SEQ ID NO: 314872 - DNA, 80 bp, Zea mays
ccaagcctctaaacagagtcgtattatctatgggcagtcacgcatattgctaccgcggatgcttcaagcactggttacga

SEQ ID NO: 314873 - DNA, 79 bp, Zea mays
aaacgtgacacatccagtcacaagttttgacgcgacggtcaatgcttcagataatggctgagctcgtgtaaagtgttcc

SEQ ID NO: 314874 - DNA, 166 bp, Zea mays
cttcctttcccttcggcaatggcaacttcccaacccaattccccggaaggaccggcggcggcggcggcggcaaggtctttcccaaaatcgggaaccggggggggaacccccggaggcaaaggccaaaatttcggggccccccccaaaaaaaacgaaaaaccccatt

SEQ ID NO: 314875 - DNA, 367 bp, Zea mays
  unsure (1)..(367): unsure at all n locations
ataagnncacgcgtccgcccatgcgtccgcaggtgaggctccgcgcctgcgcgggccctagccgtcgtctgcgggacttcatcttcgcggtgggggaatacttcttcaggcactggcagaggtgaggggtccaggatattggggtccatcagcttgatgtcatcatgtgcggggaggtatctggcatctcgattgggggcctttgcgcagaaatgtgttgcgatttttgttgtatgcgaatcgtaggtgcgccgatgtgcgcttgtccgggtcggcgaggagtgactttaggggaaattccaggggaagtctctgatctgattggattgtctgtgtcgcaggtggttgctatcgggtggcctttttg

SEQ ID NO: 314876 - DNA, 335 bp, Zea mays
agccggttccgctacagagtagggtaggccggggggcacccgcgatggggccggacggcggaggggtgatcggggccgtggtctacggggcgctggcggtgctggcggtgcggctggtgctgtcgtacaagtcggcggcgcacgcgctgcggcgggcgtggcggtgggcggacgagcgggcgcaggcgtaccagcactacgaggtgccgcgcctcgccgcggacggcgcggagaacccgctgttccggaaggcggcggcgtacgtggcgtcgctgccgtcgctcgaggacgcggacgccgcctgcgtgctctcgtcggcggccaagagcaacggc

SEQ ID NO: 314877 - DNA, 379 bp, Zea mays
aggcactggagaggatgagagagatggtgaatatgttgtctccaaactattttttcagcaacagtttaaacctggggacaagaatgctcaagagctaactacatccgatgatctggaatcaatggctgctgaatcaaatctcccagattttactacattgcccactgacaaacatgttggtacagtccaagaagttgttcataatcctgagcataatctttaccagcttaatagaaactgtgaaataagcattgaagagactgttgtcctcccaccctctgtaaaaacaacaaaggacggagataatctccaatcacaagatcagaagttgtgggaaggcgattcccagtttgaattgttagactctcagcagctggca

SEQ ID NO: 314878 - DNA, 375 bp, Zea mays
agccagccatcctacagtcacacacacacacacacacagacaagtggtttccaaagccaagtgtgtgtactagcaaccagctagctcgggcggcagcaggcagccatcatgtcggaggagaagcaccaccacttcttcaaccaccacaagaaggacgaggagcagcccgccggcgagtacgggtactccgagaccgaggtggtcaccgccaccggcgagggcgagtacgagaggtacaagaaggaggagaaggagcacaagcacaagcagcacctcggcgaggccggcgccatcgccgccggcgccttcgcactctacgagaagcacgaggcgaagaaggaccccgagcacgcgcacaggcacaagatcacggag

SEQ ID NO: 314879 - DNA, 146 bp, Zea mays
aagacctcacacacacaacatcacatacctggattccaaggcgaaatgtgtgtaccaataaccaagctcgcctcgcgggagcacgtacccatgatgcggctcgagcgggcaccaccgcttcttcaaccgcgagtagatggaccagg

SEQ ID NO: 314880 - DNA, 411 bp, Zea mays
ctcgcgggtcgacacacgcatctagcatgattcgaattagcagtactatcggttcatctggaatctcttctatgctgaatatatcttcttcccgttaatatagagaggtgagtttcctgattagcattcagcatccatgaccctttgcttctgacatttgtctgcacaaaaaaatgtcagatcttgtagttcatcttgatcttgggctacagcctaattcatggtgaaaagagggagaagttggcaaagtgaggtctgtcgtgcatattttcaacggaaacaatggagtagcaatattgctatgctagggttctgaagttgtaggagcttttctaagcttttacgatgttgaaggcgttgttggagctgtggaagctgttttccttttttttccttttgtatcaacagtgt

SEQ ID NO: 314881 - DNA, 366 bp, Zea mays
atctaggctgcggcggtgggccgcctgccggttccggcgccccgatgatgggcggcatggcaatgccagcgcctcggccgccgctgccgcagcagcaacagccgggcccgggcatgatgatgaggccgccgaacatgatgggcggcgccggtttccccggtggtggcatggggccgggcatgggccagatgggcggcgcgccgatgggccaccctcaccacccgcacccgcaccagcacatgggtgcgggtggcaatggcatgcagatgcagcctggcggtggcggtggcggtgccgtgcatggcatgccagccggcgccatgccgggacatgctgctgggttctaccaaggcggtggtagtgcag

SEQ ID NO: 314882 - DNA, 196 bp, Zea mays
aaacggtcatcgcagcaccgttatggaagcagccacgccggcggcgccatggggacgggggcactgttagctggacgtgccgcgggcggcgcagctggttacggcgcagacaggcttgctcagggggagagcggacgtggtagatatggggactttggacgccgaggccgtcgccgccgtgcatatgggcgtggtc

SEQ ID NO: 314883 - DNA, 375 bp, Zea mays
agcatcacacgcaagaaccacacctcctcccttcgcctgtgatcatgtcgtcttgctgcggcggcaagtgcgggtgcggctccagctgctcctgcggcagcggatgcaacggctgcggtatgtaccctgacgtggagaccgccgccaccagcagcgtcaagaccacggtcctcgccgcgccgaccaccaaggccagcgccggcggcttcgaggcggccaccgagggcggcggctgcgactgcaacacctgcaagtgcggcaccagctgcggctgctcctgctgcagctgcaactgagctgggccggcccggcgaatggccaacaaaatcaaaaggaggaggacgacgacgaggcgtataaatataatagcggcgt

SEQ ID NO: 314884 - DNA, 401 bp, Zea mays
gcgcgggtcgacacaacactctagagtgagtctcactaccccctccggttcgggttcgggttcgtgaggttctccggggttcggtttcgtgggtgagcggatcgagatggcggcgtcggatgttgagtaccgctgcttcgtcggcggcctcgcctgggccacggacgaccactccctccacaacgccttcagcacctacggcgaggtcctcgagtccaagatcatcctcgatcgggagacgcagaggtcccgcggcttcggcttcgtcaccttctccacggaggaggcgatgcggaacgccatcgagggcatgaacggcaaggagctggacggccgcaacatcaccgtcaacgaggcccagtcccgcggcggccgtggaagcagcggcggcggcgggtacg

SEQ ID NO: 314885 - DNA, 54 bp, Zea mays
agggaagtggaaaaaaaaaaaaaaaaaaaaaaaaaaaaaaaagaaagaaaaaca

SEQ ID NO: 314886 - DNA, 202 bp, Zea mays
  unsure (1)..(202): unsure at all n locations
ataaangacgcgaaacaaacatcaacaagaaaaaaacatgcaaaaaaacaaaagaaattcagtggaggaccacaccaacggctaaaaaactgtggtacgcgagtcggcgcagcaataactcgtccaaacggtcctccatctacatctcgcaggccgtcgatatgtagcgctccaactgggagtccgcggccttttcccacgg

SEQ ID NO: 314887 - DNA, 106 bp, Zea mays
aaaccgctcctggggttcacgttcatctgtaacgtgctcgcggtcatgtccgtctcgtgccggatttaatatttagatgcatgtccttgtgttttttctgcgttaa

SEQ ID NO: 314888 - DNA, 203 bp, Zea mays
gtcccagatcgattacgatccctcttttccacagctggacgctgaccgcgagccgtccgagctcatcaccgttatcacttctggactcttctccgtcgcactctacagacaatttgtcacgtaaatatctcggcagccatcattacagacaccatctctgtgtcctgcaagacgacagcaccgctcgctatcgcctcgcccta

SEQ ID NO: 314889 - DNA, 100 bp, Zea mays
cggtcgagacacgcgtccgaaataaatcatattaaaaaaaaaaaaaaaaaaaaaaaaaaagaaaaaaaaaaaaaaaagggaggcagctcaaaaggaataa

SEQ ID NO: 314890 - DNA, 178 bp, Zea mays
gtattacgtgttaacttcgtttcctgtcattgctctatccatttttggcagtttggctgatgtgtatatatatagctgtaaacacacgcaaatataaagtggtggctgtggacacgccaatgtgttgtttgagtaaaaaataaattcaaaattaacgaacaagtgtaaaaaatgaaac

SEQ ID NO: 314891 - DNA, 148 bp, Zea mays
atacaagcctctaaaatgagtcattgtaggaagttgaatggaatgccgtcaatgtcggacaactctcaactaggagaagaaaaaaaaaacatggttgccagcaccatgcatgtgcaccaccattcgttttttaatgtcgtcctcattg

SEQ ID NO: 314892 - DNA, 313 bp, Zea mays
tcgatacaggcctctaaacatagtagacatcaacccagttgtactaaatgatccttgtgaggatggtgtgttagcacttagctctggtaattagcttcggtgttattacttgacatctgttgtccagttgtgatatctgtgaatttcatctattaaatatatgtagataagatttaatagatgaaattcacagatatcacaactggacaacagatgtcaagtaataacaccgaagctaattaccagagctaagtgctaacacaccatcctcacaaggatcatttagtacaactgggttgatgtcgtttgtgag

SEQ ID NO: 314893 - DNA, 407 bp, Zea mays
cttacaacactctgacgtgagtcgtattatcagtgagtacagcagcagcagctgagagcgtgcgaagcaggagggaggacaagaagaagccgatggcggttgtgagcggcagcggcgggaagctgaacccctgggcggagcccttcgttccttccggggcgcggtaccgcggcctgcggaccatggaggcgacgccggagcaggaggtggaggacttctcccccgagtggtggcgcctggtgtccgcctccccggccttccgcgaccgctggctgcgcgagtactgcgcgctcggcctactcgacgccgaggacgacctggacgacgacgtcgacagcttcctccccgacgacttcttctcgcccccggccccgcgccacgagagcgagcgggaggacgccgcgggc

SEQ ID NO: 314894 - DNA, 315 bp, Zea mays
aagtggatcggagacacacgattcgcggaaggacgaggaagtccgatctgccctcgtgtcgcagagctcgacgaacaatgtcgcggagacgccgtggatgcgcatacgagtccttcacacgggagctccgggacaccttccagggctttcacttcggatctggaggcaggagtagcagcagccagtgctgctcgttcggtggcagcaccagctatgagacagcggtcttctctgggattcgtgtagaagggaacgagacgactgaagcgcgaggttgcaagagtgacgtgccggggctgaagtagggagatgtgg

SEQ ID NO: 314895 - DNA, 350 bp, Zea mays
cgcgggtcgatacaagcatctagagtgagtcataatacgttaataggagatactcggagtcgccagtacgacacattcctaatctgcactcgtgagtcagaactcgaccaacaatgtcgcggatacgccgtggatgcgcattcgacgccttcacacgtgagctctgggacaccttctagggctttcacgtcggatcaggtagcaggagtagcagcagacagtgctcctcgttcggatgcagcaccagctctgagacagtggtcttaggtggggttcgcgtataatggtacgatacgactgaagcgcaagtgtgcaagagtgaagtgccggtgctaaataaggaggatgtg

SEQ ID NO: 314896 - DNA, 416 bp, Zea mays
cgggtcgatacaagactctagattcactcctcactcaccggttcgggttcgggttcgtgaggttctccggggttcggtttcgtgggtgggcggatcgagatggcggcgtcggatgttgagtaccgctgcttcgtcggcggcctcgcctgggccacggacgaccactccctccacaacgccttcagcacctacggcgaggtcctcgagtccaagatcatcctcgatcgggagacgcagaggtcccgcggcttcggcttcgtcaccttctccacggaggaggcgatgcggaacgccatcgagggcatgaacggcaaggagctggacggccgcaacatcaccgtcaacgaggcccagtcccgcggcggccgtggaggcggcggcggcggctacggtggtggccgtggaggcggcggcta

SEQ ID NO: 314897 - DNA, 393 bp, Zea mays
atggcggcaacagcgtctggacccgcccggcctcccgcaagggcaagaagaaggcgaggcagccgggcggcctcggccacggctccggcggccccgccggggccgccagaggctccaaccctaggcccaacgccggcggcgaggaggagttcctcctcgtccccgcgacccgcctcgccgccgagcgctccgacgacgcgcccggccagcctgtgctcctctcccgcgtcttcaagtccgagcggatcgagctctcagaggaccgcctcaccgcggccagcaccaagggattccgcatggtgcgcgcgacccgcggcgttgcggcaggggcgtggtacttcgaggtcaaggtcgtgcacctcggccccaccggccacacccgcctttggatgg

SEQ ID NO: 314898 - DNA, 129 bp, Zea mays
tctgcgcacggacagtgcaccagcctgcttaagtatgctgggcatgatggacctggttagcactggccttgaatgatcggcacgatagctgtcatcagagaaagttgccgcagagtccaaagaaatagc

SEQ ID NO: 314899 - DNA, 249 bp, Zea mays
tgagtcgtattatcgtagtcaggcgggtgtgcaggtcgcccgcgctccaacagcatggagacggtcaacgttgtcatcctctcgttcttcttcatctttgctgtcgagcgtttctttaaacgcctcgatatcaggagcgggaaggtgaagcctctgccagtgggcggtctagccagcgcggtcctctgccacctgtaagtcctcgtctataggaatattcagcacatgttcacgcgcctctctgtgcgc

SEQ ID NO: 314900 - DNA, 366 bp, Zea mays
taagttacccctttaaagactgcacttttaaaggacttctatgtaatggatgggagtaatcttcagattttattttatttcatgtttatattatgttagttattttgcatgatggcttattgttcagtacaatttgttcttgtttcattgttttcaacaagactcaacttttattctggctattgaactgtgagggtactggtagattgcttgaaccttttattgttttgttatttgactacatgtcaacatcaatcatagaaatgcatactatgcattgttgggaaggatcagaattaacagagagtgaatgtaagcataaactgaaaagtaaatataaatgcttcaagtgcagatcataataca

SEQ ID NO: 314901 - DNA, 362 bp, Zea mays
aacgtcgaggagcttccggggggcagagcagggcaggggagggggaggggagagaagaaggctcctgcttgcgtaagcgaccaagtcgttcttccaaggaaacgaaggggaagggaagggcagggagggcgacagaggctgatcggagctcatcatcgttcgatggcggtgaccgcgacgacggtcgcggcggcgaccacgatgctggcggccgtggcggcggtcttcctgaccctggtgctctgcttctacgtcttcctctgcgccaagcggtaccgcggcgaggcgccgccgcacgcggtggccgccggcggcggctgcggcgtcagggcgtggctgcgcgtcgtgttcggcgtcggggg

SEQ ID NO: 314902 - DNA, 73 bp, Zea mays
  unsure (1)..(73): unsure at all n locations
aaacggnggaggacgaggaggggccgcacctgagggcggacatgccgggccggcggaaggagcacgtcagcgt

SEQ ID NO: 314903 - DNA, 271 bp, Zea mays
acgagctcttccagtgaggagtacccattggggcgggcttcaccaccgccgggcatggccggggcgccacatctacgggccacgcagccgcccccgcggatcctggccgagccgctgctgggcttggtcgcggcgcctccgcagccgcccccgcggatcctggccaaggcatcgccgccgcggagcttggtcgcggcgccactgcatccgaccccgcgtatcctggtcgaggcgtcgccgccgctgggcttggtcgtggcgcctcgccgcc

SEQ ID NO: 314904 - DNA, 322 bp, Zea mays
attcgcgatagatagcgcgaccgatccactgcgatggccaccgtccagcctcaatccccggcaggtcccattcatctcccgcacgaggatcgacacggggacgccccggtaccgccctccgtctccggcggaaccgccgccgcaacgtgagctggcggccagatctccgcgcatcacaagcaactcggcctcgtcagccgctgtgaaggataggacgccggtctgggccaccatcgcaagtcggggatggaatcttgtggctgaggccatgcgcaagtacgctgccccgcggtcttctcgcttccacagcgttaccaggctc

SEQ ID NO: 314905 - DNA, 386 bp, Zea mays
atcttaccaagtcctcctcgggttagggttccttagggttttgtggaggggcaatggcggcggctgatgtggagtaccgttgcttcgtcagcgggcttgcctgggccaccagcaacgattcgctggagaatgccttcgcctcctacggcgagatcctcgactccaaggtcatcaccgaccgggagacggggaggtctcgcggcttcggcttcgttaccttctcctccgagaactccatgctcgacgctatcgagaacatgaacggcaaggagctcgactgccgtaacatcaccgttaaccaggcccagtcccgtggcggtggccgtggcggcggtggctacggccgctgtcgcagccgccgctgctatggtggcgggcgccgtgac

SEQ ID NO: 314906 - DNA, 187 bp, Zea mays
aaacagtgcacagactgcttgaccgcgcgataacggccacgcgggacgcgagagtggagtcaatggatggattgcacggtccattaggggagtgcagcaaggtcgtgctcgggatcgactaagggggacgtctccatgaagctcggaatggtcaccgtccagaagcaggtgccagtcgcctgtggac

SEQ ID NO: 314907 - DNA, 87 bp, Zea mays
ctcccaggtcaatacaagactctagacttagtcatcacaaggtgtggcatgttctgtattttatgtctgtataatgcatccaactac

SEQ ID NO: 314908 - DNA, 108 bp, Zea mays
gagtcgtattaaccatcttctcctcgctcctcgccatcgtcgaggccgctctggtcatcggccccaacgtccccttcagcaacctgcactaggtcacccccttcggct

SEQ ID NO: 314909 - DNA, 125 bp, Zea mays
  unsure (1)..(125): unsure at all n locations
aaaactggntagaagccagaggatggcaccaagcagctgacaaaacggacaagcaataatcgtagagtcgagcctctttcattcgtcattatgggtgatgtgtgcatagaggtcaatacatgggg

SEQ ID NO: 314910 - DNA, 153 bp, Zea mays
aaaccagggtttccgctggtgtctgtcacagcgcacacggtagtggtcgtcagcatggggcggcatcagaccccgtaggcgggcttcatgcgcgggaacgacgaccatggtcccagccaacgcgatatccctctgggccgggcacatcactca

SEQ ID NO: 314911 - DNA, 428 bp, Zea mays
ccgggcggccacacgcgtccaaaataagtctatcttattagcttaacgagtagaaccgagagcctaaactaaagcagtctggctgtgcctacacgcttgccttatcttctcccgttcaccccgccgtgcgcgcgcgcccccgcggcgacaaccgggcgaccgccgccgacctacgccaggtgccaagccgttcctcagtcccatcacgaggccttcaacgaacccttcgccggcgacgagaaaatctaattttcccaaacccgcttcctcgacttcctgtctcgactctcccaagtcacaaccctcgacctcccccctactccaactactggaagtgccgacccatcaggttctgattgattcttctgccccgaaccgcagcggcaagcggagatgaactgcgagacctgtcagctgaaagagctgga

SEQ ID NO: 314912 - DNA, 380 bp, Zea mays
acgttcgtcttcgccatcgtcactcaacaactcgtctcatcgcgccgcatcgtttacctcaaggttgttttgttgcttccttgtcccgctctcaccagcaatcccgtcgatcacccagacctccacggcactgctccgtctcctccgttccgttccgaaccgcaagctcccaacccttccgcgatggacctcacctcgccgtcgcccgcggcgcgccgcgccgccgccatcgcgcgccacctcgccgcagccgcagccgccgctcccatcccggcgagcagccccctggaaccttcctgctgcgtcagctacatcccgccggagtctacggatcagccggcggcatttgcgccggacgaactcaagcttctgctggacgg

SEQ ID NO: 314913 - DNA, 65 bp, Zea mays
aaaatgggcgggttgttggtcagaacgcgactggcgttctagcagaagggttcatcctcggcatc

SEQ ID NO: 314914 - DNA, 417 bp, Zea mays
acacgcgtctaaaattttacatttcatatatataaacgcgcgtggtcgtccacgtcggtataaaaaaaactgtgcacacgatttctcatcgacgggcgcggtttcttcttctgtgtcgtctcccaaagggccactcaaagggctgccgtctgcagcgctgacgaccgcggcgtcggagactagcgtgcatcccgtctcctcgtctgctccgttcgtctccacagcttgtacaggtcgctgaaacacttggaacaaacagagcttgcttctgaagccctacacctctgaaggatcaggtatcatcaacgaatgtatcaagtaaatttacctgacactcctcgacatcgacgaaacatcttctgatcagttcattcctaactattaaaggaagtttacgctcttccatctactgcaaaa

SEQ ID NO: 314915 - DNA, 270 bp, Zea mays
tcacgggccgacccacgcttccaccggcccgctgacaaactgatagacgagaaccatccagcactatataagaaggtgaaagtcaaagaatatactgctggactctacgaacatttctctcgagggaaattggttaaagagactgcaaagatatagcttgtgggctttggattaaatccatggactaatccttagagacagggacactgtataagtagtaaaagtcggtacgaattaaagctcaagctagtcgtatctaggatcgcaaag

SEQ ID NO: 314916 - DNA, 77 bp, Zea mays
aaaaaaaaaaaaaaaaaaaaaaaaaaaaaaaaaaataaaaaacaaaaaaaaaataaaaaaaaaaaaacaaaaaaaaa

SEQ ID NO: 314917 - DNA, 373 bp, Zea mays
tacttagcatcattgtactacgatcggtttggatgaagatgtctggatattacgattgcgttttgcacctactgaatcgatgatattgtgtagatggacaaccataattgttgtagatatgttgtggcgatggaactcatgtaatggtcatgtcgcgaatgtttcatgctgctggaaattatgtattcacactggactctagttatgtgcctcactagtttcttgaaggtagttgttgaactaggtatttcttcgtctcttgtctgatataggtgtaaaccatgtggcactgccatgggaggttgactgtccgaatgctacgcttttattaaagctgccagaagcactgaccaataaaaatactaggctgatt

SEQ ID NO: 314918 - DNA, 239 bp, Zea mays
acctgtcactagcgaagcataattcgtcgagcatacacttgctattatcccaacgagttcggttcagtggtttactctcagatttacgcacagatatatcatggcatcatcgacaacaaattcgcacgtgattcggcacagtagcatcctgttagacgcgttctcgctcgaactcagggagcctttcaacatgttccgctccatcatggattctgagggttcgtccggctccggtacag

SEQ ID NO: 314919 - DNA, 149 bp, Zea mays
  unsure (1)..(149): unsure at all n locations
aagtgnctncnncggcatgcttcctgtctcactcttgcctgccactgcgttctgtttgttgcgctccgtggggctggggtcggctgggtggctcgggcggcgcggcggggtgttcgggggcttggcggtggtgctctgggaggcctgcg

SEQ ID NO: 314920 - DNA, 109 bp, Zea mays
atacggggcgcgtcggggtcggggggctcgccgcggggcggggggggcggggccatggttgccagccccgtgcgtgtggggcatccggggttttttggtgtcgtcctca

SEQ ID NO: 314921 - DNA, 327 bp, Zea mays
cccacgcgtccgcggacgcgtgggtaggagcttagccatgtgtatagatgtatttatctcttcatttccttcttaaagtttagcaagtcgggctcattatattgattagcgaataagtgctttcgttaccatggaccaataatcttcgaaacggcctgagttagactgcacacacatttatttatcagaaaagtttctagtcacactgcgcagtatcgatgttaaaaaaaaagaaaaaaaaaaaaaagaaaaaataaaaaaaaaaaaaaaaaaaaaagggggaaaacacaaaaggagagaaaacataagtgggggttcgtccaaaag

SEQ ID NO: 314922 - DNA, 94 bp, Zea mays
tgagtcgtattagacagcggctcgaggagatggtgacattgagaggacgagtggagggcgcgcgctcctcgggctccgcctggtctcggcgttg

SEQ ID NO: 314923 - DNA, 129 bp, Zea mays
aaaagagcccagctttgctcgggtggcctttcgggctcactgatggtcgagttcctgtccgatggagagttccacgagggcaaggtggcagggaggccggtggcggtccgtgcccaggtcgaggagagc

SEQ ID NO: 314924 - DNA, 120 bp, Zea mays
aaacggcggcggcggcgaccatggggctggggggcggcggccgggtccgcgggcggcgcagggggagcaagggcggggatgccttggcgtgggccgtgaagccgccggccagcgcgcggt

SEQ ID NO: 314925 - DNA, 320 bp, Zea mays
tcagcacaagcatcagcacacgcatcggccaacgcctccgcctaggcgtcggtttatgaaagggacaaaggtgctccatgccttggcgtgggcgtggaggccgcgggccaccgcgcggtggccgagggagctactactaggcgcgagaaatgcgacgtgccgaatgcgtgtgcttattagttatctgttagcgtttgctgcagtgctcttctatggagctccgaccccggactggaattatctcgtaggcccttccaggtgctactctacttcagctgctgtccctgtgcaactcgtccgggcaagttttgtggctcgct

SEQ ID NO: 314926 - DNA, 86 bp, Zea mays
aataaaaaaaaaaaaaaaaaaaaaaaaaaagaaagaaaaaaaaaaaagagggcggccgcactaagggttgcagccctatatgatca

SEQ ID NO: 314927 - DNA, 262 bp, Zea mays
aaagcatcgtcagtcggtggcagtttacaagaataatactcaaggaacagtcgcttctgaggttgggacgttgacgagatcgaagaaggtgcgagttgtggaggaacaagatttcggggagggggaggcatgcccgtggatagttggagcgcttgtactcgtgcagctcagtggaattcatgtgactgggcccatcgtgagggagctcggtggaagagctagtctcacagttggtgctgtttcggctagtgatgtgaccggg

SEQ ID NO: 314928 - DNA, 305 bp, Zea mays
agcctctaccgagtctcctacaacatgctcaagaacgcggccgacaagtcggaggacaagaagaggaagaagaggtcgtgagcgtcgagaacggaagctctcccacatgcataggagtaactgccagggttccttcctggggtggaagtgtggaactgagcttgaatgttaagaagtgttcctttgttctcttcctctcttgatgactctgtaaatagctatgtcaatctggttaagtttggtttggttgcaaaaaaaaaaaaaaaaaagaaaaaaacaaaaaaaagaaagaaaaaagagaaagg

SEQ ID NO: 314929 - DNA, 364 bp, Zea mays
ccgggctgacccacgaatcagggcatcgccctcaccagtttgctccttatagcgtaactcctacaggacacgaatcctgcaggggcaggagaatcatagttttaacttttaagctacccctcgaaactgcaacggaagcacaggagtttggaattggggaacaaaagaagacatccagttagcactagcaggcaaggctgaaggtttgctgccagcaagaaatttgcatggaacactaagaggtactacaagccttggttacacaaatcctggcaaagttgcaggtccaagtgcagcaggattcagcatgccgggaaatccaatctgctcagttccagccggcacgccacacttgcaactttcc

SEQ ID NO: 314930 - DNA, 267 bp, Zea mays
  unsure (1)..(267): unsure at all n locations
aantgtgctccttagggcgtctcgcggaccgggccggtggcgtgcgcgggcacgagattcaccgttcgcgcttttaagctatccctcggtcctgcagcggtagcataggactttgggggtggggaagccgatcagtgatctatttagcactagcaggtatggctgaatgtttgctgccatctacacatttgcatggaacacgaacaggtactagaaggcttggctacacagatcctggcagggttgcaggcctagctggagcagggt

SEQ ID NO: 314931 - DNA, 342 bp, Zea mays
agtcgaaactatgtacccaaagatggctggggaaacatggaagagtgtgcggcagtgcgtgggcgctcaatcacagcgaatgcttggggctgcaggaagttaacgtgacactccatcttcagacacacgtcgtgcagaatcacatattcggagcatgcttgaggatttcacacagactggcgaacactgcatgtcgcttcgacatcactgatggaatgaccatcgaaggttactgaagaatacctcgcatcacgaattacaaattgccgacatgatgtggactgtcgcaagtatggagactcacaatcactccttaggtgtgcattcatagtgttcaatgat

SEQ ID NO: 314932 - DNA, 77 bp, Zea mays
atccggtcgggagcttcgagagatttccatcaggtttagcgtcacgcgggtatagtgatgcgggtggggtctgtgta

SEQ ID NO: 314933 - DNA, 231 bp, Zea mays
cctactgctactctgggtcactctacaacaccaaatgagcgacccatccatgcatcccatcctgcattagggggatgcatcatccttataccctattctatcataattattaactcatcattctatcatacatttttatatatttggcttattacttttacttttattttcctcgcttcttcagtttatacattgattttgattggtgttatcgtgatattctttttttta

SEQ ID NO: 314934 - DNA, 187 bp, Zea mays
accggtcgtctctgccgcggcggccctttctccgcctccccctccgctggcgccgccgccgggcagccgttctcgccgctcaccgcctcttcgtcatctctttcatcctccccttcttatgggggctccacctccgtcagcatcgacggtgacctgctcccaccatctcatgatatccggctactcc

SEQ ID NO: 314935 - DNA, 241 bp, Zea mays
ggcggccgaggaagcgcccgtggtggagaccccgccgccggccgtcgtgcccgaggagtctgcccccgccgaggccgaggccgaggccgaggctgctgctcctgctgatcccgaggagcttcccgcggccgagcagcaggcagccgccgaggcggaagccgcggctcctgctggtgccgaggagcccgtcgcggccgaaccggccgccgaggccgaagctgctgctcctgctggtccccaa

SEQ ID NO: 314936 - DNA, 237 bp, Zea mays
aactgcgcaggattgagcatcgtgcatgtgtaaggaactctggggagctttcgactcattacctacttcatcacacgggttgaagattcgagatcagctgcttatgtccagcgaatattgcttgaggatgggaatcatacagcagcgttaagggaaagatcggactgccgactaagtagtactgtcagtggagaagttttgttggttcccggacaggaacgagctcctcctggaaca

SEQ ID NO: 314937 - DNA, 226 bp, Zea mays
atactcgcactacacgcccgacacgagacaatcaggaccacccctcggcgcaacaacggcacaagaagatcatacgccgcaggcgactggcacatcctgaagaagaccccggtggctaatctcgtgcagctgcacaagtcccagcacctggtcctactgatacggatgccggtgagtatggatttccggttgatgatcgtacgcagtgtccttcatgcgttgcgga

SEQ ID NO: 314938 - DNA, 383 bp, Zea mays
aaacccatcgattcaaacatccattctataataaccaatgggctccaaaggtccggtcctcctccgcatcccggcggtaaccaacttcggccgcgttgctcaccgccgcggcggagcaaacccatgagaacaacaagaaaatggtggcgaggagcaaggacgccgcggccggcgtgataaaccagcaggaacggcgcggcggcggatcagacgagtactgccacgcctgcgagtacggctgctgccaccacgtattccatggaggatgccagaagtgctgcacgccgctaaccggcgctgcatgtggccgaccgcaggaggttaagaactagtatacgtctacacccgccggacggccgctgccatgcatgcatgacgccggg

SEQ ID NO: 314939 - DNA, 187 bp, Zea mays
atacgcgcgcgatacgcccgaggcgaagcagtcagcctgagccttccgctgatgagcatcggaacaagacagcacgcctccggcgagtaaccagttttgactgacgatgccggtacgttaactccggcggctcagtaggtgcctgcaacaggtcgtagctgacagctgatccgcatcggtgtgccca

SEQ ID NO: 314940 - DNA, 274 bp, Zea mays
aaaagaaacaaaccataaaaacaatacaagaaaaacaacaaagggcggccgtcctaaaggactgatgcctcgatcatcgtgcacctgatgtccgatgcacttcaagtctgacaaccaacgatccagtcaccggccgtcaatctacggcatctccattgggaacgccgtggcggtaaacagcgtggcctgcacggaccatatcgcccttccccaaaccggcgttttaccgacaaggccagcaccgatcggccttcgcaccaatttcccaccctca

SEQ ID NO: 314941 - DNA, 149 bp, Zea mays
atgagtcgtattacgaacagaggcgtcacgtccatcaccacggctgaaggcttgagcgacacgagcggacggataagaggccccaacgcagcgaccaaaagtgtgggcgcggctctcgaggattcatccttaccgatccctgggggtca

SEQ ID NO: 314942 - DNA, 66 bp, Zea mays
tgagtcgtattactcgggtctcttgttcagtggcgcgttgggagttgccttcgtgtacgttccgct

SEQ ID NO: 314943 - DNA, 207 bp, Zea mays
tacaagcctctaaaatgagtcgtattacacaaacaaaaaaaaacaaacaaggtaaaacaaaaaaacaaacaaaaagggtcaacaagcaaggaaaaatggcggaatcaagataccccagttgcaattgagggggcctaccccggtccgtgtcgaccctaggtgacctgatcactgcactgcaacgtgtcatgaacatgtccggtgatc

SEQ ID NO: 314944 - DNA, 252 bp, Zea mays
aatggctgctgctcacgtcacgcaggggacacctcgatgccgcgccatggatgacgccgacctcacgcggggccgacatgccatggtctcctcccacgactgtagtgcaagggcccacgaggccggtcgctggacaggtctccggtatccgcgcctgcgacatggccccgcaccggagcgcttgccgtagtcgactggacgaccgggaatcggcacgaggtcaaggtctccgatgacgggaccgtgcgcacc

SEQ ID NO: 314945 - DNA, 342 bp, Zea mays
  unsure (1)..(342): unsure at all n locations
gtcgccgccgccgcaaccgccgtcacagtcacaccaagaacaacaacggttaacaacaagaacaacaataacaaaacaaaacaataaccacaaccaccgcaaggagaagggttaacctgcaaaccccgggccgtgaaaccaaaagggtgaagaggcagggtaaggaggaaggaggacgcacacgagcaggccgtaccaagagaatctgctcaacatggcggaggcgcggcgggagatcgtcancgccctcaagattcaccgggccagcagcaggaggcagcagcaacccaagtaccagcgtcatcaggagccgccgctgcgtcaaacaccgtttgcgcaact

SEQ ID NO: 314946 - DNA, 155 bp, Zea mays
atgactcgtactaatcaggatctaatgtgcacagtttgtaacatgccatatgtgttctgttgaatcctgatgaccaccgactggtcgcttctcaggtagacggatcggcccggagatgtgctgagatcggggttgctgaggttcttggcaatgca

SEQ ID NO: 314947 - DNA, 366 bp, Zea mays
aagcgtccgcttcccgccgccgccacgcacatcaccgatcggcaccaccacctccaatagtttctcctcgccaacggcatctccgcggagagggtgcttgagctccagtatgtgagagcagtggcgccaacgaagcatgatgaaccttgcccccatgaagactgggttagtgctgtggatggatcaaacacatgttttatattatctggatgctatgatggtcttgcaagattatggaaagatgcatcagtatgcacacaaattttggacggacacaatgatgcaattacttctaccagattcatcaataagggatctgaaaccgagggcagtctgcatgtagtgactggctcataggatatgtca

SEQ ID NO: 314948 - DNA, 162 bp, Zea mays
aacccccaaggccaagccaacaaaccctccccaatccccaactccaaactcaatccagccgccttaaggaaggaaaattccaagaaccaaggcgccttcggccaaaataaaccttaccttcaaaaccccaaaggcaacaaattccaaattcaaggcaacccc

SEQ ID NO: 314949 - DNA, 227 bp, Zea mays
atgcctgaccagagctagctgagtggactacggcatcagcaggtggtctgactgacatcccgaacgacatcaatgcatagggacccgtcgcgggcgaattcgcctaacggagactacaacggccgaccaacgggcctgcaactctgggccgaataacgcacacattaatcgccatatcgaacgaaaaatgcggacttcacaccatcgctacgcgtcctctacaccgc

SEQ ID NO: 314950 - DNA, 428 bp, Zea mays
cgatccaacaccctagattgagtcgtatcacctccccctccggttcgggttcgggttcgtgaggttctccggggttcggtttcgtgggtgagcggatcgagatggcggcgtcggatgttgagtaccgctgcttcgtcggcggcctcgcctgggccacggacgaccactccctccacaacgccttcagcacctacggcgaggtcctcgagtccaagatcatcctcgatcgggagacgcagaggtcccgcggcttcggcttcgtcaccttctccacggaggaggcgatgcggaacgccatcgagggcatgaacggcaaggagctggacggccgcaacatcaccgtcaacgaggcccagtcccgcggcggccgtggaggccgccggcgccggcggttacggtggtggccgtggaggcggcggctacggcgg

SEQ ID NO: 314951 - DNA, 197 bp, Zea mays
gggcttattcaaaaatggttcccgaacaaaaggtggtaaaaaaggccccggcggggcttcccggcggggccggccccaaaaaaaacccggtctctcgctccttgaaggccggcctcaatttccccttaggccttatcggccgcaacctcaaccaggttcgctagtccaaccttgtcggaaccggggcccccttcaac

SEQ ID NO: 314952 - DNA, 376 bp, Zea mays
ctcacgggccgacccacgcctcaacccacacgtccggtacccaccccgtggtgccaagctcgcggagccggcgacgcagcaagggatacggtaccctcccgtccacgcgacgacaggacagacacccaccccatcaccggaagcaccgccaaagcccaaagccggccaattccgacgccatggccgacgtcgacgacgacgctgtcctctccgacgtcgacgaggacccactcccgcccccctccacctcttccgcctcttcccacaaatcccttccacaagctcaaccccaatcacagtccgatgcccaggcgcagcagcagcggctgctggacctggccgcggagctcgaggaagagcgccgcctccgccgcgc

SEQ ID NO: 314953 - DNA, 277 bp, Zea mays
tcacgggtcaacacacgcctccaaaatattcatcacacaacaaggaacccccccttagccaaaccccaacaataagaactcccaattggaacccaagaaacattacctgggcgggctaacccaaaaaattgtgaaggcttttgcaaacaaccccaatttcggcttcaacccttccggaaacagggtgaaaaccgggttaaccttcaacaacccaaggtgcgtccctgccctgggctacgacaatggctgcacgcaccgggaaagtgtcccgggtgcc

SEQ ID NO: 314954 - DNA, 92 bp, Zea mays
ccacgcgtcagaaataagtcatactataaaataaagaataaaaaaaaaaaaaaatgaaaaaaaaaaaaaaaaagacaaacaaaggcagacgt

SEQ ID NO: 314955 - DNA, 246 bp, Zea mays
cgggccgacccacgcgtctagcgcagcgcatcgcagctagcatccagcgctctctccccgctcgccgccgtttagtttctctcgtgcacgtgcatgcatcgtagactgtctcaggccgccgctgcgccggcgccgctcgcatcgtttgcttccttggaccagcagtcgtcgccgtcaggctgaactgcttgtaaccgtgaattccggacccgtttgcttctgtaagatttgtgcatttgcctgagt

SEQ ID NO: 314956 - DNA, 75 bp, Zea mays
ataccatttcacgtttaagaccgaaaacaagccccctctcgatgtactcgtttcatatcgttctgtggttgattg

SEQ ID NO: 314957 - DNA, 318 bp, Zea mays
caagcaagaaccacacctcctcccttcgcctgtgatcatgtcgtcttgctgcggcggcaagtgcgggtgcggctccagctgctcctgcggcagcggatgcaacggctgcggtatgtaccctgacgtggagaccgccgccaccagcagcgtcaagaccacggtcctcgccgcgccgaccaccaaggccagcgccggcggcttcgaggcggccaccgagggcggcggctgcgactgcaacacctgcaagtgcggcaccagctgcggctgctcctgctgcagctgcaactgagctggcccggcccggcgattgcgcacgag

SEQ ID NO: 314958 - DNA, 372 bp, Zea mays
ctcgtgggccaatacacgcgtcaagcatgcacatcaaatagtcgctcatcccgcctgcctgccgccgccgccgtcatgtaatcatatcagccctcttggcgtcgtcgccatcgtcatgtaatcatatcagcccccctggcgccggcgccggttcctgccgccggctcccattggaaatggtggacgacaccagcagatacaactgcttcgagcctgggacggtcttattatggagctcaacaacttgatggcgctcaactggcggcccaggtcgtattcgattgttaatgcattcaatagacagacattcgcaactcttacagatttgtacacttagtttacattttcttttttggtggggggcaattttgt

SEQ ID NO: 314959 - DNA, 399 bp, Zea mays
ctcgcgggccgacacacgcctcagcactccatcatcgtaaggccacagccaccatggtgaagctggcgacggcgcgcgagtgccgcgcatacagcctcggcgccggcgcggggtccggcacggggttgcgcaaccggtgggagtacatcaacgccggggtgtacatcttcgcggcggtcctcctggtcggcgggttcctggcgcagctcctgccgtggggcgggcccagcagcccggggctcgtggtcgccgcgatcgggctcgccggcttgctggccgtcaacacgcacgacctcctcgcgcactccgccggcgtcgatttacgcctcgggatggtggtcgggcttgacgcgcagatggggctcgtccagctcggcgtccccgccgtgcagatcgttg

SEQ ID NO: 314960 - DNA, 279 bp, Zea mays
agacgacgagagttcagccgcttcagtgtcgtcgccgtgatcgctggtagtctgccaatttttttttaatttttcccgcggaccgtcagtagaacaccgccacgcccagggggcgcgggggcagagggattcagatggtagcgggctgctgcccctttttttttccacacacttttgtacctgtagattatagaatgtacaatgtttttgcaaatattttatctctgtatgtaagaagggataaggtctagatcagaagagggaataatcagttaatct

SEQ ID NO: 314961 - DNA, 62 bp, Zea mays
aaacccggtgcgggtccgggttggtgccgttcgccggggttgcagcttcgtgggtgagcgga

SEQ ID NO: 314962 - DNA, 219 bp, Zea mays
cgagggcctccaaattgttcatgattccaaggtagctttccgtaatccaggaaaaggtttcgcacaaaaatcacctgacatcggtcccgtgaagccccgtttttcatctcgaaaacggcttcttttacaattcatgaaggccaggtcccaagcttgctgtcaaaattgcaacagcagtaccatttccgctacggctctccgggagacacctggggaatc

SEQ ID NO: 314963 - DNA, 334 bp, Zea mays
actcatgggcaaatacaagcctcaaaactgagtcgtattagaccgtgtcaagcagccctcgtcgcacccagaagtcgaaaatcttgggccctgccaagatggcgtgaatcagtccgttgccgacgccttcgaaggcctggacacagaagataaactcgctggcgtcaacagcgcagtggactgcaacctcctcgatacgtatgcctcaggttcggcaactgtcatcgtcaccgatgaggccccagcgcagcccaatgagtcgaacaactccttcatggaatacatcaacaccaatggcagcaattaaggtaacatctccaccggcaactccaac

SEQ ID NO: 314964 - DNA, 57 bp, Zea mays
  unsure (1)..(57): unsure at all n locations
aaacnaagtccagcaaaactcgccctcctcacatggccgccgccgcggctgcagacg

SEQ ID NO: 314965 - DNA, 302 bp, Zea mays
ccggggcctcccacatctcgctggaggcagcggaacctgcggcggtgcggggcgatggcgcccaacatgaaaaccctgacgcaagcgctggcgaaggcgtcggctgtcatcgacaagactgtgtccacgacggtgcacgaggtgactggcccgcgcccgctgcatgactaccagctgctggaccaagccgggtcctgcgggccgggactcgcgtggcggatctacacggcgcgatcgccggaccgcgccccctcggcgcactaccccgtcgtctccgtctgggtgctcgacaaacgcgccct

SEQ ID NO: 314966 - DNA, 87 bp, Zea mays
ataagcatatagacagatgcgacctaatcttgccgtgggtgcaatgcatgcaaagatgacgaagctcggagccatcgttgttgctgc

SEQ ID NO: 314967 - DNA, 240 bp, Zea mays
gtgggccggcccaatactctatattgattcgtactatttctttcccctcagttttagttttcaggtttgggaggggggccatgaatgatgaactgtccgtgggagcaaaagaattgcgatagtatttattcagattcatttgtgattctttagcctggtcggttggtcctgttgtgtttgggttaaaaaaaatggcagtggcgtgaggaatggagaaagtttttattgtgttatggcatg

SEQ ID NO: 314968 - DNA, 131 bp, Zea mays
  unsure (1)..(131): unsure at all n locations
aaacngtngagagacgaactagatagatcgcaaactgttttggtaacgtcgtggacaattacaagctagccacaatgccacgatatatcggggggggggaagactcgacaagaccggggacgagggggggg

SEQ ID NO: 314969 - DNA, 242 bp, Zea mays
atagtgtctaccagaccatgcgtcctgaaagactcctgccggcgacagacttcggtgtgtggagacgcgaggatcttgagtcgaggaaggtcgcacgggaggcgcagtaacatgttcgagcccggcacgatggacctctgggacgcctgtcgacagcatgttgcgctccaacatcacgtcggcgacctcgatgaagtccgctactggcgccttcgggagacgccggcagctgctggaaggaa

SEQ ID NO: 314970 - DNA, 216 bp, Zea mays
gcgggccatcacacgcggccatctccctccctaaacgctccccaaatccggtttccaaggccggaaaaatttaaccggccgaccgggcaacggtattccattcaatcccaattagggcgaaaaaattccaatccggcggaaggaatggcttccgaaaacaacttcagttacttaacctccggcggcggcttcccggcggggtacccggcccggaat

SEQ ID NO: 314971 - DNA, 143 bp, Zea mays
caagcctcaggagtgagtcgtatcattcgactccatcgctgggtcgttcaccgccgcctcaggacacggcgtcgtaacgggtgacgcgctcggcgcatgaactgcagaatacatggacgggttcgtcatcgggccacgctcga

SEQ ID NO: 314972 - DNA, 58 bp, Zea mays
ctcgcgggtcgacacacgcctctagatggactcatctaatctttgcatttttcctttg

SEQ ID NO: 314973 - DNA, 310 bp, Zea mays
gtgagtcgtcataaatcgggcaaggagcagggagacgacgacctgtgcacaacccgaactaggtatatctcctcaagccaggcaaggcactcctgcccatcgatggccgtcacaccgcctggaaggaacattcctccacgtacgactcttggtgcacgaaccagccaacaccaccattgtcaagcggtacgacactgacgacggtccgtattcatggaagtagtttgaaatggacgcctcttcgccttgatactggtaatctactcatggagtaagtcatgctgttacccgcacgacccctaccctcgac

SEQ ID NO: 314974 - DNA, 328 bp, Zea mays
actcgcgggacaatgcattcgactagaatgcgacggatcatggctcgtcaccgcgtacatatggccgcagctgtcggcggcgctggagtccgacggcatcttcaagcttctcacggcggagtacctcggtctagctatgtgagcaactgaacggaacacagttagctcgacggatcgatcatatatgtgttttctttcttttgattcgaatcgatgcatgatgtgcttcctttgtttttctgtcagcttttgtacctgtacgccagcagatgagactctggtctttgggatattatatatctgctaaataaagatgagctcgacatat

SEQ ID NO: 314975 - DNA, 403 bp, Zea mays
accggagccggacagcgagcaccgaaagggaagttggcggcggcgcatatttccttcccatcttttcctgtcttccaattttgaactgaaaaaaaatacatttttttccggcgtgaatcaagataactataataaacaaggtatatatacgcagaggcagcattgcatttgcatttgcatttgccgtgggggaagaggtggaggaacctgattcctcaccgcccacatcgactctcttcatcagttcgtccgtccaggtcaatttgcttgagttgggtgggccaacaaagttatattctcggtgacgcggcgggaggagtggtcggcgacggcgacgagaagaaccaaaatcttgggataacggcgtaactgaatggctactggcttgtcggccactatttga

SEQ ID NO: 314976 - DNA, 236 bp, Zea mays
acacatcccaaaagtgagtcgtgttacgtgcagccaagttcagtttccttctatactctcaccccggtttgactgactggccgtcatttcaccagattatgcaggggagtcccatgtcgggttccctcgtacgcgccttgccacataagccccttgcaccagctggcgtaagagagggaaggtatgcgtggatagcacctcccagacagatggtcaccatgataaggtacctggga

SEQ ID NO: 314977 - DNA, 64 bp, Zea mays
aaatgcacgcgacatcacagatcttctacatagttgggcaagttgaactcactgggccgtcgtt

SEQ ID NO: 314978 - DNA, 409 bp, Zea mays
  unsure (1)..(409): unsure at all n locations
agtctcctcctttccacttcctctcccgttgccaggcatggggttggcctagttgtgcccgttgagcactagcagcctccttgaaacctccagatctgtgcctccaaggcccccgttcctcggcaacaagggtcctatctgtggtgtgccagacttcaagatgaggggaaagaagagtgatgagctcgaacctgtcgatgctggcgatgaagatgatgatggtggtgacgatggggacgaggatggtgactttggggaggagggtgaagaggacgtctcagaaggggagggatatgacaacccaaagggcaatgagaccaagaagcaaagaggtgatcctgaggaaaatggtgaggaagatgaggaagaaccagaagatcagganggtggcggcgacgacgatgatgac

SEQ ID NO: 314979 - DNA, 70 bp, Zea mays
tacaggcccaggactcgcgggacgatacaagcctctacacacacgtcctgacctcaacgcgtccgcttct

SEQ ID NO: 314980 - DNA, 217 bp, Zea mays
gtgactcgtcaagatttatcttgcccacttacatttgggtactacaattgggcattttctacctttaaattagtgtccctagtgcagagacgctccttcactttagtggaatacggcgatctcgcttgcggtttagggggctccgatgttgccttgagtctatcacatcctttattgggtcagcatctatccgatccttttgtgggatcacactaag

SEQ ID NO: 314981 - DNA, 376 bp, Zea mays
tttatatgttacccactgaaatttgggtactagatttgggcattttctacatttaaattagtgtccttattgcatataggctcgtttattttagtggaatataaggatgtgattgcggtttagaaaactccgatgatgccttgagtctatcatatcctttattggtaccgcactatcatatcctttattggtaccgcactaagtaaatgcagcaataatttcacttaaaaccttcgttgtttgtgaaagacaggggcggagctacagggtatgccgagtgggccacggcataccctgtagttttggcccaattaaggctaaatatcaggagtttttaacctaataaactaagagacggtttaactgcttccaaatt

SEQ ID NO: 314982 - DNA, 391 bp, Zea mays
aactggcttctcctccccctcttaccaagtcctcctcgggttagggttccttagggttttgtggaggggcgatggcggcggctgatgtggagtaccgttgcttcgtcggcgggcttgcctgggccaccagcaacgagtcgctggagaatgccttcgcctcctacggcgagatcctcgactccaaggtcatcaccgaccgggagacggggaggtctcgcggcttcggcttcgttaccttctcctccgagaactccatgctcgacgctatcgagaacatgaacggcaaggagctcgacggccgtaacatcaccgttaaccaggcccagtcccgtggcggtggcggtggcggcggtggctacggcggcggtcgcggcggcggcggctatggtgg

SEQ ID NO: 314983 - DNA, 148 bp, Zea mays
tacagggaatcggaggacttaccgtggcccactgatcttggattctagatgccgtgggattcgtgtgttctttaggtccttcggtgacgatgtttgtaatccggattcgaatcatcggtaacagtaaaggaaacttgatagactgctg

SEQ ID NO: 314984 - DNA, 112 bp, Zea mays
aaatacggttgcccactgatcatgggttctaaatgcagttcgatacgtgtgttctttaggtcgctcggagtgcatgtttggggtccgtggtcggctcagcatgaacagttgg

SEQ ID NO: 314985 - DNA, 218 bp, Zea mays
aatacaatactctatacagacgtcgtattaaaaaaaaaaaaaaaaaaaaaaaaaaaaaaaaaaaaaaaaaaaaaaaaaaaaaaaaaaaaaaaaaaaaaaaaaaaaaaaaaaaaaaaaaagaaaaaagaacaaaaggaaaaagaagaaagaaaattgagataacgaaaaaattaattaaaaaagacagtaactggaaataccctgaaggggacctcatt

SEQ ID NO: 314986 - DNA, 326 bp, Zea mays
aagtggatacataggatatctcgatcagtagcatctagccatcctctaatcagcgtgaattctcgggatcttgtggcattcaggtcgtccatgttcatattgagctaggtcacgtgtcattttggttttcagccgacaggtctcgttcctttggacttgctcctgatgctttcgttggttcttttgggttgatctgttgagtgatactttctccaattgccttcgatagccctgtgctcagtcaagcgtgcctctgttcttctgctagtgctggattgcgtgtgtctgtttgttgggttgccggcgctgtcggatatggatcgctt

SEQ ID NO: 314987 - DNA, 225 bp, Zea mays
aataggtcgcgggaaacaagagaatgtctccaatgatgcacatgacgctggccgtgcttgcctgttggatgtacatgacgaggtctgcaggaaaggatgccttccaccttcaggggctagttcagtccttacgattccatcgattacaaggccatgctttagtgtgctggggtcgattagctccagtcgggaatgatgggtgcctttggaaaacctcagggtatc

SEQ ID NO: 314988 - DNA, 292 bp, Zea mays
gtgagtcgtcatacacggttctcgggatcatgtgaaacggcctcacggtggagtaggcattgaggtcgcctcgacaagcattggtgtcaaattgtggggtgttcacgaaggcagttgtcggtgaagtgtccgtcgtcaggaagtgtactggggtttgcatcctacggctgttctcatacagacaagcgcgagatacgtcttttaggtggatcttggcagctctcttgacaacattaatcgttcgtgtaacaaatttggcatgacgagctgtcctttcgcccaggtctatctg

SEQ ID NO: 314989 - DNA, 196 bp, Zea mays
atattgttgccctctctggtggacacaccttgaggaaggtgccacaaagagcggtctggtttcaaaggggccggcactatagaggcctttagcctttgtcaactcttacgtcagggcacttctcggtggtgatgtcgacggccttcgtcacctcggacgtgattttgccctgctgagcgaggcagtttcctgccgt

SEQ ID NO: 314990 - DNA, 378 bp, Zea mays
acacgcgtctacgtcgcctcacatgaaaccaccgcctccccgatctcgtcgagaggaagcccaatcccgaaaccgccgccctattccaatggcgcccaaggccgagaagaagcccgccgccaagaagcctgcggaggaggagccggcggcggagaaggccacggcggggaagaagcccaaggccgagaagcggctccccgcgggcaagtccgcaggcaaggagggtggcgagaagaaggggaagaagaaggcaaagaagtcggtggagacgtacaagatctacatcttcaaggtgctgaagcaggtgcacccggacattggcatctcgtccaaggccatgtccatcatgaactccttcatcaacgacatcttcgagaa

SEQ ID NO: 314991 - DNA, 390 bp, Zea mays
agagatctcatctgcaccgcaggcgtgtccgtccttcacgagatcgcgcttcgggtcgttcgtgccggatgcaccgaggtactcttccgggcgttcgccaacgctccctgcgatgtgctagacagtttcttgtcaattcttcgggtcgaatgctcgcagcagacgactgaggccgtgatcaagcggtggacgacggtgacggagatcatagggaaggccatggtcgccatgcggaggcagctgtacgcgcagaacccaggcgccttcgacggtttcagggacgaatacttgctggccatcgcggagaaccgcatcctgatcctgctcgacttcgccaacggattcaccagcatcacgtcgcacgagaagctcgtgtacatgctcggcatg

SEQ ID NO: 314992 - DNA, 74 bp, Zea mays
acagacacttggaaaaaaagaaaaaaaaaaaaaaaaaaagaaagaacaaaagaaagacaaacaaaaagctaaaa

SEQ ID NO: 314993 - DNA, 296 bp, Zea mays
agcggacgcgtgggtcctgttagaatttctgtgcgtcattcattccttgttttactcgttatgaagaccgtatcagtggggaggaggaggttcagtgcagtgtttcaactggtcttcctgctgttcaacgggctcacacggagaccttttatagtcatcttcgtcatccgagaatcaatctccggcatgtcggttttggggcaccgttgtttgcatccgtgaccataaagctaaagaattcggtgtttcacacgtatgcggattctggcatgcctgtcattagcatcattttcctg

SEQ ID NO: 314994 - DNA, 213 bp, Zea mays
cccagccactgtggaggaggccaacaccgagtcgatgccgggctatacggacaagatcaggtccgcggctgccggcacaacggagtacggcaagcagctggcgagcaccgtgtacgagaaggtcgccagcgtccgcacagccgtggcgggcaaggttcagcaagccacgcagtcggcccgcacggcgactcccggggtccgcgcgcaccggga

SEQ ID NO: 314995 - DNA, 51 bp, Zea mays
tcactactaggactcgtgggccgttccaactgattaaagcgaatctataca

SEQ ID NO: 314996 - DNA, 370 bp, Zea mays
gacgcgcgggacgacacaagcccctagagcgagacggagaacggccaccctttttttttttttttttttttttttttttttttttttttttttttgtttttgtttttttttttttttttttttggtttttttttttttgtgttttttttttttttgtttttgtgtttgtgtttgtggggaacaagaacgggattggactaaggagggaggggaaaaccaagggacagaggagggagccaggggaaaggatttgaggacgcgtgcaggaggggggggaaaagtgggggggaaaaggtacgaggggaagggaggcggaagggggggctggcgcaaaaggggggggggcgaaaggggggcacccgggggttaa

SEQ ID NO: 314997 - DNA, 54 bp, Zea mays
accatcctcgacgagctctaccagttttagctggggctattagagtagtagtag

SEQ ID NO: 314998 - DNA, 359 bp, Zea mays
tatcatgagtcgaatcaatcatcgcatcacaccacacggactgcgtgactaatccgtccgtccagcgaccggcagtggcgctgatggagcgcgagtacctcagcgtggtcatgttcacgtggctcgcgcacgggcagttcacgccgtacctggaactggccaggcgattcacatccgccaaagacgcctacatcgacttgaccgtccagctcgtctctacgcccgtcaacctgtccgctattacgcggtaccagacccctcggatccgcgtcgcggagctccacctcccggcggcgccggacctgccgaccgagctgcacaccagcaatcacctggccgcgcgcctcatgcctgcgctc

SEQ ID NO: 314999 - DNA, 422 bp, Zea mays
ctcgcgggacgacacacgcgtccaaccatctccacccaagaccgccgccctcatccgtctcccccgtcttcctcgccctcgtctacctcgcgctcgtcggaaaaaacagctcagagacgtgctcggcttgaagtatacaaagaacagctcttgctagaaaccaagcaaaaaacgggacaggactgaagaatatgatgacttgatttgcatcgtaccgaagacattgctggccggaaattgatgagtccatggatgagtccatgatggacttggagaatgaggcagtgctacggaacgactgcgagaaggaagccgtgctgcggaatgaattctgccaaattgtatcattataagggggttgtgtatcataaattaaaaatcttgtgccaaggaagttagacctgcaaattgggcatacatgc

SEQ ID NO: 315000 - DNA, 119 bp, Zea mays
aaaaaaaaaaaaaaaaaaaaaaaaaaaaaaaaaaggaggaagcccaaaaggaattatagcttaagtaaaagtaaaagaaacgtcaatagctcttctaaaaatgtcaccaaaggggcggc

SEQ ID NO: 315001 - DNA, 358 bp, Zea mays
acaacgcaacagcacaatcatgataccacacctcctcccttcgcctgtgatcatgtcgtcttgctgcggcggcaagtgcgggtgcggctccagctgctcctgcggcagcggatgcaacggctgcggtatgtaccctgacgtggagaccgccgccaccagcagcgtcaagaccacggtcctcgccgcgccgaccaccaaggccagcgccggcggcttcgaggcggccaccgagggcggcggctgcgactgcaacacctgcaagtgcggcaccagctgcggctgctcctgctgcagctgcaactgacctggcccggcccggcgatggcgcacgagagtccagaagaagaggacgacgacg

SEQ ID NO: 315002 - DNA, 254 bp, Zea mays
ctcgcgggccgatacaagcctctacactgacgtcgtactactacgtccaccaaatcgtctcttcaagcttacgagtacttctcaatggtggggaaaaagtggcactgttgatttcaagtactagtgggggcaccccaacggactgacactctagtcggtgcttgctgggaatggaagtgctacaaaagttgtccgacaatttatctgctcgcccgcaggatcatgacatcgggattgagacaatcattgtcttc

SEQ ID NO: 315003 - DNA, 152 bp, Zea mays
agcgtcatggctacaatgtcatgatgtcgagattgccgaggttcttccatacgataacagaggatctttgtgttcagtactgtcaagccgtgtcttcatacgaggggggaaagtggatgctccactgaatggttgggcaagaagtggtgtta

SEQ ID NO: 315004 - DNA, 140 bp, Zea mays
aatttgtccttgtaatgctgacacagaaccatatctcgctcgtcgtcgttggtgctgcgtcgatcatgtggtcccacggagtcgtcaaggaccagggtatggctgctgaatagcgggaggctgatgagaatatcgttgtg

SEQ ID NO: 315005 - DNA, 109 bp, Zea mays
aaacagtctttggcatcatgaaggccagggaaatgtcgttcggcgccgctgatgctgcgtatgtcgtggcgtccagcggtctctagactgactgggataaggatgctgc

SEQ ID NO: 315006 - DNA, 179 bp, Zea mays
ctcgcgggccgacacacgcctcaaaattaagtcgtattagtaacatattttttaatagaaggccagggaaggtttacttagtgagcgtcaactactactgtgacagactagtttattcttatagaggcgccacttattttttgtaccttgtgtaacagggaataatacgtaaggattag

SEQ ID NO: 315007 - DNA, 366 bp, Zea mays
agaaaataaaaaaaaaaaaaaaaaaaaaaaaaaaaaaaaaaaaaaaaaaaaaaaaaaaaaaaaaaaaaaaaaaaaaaaaaaaaagggtggccgctcaagggggtgcccccctagaggttctatgcttgcttcgtcgttgttcttcgttcgtgcccccttcaattctgttccctgatttcctttttcgggcttcctttttggaaatccctggggggtaacccccttagtctccctggcttaagcccctttttcccaatccggcttttgcccgggggggtccgtccgaatgggccttcccaattgtcccccccccacattgccgaacgggaagggcccttttggggcccccctttcgtccggggggtt

SEQ ID NO: 315008 - DNA, 76 bp, Zea mays
agttcttcaatatatctaattttttcacaagtaagttaaattgagttagtaccagtatgtttgtgactaagtagtt

SEQ ID NO: 315009 - DNA, 349 bp, Zea mays
aaaaggaggaggagaagtcggtggagcatgaatatggcgaaggcgatgagaaggcgatcaacaagaaggataaaaaggagaaagacaagaaaaagaaggaagatgatggagattcagggaaggcagagaaagataagaaggataagaaggctaaagagaacgacggatcagagttgaagggttcaagtggtgagaaacaagagaaaatcaaagataagaaagagacaggagatggcaaagatgtgggggaggaagataaacgcaagaagataggaaacaaggacaaagataagaaggataaaaaggccaaagaaaaggatggatcggaaccaaagggtgacaaggatga

SEQ ID NO: 315010 - DNA, 87 bp, Zea mays
aatcggcacatgatgccatcagaagagtcacagatcaagcactgacgcggaaatggagacacacattggtgccatgtgaaagttgag

SEQ ID NO: 315011 - DNA, 357 bp, Zea mays
aggtctaggactcgcgggtcgacacaagcctccatgatgagtcttactattcatatcatgtccgaacggaccgacacatggatatcccgccgctgcagggcctgtccgaggtcgaacaactggagccgtagggcatagtgcgcgcgcaccacacgttcaccgggggcgagtcggggactttcaaatggattgtgacgcattccgtcgactcgccactggacgacctgtggcccaacatgctcagcttcagaattccgcaacggtataagcacttcaacttatgttgcaactttcagggcaatgaccgcggcacccttagcagcgtacgctacgtcaacgtcttcaccggcctcccgg

SEQ ID NO: 315012 - DNA, 202 bp, Zea mays
aaatccgattagtggcgacggtgaggggaacgggcagggaaacgtcggcgctgctatcgacgttatgccaaatgcaactggctgcaggctcgatcggctcttcaacatgaccagggatcacgcccagcaccatctggtgccagggcaccctgatttcgtactccacacgtgctccgttttcggcaatatgtactccctacgg

SEQ ID NO: 315013 - DNA, 129 bp, Zea mays
aaggcggatataggatttttgagtcagactacagaagaattttaattggtgatggttaattcgtagtgtgcaagaaaattttattggtaagaaagaagcgattagtttttgtaccttgatgtgtaggga

SEQ ID NO: 315014 - DNA, 86 bp, Zea mays
ctctaaactcaggctcacaattactcatctttgacttctctctgtggagcacttgtgatcgaagatcgtgccctgttttctgtact

SEQ ID NO: 315015 - DNA, 175 bp, Zea mays
aaaagatcaaccgcagtcgcggggatcacaccaggggtcgccctcatacctcctcgtcactgccttcggttcgggttctaggagtcaggatgaggggtggctgtagcgggggtggtggtcacaggtgtctgggtgatgtcgttggaagcagggagcgctgcagtacagaatgtgg

SEQ ID NO: 315016 - DNA, 203 bp, Zea mays
aaacggggcggcgcaggcgcgggaggagctgtgccgcgccacagtgggtctcgcacgcgactcgatgtcgaagcgccgtgccacgcgtggcgagcagagggcctggcggaagagggggatgtggggcttggtcgctagagggctagcaccaggttgtcattcaggacgacagtggcgagggtccgtgttcgtggacgtgacgt

SEQ ID NO: 315017 - DNA, 124 bp, Zea mays
aaatatcctctcgcgacgacggctaggcggcacaggcgctgagctcgcgagggaacgccgtgcgcatctccggtgctggcaccaggcagtcggctgcaaagtgattgcctggaggacgcgattg

SEQ ID NO: 315018 - DNA, 402 bp, Zea mays
ggtcgatgacaagcctctaatcagagtcgcatcatgatgatgagattgaggttgaaattgatagtatggatgctgagacactttgggagcttgaccggtttgtggccaactacaagaagaacctgagtaagcaaaagaggaaggccgagcgagcgatgcttgccagacaagatgcagagttgcgtgcgcagcgccttatacaacaaccgcaaccaaccccagtcccccaagaacctgttggtgaaaaatctctaaagcaagttgcaaaaggtgagcaactaccaacatctgcatcagagaaaaacgacgagaatagacagaacgtgagtggttcaagcaattcaagcagctccagcagtgactcaggatcatcgtccagtgactcagacagtgataactcct

SEQ ID NO: 315019 - DNA, 315 bp, Zea mays
ataataatgagattgaggttgacattgatagtatggatgctgagacactttgggagcttgaccggtttgtggccaactacaataagaacctgagtaagcaaaacaggaaggccgagcgagcgatgcgtgccagacaagatgcatagttgcgtgcgcagcgccgtatacagcaaccgcaaacaaccccagtcgcccaagaacctgttggtgaaagatctctacagcaacttgccaaaggtgagcacctaccaacatctgcatcagataaaagctaccagaatagacagaaccgtgagtggttcacgcaagtcaagc

SEQ ID NO: 315020 - DNA, 190 bp, Zea mays
aacactctccgtaggagacgagcctgggtcacctgcgccgccgcactgagcccacgtctctatcagtcgcatagtcaggtcatgtgaagaccgagcggaggaagcgagcaacttttgtaagcggattccgcgacgtcgacggcgtgcgactaggaggaatggatgtggtgggcgtggagagtgagtcagg

SEQ ID NO: 315021 - DNA, 405 bp, Zea mays
atacaacactctacagtgagtcgtaataccagagccggagagcccagtgaaacagagccggtgaacgcagcccagtcagtgagtcccccgatcccgactccggcgatctccccaaccccatggccgccgccggcgaggcccccagcacgctcctccgcttcctctacttcgtcggcgccggagtaatctgcaccaaggccatcaacacctatcgcgactacgagcagaaggagtccaccgccgccctcgccgccgccgaatcggcgttggctgctgccgcggcggccgagcccgctcctgcaaccgccgccgcgaagccctgattgtggacgagggcctgtcttcggcggttagggttctcgggatgttgctccccagaggggagatagatattttcctttggtt

SEQ ID NO: 315022 - DNA, 388 bp, Zea mays
gcgggtccatacaagcctctaatctaagtcatagaaggcatccctccggaccagcagcggctcatttttgccggcaagcagctcgaggacgggcgcacgctggccgactacaacattcagaaggagagcaccctccacttggtgctgcgtctcagaggtggcatgcagatcttcgtgaagacacttactggcaagacgatcacccttgaggtggagtcctcagacaccattgacaacgtcaaggccaagatccaggacaaggagggcattccaccggaccagcagcggctgatcttcgccggcaagcagctggaggatggtcgcaccttggctgactacaacatccagaaggagagcaccctccacctggtgctccgcctcaagggtg

SEQ ID NO: 315023 - DNA, 123 bp, Zea mays
atcaacttcaaaaagtgcttaggaagacgttttcagcttaaaagaagaaaagtaaaatccgaaaggcatgggatggaactaaagtcgtttataatgttgcttcatggggcgccactgctgttg

SEQ ID NO: 315024 - DNA, 75 bp, Zea mays
ggcatactgtaagggttgttttacgctattgataatacactgtactgttcagctgttgaactctatttcttagcc

SEQ ID NO: 315025 - DNA, 99 bp, Zea mays
atggtgtgacgcaagtgagaatatcatgtgctgttcagctgttgaactctattgcgtagccaagaaatggaggacagcggatgaggagccacagtgagt

SEQ ID NO: 315026 - DNA, 101 bp, Zea mays
aagcaatgccaatgccaatgccatctggttttcgtgcaaaagaaaaaaaagcaaagggaaagagagaacaagggagacaagagagaaagggggggcgggcg

SEQ ID NO: 315027 - DNA, 77 bp, Zea mays
atattgagaccacagtcgcggtatggacacgggatgtgtctgtggtcagaggagatcgctcaccacaatcggtatca

SEQ ID NO: 315028 - DNA, 386 bp, Zea mays
aagcagtagctcaagtacgagagtggtcttttggtaatattccaaagaaggatgcttctcgttttgtacgagcggtaatatacacgtctatctatctatgttaaaaaatttgggaatgcaacccagattgacttaattgtggatgatgttggtggtgtactagagaaggcaccacatgaagcacaaatagagctatttgatttgttgattgatggttgtcagaaagctgttaaagagaatacagatatcaagggcacagttttggattttttcggtgtacctgtgatggcctatgaattgctagctcgtgttgaagagcttcagttgttgtcaaagcgcattgcacgatacaaacgatccaatcaagcaatagcccatccaactac

SEQ ID NO: 315029 - DNA, 251 bp, Zea mays
atagtacgtcgtattaagcacagcctccctctctcgcggccctttcccacacatccgagcgatggagagtcctccttccattccttctgtcctcgtgaaggcgtctagtgaggcgtgctttcttgctcgcctctgccaggcactggtcacaagaaggtcgcctcgtgttcgggtcatcttgccttcacaagggggacgggagttccctgctagggggagaccttccgttgcacgtgtacgcacgcatgcag

SEQ ID NO: 315030 - DNA, 404 bp, Zea mays
tcgtaggtcgatacaagactctaaattgagtcgtacgacaaagattatatactaggattgctttggggaaggtatttttatatagagtctaataatcttgctttagcaatctttatataatggattttgatggtcaaagttggagaagtttgacttaggagttaggaggacaaacctaaatggacttaatactcgtgaaaggaggaaacacacaattggcatggtctaccgacatcgctattagttgcatggcatttagccgtgcagtaaacctaagtaaaagcaatattttgtaactggaattttgctttgccaccaggctaaaagaatggatgttgtatggggagagactgctggtgttgaaggtcaattgttgctgttgtgccctctccttttccccctgc

SEQ ID NO: 315031 - DNA, 113 bp, Zea mays
agacttccaagatatacatgtcttcgggcgcgagctcgccgaaatggccgcctgagggttccacgactacgaggtggtgggtcgcacgctggggacggcgaacgaggagcacg

SEQ ID NO: 315032 - DNA, 296 bp, Zea mays
ctattcagccgccagtccgccggcgcaactccagccgccgcgtgcccctcctctccccacccgatgctggccctcgcgcgcgccgcgtcgctgctccgccgcgcctcggggtccgcgcctagtactgcgtctctgtacgatccgccgcggtacgtatgcccttgcctcgtggagaatctgccaagtttctttgtcaatgggtaatcgacacttttggctcgaccatttgacgtgttgtttccatcagtactcccttctagcaggactgtgtggacaccatatcgggagcctgggca

SEQ ID NO: 315033 - DNA, 420 bp, Zea mays
gtgggtcgttacaagactctagactgagtcgtaggacggtcgcgggcgtcgtccagtttgacagaggaacggggcgactcgggttgcgccgtcagatcatcgttgaacgactcatattagttagccagataccagttgggacccctgatctacaccattgattcactagtgggcggtgaagatctggttgccgcgcccatcgcgagaactaatctggaccgtagatctagagataaatgattcggattaagttgggtcatgttggttcggatgggagcgatccagggcatcgtgtgtcgatcggatggctctgataggatctgaggttatttaaatctgcactgttggattttgatcgggcgggtgacgtcaggtaccggttcgagcgacgatagatctaatccatgtcgtccaccgttg

SEQ ID NO: 315034 - DNA, 150 bp, Zea mays
aatgcgtcgcggtaatcaggagctgtatcgctggcggttgcgcggtactctggtatcaacatggctgtgaacaaggagtccaagctctagacacgcgcggacgtatggtgcggggacgagctgcggtacagcggtatcgcctgcgccggt

SEQ ID NO: 315035 - DNA, 283 bp, Zea mays
acaacaggcagcagcacaagcaagaagcagacctcctcccttcgcctgtgatcatgtcgtcttgctgcggcggcaagtgcgggtgcggctccaactgctcctgcggcagcggatgcaacggctgctgtatgtacgctgacgtggatagcgccgccaccagcagcgtcgataccacggtcctcgccgcgcctaccactaaggccatcaccggcggcgtcgaggcggcgaccgattggcggcggctgcgactgtaacagctgcaaggtgcggcaccaactgcggg

SEQ ID NO: 315036 - DNA, 396 bp, Zea mays
gggtcgatacaagcctctaggatgagtcggagaacgacgctgacgaggtcatcccgaacggtggtgtcgagcacagccatggcgcaaacgggtttcgtgtcgcggctgctggcgaagcccgtggcgaggaggatgaggacgtggaggaagatgacgacgacgacgatgactttgaggaggaggatttgggggaggagattgatgaggatgttgatgacgaggatgctgttgtggaggtgcatgatgtaccaagtagtgacgacgaggaagatggcgtggaggaggatgaggaagaagaggatgaggacgaagatgatgaagaagaggaggaggttgaggatgaaggtgaagaggcggagccacagagcagtggtagggttgccatgatgacaggcg

SEQ ID NO: 315037 - DNA, 162 bp, Zea mays
tactactccctgaggtgagtcgtattagcataccattggagcagctccaacgcttgctactactacatgtcatcagggtccttgtccaggagtccattgccatctgctggtaggtggtccggcactacacttcaatcgtcaagttctcctccagagttgact

SEQ ID NO: 315038 - DNA, 231 bp, Zea mays
tgagtcgtattacacgcgctcgctcaatcttgcagatctctcattctgcatgtgctccacttcgatcctctatccctagctagtagctagccatacggtcgtgtggtcagcaggcttctggtgttcacgcataggcactgcgtctgtcgaggccccggtcgtcacggtgatcgaggaagcgtcggtggtggagacgccggttccgcactctgtcgtgcccgaggaggctgt

SEQ ID NO: 315039 - DNA, 78 bp, Zea mays
atccgcggggctggctccgcactggactccgtgtctgcggccttcgtagtagagttggttacggggtgcgggtggcgg

SEQ ID NO: 315040 - DNA, 94 bp, Zea mays
tcacgggtcaacacaagaatctaaagcaacatggcaaaacgatgtgacgtaacaataagttacatggcgaaataaaaactttggttcgttgtgt

SEQ ID NO: 315041 - DNA, 99 bp, Zea mays
tgagtcgtattatcctccatgatcaatcttccactggacgataggtgtggtacaaggcgcgaagtcacttcactctcaggtaccgttgacgtgatcacc

SEQ ID NO: 315042 - DNA, 408 bp, Zea mays
  unsure (1)..(408): unsure at all n locations
atactagagtactatactggtcaatgcgactttttgtacgattacgtcccttanagtccctgagattgtatgtgatcttgtgctgtcaacttgcattacacgaaacgtcgcgcacttggagtgtgcttcgtgacgacccatattggtgatgtgttggatcatttgcttgaaaatgtacaatgtttgttcgaagcagttgccttcagtattgagcatcgtggaggtaacatcaccatcagctgtatatgtcgtatgtcctatgaaaatcatttgactttgctccgcgccatgggtgtccacggtatctagctaggctagacgttcccttggatttttggtgtaaaatctggaggtcgaaccactcactgcctattgaagtaaaggatacaaaaacagttgtgctgtctt

SEQ ID NO: 315043 - DNA, 405 bp, Zea mays
agactgattctaatgaactagccgactccagcacgcaacgccagcatctccatcacagcacctctctgctacagtactggctgtctcctgtccggtatgatgcaactgcaatgtgcggccaccccttctgatcctgtccacctgtggtccaggcctgaaactcaagctcaggtagcggtgctgcacgcgctgctggtcgtcaacagtggcatccgtgtcgtcagtgctcctgctgcgaacggcacgaactgcctgtgtcgcttgagctgtgtgtcgctctctcacgcgttcgtgttcgggatcgctacgtcggcgtaccacgtctacggcaccgcatcgattagcggccgtagtccctccatctgggattcattcgcgcatgtcctaggaaatattgcagggaat

SEQ ID NO: 315044 - DNA, 378 bp, Zea mays
atccgagaaaagctccccgtctcctgcagtcctgttactccagttggttcgccgcagtgcagtgcttgtctttgctcgggcggcttggttgcagtcaagatggggaaggacggagaatctgccaagctgaacgaggagaagaagtccaaggatgagatgcatctgaaggtcaaaagcaagggcgaggcgtccggcgaggaagacggcaaggaggaggaggtcgaggtacagattgaggccaagtttgttgagaaggaataggtcaaagacacgggtgacggtgcggcatgaaagggtaccaagaagaaggatacacaggagaaagacaagaataagaaggaaggtggtgacgattcagggaaggcagaggaagacaag

SEQ ID NO: 315045 - DNA, 155 bp, Zea mays
tgagtcgtattaaacgagttgtcgagtgacgcgagtgaggtctgctcgctgacctgcgtcacggtgcgcgggcagtatggtggtcgtcattatcgcgacagcggggggttctactgcggtggtggcagcgcaacagccgggggcgctcatggggt

SEQ ID NO: 315046 - DNA, 175 bp, Zea mays
aaggcgtcgccgccgccgcgtcgtccgccgcgtccgctcttcccagcgacatgtgcaagcccggcgcgtactcgctcggctcgcgcgtcgccaggatcatgtccaacggcgcgaccttctcggtggtcggattcgcggtcgggctcaccggagccgcgatctcgatgcgggctga

SEQ ID NO: 315047 - DNA, 102 bp, Zea mays
cacacgagtctacatgtgctccgtctacgtggtggtctgctagggtgcggcaatccacccggactagcatcatctgatcttcgatggcaaatatgtatatga

SEQ ID NO: 315048 - DNA, 392 bp, Zea mays
cacaactcgcccctctggccgcctccgtcctccgccttatcggccgccgcctcctccttcgtcagtcgcatgtctctcgaggacgagaagcctttcttcgtcgtcgctgtcgtccccaactgggtgatgctagagcgcgtcgtcttccgcagggacgacgagtccttctcggacggaagcgaggccatcgtggcgaccgaccggcatcgcgtcctgtttcgcgtcggcaccatgatgttcgcaagtctggttcaggaattcttcatctacagcacctcaggtgccgacacttcctcttcgctgactgcgctcccgccttgtgccgagcctgacatggattgtagccgccgtgagggccgcctacctcgtaaacgtgcttctcggggatgacg

SEQ ID NO: 315049 - DNA, 294 bp, Zea mays
agcgcaacgtgtcaaccttgctgcactaccaaggtatctttgcatcaggaaggaggcacgtacctacccgccacatcaacctaggctcaagcattcgagtcatggtcaaggacgaccctaacgcccctgactccgtcctcgacacagcagtaccactagtacgctccacccatgcagatgcctcaaggagagtctgcccaccgtgctgaccgtgtagctcaactccccgtccgtcaacagtaatggcttcaccgtctacgacgcccgctgtgacctgaccttccgcgtgtactg

SEQ ID NO: 315050 - DNA, 435 bp, Zea mays
gggtcgcagcacgcgtccgaacacacgtccgccactccacgtcgtcgtcgtttgctgccgctgcgcaatggaggaggagcgctgcttcaacaactgggatctggacgccgtcgtccgcctgggctgccgccgccgcctctccccgccacggcagcccgacccgtttgcttcgcttctccctccgaccctgccgtcgccgtcgccgtcgccgccgcagaaggagaagcccgtggtgccagcgctggctaaaggaccagagccagagccatacgccgggtggcgctttcctaacctcggtgctggcggcgggcaagacggcgacgagctcatgagggccatgttagcagtccagccttccctgcctcagcctctgccaacgacaacgccaacgccaacgccaacgctttccccggcagcaggagagcatcgacagtc

SEQ ID NO: 315051 - DNA, 57 bp, Zea mays
tactccctgaggtgagtcgtattaaaaaggtccgtcggcgttaggtgggtgtgcgca

SEQ ID NO: 315052 - DNA, 362 bp, Zea mays
ctcgcgtgtcgacccacgcctccggatttgctgcaaataaaaaaaaaaaaaaaaaaaaaaaaaaaaaaaaaaaaaaaaaaaaaaaaaaaaaaaaaaaaaaaaaaaaaaaaaaaaaaaaaaaaaaaaaaaaaaaaaaaaaaaaaaaaaaaaaaaaaaaaaaaaaaaaaaagaaaaaaaaaaaaaagggggggggccccccaaggggtccaggctttatgtcgccgccagggggattcaagccccccccaagggggcccccaagttcatttccgggggccgttttttaaagaggcggtcgggggaaaacccggggtttgcccacttttaccccccggggaaaattcccctttttccaaaggggg

SEQ ID NO: 315053 - DNA, 446 bp, Zea mays
gtcgatacaagactctagattgagtcgtattaggactgtccatgtgtcgccgacttgacaaatggtccttagttgatgtcaattcgtcgatgcattttcctgcttctccaggagcacatagcacaacagaggatccgattgcgtgaaacccttcaacatattgcacgactgcattaacgcacatccagacgcagtctccaacgagattttggacgaagacgacaatgacgacgacgcagatgagtccaacctgagagttagagctcgatcatggtccagataatccaaccctaacgtttgagattgcatgatattaaatgatactcgtatagaacttctcaagtactggagtatcggaatgattttaaagagcacaaaggcatcatatattgaatggcagtcatatccatattatctttggtacaaaactcccacgtttttttttt

SEQ ID NO: 315054 - DNA, 100 bp, Zea mays
aaaaaaaaaaaaaaaaaaaaaaaaaaaaaaaaaaaaaaaaaaaaaaaaaaaaaaaaaaaaaaaaaaaaaaaaaaaaaaaaacaacaataaaaaaaaaaaa

SEQ ID NO: 315055 - DNA, 96 bp, Zea mays
atacggctcacgggccggcgggcggggcgccgctgcccggtgcagcgcccgtcggccggatccgtcgggcgcgcggacggcggtgggcgtgggggg

SEQ ID NO: 315056 - DNA, 59 bp, Zea mays
aaatggcgttgtcagcggcagccaaggccgtcgtgcggatttctcatcgggtggtgtct

SEQ ID NO: 315057 - DNA, 371 bp, Zea mays
acaagcggcgacactgtagcccagctccagcagcactacagcagtagcgccaccgaacctgaaaactcctagccccacgaaatcgctgaacctacccatgagccgagcgatgattagccgactcgccgcggcgaggcgacagctactgcaatcgacggacgtcgcgtaacgctcctcctcggcagcggctacagcgtcagctgtccaagatagagcagggcccgcgtcgggcactgtgctcacggacagcttcgatcggggctccgacgcgtaccagcgcaaaactgacgccgtctgcgggttgctctccaaactgcactccggcgtcacacaagtgctgagcttcggacgcgccaacgcagtaacgccga

SEQ ID NO: 315058 - DNA, 170 bp, Zea mays
ggtcggcccacgcgtctacggtaactcgtattaatgcgtcggatctgagtcgacatctagcgtcgcatcatctttcacttcacagagagtcgtttactggagtttctactgggaggagactagtacttcatagtcctcagcctgtgcatgatcccgttcgtgatccaggt

SEQ ID NO: 315059 - DNA, 426 bp, Zea mays
  unsure (1)..(426): unsure at all n locations
gcaagcctctaaactgagtcctattagatgtgtctcatcctagaccattcgatttccatcatcatactctcccaccagcagttccttctaaccagcagccttctaccattcctgttgagaatgctccagtacctcatcataacagatggccagagtattctggtggtgttggtctatcctattcatctcatcggcctccatatggtcagcatcaacctcctgggaatcttgattcaggaagtaacttggtttatccctctttccagagatatccatcaaatctaccagtcagtaacaatattggtcccttatctgatgccgatttgactaaatcgtctatcanaccccactacaatccatttgcatctacctttgataaaacagatccaagtctagatattgggcctcctgtaagccctaatgcag

SEQ ID NO: 315060 - DNA, 424 bp, Zea mays
acgtgttttgagggaacggcagcatcagaatcaaacatatttgtcaagcaggtcttctaaccagtctaatcaaaatgctatcaagcagacacaggatcaatctgacgatgatgacatcagcagcgatacttcctacaggagaactcgtagcggacgtcgtcgtggtgctgcccgtcttgccgtgccaaaacaagaggactccagtgattctgaagaagttgttgttgtgaaaaagaatcgacggaaacgtaagaaatctgtgcataaacacagggctggatctaagttgaagcatacttctggtagtcctcccaaaacaggtcgtttgggtagacctccacttgtcaaatctgaatgtggctgcttacctctgcagccaggaaaagggaactgaatgttcctgaacggtcaggagctctacgcg

SEQ ID NO: 315061 - DNA, 405 bp, Zea mays
ctctacactaactctgcataggtgaatctgcaagcccgcccgcccgtcgctcgccaccgccatgttcggcatcgtcttcccggaccacacctttcccctcgacgccaccgctttcgcgcaggtggcgcccaattcctgggtcctcgatctctccactctcgcgctcgccgccgcgccgcgctcggcagtcgtcttcctgctccccgctgccgtgacagcgctgccgcccggcaaggccgtctccgtctacttccaggccgccaccaaccgccccttcgcattcttaggtgcgctcgggcccacgcgcccctcggccagcttcccgcttccggaggccggcgacgagccggagcctgctgtgggccccgctaaactgggtgtcgccgtggaggacgcggccgctct

SEQ ID NO: 315062 - DNA, 165 bp, Zea mays
atcgttcgagttaaatcttcgtcgctctcacgatctcatccctcccaatatttcgtcgtccacctcaaatagccgaactgaatcccagattactcagaaatttccaccgaaaagggaacagaacgagccagccctcgccaaaatgccaaacgaacctgctcccct

SEQ ID NO: 315063 - DNA, 69 bp, Zea mays
  unsure (1)..(69): unsure at all n locations
aaacgtttanncncanncccccccccccccaccccccaccaaaccacaaaagaaaaaacacacaaaagc

SEQ ID NO: 315064 - DNA, 413 bp, Zea mays
tagtcagcattatgcaatagtagtgcagcacacgttgtttaatttatcctctcttcctaaatgcatatagctcggttggtatatagtttcacttggcttcgtgtgcagcagaagcatgtcaagatcgagcgttggatggatgaacggatggacctgacgagatgcagctttcggtcgaccatccggagcaatggggctggggtttcttgtccaaggacaactattttcccttgttctctgttcatttctttcagctgcaccctgcagtaggcagagttgtcaagatagatagctcgttatgaaatgcagtgagtgacactgttaccttccattcaggagggagaaaaaggtaaggctcataaaatgcagggaactgcttgctgctgcaccttgtgattatataacaaccgaag

SEQ ID NO: 315065 - DNA, 275 bp, Zea mays
taaatctatacgtgagtcgtattatgtcagtcgcacactccagagtcggcgacggaacgctcatcatgatctcacctcgtcacgcttaactcgcacgacatctgtcgctgatgcgccgtggaaggtcattcgagggcttatggcgtgagctctggtaggtcttccagagctttcccttccgctcttgaagcagcagtatcagcatgctgttccccgcgttcggacgcacgagttgttctgagacagcggcattagatggcgcttctctctactgg

SEQ ID NO: 315066 - DNA, 136 bp, Zea mays
aaaacctccgccggccccacactcgtgcacggccagctctcaatcagtctaagactcctcatagctcaacgctcgatctctcggagcgtcaccttcatggactgcgaagcggctcacatcgccgtccatggtcagt

SEQ ID NO: 315067 - DNA, 63 bp, Zea mays
aggcgtccgcccacgcgtccgcggacgcctggggttccagatcgcgagcggccgccctttttt

SEQ ID NO: 315068 - DNA, 77 bp, Zea mays
gtattacagcagatcttaatttgccccgttcgacaacaaattttggcacaagatcgaagggactaaacacatgaaca

SEQ ID NO: 315069 - DNA, 255 bp, Zea mays
ggtcattgcaccactctagactgagtcatattacggcagctatcgtttgctgagtctaatgatcccaagtctcacagtaagcaggtgtctgctatcagaacatttcccgcttagtcaaccaatccatccacggttctgccatcacacgggagtttctgtaagctgtgatagtcgatctgacatacattcccagcctcatgtcactacagatatcttggattcagtcatagctgattggccttgccatctccaatc

SEQ ID NO: 315070 - DNA, 204 bp, Zea mays
ataaaaaagaaaaaaaaaaaaaaaaaaaaagaaaaaaaaaaaaaaaaagaaagataaaaaaaaagaagggatgaggaagaaaatggggcgggatagagaaacgcgataaagggaagatgagtcgcgggggggtaggtcagctcagatgggagggagggtggtcggagttgcagattcgaggagcaagagagtgtcgtaggagat

SEQ ID NO: 315071 - DNA, 231 bp, Zea mays
  unsure (1)..(231): unsure at all n locations
aaacaggncaccgcgtagctcgccacggcagccacgatgacagcagcaccagttctgccgcttgagaagctcttcgggcaccatcatgtcttcgcacaacttgaccagccagacctaactcgatgggcggccagacgtgatcacggtcagtcgccatcggccttgcactcgctgcctagatcatgtacatcagcgcgcgtagagtgtagaacgtgtcccacggggttagga

SEQ ID NO: 315072 - DNA, 91 bp, Zea mays
atacgtcacgagcagcgaaacgccatcgattcctgactctgctgcacctgcagctctgggctgccgcctatatgggcgccaatggcgggct

SEQ ID NO: 315073 - DNA, 108 bp, Zea mays
ttcgatgcaagactctaaagtgagtcttattagttacaagcaagcatgctcacacataggcagttagcatctcactttgccttaggttctattcgagcggggtagcac

SEQ ID NO: 315074 - DNA, 67 bp, Zea mays
aaacagcggcggagctcaacgggacgggctagaagacggacgcgtagaggcgctgcagcaaggcgca

SEQ ID NO: 315075 - DNA, 80 bp, Zea mays
  unsure (1)..(80): unsure at all n locations
atacgggtcgngatggcttgagtgtgtgacgctgtgcacggcgtgagggtcgtggttttcttattggtgcggaataggtc

SEQ ID NO: 315076 - DNA, 410 bp, Zea mays
tacaagactctacagtgactcgtattagtttcgctgtcttgttccgcgctccccaacccccctcccaaccccaaccccgtcccaacccccactacggccttccccccatggctcccctggcctcccttcctctcccgcccagtactgccgtcaccgctcgcttcctcgccgccctcgccatccgcgtgatcagcccatcgcggcccgcgctgccgctcctctcatccgcctccgcatgcggcttccctcacgcctctcgcgctccctgcagtgccgcccgcgagcaccgccgcggcaccgtgcgggaatgctctcgagctgatgctgctggagcagctccattatcaatgacactgttagacctcattgattcctgctggagatttttaatgccacatacaatcctagga

SEQ ID NO: 315077 - DNA, 125 bp, Zea mays
gcgtctgactcaaacgccgctcccgccacctctctgcgaccgtcgccatggggaccaaggcctgcgagatgcaatcgccaaatcacgactacgccatacccgaattccaggtatcgccgtggtgt

SEQ ID NO: 315078 - DNA, 112 bp, Zea mays
agacgcatgagaagtgtagaattcggagccatagagactgatgctagcgagtagtggatcggtgcaccagatacagacctagctttgtgggggtgggcctattaccagggag

SEQ ID NO: 315079 - DNA, 450 bp, Zea mays
  unsure (1)..(450): unsure at all n locations
tcatgggtcgatgcacgcctctacactgatgctcctcatataaccgccctggctccctctatcgccacacgaacgccgccaacccgaacccacctctcggtgcgctccgccatgcgtcnccacctccctccgctcatcatcttcctctccaccatcgtcggcatcttcacccagccactgcccctcggcacggtcgcgcccttctcagcctcggtgcagctacaaggacccaccgcgctggatgtgccccctccgctgcgtcctcaaccgtcgtggcccatcgactccaccgccgttgttggtcctccgccccaccaccttcaaccatcgcggcttccccgatgaggacgacaggaccgctacgaggacccgacgcgctggatgtgcgccctcctttgcgtcctctcggttctccctcggtcgcgccctctcgattctcccttcaccacg

SEQ ID NO: 315080 - DNA, 275 bp, Zea mays
  unsure (1)..(275): unsure at all n locations
aaacgatngcgagagattgagccttcgatggctaccattgtgttgtaggggtcagcatgatgtgatgcccacaagcttgtccttggacaatgctgcagcctgcagcttcgaccctgtatagccaggatagtgaggtttcagcggacctacgcactcttgtttccaggaaggggactgaactctgagtgaccgctggaagagtccaagtcgtacttcagctgatgaatcgataagtggtttagtctctcggcctttttcgtaggatcgagagcagc

SEQ ID NO: 315081 - DNA, 87 bp, Zea mays
aaacacggtggtgagcaagatgatgaaggctgggtccgaccgcgtggaggccgtcatggacgtgcatcggcgtcgctaagccccagc

SEQ ID NO: 315082 - DNA, 232 bp, Zea mays
atcacccttcagctagccccaagttgagtcggccgatcgatcactgacgtagggatggcctcagccagcaggtggacccccgacatcgcgtcgctggtggccccgcaccgccggatccgcgccgccgtgacggactgccacaaccggttcagcaccgtcgcctcgcacatgcgcgcgagcgcgccggccacgttcggagacggcagcgcttgcatgggctggccgtgcaggt

SEQ ID NO: 315083 - DNA, 113 bp, Zea mays
  unsure (1)..(113): unsure at all n locations
aacacacacccgccttgccactaacgagcaccccgcctcaatccacggcncacggatcagccgcagcatgccctacatccgccgtcgctgaggccggctgcgccatttgccat

SEQ ID NO: 315084 - DNA, 119 bp, Zea mays
aaaccagttcgcctccgcctccgctccgctcctccccctctcgtcccgccatggccaccgcagcacgcgccctcgtcgccgcacgcccggcactgcggttgcggccgccttagcgcctg

SEQ ID NO: 315085 - DNA, 316 bp, Zea mays
aggtccttcgtccgtcttcctcctctgccgactgccctcatcgactccactcccaagtcgacacgacggcacaaggagtctctcaactgcggctcaggcgacgattcggatcggctcggctccagcagtagaaagtgcaacaggcagtgcagaccgtcaagtcagacggcaatgtgctcaagtagggtgttctacaacagatcatcgcgcgcaaccgagcaatgcttcctgctgccttttctcgtatcacgtcacttacatctgcgagtctacaagataggcgagttaaaactgacacagtaccacatctcatgaa

SEQ ID NO: 315086 - DNA, 80 bp, Zea mays
acccacgcgtcagatgatattgatatattgttggacaacaatagatgcatattgttcccctgtcaaatcgacacgggaat

SEQ ID NO: 315087 - DNA, 272 bp, Zea mays
aaataaatcatataaaaaaaaataaaaaaaaaaaaaaaaaaaaaaaataaaaaaaaaaaaaaaaaaaaaaaaaaaaaaaaaaaaaaaataaaggaaaagaaaaaaattgggtttaaatcacattaaagtgggagaaggggcaaaaatttaactcctaggggggggcgtcccaggggtttctgctcctgtttggcgttctggtaaattttcatctttctcttctgtttgatccgttttcctctccggcgttctattttactgcctatttgcgg

SEQ ID NO: 315088 - DNA, 402 bp, Zea mays
  unsure (1)..(402): unsure at all n locations
cacgcgtccagtcaagttgtccaatcacaactaaagccaaaacaacaaccaaccaacttattctgattaacaatccttttcccaaaacaaaaagggaacaagaatcccctccaaccgacgaagaaaggcaatgcccccgcttgcgcaggccgtccacctcctcgtcgccttcgccctcgcgcttggctgcctgncgggcggcgccaccgcgacggtggtgacgacgtgcagggcggccgcggacagcgacgcgcgcgtggactacgcgttctgcttcgccgagctgggcatgcaccgcgagagccccgacgccgacacctggggcctcgccaaggtggccgcgctgacgggcgtcaacaacgccgacaacgccgtgtacgacatcaaggccctgctcgccaa

SEQ ID NO: 315089 - DNA, 165 bp, Zea mays
cgcactcgaccgcgctcctctcgaacgttaggtatgctcgtccaccgtctcctcctcgtcgtcgccgtctccgcagcgagctgcaccgccatcggggaggcggtggtttacgaacccctctctgacgagcacttccctccggggatcctccccaatgacgtggtc

SEQ ID NO: 315090 - DNA, 352 bp, Zea mays
cccacgcatcaactgctgccttatacgaggcatagctactcctactacacaaatccaaccgtattcagcttagtgtgtgctacatggactcggaaagactaccaccccaagtggtgagatctgactttcagtctcacaatccatgaagcaggtgaaactacagcagggagtcctgatctgcagagtctgagtgacaagtcgtaggtgcatgcactaccgatgcagttgcgtttaatgtaggaactcattctggacagtcgatcatcatggagatggatactctactctaccttgagaacgcaatgaaatacatgattcgtgggtcacgatcttgttgagtagcccatacgtg

SEQ ID NO: 315091 - DNA, 334 bp, Zea mays
aagcaagcctccaatccattcggcgggcacgtggctggcgaagtcttggtgcgtgcccacggtgccatttcctgcatcctcatcgtacaacaggaatcgctagctgagaacggagagatgtctggcacgtcggcatcatcgacttgcttcacgaacgacacagacgtgcagtctccacgatccacgcgcgtcttcgtgctgaaggatcacagccaactcggtaatgcacatctggggttagtcaaccttgtgaaagacacaacacagtttgtagctcgcactatgtacgatcttattattgatctgaacgatggcgtacttaatacactttaag

SEQ ID NO: 315092 - DNA, 176 bp, Zea mays
agtcaaatccgacagctcatccgctctatcggtacgattcgaataactcgtgcgaccgtgcggtctaaaccatggataacgttggtcaacaatcgcgggcaactgtcaccattgtgaagcatcacttcctcaatatgaggccaggcgtagcagaactcgacgagagccatctggac

SEQ ID NO: 315093 - DNA, 412 bp, Zea mays
agcgaatccccaatccgttcggcggcgagccgaccggcgatgcgtccgccggcgccgaaggtcccatccgccgcttcctcgtcctcccacagccagcgcgagccccgcccggagaaccctctcctcctcctcccctcctctcgcttcaccaagctctcactcggctgtcccctcctcgaccgcctcctctgcggcggcctccccgccgcctccgttaccgagatagccggcgagtctgcctctggaaagactcagctctgtcttcagctcgccctcctggcgcccctgtccccgctctccgcctcctccctcttcctccactccgacctcccattcccccttcaccgcctccgccgcctagcccccaaatcccgccccgatatcctccgacaagtcctcgtggcggccgcgc

SEQ ID NO: 315094 - DNA, 213 bp, Zea mays
ctaacacatcgcgaatccttgcacaggatggtcatagtcttagactgcaactcacagctgcagttactatgtcttcagatacgaccatcagtagtccagctgatgatcctgcatctaatcatgattacatgactgatatgtcagtataagcggctagcattgcatctcaatggatggaattactgcatcatgacataacgggacgtcatgctg

SEQ ID NO: 315095 - DNA, 239 bp, Zea mays
cacgctctgctcctccttttccactgctctgcgtctgcgtctgcgtctgcgtctgcactgcttctcgtctccctccccccgcctccgccatcggccccgggggggggcataacacggccatcgaaggctacggccgcgagttctaccacttcaacgaccagctgcgcctggagacggccgccttctcgggcctctccctcagcgactccatctggtcgcccgccggctggcgcagcaac

SEQ ID NO: 315096 - DNA, 208 bp, Zea mays
tcggcatcatgagatcgatctggctgcaggacttctcataaatgtcttgggtttctgctcctgggactttgtcagccatagacagaagtgatgaggaatggccattcagtccgatgaatgtcaccatgttggcatatgtgaacatgtagtagcggcaatccgacactatgtgtggatcgatagtatatatacatcatcaacgacggga

SEQ ID NO: 315097 - DNA, 293 bp, Zea mays
cgcgtccagttaattatttttagtgcgcgagatcttgaaatttcgtgcacgattgtcagtagccaactgctgataacatcatcgtatcgttcctgtaacccctttccgtgacgatgcgatagaatttgctcttctctgtgcgtgtgcaatttcatcagctacagctcaacgatcagctactctgctgttttgggatatacgccatgggtggcggggccgttaaggatgacttcccgggggcgaacaacccgctgctccccatgacgcaggatggagacagggacgaggacgac

SEQ ID NO: 315098 - DNA, 393 bp, Zea mays
acggacgcgtgggcggacgcgtgggcggttgcgattttgacaccatagaaccttcagtatctacatatttgtaaggtgagtaacaatcattcttattgcaaggcacattcttcttgattcttattcctaatataatatttggcaaaacaataaaatacaatggtgcttgtaccagaagtagaataaatatttgtgcttgcctacgtatcattgctttgagaagaaagaggtggggaaaagaaaccccccaagttacagaccaccaatacaaacaaacaaagagcagtgacccactaaaatcagccctaacagaattcatagtattccatacaaattcaacacttattaatctaggtttatgcttttgattccatgttttataaacacagttca

SEQ ID NO: 315099 - DNA, 421 bp, Zea mays
  unsure (1)..(421): unsure at all n locations
gacccacgcgtcagaggagggcgctcacgaggccaccggcgctgatctcaagcaaccactagtcctcgccgtagcggttggcgaatacaggcaggcgcgagccaggcacagcggcacgacgacggactaggagcacagctgcacacgggcacgacggctcctggggccaaggcacggtggcggttcgggcgacgatggggccaaggcatggcggaggggcagccggccgggcaaggtgctgcactgagggggtcgccggtgagaccacggacggagggacgcgtgggacgatgcggcatgatgagatgtgagagagaagcccgtgagaataaaaaatataacttcctatattaaaaccgtaggaagttacttaacttcctaaatgttgtacatgtactctagaaagttanggcctgtttgt

SEQ ID NO: 315100 - DNA, 406 bp, Zea mays
ggcttcaagacgcacggcgtgaacgacatcaccgtggtgggcggctatcgcgccgacgcgatcgacacgtcgggcatcaagctcgtggtcaacgaacgccatgcgcagacgggcgaactcgcgtcgctcgcctgtgcggccgaacgcctgaccggcgacaccgtgatttcgtacggtgacctgctgttccgcagctacatcgtgcgcgacctcgcggagagcgaggccgagttcagcgtggtggtcgattcgtcgctcaccgaaaccaaccagagcgtgcgcgatttcgcactgtgctcggcggcggacgatcgcggcctgttcggccagaagacctacctgcaacgcgtgtcgagcgacgtcgccgccggcacgccgcacggccgctggatcggcctgctgaacg

SEQ ID NO: 315101 - DNA, 276 bp, Zea mays
gagtaaggttgcagaaaatattgaaaatttcttgcatgagtgtcagtcgcaaagggctgataagataatcgattcgttcatagttccacgttcagtgacgttgggatacaacttgctcttcactgaacgtgtggtcattcgtcctctatatatcaaggatccgctggtcaactgttttgggagattcaccatgggcggtggggccattatcgactatctccaggtggccagctagccgctgcgcccgattaagtgggatggggaaagagatgagga

SEQ ID NO: 315102 - DNA, 277 bp, Zea mays
atatcggagggtggtaagtccgcatcggcgttagggttccttagggttttgtgggcgggcgacatcctgcggttgcttatgctgatgttgcgtggtgtgcgggcttcggcattgcctcaggggggcggtggtctgcggatgccgcggcctcatggtggtacatcacgtcatcctcgatgtcgacggggaattgttctcggacgtggtcggcttcggctgcgtgcccttggcgtccaaggacgccatggccgcacttaatgaggtgatcgccggggag

SEQ ID NO: 315103 - DNA, 370 bp, Zea mays
atgctgggaagcagcttgaggacgggcgcacgcttgccgactacaacatccagaaggagagcaccctccacttggtgctgcgcctcaggggaggcatgcagatcttcgtgaagaccctgaccggcaagactatcacccttgaggtggagtcttcagacaccatcgacaacgtcaaggccaagatccaggacaaggagggcatcccaccggaccagcagcgtttgatcttcgctggcaagcagctggaggatggccgcacccttgcggattacaacatccagaacgagagcaccctccacctggtgctccgtctcaggggtggcatgcagatctttgtgaagacactcactggcaagacaatcacccttga

SEQ ID NO: 315104 - DNA, 387 bp, Zea mays
gacacacgaatctacggtcacttgggcgaccccacatctatcgacccgaattctccactcaatggacccacccaagccgccgtcctcggtcgcctcgtcgtcggggccggagacgccgaacccgcacgccttcacctgcgagctcccgcactcgatctacgcgctcgccgtctcccccgtcgcgcccgtcgtcgcctccggcagcttcctcgaggacctccacaaccgcgtctccctgctctccttcgaccccgtccgcccctccgccgcctccttccgcgccctcccggcgctctccttcgaccacccttagccacccaccaagctccagttcaacccccgcgccgccgcggccgtccctcctcgcctcctccgccgacacgctcc

SEQ ID NO: 315105 - DNA, 332 bp, Zea mays
ataaaatacgacacacaaggaaggagtaaaaaaaaaaagaacaaaaaaaaaaaagagaaaaaaaaaaaaaaaggggggaagacaaaaaaggttggggggggagataaacgtagaacggacgattaaaatcacatcaaagggggggccgaccctcaggtacgggccccttcgtttcggagcggagtaatgggaatctctctggcggttccaagaaatatcgccggggggggggtttttatatcccgcgcagggggggaaaactggggtggcacgccacattgacccccccaaatattcccccttttggaggggttggggaaattctcaggggg

SEQ ID NO: 315106 - DNA, 58 bp, Zea mays
gcgtccacgttactctagccgtctcgcgcagccacagcctccatttctcctccgacgg

SEQ ID NO: 315107 - DNA, 276 bp, Zea mays
agaggggaaggcatgagacaccaaccaactctagttaccgtctacgacgaggaacgataacaggctgattcgatcgagcatacagcggcgcggcgggcacggccgtgtacccgactaacggcaaagcaccttcagctccccgtcgccgcagtggatcccatagccgcgtaccgtcacgagaaatcaggagccattgctggaaccacctcagcaaccctatgcgtgtagccaacccagcggccgccaccggtactagaaaccgccgccgccaccgcc

SEQ ID NO: 315108 - DNA, 370 bp, Zea mays
acatctgacaatctgctcatcgcctacaagccccgccgggggaagttcgcggtgtacgacggcgatgtgacactggcagaagctgagaggttcgtgggatccgttttgaacggagacgttcaactgtcgccgacgaaacaaaagcctgtccttcggtagacgattactgcaagttgcaaaggttttagatctaacacttattatcttaattaaggacctgtacatacatggacgatgagagtacaatcgtagagcgtttgctggacagttttgtcgttcggtaaaccacagttactaactacatctcgccctcaaccgtgccaatgtaaattacgcaaattctgcagtcctgtcgagatatccagtatgc

SEQ ID NO: 315109 - DNA, 355 bp, Zea mays
agtccctcaccgcaatggccactgccttgcagggccagccgccgaggttcactgcgtgcatctacacaacaaacccgcaagaacatgtggctgcctgcccagatgatgatcgtcgttgccaccaccagaaacgacctcgagcggtgaccaccgctagccgcaacaccacccttcttctgaattgctgatgccacgatgcgctgccactcgcccgcccggcaagcctgcccggcggcccggcacatcgccgccgcaggacacacagccgccaccacagcaaacacctccaagccgccaccaagccaggccaccgccgtaggcgtgcagcagcccaatatcttagtgccccacaacg

SEQ ID NO: 315110 - DNA, 128 bp, Zea mays
agcgaagcgcacagagggggggaacgaaggatacaccacccagatagagttaccctctgcgaagatgaaggacaagaggctgatacgatcgaacaccatagcaccacgagccgcagacaatgtccaca

SEQ ID NO: 315111 - DNA, 123 bp, Zea mays
agagcctcctcgctctgcaaagcgaagccaagcctgaaggtagtcgcggtggctcgaaaacacgatgggcagggacgacctgattgagagcggggcggggggcggcgagttcactgccacggg

SEQ ID NO: 315112 - DNA, 139 bp, Zea mays
  unsure (1)..(139): unsure at all n locations
tcatatggctgnngcctgngggcnnggtccttntcantgnctactgcnngnntcctgggaaaccatcanaggaatttgcancgtacattaaccagagaggttatgacctacatgctgtggaggcttatggacagtgggg

SEQ ID NO: 315113 - DNA, 67 bp, Zea mays
aaacgttgctgcgccataaggcagtgtccatgatccagtctagagtgggaacgcggtttatggattg

SEQ ID NO: 315114 - DNA, 374 bp, Zea mays
tggcccgcgacgagctgcggcggctcctcgccgccaccctcagccccgacaaggcgtcggtggacgccgctgctgcggggctcgacgcgctctcttcggagccacgcttcggcctcgcaatcctcgccgtcgctgcaggggatggtgaccagcggatgagagtcgctgtagcgacatacttaaaaaattttacccgccgaaatttggaaaggcgtctgtgttcatctgaggtttacaacgagttccgtgaccaacgtgcccatgctttgcttctagtggagcatgcaattcctcaagtgctgattgaacttttccgccaagttgtttaaaaagattttgtcaaggataacttgtggcctgagcttatccctcag

SEQ ID NO: 315115 - DNA, 343 bp, Zea mays
cttagcaagtcctcctcgggttagggttccttagggttttgtggaggggcgatggcggcggctgatgtggagtaccgttgcttcgtcggcggacttgcctgcgccaccagcaacgagtcgctggagaatgccttcgcctcctacggcgagatcctcgactccaaggtcatcaccgaccgggagacggggaggtcccgcggcttcggcttcgttaccttctcctccgagaactccatgctcgacgctatcgagaacatgaacggcaaggagctcgacggccgtaacatcaccgttaaccaggcccagtcccgtggcggcggcggcggccgccgcggccgtggct

SEQ ID NO: 315116 - DNA, 189 bp, Zea mays
gtgggccggcgccgggcgccgcgcagcagaacaggcgctggcgcgcgaacggatctcgtgttttccgacgccatcgcgcgagcaggccgtcgcgagcacgtcgggcttcttcgactggatgttcgtgggagagcgcgtctaccgcgcgctcgcggatgcctatccgttgctgaccgatgcgcgatatgc

SEQ ID NO: 315117 - DNA, 138 bp, Zea mays
acaggacggagccgagcgtcgagcggcgtgcgctgtatcggctatcactccttccggggcggtgatgacgcgacggacgcgcaaggagatgtcggagtatcagcggaggtgagatgaggcgagtggacggcgcacggg

SEQ ID NO: 315118 - DNA, 83 bp, Zea mays
agcgccgaggttccttcgttgggggttcttggtccggattgagagatttggttcgcggggggttgttgtgtgggtgtgagttg

SEQ ID NO: 315119 - DNA, 82 bp, Zea mays
acacacacgtccggtactagatcgcgagcggccgccctttttttttttttttttttttttttttttttttttttattttttt

SEQ ID NO: 315120 - DNA, 394 bp, Zea mays
cccacacgtcaaaaagcagcaatgcaacagcacaagcaagaaccacacctcctcccttcgcctgtgatcatgtcgtcttgctgcggcggcaagtgcgggtgcggctccagctgctcctgcggcagcggatgcaacggctgcggtatgtaccctgacgtggagaccgccgccaccagcagcgtcaagaccacggtcctcgccgcgccgaccaccaaggccagcgccggcggcttcgaggcggccaccgagggcggcggctgcgactgcaacacctgcaagtgcggcaccagctgccgctgctcctgctgcagctgcaactgagctgggccggcccggcgatggcgcacgagagtcgagaggaggaggacgacgacgaggcgtataaatataatag

SEQ ID NO: 315121 - DNA, 281 bp, Zea mays
atctctgcagcatcgcgcgtgaaaaaagatcagccaattccacgagcattgatgttgtcatgacttcaaaagaggagagactatgctaggaatagtgcattatgacatttgtcaggcttacatatcgactgtttgatatggatagatgtataggtttatgaccaatctagttcaaagcaattggagtatagacgagatactgacaaacatcgcagaagcgcaaccgcaggatgctggtaagccgccctcagattgcgctgcctgttggatcgcccgaaata

SEQ ID NO: 315122 - DNA, 231 bp, Zea mays
atgcagacacgtcctgctgcccagacaaatactgcctacaacaagggcatagcccatgcacattatcctatctgcaaagatgatggtgtcagtggactgtaccacggtcctggagatacctcattgggaatcggccccaacattgcagtagccctcaccgtttacgaatcttaacactcgcactgccagatagacaagccatgtgctccccctgttcggataagtttggct

SEQ ID NO: 315123 - DNA, 384 bp, Zea mays
gtccgaccgaatccaaccgcgaatcgcccgccgtgccttcacccgccgctcctccatctcctcctcctcgtcgtcgctgccgccgcgctgcggggggcgccgttggcggacgccggcgcggacacctgcaaggcgtggttggtgcagtccatccccacggacatgccgcacctgagccgcatccccggggtcctatccacgggagatgtgctccagtggctctcggggaatgcaacgaagagtctggacatccttgcgcagtactggcagttcttgccccagccgaacaatccgaaatcgggggactacgggttctccaagagtgacatgaggagattcggggccgacgaaggccgccgggtttacaaggcactggaaaatgct

SEQ ID NO: 315124 - DNA, 417 bp, Zea mays
atccaggcttctcctccccctcttaccaagtcctcctcgggttagggttccttagggttttgtggaggggcgatggcggcggctgatgtggagtaccgttgcttcgtcggcgggcttgcctgggccaccagcaacgagtcgctggagaatgccttcgcctcctacggcgagatcctcgactccaaggtcatcaccgaccgggagacggggaggtctcgcggcttcggcttcgttaccttctcctccgagaactccatgctcgacgctatcgagaacatgaacggcaaggagctcgacggccgtaacatcaccgttaaccaggcccagtcccgtggcggtggcggtggcggcggtggctacggcggcggtcgcggcagcggcggctatggtggccggcgccgtgacggccgttatggc

SEQ ID NO: 315125 - DNA, 325 bp, Zea mays
atggcggctggtcccaagctcggggcgggcgcgacgcgcgagcaccgcaccgatgccgatgctcctcccaccccctcccctcctcctcatcacccaactactacctcccatcccatccgcgccctccttcggtcctctcccatccgctccgctcgcagcccctccccttgcccccgcgatgtcgtcgtcgtcaccgccgccgcgggccgacgacgacgacggtgcgcaggaggtgggcgccggcgatgggaggtcgctgggctacggcgaggcggactactgggacgcgcggtacgtggaggacggcggcgcaccgtacgaaggg

SEQ ID NO: 315126 - DNA, 59 bp, Zea mays
acaatactcaatattgagtcgtattatccagattgcatatgttaataatttcagttgtt

SEQ ID NO: 315127 - DNA, 229 bp, Zea mays
aaaccgtgcgaccggcaacgcccatcaactactcgttcatggaacagagggccatagacacagcacgctacagcgatggaggatcgagggagtccccaagcgtgcaagagcgacgcccgcagcgagggcaaggggcaagctcaggggggagagattccggggcgtggtgacgtcctgcgagccgcggcagcacacgaagagaggagaaaacacgctcatgcgagggcag

SEQ ID NO: 315128 - DNA, 112 bp, Zea mays
gagtcgtattagtctgggtgtcatgtgggtcggctttgttctcgggtttcatgaccaactcactttatgctggaccttctatctatgctttcattcagttcctcgtgggtta

SEQ ID NO: 315129 - DNA, 205 bp, Zea mays
acacgcatctgagttgtatcatctaagagagttattacagcgagcagaaataattggtactccaaaaaaaaaaaaaaaaaaaaaaaaaaaaaaaaaaaaaaaaaggaagaaaatctagaggaataaaacttaattaaacgtgaatgcaaacatcatatatcttctatactgtaacgtaacattaaattcactggcggtggtgttt

SEQ ID NO: 315130 - DNA, 95 bp, Zea mays
tgagtcgtattagggagttccggcagccaggagagagatctcgaaggattgggatcaggatggaattctcagccagccactgtcaagatagggac

SEQ ID NO: 315131 - DNA, 438 bp, Zea mays
cgcgtccgactgaggccccgacaccaagcagccgcactggcgccaccccgagctccgccgggcgctcgcctccaacgaccagaccgacgagctcaggcggatccgcgccagcgtccaggactccgcggtcaaggccaaggagaaggtcaggtcgctgcacgaggccatccagaagctcgacaagtacaagaacattgtcacacgcaagcgccagcgcgccaccgaggcgtcgtcctcgcccgacaagctcggggctgccggtgcctgctcctcgtccacaggcgcgctcaggatgggggcgcagaacaactctgccgtcttgagcaagcgcgtgcgctcctccctcgctgatgcccggtggaaggacgtggtagtgttcctacaaggcaaggcccctttggttagtaatgagaaaaattcacctgtggagaaggaaaa

SEQ ID NO: 315132 - DNA, 226 bp, Zea mays
cgtattaagtagtagatggctaacggaaccctttgttttttttttttaacaatatcaacggtcatttttttcaagcagagatataaatcgtttctcttgcgagagtatttaccatgcataagcaacgctttagtgagtcttgcttattcaatataggttctacaaaagtggatttggataaggaactagtgcaatgtcgagaaactagactaagggcgtgtttgga

SEQ ID NO: 315133 - DNA, 273 bp, Zea mays
acacacgcatccaaacacacgtccggttctagatcgcaaccggcgccctttctttttttttattacgaatatcaaaggtcatttttttcaagcatagatataaatcgcgttcacgtgacattgtatttagcacgcataatcaacgcttgaataactcctgcaaattcaacacaggttcaactaaacttgccttggctatggaaccacagcaatgtcaagaaactacactaagtggcctatttggattactggcgcaaacaacacgccgctcca

SEQ ID NO: 315134 - DNA, 146 bp, Zea mays
agggaaggggagaagcaagcgagacgtcacgggagcagagcatagccttgcctggaacctccattgccggccatcgcctagccgccgcccggcttccgggaagaaaaatcagtcagccccgattcccaatccgtccgcccccaaaa

SEQ ID NO: 315135 - DNA, 84 bp, Zea mays
agagaggaatcacgtcacgtgggtcaaattgagcattgatcaagctggattttatagagtgaagtatgatgatgaacttgcagc

SEQ ID NO: 315136 - DNA, 153 bp, Zea mays
gtattaaactgccatggaagctagctaatggatggaggcagaggccagaacgatgaaggggggaagctatacatatatgtgtgtaatatagatatatggggtttgtgttaaaaaaataacctacaaaaaactgggggtaaaaattcaaaatca

SEQ ID NO: 315137 - DNA, 81 bp, Zea mays
agatgctacgacgcctatgtctcgttcaaaagttctctgtcgtcgtcatcaacaggacgctccatgtagcaaaccacgttg

SEQ ID NO: 315138 - DNA, 70 bp, Zea mays
gttcgaggcctacttagcggttaaggggttttcgtactccttcaacattgggacccacattgtgtcaacc

SEQ ID NO: 315139 - DNA, 156 bp, Zea mays
aagcgggatggttggcatgctgtttactcagttgcttttcttacaggacctgaacgaataaatcatataaatctaattacatcggtcatctggatcgagagatttaaatttgggcgtcgattaatgaggaagggcgggtgtttgaggttggttccg

SEQ ID NO: 315140 - DNA, 391 bp, Zea mays
aacttactgttgtaatttctttttcttccaaatttctttgattttcttcttatttgtatttatacgtcagcctgttttatgattgtaggtcgtgtcaggcatatgttaacaatttgagaccagcaaaattctgcctgctatgtcatgtcacatgtatttgtgttcttctataggcaatatatgagagctaagatccatagagcgacagccatggtatatcctcgtctgtctttggtaaacgtttatatgataatcaattatccagttagatgagagctaagatccatatagcgacagccatggtatatcctcttctgtctttggtaaacatttgtatcataatcagttgtccagttagatgggagttaagatccatagagtgacagcctct

SEQ ID NO: 315141 - DNA, 400 bp, Zea mays
accattttgaagccccatgatggtcaagctgtttactcagttgcttttcttacagcacctgaacgatcaaatcatataaatcaaagtacatcgggtcttctgaatcgagaagttaaaatttgggcttctactaatgaggatggctggttgttgccaagtgattctgagacttggaagtgtactcagacgttggaacttgttagttctctggaacctagagtcgaacaggcatttttcaaccatgttgcggtgctgccccaagcgagcctgattttgcttgcaattgctaaaacgaacgctatttatgccgtgcatgttgagtagggcccaaatcgtgcttcaactcgcttagactacatagcagatttcacattttgaatggccaaaattaagccttaaa

SEQ ID NO: 315142 - DNA, 159 bp, Zea mays
aaaataagtcgtactaatcatcgtcatgctgtgtacttaggtggtcttcttagatgagcaagaagaatgaacgcagagctatcagaagtacgtcgtgtcaactgaagctaaacatgttgatatgagcatctgttatcgtagaatgacatgtggcaagaa

SEQ ID NO: 315143 - DNA, 196 bp, Zea mays
acattcattcgtactcactcagatgacgtctcaatcactctggataccgttgtacaatcaactgcttcgtcaaacggaccattgacaatgggatcaacgaggttgcagttgaagtcgcttgagggaccatcttctgtcatcataccgattaagtcaactacgctcttgatgtacctgtgaggaagccgaagaactt

SEQ ID NO: 315144 - DNA, 240 bp, Zea mays
cccttcctctcctccaaggtccaatcctcgcccaaccgcaacctccccaaccaaccaaggttttccaaaataacaacgccggaccccccaacttggcccctggccaagggcggcaccaacaaggggggaacccactccttcggcccctccaacaatttctcctcccacgacctcgcagtccaaaacttccctcaagccaaggtactctctcgctctctctcctacgtctctctacgatct

SEQ ID NO: 315145 - DNA, 179 bp, Zea mays
acggatcccgagctccgacggccgcagcatcatgcgcggccccccatcgcgtgtcaccgagatggggctgcgtaatcaggggacggttggctagcccaggttcatgctcgtcatcgtcagggatggtggaattggcaggacggcatttgtgatcatggatctcactgtagagtttgaga

SEQ ID NO: 315146 - DNA, 322 bp, Zea mays
attcaaccccgccgcccaatccccaatggctcaaccaaccacgaaaaccgccaagccgccggcatccttccgcttccgatggggaatgccgcctgcggccccccctccggatttcctccggggggccgctgccgccgccggcgcggcctgatggttgttcagcacgtcatcctcgacgtccatggggaattgttctctggcggggtcagcggctgcggcgttccgccggcgtcgaaggccgcgatcgccgcgctgaaggaggtgaaggccggggagggcgacggcgatggcgacgacgcgctgggcgagtgcgccatctgcc

SEQ ID NO: 315147 - DNA, 155 bp, Zea mays
cttccagggggcactttcataatcattcaatctggaaaacccctgcgttactcacagacgtcgcccgagggaaaattgcccctttgaagaatcggttttttttaagaagggtctggctcgttggcatccctcaaattttggcccccactatgggg

SEQ ID NO: 315148 - DNA, 161 bp, Zea mays
cgggtcgagacacgcgtctaaaataaatcatgttatcttttgttttttcctctccatgaactgttttatttattgtactaatatagctgattattcagttggacattcatttttttgtcaaacagtttaacaatattttttttcctgtgtggtctacaatt

SEQ ID NO: 315149 - DNA, 386 bp, Zea mays
gggccgacgcacgcgtccacccagacgtccgatcaaatcaccctgccgatcgccatggacaaacaacaggcggaggagggcgaaagcccccgcgtcaagaggaccccggaggaggggtcgtccccgctgtccgctctggcggatgacgtgctgctagagatcctgggacggctcgaggcggacccgcgggactgggcgcgggcctcctgcgcgtcgccgctcctcgccgctctgctccgggcggcctgcctctcgccgcgactgtcacgggcgctctccgccgagctcctccccgcgccgtcaccggacggggcgcccgcggcctgggcggcgctccacaagctctccgtctgttgcccggggctcctccgcgccggggtgctcct

SEQ ID NO: 315150 - DNA, 186 bp, Zea mays
acaagactctagattgagtcgtattacagcatgatgtgggatacccagacagccgtgatgaactagtgcatcagcggttgcagtcggcatatctaccatactggtctgcatgatgggatgctgaagtctaggatgtggaccactacgtgtctatgtagatgcacgcactgatgtatgtgggacact

SEQ ID NO: 315151 - DNA, 79 bp, Zea mays
atcacgcccacatgacgacacacgcttggggtgacggcctgcgactcgtacctccagatgtggatcacgcacaagggcg

SEQ ID NO: 315152 - DNA, 218 bp, Zea mays
agactgtccacgccgattccacgatacgttcgcgagttcaggccaacatcgtcagctcctggcactcgttgcgatactgtaggtcgtcacccgtaaggtctgactgataggattccagatggatgggtccagtaggcagcctcaatgccggtgcactcgacagccgtcaagagtgctccatctacaggatcggccgtggtaactgcatcgaaaggagc

SEQ ID NO: 315153 - DNA, 413 bp, Zea mays
  unsure (1)..(413): unsure at all n locations
catgaatgttattcttcaatgaaacaccccatgaaactggaggccggggaaggaagcagctggatggcggcggcggcggcagcgcggccggtgcccggcgtgcatcagctaccgatgttcgcgctgtggaacgactgttgattgtggcaatggcaacctggttggtagagtacgtagtagttagtgaagaaatgcatgtcattgcacctgcatgcgcatgcgcgagcacgaggtgtaatgactttcggcagtagaagtggcggtgaagaagtggacgacacggcctgnggaaggacatgcatggcgtactgcctcnctgcaagcgagatgcatgcatgttgcacacgctcgccgtttcttcgcaagatggcgacaattttgccgcaatatgtaatgtaatggttccacatgca

SEQ ID NO: 315154 - DNA, 444 bp, Zea mays
  unsure (1)..(444): unsure at all n locations
cgcccgggccgacacacgactctagagtcaggcgcacgactcccgcgcggcgcttgcgcgcaaacacgccgcgcggaggcgggacgacggagcccgtcgagccgcgcaaggacggccgccgtccgcgggccattaagccgaagaagccgggctggcgcccgaagagctggaggtgctggaagaggcggccatcatgggggaggacgaggggcgccggcccaccgactacgaccgccgcgcgcacatcttcgaggagagctcgcgggtcttccgtgatctcaagcagcgaagcgacggcgacggtggcggcggaagcgagagccagagcggccgtggtggtggcgtgactactggtcncgcggcggaaacagctaacaaggacgtgtaaagataacgagccgcagctgtagcagctttgttggataaaatgtcgtactgtgtaat

SEQ ID NO: 315155 - DNA, 133 bp, Zea mays
accccggcgaggtacttgcgcgcaaatgcgccgacatgccgcggaaccacggtccacgtgaagccaagcaacgacaggccgcagtccacggtcgatcagccgcagcatgccagcccgacgctcgagaacgccg

SEQ ID NO: 315156 - DNA, 443 bp, Zea mays
cccgggccgatgcacgcctctacactgagtcgtattatctcgtcgagagtagctagccgcccttgtgcagacatgccaccgctccgagctcgacgtgccgcccacgcacgagagccccgcactgcaagctcgctccgccgcgccgttcttgctcgaggttcgccatcgcggaacgaatccctgcaccagccgagctcgatccgacgtaaaaccgttggtcgttccttcattttctctccgctgttccctcctctctgttgcctgctcatcgatgagggatatacgtgtacatctgggccaacacgctggcccgaagcacgatcatacacagcctaggtgttggtggccttcatcttcgccgaaggtcttctaagcacagacactttccgcaggactatctgcaggcttacatcacgtgaacgtataggccgaatctacaattc

SEQ ID NO: 315157 - DNA, 357 bp, Zea mays
ctcgcgtgtcgatacaagcctctacagtgacgtcgtgtcaaagtgagcattccgaattcgctgcgatttctcgagatcacgacaacatcgactactcttggtaccccctttcgtgccatagatcgtttctagtgacgttgggaagatgcgatgctccagggatggggatcggtgtcgggacgaactacccgtgcgtcagcctgtggtcaaacgagcgcgatcgacatgaatcggcagtaggactgcgaaccaaacgagctgtcctatgtcgggatcaccttcagcgaggtgctcatcggcaactccggcatcagcgacgtccgcattcacgcaatcatcaacgtcttcgatcacaat

SEQ ID NO: 315158 - DNA, 125 bp, Zea mays
aaggagcaggaacctaaccacgaacgcatccgcagcgactgggtaacgatctctgatcccggagcaatgaacagccaaacgaatcgcaaaccgtgaggatcagacgatgttttatctcaagcgcc

SEQ ID NO: 315159 - DNA, 92 bp, Zea mays
aacacgtcaagctcacgtcgggcgccttcgtcaccgccgtgctcttcagcgtccacgggctgctcaactcactcttcgaggggcgcaccgtc

SEQ ID NO: 315160 - DNA, 216 bp, Zea mays
gcccttcgacgcccatcccggctggtcgatcgcgatgagccatcgcgggactgcccggcgaacgatcccaccgactgctccatgggtcttcctctacttcctctgcgccatgaacatccgaaccaatctccagaaactgctcggcttcaccccgctgcacgcggttactacggccggcaggggtctcttcattatgtccgatccgaacgttaactg

SEQ ID NO: 315161 - DNA, 360 bp, Zea mays
agccacggtcacgggcgcgtcgacgggctcggcggcggcggcggagcgccggtggagatcgtggagagcccccgcgagtacgccttcgtgctcgacgtgccaggcctctccaagtccgacatccaggtaccgcacctgcggcgcgcggtccctttactccgttggatccagggcgcgagcaactgaccccaatcgcatccgcttgtgtttcaagtgacgctggaggaggaccgggtgctggtgatgaagggcggcagcgggaagcggtagcgcgatgaggaggaggacatgaacggcgaagggtgccgatacatccggttggagcgcggcgcggcgccgcggtcgttcgtgcgcaagttc

SEQ ID NO: 315162 - DNA, 317 bp, Zea mays
gtgtggctctggatcgtcctcagggccaacgtcctgggcatcaacctcaacctgcccatcaaggtggggctcctcgtcaactattgctggaagcgggtcccctctggcttccaatgcttctgatcatgcccatcgattcatctgcatgctacatagtttgttcaagctagtatatatacctacgtacgttgagtatatatgatgtagtactatatatagtgtccatgcatccaatgcatctcgtcctccatcgcatgttgttgtcgttgtggtgtgtggttttcgatcatcctgtcgctgtgttacatatcattagt

SEQ ID NO: 315163 - DNA, 237 bp, Zea mays
aaacattgccactcactatacggtgttatatttcttatgtctactcactggctgaacttgagagatcgaattacatcgtgtcctgtgtggcgggaggtgattatttgtgcatctatgagggtggatggtcatgttgtcgcgaagtgattctcagacttgcgcgtgtactcagaggtttgatcttgtgagctccctgaaaggtagagctcccgaggcatttttcaaccgttttgtggt

SEQ ID NO: 315164 - DNA, 405 bp, Zea mays
acatgattcaggcttatcctactacataatattgctcgcctctcctgtctcctctcctcgtcgagcggttgtgggtggtcgatccataaggccggaatggcaaaccaccaggagaagcccaccacgtccccaccgccccagccggcggagggcagcgtcgctcgcccccgcttgcccggcgtcggcaacgcacacccgggcagtgccggatacccaaacccgccagatgccgcgatccccgatgcggcgactcttcgggaccagtggcggtttgccgtgcggcagtacagccgctggtactcccacgcctggggcaccgccatccttgccggcgccgccttcttcgcgcttgggtggcttgtcaaggggtcaaacccgctcacgtcccgggccgagccacaacac

SEQ ID NO: 315165 - DNA, 110 bp, Zea mays
aaactgccgtgggtaaagccgccgccgccgcaaatgccgcgccagcatcatgcacgcctggtgccggttcttcatccgggggtgcatggcgtagcgccggactcagcgtc

SEQ ID NO: 315166 - DNA, 276 bp, Zea mays
gggtcgatacaagactctaaagtgagtcatctgatggggacccaattaactagcctttcgtatcttagctggtctttggccttcttcagcgaccgcgagctcgcgagctgattagtgtaaatatacgacgatgatcggatgatgatgatgatgaaaagttctgccagaaaaaaaaagaagaaaaaagaaaaaaacaaagaacaaaaaaaaaaagaaaaaaaaaagaagatgaaaaaaaagaaaatgaaagaaaaaaaaaaggggggggcgcccgaa

SEQ ID NO: 315167 - DNA, 77 bp, Zea mays
gcactgtcacacaagagtttttgatccaagaggttccagcaatgaaggttactgccctgacgttcacggagacagca

SEQ ID NO: 315168 - DNA, 384 bp, Zea mays
atcccatcccacactgctcagcagtcattcaacactcggcaaccacatgcctccgctcagcccactggtctaatgcaactctcagatctccaggaaacttctgcagacgacccggttagggccgctcacatggccgacgctgaggacatgcgctaggtcgaaagggcgtcccgatacatccgtgacgtcatcaccagcatgggatacgttacgatcatgctcagctgcatatggaatagaacgttgcacttatgaccttgactttatgccctggtggagcaataggtacaactagatatggttacaagtacactcagcgtgcataagctagttaatggcttgcaatcaatgtccatgaacccatcattgatgttaccctgtatg

SEQ ID NO: 315169 - DNA, 318 bp, Zea mays
ataaaaaaaaaaaaaaaaaaaaaaaaaaaaaaaaaaaaaaaaaatcaaaaaatgaaaaaaataaaaaaggcgggagcgcaaattggtgggacgctgttcctaggtgtcaatggattggtttctcctcttcttaagtttttcctggtttaattgggttagcagtctttttttaacggcgttccggtttgaaccgtatggtaggttaactaattggcgttccataattaagccgtttcgctatctagcgttttttcaattttgccggcttcaattatcagcccaaactctttgtatctcggcatcattcttggatcgttt

SEQ ID NO: 315170 - DNA, 376 bp, Zea mays
tctgatgtcaattaatggcagcagagttcaataatgtctggtctctgaagcacatactcagttttctgtcggctgtgttgcagacgaatgacttattgccacagagctaaggatgacagtgtgagtatttttgctgttcaatgtaactcagttctgttatttttttgactgttgttgatgcatttctgtctagactggactgcagagagaaagttggggcagatttccggcttcaatttatgtccttatcatcactacaacagcaacgacgagcacagtagcaaatcagtccgagccttgtggaggagagcctccacaagaagtgcctcgacgggttcgctaactccgccgccggtaccgtgtcaatgatgggcca

SEQ ID NO: 315171 - DNA, 430 bp, Zea mays
  unsure (1)..(430): unsure at all n locations
tcccgggccgacacacgcctctagcatcttcacatgcgaatcatcgttttccatcgctcctactcctatcatccagaaaatctgagcggtattgatggcgcccaaggcggagaagaagccggcggcgaagaaggtggcggaggaggagccctcggagaaggcggctccggcggagaaggcccccgcggggaagaagcccaaggcggagaagcggctacctgcgggcaagtccgccggcaaggagggcggcgacaagaagggtangaagaaggcgaagaagagcgtggagacctacaagatctacatcttcaaggtcctgaagcaggtgcaccccgacatcggcatctcctccaaggccatgtccatcatgaactccttcatcaacgacatcttcgagaagctcgccgcggaggccgccaagctcgcccgg

SEQ ID NO: 315172 - DNA, 144 bp, Zea mays
  unsure (1)..(144): unsure at all n locations
aaacnngnnctgntcanagcaggtacctgccagcgggacacactgaagtgtagcccgtgcgcatctgccacaagataccctgaaccagggtgcggtagaagaagcaggtgacttgttctgccagcggggggtggcccatcaccc

SEQ ID NO: 315173 - DNA, 137 bp, Zea mays
ataaaaaaaaaaaaaaaataaaaaaagataaatcaaaaatggcggtttgcgcatgaaaggtatatggactttctatccttccaatcgagtcctaattggcggggaatctgttacctgcttttccgtaaatggccctt

SEQ ID NO: 315174 - DNA, 167 bp, Zea mays
aaaaagtacgactcattagagggagtcgtgttaagtggtaccacccagtagcgggacaccgacagaggtgtcggaggctctagaggcggggtgggacttgcctacgacctgcggctagagctgggggcatgtcgccaggtagaagacgcgcagtcggcgcgcggagg

SEQ ID NO: 315175 - DNA, 297 bp, Zea mays
  unsure (1)..(297): unsure at all n locations
aaacancgcgacacaagatgtaggacatttggatgttagcctgcacgtcttctggcgaccagacaaggttttccccctgggggcttgtggtggagcttgttaggctcaccttaccttgggtagtggacgtgagccaggaggtatacgatttggaagaggagagaggataattttaattttcatcgcgcttggagtattattgagttatgtttgtgggtacgaaacttgaatttgtttcagcagatcgagttcacaaaaagacggccattactgggtgatggttctgaactgcaggtg

SEQ ID NO: 315176 - DNA, 390 bp, Zea mays
agtacattcctgatcatggcactagtgtgcatctccaaattcaacactagtgccaagatcacgaatgtacagagagaaaagggtagaaagtgcatcttgcattttgtcttgattttcatccaatgccgcagccagagcctcagcagatgcagcacgaacattgtaatttttatgggaaagtgcattgaaaataccagagtaatcagtgatggcatcaaaaccaaagcggtcccataattcctctgctaattcagcaaccaccttctccggatcatgagcggcaatccagaggcttgttgacacctgcaaatctcgttgcacagagtgcacaggaacacattttatagcagttaagcaggcaagcctaacatgcagttcttttgcatatac

SEQ ID NO: 315177 - DNA, 64 bp, Zea mays
aaaaaaaaatcaaaataaaaaaaaaaaaaaaaaaaaaaaaaaaaaaaaaaaaaaaaaaaaaaaa

SEQ ID NO: 315178 - DNA, 177 bp, Zea mays
acctgagcctccagcgaccggctccaccaccatctgcgcgcttcgcgcgcgcgcaagggaccggtgtggcatctgaggctccattgacctcttagcgggtgtattagcaatagtgacagccctggtgcctgtgtgcgccgatgcccatggccattgtctctatacatcctctagctc

SEQ ID NO: 315179 - DNA, 406 bp, Zea mays
  unsure (1)..(406): unsure at all n locations
agcaagatgttcgggcgcgcgccgaagaagagcgacaacaccaagtactacgagatcctcggggtgcccaagtcggcgtcccaggacgatctcaagaaggcctaccgcaaggctgctatcaagaaccaccccgacaagggcggtgaccccgagaagttcaaggagctcgcacaagcctatgaggttttgagtgatccagagaaacgtgagatttatgatcagtatggtgaagatgcccttaaggaangaatgggcggtggaggatcccatgttgatccatttgacatcttctcatcattttttggaccctcttttggaggangaggtggaagcagcaggggaagaaggcaaangangggagaagatgtagttcacccacttaaagtttctctggaagatctttaca

SEQ ID NO: 315180 - DNA, 376 bp, Zea mays
agccgaccactccgatctagatcagatcgctggtcctgcctgtgcacttggttcattgatgtgatccctagactcttgacggcgactggttcctatgcgacgcggacaggacagggttcgagaggctgggtccaggcggtgtggggtagatctacttcatgctgccctccgtcacggcctgcggcacgaggactcatctctcttgtcgtcagggtccgccactctctcctcccagcactcctgagttatgcttgttccattccctccagggacgcataagcgggggctgtagaggaggcggatgcgccagcgaccgtgtcgcattggtccgcgatgtggctccggggacactgtcatcctgctccatgtgcgcccc

SEQ ID NO: 315181 - DNA, 426 bp, Zea mays
  unsure (1)..(426): unsure at all n locations
gggccgacccacgcgtctactaacttacctgcagacctaactaaactgccaagaatttggccaaagcaagatctcacaatcccatataacagatcggagcccgcccatgtatgtgtagatagacagagatatagatatatggcggataaccaggagatgatccacccaccagcggctgctgccaccacgggcagcacgacgactcacggcgattggtggaccacggcggtgtcgtggtcgccggaccagcagctacctgctgggttcggcggctgggcgtcgtctgccgcggcaacagctggaggcaacaggtcgaggtccggcaacaacgcggctgcctcctcggagtcncccgggtccaagtccaaccactcgctcaccaccgaccaaggcgtggtctccgtgccgccgcacccgccgccagcg

SEQ ID NO: 315182 - DNA, 406 bp, Zea mays
tttctttcaactggatgaagaagatgtaatcaagactttttttaccattagaaaccgcaggccaaagaaaaacaagtaatcttctagtacatactcccatgagtaagtgaaatttatgtatatgttgaactgaattaatatattatcatgattataaaaatattatattggaaccaattatatatatttgtaactatttagttaggcaaattttattatttctatatggtgccaccaaattattggttcggcatacccagagataaattcctagattcgccactggtgaaagatacaaattcctgctactatagctatttgaagtattgttgcccgatgtgctgactgctgaggtagtaagtagtatggatctcgttggttaataccttgcattttgtttcttcat

SEQ ID NO: 315183 - DNA, 286 bp, Zea mays
tcgtattactggatcatcaatagtcgtcatccattttttaatctcctacttcaaggatgacgacacccctcaaaacttctcggcggtcagcccctgagtcggggagattctagtataagtgctatagaggaacgacagtacaatccctattcacaatacagccatccatctctctcatcgcatgtctgacatgttccttaagccttctttattatttcaatttactgccactacattattggttcgggataacctgagatctattcatatgtcagccacagatgtc

SEQ ID NO: 315184 - DNA, 332 bp, Zea mays
aaataaacaaataaaaaaaaagaaaaaaaaaaaaaaaaataaaaaaaatgaaataaaataatcattaaattcaaaaaaagatatatcacaaaaacttcgtcatctcggggggaggtctctcaggtggtttctagagatagtgatctcaagttttgcacgtcattcatgtgtttggggccagcattgcatacccgtgactttgtcacgttcagcttgatcagggcattctggccagatatcagctctaaggttttgtctgtcagattatcattttgataaagattcagcaacgtcagggccttcagatccttgagtttcttcactccagcatc

SEQ ID NO: 315185 - DNA, 143 bp, Zea mays
acacaaacgtctgacaaccttcctacgatataagacactttgcataaacgtgtcactggccaagattaagcggtggtaacaattagtcgctcgatccgccgagctcatgtgggtctcagaaagctcatcaggccaattgcaag

SEQ ID NO: 315186 - DNA, 330 bp, Zea mays
atgagcttctcgaagcatccactgtctccgccatgagtcctttcggggcggtgatgacgccaaacgctcgcaaggagctgtctaactctgaaggacgtcagctcacgcaggtagactgcggataggaggcgcagaggcagatacacgcagaagataccagtcactatgccgaaggctcagcggagtaacagcccaaacatgttcggcaacggcgtaagcagtatgggcctcgtcgacaatgcgacagttgctatacttagcccggtggcgcatcggacacactggctagactgcgatcataagccgccgataccggacactctcaacaac

SEQ ID NO: 315187 - DNA, 395 bp, Zea mays
  unsure (1)..(395): unsure at all n locations
agccagacactgccatcgccgcgagagaagagccaacatcatagccgcttgcctacatagtcgcccggagcgcacggacaagcccgagagcttagctcttatggcgtggtcatcatcgctccaaagaaaacaacagagggggtcgaccaaggtactctgcggcgcggggttatggtcgcgactcgcacctcaccgtgggtgagagactttgtgccaccataacccgccagaattgctcaccggagctaactcggcgtcgtggatccgcaccaagcaatagtcaggcccgaaggcccttatgcacaccgatgagcaagtgaacgaggaacacgaagctcgcaggttgaagattctgagtaggagctcgttgaaggtgangagcaggtaccgccgga

SEQ ID NO: 315188 - DNA, 61 bp, Zea mays
acgaccgccggatcatatcacccgttgggctagcctgcgaccattcgcgcgtggcgttcgt

SEQ ID NO: 315189 - DNA, 145 bp, Zea mays
aatgtgacatacatactgtgctagcgccggaagccggaagcatcggtgacgaagccttccgtgtcatcactcagtcaggatctcatggggatgggtcggttcgcgggctttgggaatcagccgatgtgacgaagatgctcatcga

SEQ ID NO: 315190 - DNA, 94 bp, Zea mays
aaaaaaaaaaaaaaaaaaaaaaaaaaaaaaaaaaaaaaaaaaaaaaaaaaaaaaaaaaaaaaaaaaaaaaaaaaaaaaaaaaaaaaaaaaaaaa

SEQ ID NO: 315191 - DNA, 375 bp, Zea mays
gcccaatcgatcggcgctagccgctagcacgcctataaaatgccacttcattgaagtagatccatgcagcgccgagccatagccacagcccaccgcgcgagcaacgatgttcaggtgccccagcaatggctacggccaaccgcaccccaccgcgaactaccaccgcacccactccggcgaacacgtcaccaccaaggtcgcccagaaaccctgccatgccggcggcgccgtgcagcagcaccacgttgtccacaaggagtcgtcgttcaaggagctggacgggggtaaccgccgctgcttcgacaactatcccatgaacgctgctaacaacgcgaaccatcaccgctacgaggcctacgaggaaacctacgagga

SEQ ID NO: 315192 - DNA, 349 bp, Zea mays
atctcactctcagctggtcgctcactcttgcagctccacccttcactcagtcttaggctcttagctctaggctctagctagccgcgccactccttcgtgtagccatcagccttctcatcgccaccaatggccactgccgaggtagtccagaccccgaccgtcgtggcggccgaggaagcgcccgtggtggagaccccgccgccggccgtcgtgcccgaggagtctgcccccgccgaggccgaggccgaggccgatgctgaggctgctgctcctgctgatctcgaggagcttcccgcggccgagcagcaggcagccgccgagcccgaggccgctgctcctgctggtgccg

SEQ ID NO: 315193 - DNA, 293 bp, Zea mays
cccgtgggccgctcggcggaggtgaaggcggagccggtggacgcgcgtctcgaccatcagcacagcgcgacggagccgcagtcgtggcccatttaccggcccaggccagtgtaccacccgctccgggcctgcagcggcttggtcagcgctgggagcgaccacgactggtccaacaactcgaggtgacttttgcttgcaagcccaatcgtccacaggttacaggttaaacttagaatgagagatcaagtgtttatgtagcaataactttttgttaatttatctcatattaccgc

SEQ ID NO: 315194 - DNA, 244 bp, Zea mays
cgacccacacgtcagtctagatcgcgagcggccccccttttttttttttttttttttttttttattatttttttattttttatttatttatatttttttttttttttttattttggtgggggtgtttctttttatattttttttttatagaaaaaacgcggagcttgagcatcaaagaagacgcgaacgaaagacggaggtgcaccaccaacggagatgtaaaggggagcaaaggggaaaaacc

SEQ ID NO: 315195 - DNA, 74 bp, Zea mays
aacctgttcgccggggcgaccctagtagtcgccaccaccgcgcacgagcacctatactatggctcccacctcca

SEQ ID NO: 315196 - DNA, 297 bp, Zea mays
caggaaggcactcacttctccatgagctttgagtcggcaacatgagctaatggtcgcgaacgcctcagtcgttgtcacccattcattctggccttgcccagacgagagggctagttcagccagcttcactgctgtggatcagtttctcatgaatttgttccaagatagtgtacctctaaacactgcactaactggactacatctttagggatcagtgttacctgcaacatccaatgttgcaatctcaattccaacatctgggtagagcagctatacccatctgaacacaagggatgt

SEQ ID NO: 315197 - DNA, 305 bp, Zea mays
atgtagtgttataagccacaatacaagtcactacgatggtgtgaggaacagaaagtttacaatgtcgcggcattggccaattcttactctttttacatgaggaacatatgatgactattttgccgcaccacatgccaataccaatatccgttttgcgctggtcatcggcacctttgggatctatctatttcgccacgatgtcaagaaacaccgttactaccactctttggacctctaccagtttatgcccacatgatccgttcacggtcagaaactggaccaactttaccaagcactggtgctgt

SEQ ID NO: 315198 - DNA, 339 bp, Zea mays
atgttgctccctctaatagaagtatctcaccacttcgtcacgctcacgtccgatccgtccacatgtgatacgccgatagatggaatcatccatgtccatgtcggcggccgccacagtcgtcttacagatatccgtgacgaccagcgtcatgttgcgcatctcactgtccttgatcaggtgcactttacggatgatcgcgctatgcctccgctggacgtacatcatcgctaccacagactcagcagtcatgtcaacaacgctctcgaactacgcacggtgcctatcagcggcagttatccagtactagagccggaattccagaatcgtgatcacgatagt

SEQ ID NO: 315199 - DNA, 300 bp, Zea mays
ccacgcgtccgataaattcttctagctctagctaggctcgtctgctgcaagaaggtaacagcgcaggcatggaggggaaggaggaggacgtccgcctgggcgccaacaagttctcggagcgccagcccatctgcaccgcggcgcatggcactgacgacaatgactacaaggagcccccgccggcgccgctcttcgagcccggggagctcaagtcctggtccttctaccgcgccggcatcgccgagttcgtcgccaccttcctcttcctctacatctccatcctcaccgtcatgggcgtct

SEQ ID NO: 315200 - DNA, 156 bp, Zea mays
acggacgcgtgggcggacgcgtgggcggacgcgtgggaaaaaaaaaaaaaaaaaaaaaaaaaaaaaaaaaaaaaaaaaaaaaaaaaaataaaaataaaaatataaaaaaggagaaataaaaaaaaatggcggcatataagggggttcgatgtttag

SEQ ID NO: 315201 - DNA, 51 bp, Zea mays
acggcctcgtcagtgcggacggcgaatcatcgcgcccttccaccatcgatg

SEQ ID NO: 315202 - DNA, 384 bp, Zea mays
acgcatccagcgttgtctcacacgcccaagtcccaactcccaccgcccccgcctgccgttcaaatctccctaccctcccgaagtaggcaagtagccctccctgttcatcgagggggcagatcagtgagccgaacaacgaagcatgccgtccaagccgaacgccgcgtcacgcctcgtcttccgcgctttcctcctcgtcatcagcgccgccgcggacaacgataacaccgcggcacggctgacgatggagtagttcacccgcttctccgcctccgacgacagcgagggcccttccaacgacttccaggtcgagtcccaaggcctccagcgtcagatcgatgatcgggcctcgttcacgaagccgcccgcgacgtcggtgagccg

SEQ ID NO: 315203 - DNA, 370 bp, Zea mays
acaacacggcaccacacctcttcttcttcttcctcctcctcctagcacagctagcgcctgctccccttcgcctgtgatcatgtcttgcaccagcggcaagtgcgactgtggctccagctgctcctgcggcatctcatgcaactgcatgtccactaacgtagtcaccaccgccgccagcagcatcaacaccatcgtccactccgcaccgatcactaccgctagctccagccgctttgaggcgcgtaccgacggtcgccgctgcgactgtcaaatctgcaactgctgtacaaggttccgctgctcctgctgcagctgcaactgaaccggtcacgcgatcgtgctatacagtccagaggacgacgactagtcg

SEQ ID NO: 315204 - DNA, 366 bp, Zea mays
acccacgcgtccgcggacgcgtgggtcggacgcgtgggcaaggcaccacacctcttcctcctcttcctcctcctagcacagctagcgcctgctccccttcgtctgtgatcatgtcttgcagcagcggcaagtgcaactgcggctccagctgctcctgcggcagctcatgcaactgcatgtcccctgacgtggagaccgccgccgccagcagcatcaagaccatggtcctcgctgcgccgaccaccaaggccagcgccggcggcttcgaggcggccaccgagggcggcggctgcgactgcaacacctgcaactgcggcaccagctgcggctgctcctgctgcagctgcaactgagccggcccgcccg

SEQ ID NO: 315205 - DNA, 358 bp, Zea mays
taaatgcgattgtacactcactcggatcctaatcgatggttcgcaattaacgttacatgtatgcacatgtgcgttgtctgaagacattgtgctatcgcagtcgatggagagagcactgactgtgacatgtgactctgtctgctcatctgcttgcacgataccactcaatagggggatcatcaaattcaggcagcaacagttatcgcgggttgagacaactacaggatgttgggtgcaacacatccggaaggtatcaaagggtcagtcatcattagaactcaatgttgaaaaacacgatgctgtaatcaatggtcatgcttggagaccaggaattggtgcctgcctacatgtagctaaa

SEQ ID NO: 315206 - DNA, 413 bp, Zea mays
agcctcagttcgtatatcatccatactggtggctggtgccatttatttccattcaccaccaacctgacgagcactgttccgtctccctcgtctctgttctgttctgttgtgttctgtcccagttccagttccagacgagagaaacgcaggcggggcaggcacactgctaccgagcctggcgtcgtcgctggcagtggcatgcgctgaaagaccaccgaaaccacatgtggccagcaggcgcggaggacccgatgggcgtgggcgtggcgggcacggcgggcatgagccacggccccgcggcgccgtcgccgaggtcgtcgagcacgatgccggcggcggggcagtcgccggtgccgtacctcttcggcgcgctggcggccatgctggggctcatcgcgctgtcgctgctcgcc

SEQ ID NO: 315207 - DNA, 195 bp, Zea mays
agctagttctagatcgcgagcggccgcccttttttttttttttttttttttttttttttttttttttttttttttttttttttttttttttttttttgtttttggtgtgggttttttttttttttttttttttttttgggttcttttttgtcttttatgttttcgcgttggtttctttgcttgtagtgttgtttg

SEQ ID NO: 315208 - DNA, 382 bp, Zea mays
acccacgcgtccgctcctttttcattaatctaagttgatcactaatgtcagcggggtcttttataatctgatgatgccggtcttctgactgacggaacaaatggacagattatgtaggtagagagaggttgactactctgtgccgtatcattgtacatgcatgcagcagaaatttcggtctctgctttctcgcggtcaatagccagccctgagtctgcctcaattgtcataaaaagaaaagaaaagaaaagaaaagaaaaaaggttgctgcaacgagtttccaagtccagtcccacaagagacgttggacagacagggacagggacactacggcaggcactcggtagcaatcaagaagatggccggcgggcacaaggacaag

SEQ ID NO: 315209 - DNA, 177 bp, Zea mays
atgcaagtgatactattcaaatatcaagggttacacactccaatggcacgattgagcactgcctgtcaagtgttgctgtgcagtacgtctctgctcggcgacgttatagctattgttattccttggccaaacatggtgtggaagggcgggagtgccacaagatttactgctaacatt

SEQ ID NO: 315210 - DNA, 328 bp, Zea mays
aaaatggtcttcgtgggtgctccttgttctaatgcaggtctcttgcatgaactgcgactcatcttcacagaatggatgatgcgctaaggacgggcgtccaatagtagccgcgtccgccaagatcatcttcagtgccgttatcattctaatgacttgcagctcagaagctagatctacaaggatgagcatagtcagattactgctggtgctctcaaagccaaggaagaaactgacggtgtccctgcagtggcagtacatcaatagtctcactgtctagtttttgtgttatcgttttcagtgaactcatatttggttcagttatgattgc

SEQ ID NO: 315211 - DNA, 239 bp, Zea mays
acagtgtcagtccatccggcatcgctacctgcaggagaatgaacatcaccatatagtgatgtataaagcttttaccacaaactttcaggaatgtcttgcatggtggatcgcatgatataggatacactcgttggacatatatcatcatccgtattaccttgtccgcactgtccatacagtccccacacaagtgtaagaatagctcctgaatctgttactgcagaactgtgacaacgtcc

SEQ ID NO: 315212 - DNA, 213 bp, Zea mays
gtcggcgtcggcgtccgcgtctgagcggtgcttttcttcctcgcgtcggtgtggcggctccactgggcgtacgcgtcaccgcaggtaggcgacggcaggcggtggtctcgatggtgtccgccgacgcgcgcttggcggagattggctcttcgatccggcgtcgatcccaggacttccgcaggcccagggatcatgttccaggacagcaggaca

SEQ ID NO: 315213 - DNA, 350 bp, Zea mays
aggctgctattgcaactgggcaaactctcgatgaagctgcaaagctaaagtaggtactatgcacaggacaagttcctgctgaatttgcaatggcaaagaccgatgcacacatggacgaagcttcagatggagccgatcagatggacacagatggtaagaaccaatatggcagtgaggctgatgggcattgacacggcgaaggaagcaccccaattcaggacgatcgaaagcatggagacataggctgggtcatccattgtctgagttatgtttgacagttttcgtgggggtgcatgaaagagctatagccttgatgccgcataactcggactctactgatcgcatgtgga

SEQ ID NO: 315214 - DNA, 73 bp, Zea mays
tcgtattagggcaagcaatgatccgaagctcaatcaagtcacgcaaacctcttccccaaatcttctatgagat

SEQ ID NO: 315215 - DNA, 407 bp, Zea mays
gtttcattgattcttgaagagatcgagcttcttttgcaccacaaggtcgaggatgtcttgcaactgcggatcaagctgcggctgcggctcaagctgcaagtgcggcaagaagtaccctgacctggaggagacgagcaccgccgcgcaggccaccgtcgtcctcggcgtggccccggagaagaaggccgcgcccgagttcgtcgaggccgcggcggagtccggcgaggccgcccacgcctgcggctgcggtagcagctgcaagtgcgacccctgcaactgctgatcacatcgatcgacgaccatggatatgattattatctatctagcttgtggtggtggttgaacaataataagcgaggccgagctggctgccatacataggtattgtgtggtgtgtgagagagaga

SEQ ID NO: 315216 - DNA, 122 bp, Zea mays
cccacgcgtccgcccacgcgtccgcccacgcgtccgcccacgcgtccggctatatgcaagtgttgtacggagtactaaactcatacgtggtaaaagatgaataaagacttaaacatttcttt

SEQ ID NO: 315217 - DNA, 161 bp, Zea mays
ttaaccgggaaaaccttttgaaaattgaaggaataacaagttatccggaaaaggttcggaaggaaacaaaaggacctaaggcccttaaggatttcacaaaagaaaataacaaaaattggttaaacaatcaatggggtaatgggaaaaccaaaaaggttcaa

SEQ ID NO: 315218 - DNA, 381 bp, Zea mays
cgtcagcagaggaagttctatttcgacctctcctctatccgctctctttcccctcgatcgacgccgacgctgctgcctcccgcggcgcagcataaaaatggggagcggcggcatccgtaacgccaggccctcctcctggctcgccgccgtggccgccgctgccgcaccaccaatcgcccacgccgtcctcctcacctccggccacctctcctcccgtgcctccgccaactccctcctccgcgtcgccccctgctcctccgcctgcgcgctcatcctccgcctcctgctgctccaccgcctccgacccgaccacatctccctctccttctccctgcacgcctgcgcccgcgtcgtccccaccaacagcccgctaccgctcac

SEQ ID NO: 315219 - DNA, 222 bp, Zea mays
ctatgatctgccttatgaagggggacacacttttgtgggtgtaaatgtgttactccaagcaacaagtaacccaacgatcatgatgcttgttacggtttactagtaccttatccatgcctttgtgctcgcgtttacctgtggttgcatatcaagtattattagcacgtcatgtcgtctaactaggatagattgtcttaggggccttcggcttccgaaggtcct

SEQ ID NO: 315220 - DNA, 284 bp, Zea mays
agagcagatccgcttcgcaagcaagaacatctcgaccgatcgacgacgactctaatcggatgccgattcgatcttcagctctcgggctatctacctagctagcaaagcatctcctctgatagtctgagcgcacctcgcaagcaagaacacctctgtcgatcgatacgtgtgcagtggggctgggcatggaggtggaggcggtcggctgcgagtgctgcggcctggaggaggagtgcacgggcgagtatatcggtggtgttgcggggtctaattcggagggaggt

SEQ ID NO: 315221 - DNA, 331 bp, Zea mays
cagaactggggagagggaggatacctcaggctcgagagaggcgcaaacgcctgtggtgtcgcccagcaagcctcctacccggtcgcatgatgaataaagcatatattctacatatacacgaaggcatgcataaaaatggctagtaaggaataaagcatgcaaacacattgacagtacatacatacatagcttaaaattgaatcacaattgtcatgtacaacactccagatatcatttatttctatttggccttcttttcaaagatcgatattctatatatacatatatgtaagggaacaagtttttatagcataataagtccttcgcacct

SEQ ID NO: 315222 - DNA, 349 bp, Zea mays
cccaagcgtccgcaccgtctgtggagaagcgagaggaggaaggagacagggaaaggaatggaggggaatcttcgtaaagcacgaagcagcgacggagtcatcgcagcttcgtctccttccttctttcccctttcgctggccgctggtcgtcggcaccatcacctacggtcactggcgcagcgcggggccgctccgtaccgggtccgcgggcctctcgccagggggaccctataagcctccgctgctctgctcggctgctcttaccgtctctcccgtccacggtccacttagctagaaatacacaatacacacggagaaatcgcattgaggagcagcgcctgccgccgcg

SEQ ID NO: 315223 - DNA, 215 bp, Zea mays
ctgccgcagagttgacaaggtccgaatgggagttagtctgtctgtctttgcagctctgtttcttctgcacttgggtaaaaacgctgtgaaccccaaaattaggaagattcagttcagaggtgaggattaagggtgggtgtccggtctgaaatagcagtggacctttgatgcctctgtttgtcttggtctggttccagtgatagctgtatcttgtg

SEQ ID NO: 315224 - DNA, 269 bp, Zea mays
cactcacatcgaattaccccaggtaagccaagatcgtcacgaaacgccctatctaattagatctacgaaatttaccacgaccagggggaggacaaaggactcgaatcagacgcatcaagacctctgctctggctgatgttctagcaggacgggccgaaatccgtcatgaaatcttggctgtcgaaagccatccgctggaacagcctgatctcgaccgtgctcgctacgttgaagatctcgctctttcctggctgcactccgttagttag

SEQ ID NO: 315225 - DNA, 353 bp, Zea mays
cggccctttttttttgttgttgctattgtgatctgttggaatggactcattgctactggggagttcttccggcgtgaaggactagtggaggaggagcctatggctgggaagcagctgcgccacgccacacccgggctcggtatcgccatcgtctgcttcgggatctagctcgtcggctaggccgcctagaaacgccgtgtaccgcgcctccggcgacgtccaggcactagatcgccggcaggatccgtgactcggtcaagaatctggcgccaactttacgatgcactggtgctgttgatgtttttagagttttgagctcatatcgtcacccatgacgatattgtaatccgtga

SEQ ID NO: 315226 - DNA, 383 bp, Zea mays
gacccacgcaaccagaaaaaaaaaaaaaaaaaaaaaaaaaaaaaaaaaaaaaaaaaaaaaaaaaaaaaaaaaaaaaaaaaaaaaaaaaaaaaaaaaaaaaaaaaaaaaaaaaaaaaaaaaaaaaaaaaaaaaaaaaaaaaaaggggggccccccaaaaggttcaaaccttacgtccccttaaatggaacttaaaaccccttcaaaagggccaccaaatttcaattaacgggccttcttttaaaaacttcggaacgggaaaaaccctgggtttaccaaattaaacccctttgaaaaaaatccccttttcccaagtggggtaaaaaccaaaaaggccccaaccattcccccttccaaaaattttccaaccctaaatggcaaatgg

SEQ ID NO: 315227 - DNA, 350 bp, Zea mays
atcccaatccccaatactgattcgtattaccagcacagactgaattctctttagctagctaagacagggtaaccacaccaaaacaggatgcagtcagcgaaggtgaaggcaaatgacatggtgagctcggcaacggaaaaggtgaacgaggggtcggcaaaaatgcatggcaagacgggcgacgcgaccgcggccacgcacggcgagaacgaaattgccaatgatgctgcccgcgccaagaacgaccagttcaacgccgacatgcaccacgacaacgtcgaccaccgaacggtcaccgccattggccactacagcacgcgcgtgcccctcaatcgcccgcacgggcatca

SEQ ID NO: 315228 - DNA, 386 bp, Zea mays
gacccacgcatcaacggacgcgtgggccgcgctacacgcccgcgctgtctcctcccgagcgttgtatcctcccgagcgccgcaagcccgcctgcgtcgagcgccgcccgagcgcctgcggtggacggaggagctgcaccggcagttcgtcgagtgcctcggtggccaggacggtgagtcagcccgcttctaatacttcccttcgtgtccgatccaaaaatatgattccatccggccatgtgggtcgctagggttccatccggccacaagagcctttttgctgcttctctgtcccttccgaccgctgtgaagcaaggcccgcctcgccgctcccgtccgggcgccgccgcagcatggctcggcaagaaagatgtccccagcagctcc

SEQ ID NO: 315229 - DNA, 282 bp, Zea mays
ccggatggccccggatgcattcatgcactggtcggttctgaaaccctgctttggtaactgctccgtcgcggtcgctgtcatcaggctccaaagaatcctcctatgcatccgtatcggcgtaggtaccatcatcatcaatcttcgcgacgacgcacaattcacccctgtaatcggcatcatccgcttccctactcgcagttggtctgctgcaggaagtcatgcgccaatccagctcggcggcttcctacctcaatagatttctgcgccacatcgcgtcagatg

SEQ ID NO: 315230 - DNA, 196 bp, Zea mays
cagttaatggttcaattggaagccacatttttccagcttgtcaagggtgaacgggccaatacagaggaatatttattttgccaagttcggacactttgacgacgaatgatgatgcacagggaatccgtcatatgatgcaataccggtgccattaaagtttcaggtttgcaacccttagccaatgcgctagcgtgtc

SEQ ID NO: 315231 - DNA, 394 bp, Zea mays
  unsure (1)..(394): unsure at all n locations
agccttcaaggagttttgtaatttccggaaaacggcaatggggtgatcctaaagcccaataagggggaaccatttcccaagaaagttaattgcaaaatcctggttccaaataaaaggcctgaattaaccgttggaattgccaagaaaaaacaacaaaaaaaaattccctcccaacctaagttgggcaacaaaattgtccttgaacctaagaagccttgcaattaaaaattggggagttccctctcactttgggcattgacacantaagctcgacagactttttatgaaagggccagaaggacgtggagacgtggaagtagctgtctctggcattgcagatcaaagcagtgggaagtcgaagaaagatcaggagatagctttcgagtccttgttc

SEQ ID NO: 315232 - DNA, 389 bp, Zea mays
aggaatgtgtctcaagaaaaggagttcatcaaagtattttatatactatattatatgatatggtgaattaagtctgatgtaataacagtgtgtaaattaatgtataacgagcgaataacaaaaaaaaaaaaaaaaaaaaaaaaaaaaaaaaaaaaaaaaaaaaaaaaaaaaaaaaaaaaaaaaaaaaaaaaaaaaaaaaaaaaaaaaaagaaaaaaaaaaaagggggggccccccaaaaggttcaagccttacttacgctttaatgaaaggtaaaaccccttcaaaagggccaccaaattcaaattcacgggccttctttttaaaaagccggaacgggaaaaaccttgggtttaccaaacttaagccctttgaaaaaaaaccccctttc

SEQ ID NO: 315233 - DNA, 223 bp, Zea mays
tacaagactctagagtgagtcgtatgtatggccgcccctatgctgattctttagcatgcaccgcacatgcgtgccataacgaaatcgacaacttgacactggaggtcagcattgaagtggaagcagagaccaaaggcgactctggcagttcggagcaagaatatgtatctcgcatttatgtaggcatgcgacgagtagagccctccactcaaaccagccatag

SEQ ID NO: 315234 - DNA, 304 bp, Zea mays
gccagggtttgacagggaatgagttcctgataaagccccctcgcggaagcaacaagatttgttccagcttgagacaggagctgcggctgcggaggaattcagcaaaggcatggttctttccggaacgcagggcaacctgccgatggcaacaatgcacaccggcgggtctccgtacctgaggctgcacgacaggcacacacagcatcacagacatagcgctaacggccggtacatgtcgccactggatgtggtggctgcagaggtcaacaaccagcaactcacggtcgtgcccgtgggcacagga

SEQ ID NO: 315235 - DNA, 180 bp, Zea mays
aagttaaaacccctccaaaaggggccccaaatttaaattcacgggccctcgtttaaaaacgtcgtaacgggaaaaacccggggttaaccaaatttaacccccttgaagaaaacccccttttcccaagctggggtaataccaaaaaggccccaactgttcccctttccaaaaatttgccca

SEQ ID NO: 315236 - DNA, 389 bp, Zea mays
ctcgcggttcgacccacgcctctacagtcactcgggacaaattagctagcttcttctagctctagctaggctcgtctgctgcaagaaggtaacagtaacagcaggcatggaggggaaggaggaggacgtccgcctgggcgccaacaagttctcggagcgccagcccatcggcacggcggcgcagggcacggacgacaaggactacaaggagcccccgccggcgccgctcttcgagcccggggagctcaagtcctggtccttctaccgcgccggcatcgccgagttcgtcgccaccttcctcttcctctacatctccatcctcaccgtcatgggcgtctccaagtccacctccaagtgcgccaccgtcgggatccagggcatcgcctggt

SEQ ID NO: 315237 - DNA, 431 bp, Zea mays
cgggtccgaccaagccttcgaaagatgttggccccaacaataaccacctaatttgattgaggcatggtttgccaacggaaccccatttagttaatggccggaaccggtggttccccttcttcagggctcaaggtcaatcagttgtggtcacacttttccatttttacgttcagctaaactgaccccctgtctcatggtgtgccagcccccatgatcctcttctttgttttatccattgtttttgctttgatgagactattctggaataatatcatggaatgcactcttgttgcttcggtaggtgcaactgtgcaaggataggcaacaagtgttcaacaatatgtctgtggatcaattgacctgcatttcagcttttagttgaggatcaaaatctcgtgtcgttcaaggccctcggtagagagacattaatg

SEQ ID NO: 315238 - DNA, 376 bp, Zea mays
aagcgacctagcttgattgatgcatggtttgtctactgaatctcaattagtttatgggctgaatctgttggtcctcctcctcaaggcgcaagggcaatcagttgtggtcacacttttccatttttacgttcaactaaactgaccccctgtctcatggtgtgccagcccccatgatcctcttcgttgttttatccattgtttttgctttgatgagactattctggaataatatcatggaatgcactcttgttgcttcggtaggtgcaactgtgcaaggataggcaacaagtgttcaacaatatgtctgtggatcaattgacctgcatttcagcttttagttgaggatcaaaatcccgtgtcgttcagggccctcggt

SEQ ID NO: 315239 - DNA, 294 bp, Zea mays
  unsure (1)..(294): unsure at all n locations
ccaatccacanaggaggttctcaatgagagcatacatccattccccatcattggttcgaagattgttcggtctggcacccccccggttggtggggtggggtcaagtgatggatgttctgcatggtcatatggtggccggtggcgcaatcatcacctacttcggcgatgcgtcctcactggcagtcacactggttgagttcacggtcctcgcggaagtgtacatctggcgcgtgggaatgagtgggcgttttcctgacatctacagggtgcatgtggtagaggaccgggttgagg

SEQ ID NO: 315240 - DNA, 263 bp, Zea mays
gggggagggtgtgagagcagttttcggtagtcgttcttcagttcgaggcttgctcgtggactccccgcagcgtccagttgggggggagccgattcagtcatggtatgctttgtcggtattctgctgatgcgatggatcttctccaccgactctgctgcgcccacaactgtcgtcataggcatggaacttcgcatctacatgaggtatcacttcggttgtaggctgatgagaggatcatttggggagatctaccacgacaacgg

SEQ ID NO: 315241 - DNA, 221 bp, Zea mays
cggcggcggcaagaacaataataaccaaaagcctttcctggcattggacctaaggcatgcataacggattcctcccggttggcaaaccgtacaaaattacacagcgtgctaccatgaaacttgtacataaaacgccggttaattaattgtaaccttaccatggaaatgtgctttatacgtatccccgtatgcaatatatatgaattatcacttatcaataa

SEQ ID NO: 315242 - DNA, 117 bp, Zea mays
cctaatggtaatttttggagttggtggttgcaagccaacaatggaccgccggtgaaacctttaataaaggtaaccgcagttaataatgaattaaaaagaacgcatggctattgtatt

SEQ ID NO: 315243 - DNA, 141 bp, Zea mays
cccaacccccaacaatgattcatagtattggccaaaaccaacaaaccgaaaaaccaaaaggccaccaagaattgcccgaaattaaaaaactggttaaaaaaaaggaaccaccaccaggacgccctacctaagcaaaccgat

SEQ ID NO: 315244 - DNA, 277 bp, Zea mays
gtcgtagtagccgcttgatcaatctccctggtcgctagcacggccggacacagtacacgaaggtgcagggcagttgcagacatctgcaagaacacccaggtcgcggatctgcttcaccgtgtggacctcctagccctgccagtcgtacatctgtgccgcactcatctaggtacgatcatcaggaccatttcaactatgacgccgcgtgccacgagtacgatcagttctccacttccaactggatgtatagaaaccaaggcaagaccagtgtccgctc

SEQ ID NO: 315245 - DNA, 396 bp, Zea mays
actcgcggcgccctcttattatgtcttccttcgggttatggttcctttatggttttgttggatgggtatttgtgttggtccagtgaagtaccgttgccacgccagaggatttgcatgcgcgaagggtaactagtcaccggagaaagacatcggtcaatacagccagatacactactccagcgacaaccatgagcagacagatgctcaggttcacggcaatcacattcgtaagactcacgagaacgaaagttctgcactagtccaacaagaccggcaaacgaaaggcacacggatgttttatcatggttgcttaatgggccctttcgggcacgatcagcatcctcctgcacgacgccgctgtccaactctgctccaaaagccggcgggacttggggg

SEQ ID NO: 315246 - DNA, 216 bp, Zea mays
tgtgtaacgtcaccaaggacgatctaggtatcccacttttgaaaggggtggtttcacattcctatgttgaatcaacgttcagcctttgggagtggtaatatagctgggccgccaacatgggtaaggttctcacagcttaagccctgagggaatctagctataagtgatacatttttagccaaaagaccattgtgatttacccaatgaaccctattc

SEQ ID NO: 315247 - DNA, 188 bp, Zea mays
ggcgcccacgcgttaaaaaggcgcgatccatggaccggtcgatcaacttccgcggcatcgccgggagcgccggcaacatcatgcagggaatggggaaattcgttttcggcaacgagggactcgactcaaaggaagatagctatgttgagagataccttgaccggataagcaatggcaccatacctgat

SEQ ID NO: 315248 - DNA, 367 bp, Zea mays
ccccaaaacgtaaccggcgtataaaacaactccaaacgattcaaccaaatccaaccaaaatacgttaaccccttctaaaaaaatatgggctccgccattaaaggtggaaccaactcctccccgtgggcctcctccccggccggaattcaatcctccacgttaaccaaaccgctaacaactgcaattggcaatcccggggcgccgaaggtcgttggcaactgaaaggccgtccccccggtagctccggctgccccggcgcgccggcaaactcaccccggtgcggcggccgatgcctccggtgtcgcagaccatgtccaggctcaaggcgcaaggcaagacggcgttcatcccgtacatcaccgccggc

SEQ ID NO: 315249 - DNA, 411 bp, Zea mays
aaaataaatctttttaatacttcttctttgtctatattactcttttgatcacttgctcccactatcacatttgatgtttctgttttctggaaggaaaaaggtggtgacatcgagagtgcagctgaccccaaggtgtctgctcaaatgccagtaaggtctgacactatcgtgtacatgttacatctctcgctgcatatatatatctcatcctcctacctattagactattagcccaactagctatatactctggttctgttaccatgtacccatcattcgtcattagaacattctcttccagaatgatcgtttctgcatgttttgagcaaggaaggacttatattacacaggtaaaatcttggatcacatgttggcagtaatagtgctctctttctgtttcctgtcacctga

SEQ ID NO: 315250 - DNA, 400 bp, Zea mays
ctcccgggtcgatacacgcctctacagtaactcgtagtagtatgtgttattagaggtcatcggtccgtgagtgctaatctctcattggcacagtgttacatatcggtgcagctccagctagcacagaagtaggcactacatcagctggcagaatatatctagattgcgggactttttccataaactgtctcaagattacagccatctacttgctgatcatgatggacaacgcaagaaggtgctccgcagcaacctctctgcgcggttgatatggtaatacttccatgtacggcacaactacggcctcctcctagcctaactacatctgcgctagccagactcaggcatagatcattacaatcgtcagggggtggaagactacgaatcctgaagatattac

SEQ ID NO: 315251 - DNA, 318 bp, Zea mays
acattcactcgaatgagtgcagctgggatgacggtatggacactggtcatgcactgagatctgtgttgattgcaagcagaaattggactggcgtagctatctactgcgtcgcaccggacgctctccaccgtgtgccagatcgtcacatgggtccactgccacagtgtcgatgatcagttccgctcaatcatcacgtagtctgcataccgtatcgctgatactggtgtctacactagccgtggcaccaagctgattcgttgaactctacggatgcgtctgcagcgtgcacttcaccgacgtgatgacggaggacgtcga

SEQ ID NO: 315252 - DNA, 180 bp, Zea mays
tataacgctatcagaacatattgccaatcactcttgcttcagtgagttctgtttgttggacgctagagctatctgctatcgtctacggggtggtcgtgaggcgcagggtgtgttcgatcccttctcgatggatctctgggacgctgtcgagactatgttccactccatcgtcgcgtgggt

SEQ ID NO: 315253 - DNA, 306 bp, Zea mays
accaagcggatgttgctccgggatctgctcgacgaccaagacgatgacgaggattcgatgacgtttcgtcggacgggtactggcatcaccgtcttcgtcaagtcgtcagcccgggcagggaccagtcagtggacatcagaggtagcaccaccagcagcttccgcgagttgagcagtacacggttgatagatattgtcgacggacgcggccgccgacatagagagcatgatatggagaggccgctcgtgctgcgtaataatgcaccaaggtgacgatagcagctgcaatgatggtgcctaaatttcc

SEQ ID NO: 315254 - DNA, 312 bp, Zea mays
acccacgcgtccgggaaggacaatttcttcatgaatgactcgccctagaatcatgtagcctcttgccaacagcttatacatccacatatttaaactctactctgcgaacaaaaaaaaacaaaaaaaaaaaaaaaaaaaaaaaaaaaaaaaaaaaaaaaaggcaaacacacaaaaggaataaattcaaaacataaacataaaaaataagaaaaagctctataaagggcgtcacctaaatagaattcaatgtgagttccttgaaaatgtaatcactaggacaactagacgtttacacaacttaatgtcctaggg

SEQ ID NO: 315255 - DNA, 409 bp, Zea mays
atcctatccccccacgctgggtcgcccgatctgcatgcgcacggcggcttcctcttggcgtttctagatgggctcctcctccgtcctcctcttcccctcgtcctcctccgccgcaccctccgcccccccattcctttccccactctcatgccaccgccatcgcctcctcccactccttattgccgccgctgccctgctccaaccccccgcctcctctttcctcgcaagaccacgtcctcatccactacatccaccagctagacgatttgaggttatttttgtttccccaactggtgaggaaattaaaagcaagagacagctgactcagtacctgaaagctcatcctggaggccctgcatcttcagagtttgattggggaaacagtgatactcccagacgctcagcacgc

SEQ ID NO: 315256 - DNA, 382 bp, Zea mays
  unsure (1)..(382): unsure at all n locations
gggaagtcctctgtcacagatatcgagggaagaatcgagctcgggcgaaggcggaggtcctccgaaggtaacaccgaacctgtcctgaaacttgatgacgcgtgtcacagtcgacggaatggccggagcgggagagcaagtagcagaggcctggttcgggcgaagcggagcttacgcccgaggttgagtttagcttcgggcgaagcggaacttgcgcccgaggtcttggtccgtgtcctgtcgtattatgcgtcacgaccgccaggtggcgtgcgcacgcttaatgatgttggtgaatctttgacaagactgttgtcctattgaaagattcacatgcagcctgacgtgaggtangtgtgcgcattgaatacggttgtctccc

SEQ ID NO: 315257 - DNA, 426 bp, Zea mays
aaccgattgccttcccccctcccaacccaagaccgatggcgcccaaggccgagaagaagcccgcggcgaagaagccggcggaggaggagcccgcggcggagaagacgaccgccgggaagaagcccaaggcggagaagcggatccccgctggcaagtccgccggcaaggagggcggcgagggcaagcgtggcaagaagaagggcaagaagagcgtggagacgtacaagatctacatcttcaaggtgctgaagcaggtgcacccggacatcggcatctcctccaaggccatgtccatcatgaactccttcatcaacgacatcttcgagaagctggccggcgaggccgccaagctcgcgcgctacaacaagaagcccaccatcacctcccgcgagatcccagactccgtgcgcctcgtgctccccggcg

SEQ ID NO: 315258 - DNA, 69 bp, Zea mays
acgccgcccaacccaagaccgatggcgcccaatgccgacaagaatcccccggtgaatattccttccgct

SEQ ID NO: 315259 - DNA, 315 bp, Zea mays
caataccggccaacagctcgtgatctgagattgctcttacagacgtgagtcgtgtccatggagttgtattgattgtattggcgttggctatcaaatcggtcaatatgtctgctaatcactagtcagtggagcttgaccagacctatatctgacagtagatctacgtggctgtaatcgtcaaggcacaaggtaaacggctgccgcatctatacgatacattcatacgtacgcttgcaccagacatcaccactcttccatcatgtcacgcatctttaattcactggctgtcattgcactaagtcgtgacttcgagaa

SEQ ID NO: 315260 - DNA, 364 bp, Zea mays
gcgtccgatccaagcccttctccaatcgctccgccaggacatccccgacgcccgggatgcggtgcaaccacccactccaacgcaaacgcacggcgggtccgacccaacgaccgaccgttccgggtaacataccacgcatatacactctatgaccgccgcacacttcatcaacctcatcagcttgaatgagcacctacacatccagtgctggagaacatcctccagagatacaaaatcatccactcctccgcgagactcaactctcgtgggcgctttcgtaacccgtcgaatgacgtacaaagccgcccctactgttggcaactcagtatccgagtttccgtcgggcatcagcggcgggaacaca

SEQ ID NO: 315261 - DNA, 302 bp, Zea mays
aaaaaaaaaaaaaaaaaaaaaaaaaaaaaaaaaaaaaaaaaagaaaaaaaaaaaaaaaaaaaaaaaaaaaaaaaaaaaaaataaaatcgcgcaaaacacaagattggaaggttcaagttaacaataggggtttgggcgggcggctttaaaggttcaagcccaggttcggcatcaccgtacgctcttgtcgtgtccaacatggtctaaaaccgcggtccatggttggccgttttattgggggaaactcccgagatccgtgccagttctcaccgttaccggcattgcccccatcccccttccgg

SEQ ID NO: 315262 - DNA, 387 bp, Zea mays
acgcaaccggccctcggtgacgctagccgtgccagcctcgcatcccaggatcctagctagatgcaggttctcctccatctagaccctaacacagcttcaccactgcgccgccagcctcaccgcagtcgtctccatctcgacctcctgctcctccttctccgcgtccccgaccacctcctagccgtcgtcgtcgcactcgcagcgacaccagccgcagaggcccgtggtgacgtcctcctcggtatcccctctagccgggtggctccgcagcgcatccggccccgaccccggatccgacgcaactcacacatcgctaagaaaacaatcatgcatcgaatcagtgttattgggggggggggggctcttcagcattgctgacctttacct

SEQ ID NO: 315263 - DNA, 189 bp, Zea mays
aagtgacgctagccgttctaaactcgcatctcaggatcataattagatgcaagttctcctccatcaagtctctaggacagcttcacgagggcggggccagcctcaccggagtcatcaccatcgctggctcctgcgcatccgtctccggttcgccgaagagctactacatgtcgttgtcggagtcgcaca

SEQ ID NO: 315264 - DNA, 354 bp, Zea mays
gtttaattcagatccgtgttctgagcacgtttattcaagccaaagctcgcgccaaagacagttgttccagtaacgaagtctctttcaaaaatagttaaaacactagggctcgcacgcgcgctctttctgcgcaattgcgccggccgccggctcggccgccccggagtcggccgcgggcgcgccggcgtcggccaaggtcgccgatcgcgacgtgcgcgtcctcgccatcgatctcgagggggcgcgccgcgaggtcgtcggcctcgccgggcagacactcctccgcgcgctcgccaatgcggagctcatcgagccggcctcccagcgccacgaggatatcgatgcgtgatccgc

SEQ ID NO: 315265 - DNA, 51 bp, Zea mays
aaaaaaaaaagggggggcggcccaaaaggttcaaacctaagttaccgttga

SEQ ID NO: 315266 - DNA, 368 bp, Zea mays
aaagtaacgtgggctaacacatgcggtcaatgactcctccagactccgatggttcaatcaaccgacggccacgatggttgcagacggcagctcagcgagcctccgatctggtaacatgacctcgcgcccttccagcaatacagccacccaggctgagatacgcatagcgaagctggaagccttgctgtacaacaaagatggtccgagcggtggatccgaggcaacttcctctgccgtgaaggatctccagtcgaagctagatgtggttactgcagaatgcttgactgaaaacgagaagaacaagaagctgaccatggagaacgagaagctccagtaccgcatgacgcatctgattcgtgcgataaaag

SEQ ID NO: 315267 - DNA, 142 bp, Zea mays
  unsure (1)..(142): unsure at all n locations
aaccgtncggttctgcntctaaacccagccaacggtagtttggcaggttctaaggggcctatctgcaccaggcaaggaaaatgaggaactacgaggggggcagccgcagcgaacacggactccggaagacgggcggcgctgg

SEQ ID NO: 315268 - DNA, 121 bp, Zea mays
atgatttctttgaacatcagtcacttctcttttcaccttgtgttcaacatgaagggttcgtcttccatgtagatgaatgcaagcccttcatgtggcatacccggtggaaagataagtgact

SEQ ID NO: 315269 - DNA, 387 bp, Zea mays
gtatgacgggccaactctctaaactaagtcgtagtacttcatggagcatggagcacttgtaccgcatgggaaagcgatctggggatgaggctcatctcatgactacctcctgcaatagcctctctgcaatggtccatctcatagttaaggcgcagcctcgagggcctccggcgttctgcaaagcactctgcacgcgcttacgctttagctgctcattgtcgtgcttcactgagaatgtctgatgaggatgcacccggggagtgtcatacattagcagtcttcttgacacagctgcagagaggcttgcatatgttttcagacggtactgtactgaagggacatgtgacagcagaactaaactacgtcactgacggcggaactgcccaa

SEQ ID NO: 315270 - DNA, 450 bp, Zea mays
aagcggccttgcccacgtttcaaaccatcttgaagaaggagatcgagaggcattcctacggcaccgtctttttttcccgattctcctgttcttgtttgtgagtgaaagcgggatccgacatccgaggagaggtcgaggccgggcaaagtcgaagtccgcgctccggtctccagctgacgaagcaggatgcactgtgacgcgctggtccatcgtgagcttctgatgccaattaggactaaacatgcttcctcgctgcgctcaagtgggagaacaagaaatcagcctagacactagtcatctgctgcaagcagaaaatgcacccttattcacttaagagttccaagggagcaccaattctgccacggccagtcttcgttttcttcatcgcgacatttgggttccaaggtatgctaactctccttcattcagataacgctagagaacaacaga

SEQ ID NO: 315271 - DNA, 333 bp, Zea mays
aaaataagtcgtattataaaaagaaaaaaaaaaaaataaaaaaaacaaaaaaaaaaaaaaaaaaaaaaacaaagaaaaaaaattcaaaatactgaaaaaaacaataaacaaaaaaaaagggggtgcccctcaagaggatccaacttaaattacctttaaatggaaattcaaagtccttccaaaggttcaccaaatttcatttcattggccttcgtttaacaacttcttcactggaaaaaccctgcgtttcccaaattaaacccccttgaaaaaaacccccttttcccaatcggccttaaatccaaaaaggccttcaccattacccattccaaa

SEQ ID NO: 315272 - DNA, 313 bp, Zea mays
acccacgcgtccgactatgtatgagatctcatctcctttctcctactgaatgaatgaatcattattggctttgctttgcttcaaaaaaaaaaaaaaaaaaaaaaaaaaaaaaaaaaaaaaaaaaaaaaaaaaaaaaaaaaaaaaaaaaaaaaaaaaaataaaaaaaaaaaaaaaaaaaaaaaaaaaaacaacaaaaaaaaaagagtattacacttaactggggtacgttttacagattctgaacttcaaaaattctgcctaaaaagaattaaagacacattattataaaagcaccatttcggaaaaaggtata

SEQ ID NO: 315273 - DNA, 59 bp, Zea mays
atagcatcccttcagctccagcttcagatggctggtcatgggggaaaggaaatgtcacg

SEQ ID NO: 315274 - DNA, 351 bp, Zea mays
aattcgatcgttccggctcatcatcctagtctgggagttcgctgatgtcgccgacaccgagcctgacactgtgcaggtaatagatgcccctccgctccgtatcgtgctgaaaggtggcgccaccgccacgaggatcactgtgtcgatcgttgcatggacaacacgtgttacggacacgtacaactggtgtgtacctttgcactaccttctcatggatcacgatacacactgggcgggacggagctttacgctgacctgatgcgcgaggcgtacccccagctttaaccttctccaggcatggcacgtgtatagcactaggacatgcgttgtctcccgcaatctcaatgcagc

SEQ ID NO: 315275 - DNA, 374 bp, Zea mays
aggagattcttagcaagatgaaccgtggaataactgtgaaactaaaccgtggaagatgaattctcaatcaggtctaaataggcaaccgacagcctagcctggacactgcttggttctagcgggctatagtagggcaggctaaaatatctaaactgaacctgactacaaccattacacgccttctactgctacagctatctggatgaaggaatacgataataggagataatagaacagggtatggaattatgttgtatcattcatatccttttatggtatacgccttcgctctttaaaaaaacttcaaaaggaaaggcacgtataaaaaaaaaaaaaaatacgttgtgtcccgaaatctcagtggtgctttcttt

SEQ ID NO: 315276 - DNA, 229 bp, Zea mays
gatacacgcctctagtctgattcggaatagttccagattaaaagcaaatcacaagcaacataatgacaacgactttaatcgtggcgaattccactggatggggaatcatctgtataggagctatgtgtgggtgtcactaacgtgacatcccttctttgtgattccataacccatatgtcgtccacttggtcttcggtctacatagcacttggacgggaaaaccctcgcc

SEQ ID NO: 315277 - DNA, 413 bp, Zea mays
aacatgataacgagatttcccccagcaatgaggcaatccaaggtgatgagttggctcatggcgaagagctgttccaaggtgatgatcttgttcaaggaaatgagttggttgtttctgaggtaacaacacctcctactactggaatcagacgtaggaggaagaagaagtccttggtatgggagcacttcactattgaagccgtcgcgggcggggccacaagggcctgctgcaatctctgcaagcaaacctttgcttacagctctggctcaaagattgctgggactagtcatctcaagaggcacatcaccttgggctcttgtcccaagataaaggaccaagatcagaggctggcactgccttcaactggtgggactgacaactatggcgaggcaacttcggagcggccaaccaag

SEQ ID NO: 315278 - DNA, 73 bp, Zea mays
aaactcgcaccgttctttgcattccttcgtccccaccttggctcatcacaacggatcagctccacggtgccgg

SEQ ID NO: 315279 - DNA, 234 bp, Zea mays
attctgcctccgttctttgcttccttcgtccccccttggctcatcgcgcggctgctgctccccggtgcctgtgctgtccgccggctcgcgttggcggtgtctgccggatcaacgtcccggggcacgggggtcttacctccggtgtgcgcgtcctccctggttggcgcgccgctctctgtcgcccccctcccgcggtcgcgcttggcggcctgctgtacggcgtcgcctcttgcc

SEQ ID NO: 315280 - DNA, 382 bp, Zea mays
  unsure (1)..(382): unsure at all n locations
aaattatgttgttataactgacaattgtttccaagtggttctaacatcggtgctgtccatggatgcggtgaagttggctgcacaaagtcctgctctgagaaagacttaatctacatgactttactgttcccgagttgcggtatcaggacacataccattcgtttaaggaccagcctaacacctccacatcattctggacggacgttcaactctaggaacttacgacttgttctgcgcttacactttatcatacacttactatgcagacaatttgcgtgagatcactacanactgtagagtgtactttaggcaaactcctgtcacttgaatagttgggagagtatccagctctctctgtatgactgcacatctcagtgcattt

SEQ ID NO: 315281 - DNA, 461 bp, Zea mays
gggccgacacacgcgtccaggagaacggagggaaccagggagctccggccgcctagaaccggagctcccaaatagatcgatccatcggtcgttgagcggacacggcaatggaagcccacgcctcgcggggccgccgcaccctggaggagatccggcagaagagagccgccgagaggatgcagcacgccctcccgatcgcggcgtctcacgtcgactctcacgggaaccaaagagccggagctgagcttcttgctcgagttcaagaacttgaaaatgggaacacggaattgattgatgagaagggagttgagaaggatgcccttgtaaaccgtttgaatgatctcgagcggaatgtagttccctctttgcaaaaaaacttgaatgacatttctttggagaaagatgctgctgtatttgctaaagaggatgctctagctcaactcaggagcatgaagaaacgg

SEQ ID NO: 315282 - DNA, 425 bp, Zea mays
  unsure (1)..(425): unsure at all n locations
cttcactcactcgtcagctccctgtcgcgcaaacaacggacgcaagaggcaaaaccaagaacaccggccccccccggattcggagcaggcaacggcgccacggtccgtccgtcccaaagggcgcggcaacaacaacggtaccccggcgtgccgcagcgccaactggggctcctgggtctcggagatccgccaccccctccctgaagacgaggatctggctgggcaccttcgagacggccgangacgcngcgcgcgcctacgacgaagcggcgcgcatcatgtgcggctcccgcgtgcgcacaaacttccccgaggacgcaggcngcggcggcggcggcgacgggcagcagcagcagcaggccgcgccgtcgctcctctcncccgcgctcgtcgccaagcttcaccgctccaacctcgcgttcgct

SEQ ID NO: 315283 - DNA, 296 bp, Zea mays
gtattggcttctcctccccctccggttcgggttcgggttcgtgaggttctccggggttcggtttcgtgggtgagcggatcgagatggcggcgtcggatgttgagtaccgctgcttcgtcggcggcctcgcctgggccacggacgaccactccctccacaacgccttcagcacctacggcgaggtcctcgagtccaagatcatcctcgatcgggagacgcacaggtcccgcggcttctgcttcgtcatcgtctccacggaggaggccatgcgcaacgccatcgagggcatgatcggc

SEQ ID NO: 315284 - DNA, 67 bp, Zea mays
atttgtttttttttttaaggttgagctcatcgcgttcaatttcgagtgcgctaggccacagttcgac

SEQ ID NO: 315285 - DNA, 437 bp, Zea mays
ctcgcgggtcgacacacgcctctacaggcatccccaccacctcttatcaagtcctcctcgggttagggttccttagggttttgtggaggggcgatggcggcggctgatgtggagtaccgttgcttcgtcggcggacttgcctgggccaccagcaacgagtcgctggagaatgccttcgcctcctacggcgagatcctcgactccaaggtcatcaccgaccgggagacggggaggtcccgcggcttcggcttcgttaccttctcctccgagaactccatgctcgacgctatcgagaacatgaacggcaaggagctcgacggccgtaacatcaccgttaaccaggcccagtcccgtggcggcggcggcggcggcggcggcggtggctacggcggcggtcgcggcggcggccgctatggtggcgggccccgttacggcgg

SEQ ID NO: 315286 - DNA, 331 bp, Zea mays
acctcctattccgctacaagcccaattctcgcgttcctcgcatacacgcgcagcggtggatctgagaccaactaagaatacgtaggacaatcggagcattcacaagcttaacgaacttggattgtgtccaaggctacgacggtcgccgcgccaggctagtcaaccatctgctcatcactcctaactgcggatcctactgctggcgctgacgtctacgtcagtactgaactccgtctcggcctgcccggaggaagccctcatgcggccaaggctgccaagacgggcttcgacgacaccatcgacctcagtctcaacctgccgcacgccggca

SEQ ID NO: 315287 - DNA, 359 bp, Zea mays
acacaagtttaggctggtgtattatctcgagcaaattgccgatgatggtgttaaatatactttgtagcgattccgctgtgaaaaaaacttaaatctgaggcatttgcagagtattgccgtacattttcatcttccctttacatagtgaccctcacaaaaaaatttcatcgtctataggtttgtgtttcattttctacagactttatacttcctacgatgttatattacattctgatagttaattgactggatcgtgtgaacaactgcaaaaaaaaaaaaaaaaaaaaaaaaaaaaaaaaaaaaaaaaaaaaaaaaaaaataaaaaaagtaaataaaaaaaaaaaatcaaggggaggccg

SEQ ID NO: 315288 - DNA, 258 bp, Zea mays
agcggcgcccaagacgtctagcatcgggtcgtcgcgaatgtcctagagttgcattactgcttggctgcgtgcgatgtccccattcgcgcgaaggcgagggttgttgacgtggccaccgacggtacacgttgtgatcgggttggaggtgtgccggcacggtggcctgcagcgaggtcagcgtcgttcttgacagccagggacgagtctaggggcgcggcggcagtggggaaaccagaagcctgaggctttcggaatgtc

SEQ ID NO: 315289 - DNA, 326 bp, Zea mays
agctgcactggcccgaggcgcggccatgaaaggcggcggcgacaagaataagaaggtggcggcaggtggcatgttgctgtccgtcgtcgccgtcggctgcttcctcctcttcgtcgtcgtcgtcttcacgctctcctcccgacgctacaccaacctcgtcctcgacgctcgtgatcgtgagccgatgtgacttccacacgtcgcagctgcatgggggcagccacggcggggatgcggtaaaggttacttcaagcatcggcatgttgctcaacgaagcaacgatgacgacgagaacgcgtgtcacggaagcgtgttcttgacgaatc

SEQ ID NO: 315290 - DNA, 394 bp, Zea mays
cccacgcgtccgccttcactcagtcttaggctcttagctctaggctctagctagccgcgccactccttcgtgtagccatcagccttctcatcgccaccaatggccactgccgaggtccagaccccgaccgtcgtggcggccgaggaagcgcccgtggtggagaccccgccgccggccgtcgtgcccgaggagtctgcccccgccgaggccgaggccgaggccgaggctgaggctgctgctcctgctgatcccgaggagcttcccgcggccgagcagcaggcagccgccgagcccgaggccgctgctcctgctggtgccgaggaacccggcgcggccgatccggccgccgaggctgaggctgctgctcctgctggtcccgaggagactcccgcgg

SEQ ID NO: 315291 - DNA, 357 bp, Zea mays
cccttttccctccccacgccgaacgcacccgatcgcaaacaaagcgagcagcagaaacatgcgagacatgccggttgtccgccgccaggaacccaccgtcgtcaggacggaggacgacgtggtttccggcggtgaggactcggacggcgagttcgagttcccctccgtgagccgggagtccgcggcgggcgttggcggcgccgcgtctgccgacgagctcttcgcgggcggccacgcccgggcgttctacccggtgtttggccgagtgctggacgaggccgcagcgccggcaccgacggcgccactagggcggctgttccagctggagcaggcgcggtactcgtccgtcgcgtccac

SEQ ID NO: 315292 - DNA, 81 bp, Zea mays
cgcgtccagacattttggcaatgttgcagcgttgagatacaattctgttcacccccagaatgatctagactgcatgagcta

SEQ ID NO: 315293 - DNA, 74 bp, Zea mays
aaaaaaaaaaaaaaaaaaaaaaaaaaaaaaaaaaaaaaaaaaaaaaaaaaagggcggacgcacaaaaggaataa

SEQ ID NO: 315294 - DNA, 386 bp, Zea mays
gcagtgcagggcgcaggcgtcgatctccccgtacctgcaactgccaccgaaccccgccaccaaaaggcccgccgcgacattcgacccatggctgccgccgatggcaggggtgcgccgctgtccagctcccgcgtggcggtggcgaggggactcgtgcacgcggcgcaggtcgctgcaggcttggccgtgctcctctgcgccttcgccgacttgccctgggctgccgccgcggcccccgcctgcatcctccgcgtcgccgcctccttcctcgccccgccgcgcctctgcttcctcgccgcgcacgtcatcctgatcgccctcgccacgctcttccgccgcgacgcagcctcgtcctcgccgccgtccgcggaccctcccggctccag

SEQ ID NO: 315295 - DNA, 390 bp, Zea mays
cgcagcagccaaaacctacctagccgccgccgcaggcggccccccatcgccgccaagatgcagatctttgtgaagactctgacggggaagaccatcactttggaggtggagtcctcggacaccattgacaatgtgaaggccaagatccaggacaaggagggcatccccccggaccagcagcggctcatcttcgccggcaagcagctcgaggacggtcgcaccctcgccgactacaacattcagaaggagtccaccctccacctggtgctccgcctccgcggtggcgccaagaagcgtaagaagaagacgtacaccaagcccaagaagatcaagcacaagcacaagaaggtgaagctctccgtgctgcagttctataaggtggacgacgcc

SEQ ID NO: 315296 - DNA, 365 bp, Zea mays
agagcccgagacgccgccggagtctgcaaccttcagtgtgcactctttgatctccacatatggagttcatctcgcttcaatgcggccactggatgagggtgccgcactgatggcgacatgtcggacgctgaggctaaatccgattcagtatggcttatcgaagtcaccatcggagagcactatgatgttttctggacgattctctcagggctgatacgtgtacattctaagggatttcgtgtatgtagtcgggtactacattacagacgcgtaaggtcaagttcgtttatgtcgagtacctgttgcagaggatcaatatgtacatgaccacctagcacgatatgcagctggctcttgatagctcg

SEQ ID NO: 315297 - DNA, 191 bp, Zea mays
tactccctaataagagtcgtattaaatcggcatatattgggccaggttctggtatattacatgtacacataactttggcatttgaaaccgtacgttcccggacgcctgtggcgttcgggggttatcagccattgatgcaagccttgttgatccaccaaagacgtagcacagtcgcttcgccagtactattc

SEQ ID NO: 315298 - DNA, 405 bp, Zea mays
atatcctactgccggcgttccagagttcgagctgagcagttgcacacagctgctcgtgaagctagctagcgaagccacaggcccccagtgactttgctcccccacaccgtagcggccgtataaaccagctccaaccgatccatcgaaatcgaaccacagtacgtgagcccgtactagagacatatggcctccgcgatcaaggctgcatcgacctcctcccggtggtcttcgtccccggcggcagtccactcgtcgccgttatcgaagcggctaccagctgcagtggccatgccggggcggcggaggtctgtggccactgtaagggcggtcgccgcggtagctccggctgccccggcggcgccggccaagctcaccgccggtgccggcggccgatgcctgccggtg

SEQ ID NO: 315299 - DNA, 199 bp, Zea mays
acaaaatgtttcagaaaagagataaagggcatgaccggtggtgccttcactgaccaaaaaaaaaaaaaaaaaaaaaaaaaaaaaaaaaaaaaaaaaaaaaaaaaaaaaaaaaaaaaaaaaaaaaaaaaaaaaaaaaaaaaaaaaaaaaaaaaaaaaaaaaaaaaaaaaaaaaaaaaaaaaaaagggggggccccccaaa

SEQ ID NO: 315300 - DNA, 108 bp, Zea mays
aaattcttcttttttttgtttcacgtcgcgggtcgttcgcgttagatcactacgtcgacaggcaccttggtggactccgtgcgcagatgcggggggggtatcggggtg

SEQ ID NO: 315301 - DNA, 348 bp, Zea mays
aaaccgagctcatcccgagccatccgtctcgctaaggattctccgacgccgctactacgtggatgcctcaccggaggtcatgaacgactgccgcagtcccacttcagcgtgctgcgccactgaggagatcgatacagacatcacgcgacgatcctcctcgaggtcctgtacgagatgatggaggctccacgtgtggaggaattgcatctacgattgatcatcgtaccgcgtttgacatagatagaggcaagggaaataggcctgttcatgctgtcggaggtcgggggactagttagaatggtagtggtggatcagaagctggtgctgcagtgactgctgatcgaatgc

SEQ ID NO: 315302 - DNA, 352 bp, Zea mays
gcgatacctcagtcgccgtaaccctagactcgccaccgccggagcgatgctccgctcgccgggcaattcgctccgccggctctcaccgtcgcccacacccgcgcactcaacccctcgctcggtctccatgctatcctccaacgccctctcgtcgagtctccgcaggtcggcagtgcgcgacgacgacacctacctcgccgccatctagcgcatcatcgagcgcaactacttccccgacctgcatcgcctccgggaccgcctcgactggctgcatgtcgtgctgtcccacgacccgctcagcctacgcgacgcgcatctcatgatgctagaccgccgtcgctgcacccagcgc

SEQ ID NO: 315303 - DNA, 189 bp, Zea mays
tgagtcgtattattcgtacacagggatttcatactcatgttgttgtccgtcacgaaacaacggctttttgttgttttcgttcaatagtcgtacataacgcggagcgaaatcagttatcttgtgtgcgggacgatatctgcctcccattttgcacacacgaaacttttgatcacaacggtgttttacctc

SEQ ID NO: 315304 - DNA, 348 bp, Zea mays
gcgcgtttcgatgcacgcctctagacagattcgcattagtacggttgaatgaagccaaaaacaaaaataaaaacagacacaaaatcaacagaaaataagatggtacaacagagggtggatgcgctagaggatccagccgttcgtacgtcagctcaggacgtcggaggtctcctaaagtgtcagctatttgtcgttcactggatcttcgttatcagtgttcgctgactgggacatcactggcattgcccagtttattacacgttgccaacatcggcctttctccagctggattactagcaaatggggccgcaacggtcgctggtctcaccatttgtgcagctgtaatgg

SEQ ID NO: 315305 - DNA, 220 bp, Zea mays
attgccggaatggtccaagaattgcaattggtaattgaaaacgtcagcaactacgcagactgcctgctcagccgcacgctcacgtgccgcatccacaagggcgactactaactcgaaatcgacgtcgacatcggcagctcgggcgatcgccagcgccatcctgcatctcgcgctcggcgccgtcacgtcggtgaccatcgacatggggttcctcatccag

SEQ ID NO: 315306 - DNA, 344 bp, Zea mays
cagaggtgggttggcttctcctccccctccggttcgggttcgggttcgtgaggttctccggggttcggtttcgtgggtgggcggatcgagatggcggcgtcggatgttgagtaccgctgcttcgtcggcggactcgcctgcgccacggacgaccactccctccacaacgccttcagcacctactgcgaggtcctcgagtccaagatcatcctcaatcgggagacgcacaggtcccgcggcttcggcttcgtcaccttctccacggaagaggcgatgcggaacgccatcgagggcatgaacggcaaggagctggacggccgcaacatcaccgtcaacgatgccca

SEQ ID NO: 315307 - DNA, 398 bp, Zea mays
tggcggtggccgcccggcgccgacgggcgcggcgggacgcggcagcggcagcaccagcgccggtggcagcggatggggcgcgatgcgtggctggagcgcgcgtggcgcatgcggaagcatcggcggcagctgcaggaggaggtggtgcccgtggtggtcctcggcggcggcggcgactccccggcgagccgcggcggcgtggcgatggatatggaggaggtccgcgcgtgcctcgacctgagcctggacctcccctgcgactggaccgtggagataccctcctactacgcgctctccggcgtcgacaccgccatcagcggcggcaattcgcgggactccgccggcatctggcgcatctccagtctcggagacgattccaaagatgttaacgcgctgct

SEQ ID NO: 315308 - DNA, 344 bp, Zea mays
aaagagccacatgcaaccggagcagcgcacagcaacagagcacacgccgcacaccgccgcctccgcaccagcagcaatggagcgcgccggcgctctctgcctggtgctgctctgcctcgtggccgcacattcacccgcggtgcacaactccacgaaagcgtcggccgctgcgccggcctgccactaccacggcgccggcgatcgctacaacaaagacgctcgcgcccgccgctgcgacgcggacgattccggacaccatagcctctgccacctcgcatgggaggaacgttggccatgactagcccgtggctaccgtgttcacaaatactgtcagtgatgcactt

SEQ ID NO: 315309 - DNA, 294 bp, Zea mays
  unsure (1)..(294): unsure at all n locations
cagtacngcaacccagtcggcggcgtcgagcacggcaccggcggcatgaggcacggcacgggaaccgccggcggcatgggccagctgggtgagcacggcggcgctggcatgggtggcgggcagttccagcctgcgagggaggagcacaagaccggcggcatcctgcatcgctccggcagctccagctccagctcgtcggaggacgacggcatgggcggaaagaagaagaanggaatcaangagaagatcaangagaagctgcncggangccacaangacgaacagcacgccacg

SEQ ID NO: 315310 - DNA, 414 bp, Zea mays
  unsure (1)..(414): unsure at all n locations
gggctggcttctcctccccctcttatcaagtcctcctcgggttagggttccttagggttttgtggaggggcgatggcggcggctgatgtggagtaccgttgcttcgtcggcggacttgcctgggccaccagcaacgagtcgctggagaatgccttcgcctcctacggcgagatcctcgactccaaggtcatcaccgaccgggagacggggaggtcccgcggcttcggcttcgttaccttctcctccgagaactccatgctcgacgctatcgagaacatgaacggcaaggagctcgacggccgtaacatcaccgttaaccaggcccagtcccgtggcggcggcggcggccgcggcggcggtggctacggccgcggtcgcggcggcngcggctatggtggcgggcgccgtgacggc

SEQ ID NO: 315311 - DNA, 188 bp, Zea mays
ataccacttccacatcctgatagtggtggcctacagcgacggcattcgtctctgatcaagccgcaatgcaaagatgcgtatgtcgtcggcggcacccgttccggcggcaactcaacacaccatgtatcatgttgcgtggcgaccgttgtccggagatttggctgagctagcgaccttgccacacctga

SEQ ID NO: 315312 - DNA, 364 bp, Zea mays
acgcacgaatccaatgtgtctcgtatcatctcccgtccatattccgcttggggttccctacagcttcggcaaccgtcgcctcttgatccgctaggtgaagctgcccatgtcgtcgtcggcgcccttgccggcgggcactctacacaccatcaggcgtgttgccaacctgccctggtctgaagatttggctgatctggctatctagtcatacattcatgctggctttaagagccatgttccttcaggagaggatcttccgccaattgttcatcatggtacattcccctccagcgtacaccatgattacgaacagtcaggcttagttcctttggagggatgttctgccagtgtggcttcacaggtt

SEQ ID NO: 315313 - DNA, 246 bp, Zea mays
aaaaaaaaaaaaaacaagaaaaaaaataaatataacaaaaagaaaaaagaaaaagaaagaggaaaataaataaaagtttcaaacaaggaataagtaacttaaatcacgacaataaaacgtgacacggatgcgggccgcggctgaagtgacgatctctaccttgacatggaacgacataaagattccatgcagtcgcgtagttatgattccataagccaccgcttgtcatattcaccaatgcggaag

SEQ ID NO: 315314 - DNA, 52 bp, Zea mays
cagccacctgttacttcacttgttttgttcaaaaagaaaaaacaaaaaacaa

SEQ ID NO: 315315 - DNA, 212 bp, Zea mays
acgcatatccgctcacctacctctccagcatcctcccgtctccgtcgtctcgtctccgctcctcacctcgccagccatgggcaagatcaagatcggaatcaacggtttcggaaggatcggcaggctcgtggccagggtcgccgtgcagagcgaggatgtcgagctcgtcgccgtcaacgacgccttcatcaccacggactacatgacgtaca

SEQ ID NO: 315316 - DNA, 95 bp, Zea mays
acacatactagaataaaatatagcagcgcgtgtgcgcaacaaagactaagagtgtgatatcaaagttgtgcttgcaatgcaacaactgctagctt

SEQ ID NO: 315317 - DNA, 367 bp, Zea mays
  unsure (1)..(367): unsure at all n locations
aacggaacgcgtcgcaggccgtccgcctccccgagcaacagacgagcggagtagtaggtggcctcccgacccggggttctcctccactcccgcagtcncgctccagctttctctgccccgaccccgatcgatgctaaattcccgcgccgagccgctcgcccgcctcccaccccatcaccgagccgcctcgcgcggccccccgtcattttcgcccgactctctcgcctcggaggacgtagagagaggagaagggagtcgtcgtcgtcctgcgcccggcgctcgggccactggattcaaggggttccggtggatttggaccccggagtggactgaatgctgatggtaatcccccaaggaagaaggcagg

SEQ ID NO: 315318 - DNA, 74 bp, Zea mays
cacacacgtgacctctaattcgctcacatctgaacccttcctaaccgcatggctgccgtctaggaacctcacac

SEQ ID NO: 315319 - DNA, 334 bp, Zea mays
aaagcaacaaggcagcagcacaagcaagaaccacacctcctcccttcgcctgtgatcatgtcgtcttgctgcggcggcaagtgcgggtgcggctccagctgctcctgcggcagcggatgcaacggctgcggtatgtaccctgacgtggagaccgccgccaccagcagcgtcaagaccacggtcctcgccgcgccgaccaccaaggccagcgccggcggcttcgatgcggccaccgagggcggcggctgcgactgcaacacctgcaagtgcggcaccagctgcggctgctcctgctgcagctgcaactgatctggcccggcccggcgatggcgca

SEQ ID NO: 315320 - DNA, 249 bp, Zea mays
attcttactacggcctggcagccctctccttgttggaagaggaagggctggaacccctctgcgtcgaactggggatcctctccgctgctgcattatagaaacttgtgtttctaccgaatccagttactgtacaatgtttgtggggggggggggggggggggggtaatccagtgcttaccacaggataatcagctgaaaaatcgaagggagtaatttattgataaagtgaggccttgttcggttattccc

SEQ ID NO: 315321 - DNA, 250 bp, Zea mays
ataagacttgcaaaagtatacttcgtactcagggttttcaaacccatgttgttgtaggtgaggaaacaacggagttttgttgtttttgttcgaaggtggtaccaaaggaggagccaaatcagtgatcgtgtgtgcgggaggatgtttgcctcccaatttgaaaacactaaacttttgttcgggagggtgttttgcctccctggtatgtaataatattttatgcactcataacatctggtactgtaataat

SEQ ID NO: 315322 - DNA, 130 bp, Zea mays
gtcctgaattctagggatatgtatatgtgtgcatatataggattcgtgatttttttgtatacagtggattgttaaccgaacacgctaattaattccattatattattgttgactgctggaatttgttcag

SEQ ID NO: 315323 - DNA, 161 bp, Zea mays
acgacgacgggcgaggagggacggttccacgggcctcacaatcagagcaccaacacgaccccgacgggcggccctgtcgctgcagcagcatcgccgcgcagggtccggcgcagcttctcctccgcgtcctccgcgggccacaggcacggcggcggcggcgg

SEQ ID NO: 315324 - DNA, 301 bp, Zea mays
aaaaaaaaaaaaaaaaaaaaaaaaaaaaataaaaaaaaaaaaaaaaaaaaaaaaaaaaaagaaaaagtcacaatagggtggaccctcaagaggatcagatcttgattattcaagcatattttgtaacacctctgcaatagggtcacagccattcaatttaatgaatgttcattgacaacttcttaactgaaaacaccttggagttattccaataaatctccttgcagtagctccgttttacagcacctgtgatgatacctatggggcttgcaaatatttaccctcccaaaatttacccccc

SEQ ID NO: 315325 - DNA, 245 bp, Zea mays
actgggacccgtgtttttttagactcacaataaagccggtttgtgtttgtgcctaaaaaaaaaaaaaaaaaaaaaaaaaaaaaaaaaaaaaaaaaaaaaaaaaaaaaaaaaaaaaaaaaaaaaaaaaaaaaaaaaaaaaaaaagaaaacaaaaaaaaaggttaaaacttaaaacaacgatgtatttaatgtcacaccacttaaagaacgtaactttaattcaattcacaggatttaaattaagaa

SEQ ID NO: 315326 - DNA, 358 bp, Zea mays
cgtgtcatttgaaactcagaagacgatagaggtgagggatatccattacatatcgaaacccaagaccaggtccaacttcgtgcgcaacagcggaagcagcgccggattctcggcatgtcaccggtgatctctgcctgacgacgatcggctctgtatccgactcagcgtatttatttctgtactaactagcggaagaggtctaccgaaattttaggaagcactctcttgttttcccaatttgatgtgtagccctgcagtctaactcactgatattatgtggatatagatagtgcctagtccatgaggctacgcttttgtacctctcgttgagattggcgaacatgaggaaagcagagtg

SEQ ID NO: 315327 - DNA, 335 bp, Zea mays
ggtgggctggcttctcctccccctcttaccaagtcctcctcgggttagggttccttagggttttgtggaggggcgatggcggcggctgatgtggagtaccgttgcttcgtcggcgggcttgcctgggccaccagcaacgagtcgctggagaatgccttcgcctcctacggcgagatcctcgactccaaggtcatcaccgaccgggagacggggaggtctcgcggcttcggcttcgttaccttctcctccgagaactccatgctcgacgctatcgagaacatgaacggcaaggagctcgacggccgtaacatcaccgttaaccaggcccagtcccg

SEQ ID NO: 315328 - DNA, 52 bp, Zea mays
atcagacaaaaaaaaaaaaaaaaaaaaaaaagaaggaaaaacagacagatag

SEQ ID NO: 315329 - DNA, 374 bp, Zea mays
gcaccacacctcttcttcttcttcctcctcctcctagcacagctagcgcctgctccccttcgcctgtgatcatgtcttgcagcagcggcaagtgcgactgtggctccagctgctcctgcggcagctcatgcaactgcatgtcccctaacgtggagaccgccgccgccagcagcatcaagaccacggtcctcgccgcgccgaccaccaaggccagcgccggcggcttcgaggcggccaccgagggcggcggctgcgactgcaacacctgcaactgcggcaccagctgcggctgctcctgctgcagctgcaactgaaccggtcaggcgatggcgcacgagagtcgagaggacgacgacgagtccgtataatataat

SEQ ID NO: 315330 - DNA, 363 bp, Zea mays
  unsure (1)..(363): unsure at all n locations
gctagaccgagctgaatatgacagaaagtccaaggaaaagagccgggaacgtgccaaggattcgaacaaggatcgctacataaaacgcaacagcagccgtgacagggagtatgaccgcagaagaagccatgatcgcttacatgacagggaaagagagagagattccaggcagtctcgtagttatgattccagaagccaccgcaagtcatattccacaaggggaaattctanggattatgatcgatctgggtatgtttacttatacttcagttagcatgtattaatggaactccaaagagctgctttgttatctcttgctattgtggtaacactgattgttgtctttaaacaatgatagaatgt

SEQ ID NO: 315331 - DNA, 383 bp, Zea mays
ttagaacaatgccgagaccgagatgagctagacggttttgacagaatggaagggcctcgcttcggtggtttgcgcttgccaagcgccgtgtggcccacgccaagcttggtaccacgataatacttacaagatatacattaaaggctagtttatatacttacaagatatacattaaagactagtttggaaactctatatttctaagagaatttccaaattccaaaaaaataatttaattttacgtgaaaaaaatagaaattcttttgaaaaatagagtttccagactaaccctattactcctacaaacgcgcgtgtctgggaaatgagtacaatttggactcgcaatgttttttgtactagcaacttctgctttccgcttggga

SEQ ID NO: 315332 - DNA, 130 bp, Zea mays
tgcacgcctctaaaatgggtcgggttaactcgtctagttcgtctagatgctgctcaacgacagcggcgtcgtgtccatcgtgttggcctgcggtgctgggtatgacctcggccgcacatgtggtgctttc

SEQ ID NO: 315333 - DNA, 383 bp, Zea mays
  unsure (1)..(383): unsure at all n locations
aangngttgattggttggaagataaatcgggtggtgatgtcggcaagaacaaatcagattaaaactaaggccgaagtantggtaatagaccttggtgccagtgcgtttgctcctgctaaggctgcccctataggtgtacatttgtgctgtgcctaatagaccggcccaaagcacacaatttctggcacggcccatatctggcacggcccaacctaattgtgggcctgggccggcacggcccatattgtgggccgtgcctgggcctcaagtcaagcccacgggccggcctggcacggcccatttaactaaggcccatcgaggcccactaaatatagactcagtatttaactaaggtccgtcaaagcccacatgactaacataac

SEQ ID NO: 315334 - DNA, 321 bp, Zea mays
agcccacgcgtccgagttcacccagctctgctccgcccgaggtacgtcgtctatcctcatctggttaacgtacctttcgtgcgctgcgagtcaaagttgcgttttttttccgccgctcgtgcgagtcgagctgaaagggaaaacgttagtcggtcactcaatcgatctgtaacttgtctgcatcaaagagggcaaacatgtccgtccgccacaccacccgcggtcgccgtcgcgcgtcagcggtcgtcggcgtcgctgtctggacgtgcacacagtgaatgaagttagtgtatgttttggatggttgcttgagagagatat

SEQ ID NO: 315335 - DNA, 205 bp, Zea mays
aggtaggacgaagcaggttcttctttaagtattttaggaagtgcaagcaatggcgagtagctagggaagggactaccatatgctatagctgccttgctagctagctagggagaggggggggcatccaagagaccaagctcacgggggcggatcggaggtgatggagaacgacgacgaggaagaggggtacgtgaaggtggggacg

SEQ ID NO: 315336 - DNA, 289 bp, Zea mays
gcgtccaggggataccagtaccaggaggcggcgtatggcggaaccgacccgggacgatacgagctcagtcaccgtcaggagcacgatccgccattcagaagcacggctacaggaaggacgtgtacgagagcgagactgagagcgaggacgacgagagcgactgcgaagaggcgttcgcgccgcgcggcggccaaatgcagggcggcgtgcaggtgcatcagcgctacaaatgcgccatacacttgggtgtagcccgaggatctcaaaccgagagccgagaagaacacaa

SEQ ID NO: 315337 - DNA, 105 bp, Zea mays
gtgagtcgtatgataagcgtgtgggcgacccggtccgggaggatacggggctcactacggtggtggcgccgcctattgagacgcatgcccatcaccattcaggaa

SEQ ID NO: 315338 - DNA, 59 bp, Zea mays; identical to SEQ ID NO: 77935

SEQ ID NO: 315339 - DNA, 92 bp, Zea mays
aggaaaaatcttgtttaaagaatgggtctgctagcatatttctcctccaatttggagacaagatttcatttgtagatcattttgctcggtag

SEQ ID NO: 315340 - DNA, 178 bp, Zea mays
aggacactcacacctctcttcttctctttcccttcgcattaatggacgctctctctctaaccacattcgtcacgcgcacggagtaggacactcgcccgcttcaggcgtaaacttcacaattcaagatccacggcaaaactcgtcgagcttgggaaggaacggcaccgtcaggatctgg

SEQ ID NO: 315341 - DNA, 160 bp, Zea mays
tgctgagggtcgtcaaggtattcacggggcaggaaaaacgcctggtgtcacagttttatcaaatccccctgggttcaatgcttcagatgcatgtgaaaccatagacctcagaaattacaccgtacatagcttgtgctgtcctaagatgggtaacttttga

SEQ ID NO: 315342 - DNA, 210 bp, Zea mays
agcggacgcgtggaaaaaaaaaaaaaaaaaaaaaaaaaaaaaaaaaaaaaaaaaaaaaaaaaaaaaaaaaaaaaaaaaaaaaaaaaagaaaaaaaattaaaaaaaaataaaaggaaaaaaaaaaaaacatgcaaagaataaaaaagaatgggagttagttagagtcatttaaaattaattgacgaggtcaactacttgaatttcccatct

SEQ ID NO: 315343 - DNA, 369 bp, Zea mays
  unsure (1)..(369): unsure at all n locations
accggcaagactatcaccctcgaggtggagtcctccgacaccattgacaacgtcaaggccaagatccaggacaaggagggcatccctccagaccagcagcggctcatctttgctgggaagcagcttgaggacgggcgcacgcttgccgactacaacatccagaaggagagcaccctccacttggtgctgcgcctcagaggaggcatgcagatcttcgtgaagaccctgaccggcaagactatcaccctcgaggtagagtcttcagacaccatcgacaacgtcaagggcaagattcaggacaagganggcattcccccagaccagcagcggctcatctttgctgggaagcagcttgaggacgggcgcacg

SEQ ID NO: 315344 - DNA, 319 bp, Zea mays
tcgtatgaggcgctgcactcgctcttcctctggctgctgctcctcgcccgcggcctccgccggtaccgggctgggactaggcgccgacacctcggcgtcggacgcggcggctggggccgggacctgctccacgcggacgtggtcgatgcggctgcaggccgctgacgaggaggacatgcgccgcatgcacggcgctcgccgttgaagtgcctatcaacgacgaccggggcactatcgtgggccaccttcatcgtcaccgtcgccagtaggaacgcccttttctgacgactctgtgctccggtcgttgacgaaatgaggg

SEQ ID NO: 315345 - DNA, 144 bp, Zea mays
  unsure (1)..(144): unsure at all n locations
aaaaaatttgcctcttttagcgtcagtatattaaggccgcagcacgtaatgtgcagtgctgangccttaanagactgacgcnannagaggcaaattttagcgggtgtagattgaagcgtgaacaccggacaggtacctatacga

SEQ ID NO: 315346 - DNA, 132 bp, Zea mays
atcacatagtctctccactcgagctagctactgtgcgactaccatagttgtaacatcagtttacagctcaagctgcaacatttgggacaatcttgcaccttacggttctcatgcacgctgcgtttggggcct

SEQ ID NO: 315347 - DNA, 89 bp, Zea mays
atgggcgctgagcaagtccagtggagagagggagagcggcgagaggatggctgggatggcgtcgctgcatggcgccatggggtcgctct

SEQ ID NO: 315348 - DNA, 140 bp, Zea mays
ctgcgccatgttatggaacaggcttactgtagctccccatgcctgaaaatttaatttgtatgattatgaacagtacatttgtcctcgaaaaaatgtaagatataatatttgacaaatggaatatgcttatgtagtcttcc

SEQ ID NO: 315349 - DNA, 319 bp, Zea mays
ggaaacaggaagagttgattggaaaaagaaaaaatgggatgtgtttttctttttgttcaactgagatacgacttaataaactatatcttcgaatgatgctctgacccccccccccccccccttttaatgttttttcattgactaaaacggttatgtaatgataactatgtgacacttgttttgtttggtgtgattcttcagcgtagcctggtgatcgagactcatgcgggcaaaaaaaaaaaaaaaaaaaaaaaaaaaaaaaaaaaaaaaaaaaaaaaaaaaaaaaagaaaaaaaaagaggaaaaaaagaaaagggggg

SEQ ID NO: 315350 - DNA, 221 bp, Zea mays
ttgagtcgtattaggcagctcggcacgtggtcgcagtgccgtaccccggccgatgtcacgtcaaccccatgctcgtcgtgtgccgcctgcacaccgccgcggacgctgcctttagcgtgaccgtcgtcgtcacatacgattggaactcggctgctggacgcaacgaaggtgcccggcacgctccactatcgcgtccgcctcgccatgatcaacaacgtcat

SEQ ID NO: 315351 - DNA, 184 bp, Zea mays
aaagcttgcgttcgtgtggtacaggtccgcagcaagcggtagagcgagaggtcgagaagattaagagcagcactctgttggcgatgggagttctccaggcccttctggtctctacgggcgtgggcagaggacctggcagggcctagtaagcagtgctggtgcggtgaggtgagcagctggtcgg

SEQ ID NO: 315352 - DNA, 343 bp, Zea mays
gcgaaacatgcgaacctactgtatatccattcagatatgttttaggcaacctacagggctcagtgcctatccctatggtgccattcagaatcatagtgcctttagttagttgatggtggtggtggttggaacacaataattacctgacgtcacgcccctggccaccggaaggtcaccggcgacgtgagccacaccaattcggcgacgaagcgccaggaacacagacgcaactcgaagcacgaaggtcaattacttatacacaaatcttggcatgaaagcccatcacaccattacagaatctctatacactaatagcttctacttcctcgttcagcgacatagc

SEQ ID NO: 315353 - DNA, 377 bp, Zea mays
ccggatggctcgcctatggtgctgtactggagaatttacaatcaagagctgacctaactgagagaataagaggatgtattgtagactctgcaccagttctagagataagaccagaggtctgggcggccgggttctctgctgcaatgttaaagaaaagcagttccatgactggacctacgactgaatctcttgatgggcctgttgtaaatggcaccttgaacagagttggctccaatgtgatccaaccttcatggggtgaatgttttcttctgtcaactctgcggaaattcttcgagattgttctttacgtacctgatgtaaacaagcggctgtgcaaggttctctcggtgctttcagagcagcagcctcctgcccgc

SEQ ID NO: 315354 - DNA, 109 bp, Zea mays
aaaaaaaaaaaaaaaaaaaaaaaaaaaaaaaaaaaaaaaaaaaaaaaaaaaaaaaaaaaaaaaaaaaaaaaaaaaaaaaaaaaaaaaaaaaaaaaaaaaaaaaaaaaaa

SEQ ID NO: 315355 - DNA, 341 bp, Zea mays
gacaagccgtctactggctcatgttcgtctttgtcttgatgcgattgatctctacgacggtcaaggtgacggcgacaacagttcagtcgcggcaggcggcgctcagtacctcccgcaaaagatgctctggattccgagcatgacggagggatgtactgtggccggacaggacagctggtgaagcttgggcgccaacggagccaaatgtcaaaggcaacgtcgcatgagggcacttcggtcgtcgttgactcatccacattcagtcacacccgtccaatcgacatcgtttcatgacagatcgaccagctagttaacatttcccatctcactggcgtgtgtta

SEQ ID NO: 315356 - DNA, 146 bp, Zea mays
cctgcgccgtcctcgccgccgccgcctccgctgccgtggtcctcgccgccggggccccggcgcccgtcctcaccagcgcctcctcggtcgcgttcccggccgtcggcgccgtgctgggcgcctccgtgctctccttcttcgcctac

SEQ ID NO: 315357 - DNA, 343 bp, Zea mays
aaaaaattaaaaaagaaaattaaaataaaaaaaaaaaaaaagagataaaaaataaaatggaaagaaaaatgaaaaaaataaaagaaaaaaaaaaataggtggaggctcttgatgatgatgttaatgatttgataatgtatctctcgaaagtcttagctgatatccctgatcttcaatgcatcggcttcggtcattcaacgtgcttgatgtgaataccttaaggctgcacttgattaacatgtagaaactctccttatatgtattgtcttgacataatcagatgtcggtgttcagcctagacattcaatcatattggtcatggcaaagatttatgggcacatcg

SEQ ID NO: 315358 - DNA, 411 bp, Zea mays
ccttcccccggctctccctcctccgcgccgcgcccgttgatggccggcgggaagaggacgacggcgcgccaccaacacaaccacccaccgccgccgccgcctaaccctagccctaaccgtggccgcggggtcgccgacccgccgccggcctcggacgactcgccgtcgtcgaagcgcatgctggccttccacttcctccgcgcgctggcacggatccacagcaccacgccggcgccgcgccgcccgcgcatcatccgccgcgcggtctactcgtccatggcgcgcgccgccagcacgcgccgggcctggacgcaggcgctgctgctccgccgggcgcgctcacgcggggtggccgtcgtcggctcgtccaggcgcgcggtcctgctgcggaagcgcgtctccgcctcggcg

SEQ ID NO: 315359 - DNA, 318 bp, Zea mays
aaaacaacaaccaaagataagaaataaaaaaaataaccggcggcatcagcgtcggctcctcggacacctgtggctctgtccgcggatcgcgccagatccatcacgaccagcggctccaccgcggtcgcagtcgcgatcgtccgtgctgccttggactccttcgtcgtttaccacattcactgacttgccggactatgagcctgagccagatggaatagacgcaagtagggggacagagttggctgcgcttagctgttctgcagctcgcgcgcattcccgaaccctcggcgtgctcccacatgacacgggggtggtagt

SEQ ID NO: 315360 - DNA, 171 bp, Zea mays
cccacgcgtccgctcaggcatccggtcactcgtacccgggcgcgtccggatacgcttccgcgcgagatggcgatagagcgctgcgaggacctcaacataagcatccgacatcgacatcgagatggacctagcacatgagcacatcgtgagcacccagatcacgctgcacag

SEQ ID NO: 315361 - DNA, 345 bp, Zea mays
cccaagcctccggtcgtccccctttcgcccgcggccccacccgccatgtcactcgcgtacacgcgcataaagtatcgctccagaaacactatggcgcggcagtcacccgtccgcctcagcgcagcgtcgggctcatgccgcatggcgccacaagccgcgggtgtccaccactgctgtggccgcgctcgagtaccgacctcgcgacctgactgggagattcaggtcacgtgcgatgacgcgaagatacgcgatgcgctcgatgctgcatatcatcaccgcaatttgcgccacttcaaaggagaacctacgggttacgacgaagagcatgccgagcaggggcctgac

SEQ ID NO: 315362 - DNA, 81 bp, Zea mays
gtcaagcctccggtcggcccccttacgggcacggtcccatcggtaggtcacacgcgtacacgcgcataaagtttcgctcca

SEQ ID NO: 315363 - DNA, 179 bp, Zea mays
aacgaatagaaaagattaagcttctatataatcattttctacacaattgatatagtagattaacatcaaactctacgtagatgtgaagataaataatgtggtaaaagtttgatgttaatctactatatcaattgtgtagaaaatgattatatagaaacgaatagaaaagattaagcttc

SEQ ID NO: 315364 - DNA, 412 bp, Zea mays
  unsure (1)..(412): unsure at all n locations
ctgaccggcaagactatcaccctcgaggtggagtcttcagacaccatcgacaacgtcaaggccaagatccaggacaaggagggcattcccccagaccagcagcggctcatctttgctggaaagcagcttgaggacgggcgcacgcttgccgactacaacatccagaaggagagcaccctccacttggtgctgcgcctcaggggaggcatgcagatcttcgtgaagaccctgaccggcaagactatcaccctcgaggtggagtcttcagacaccatcgacaatgtcaaggccaagatccaggacaatgagggcatcncaccggaccagcagcgtttgatcttcgctggcaagcagctggaggatggccgcacccttgcggattacaacatccagaaggagagcaccctccacc

SEQ ID NO: 315365 - DNA, 356 bp, Zea mays
cacagagctagctagccagccagccagcagccagcttgctcgccgcgcccgtccttcttcctcgcctccgttccattccgtcgcgccctccaccgccgccgccgcattcagggatggagatgaagaagatcgcctgcgccgtcctcgtcgccgcctcggcggccaccgtggcgctcgccgcggaggctccggctccggcccccaccagcggctcctccgccgtcgcgcccgccgtcggcgccgccctcggggcctccgtcgcctcattcttcgcctacgacattcagtgagccgggccgggcgctccgaggccgaagaataaaccaaggggatagacagtgacatggctgcgcgca

SEQ ID NO: 315366 - DNA, 291 bp, Zea mays
ccgggcagcatggcggagatcagccgtctcctgccacctgtgcgtgtttgttatcggtgcattgatctctacgacggcatcggtgacggcgaccacagttcagtcacggaaggcggggctcattacctcgcggctcagacgcactggattccgggcctagctgatggatgtgctatagccggacaatacatcgggagaaacttgggcggcaccggcgtccataggcaaccgcatgttctcatgatgcgacttctgtcctcgttgactcatccagatgcagttacaccgacc

SEQ ID NO: 315367 - DNA, 194 bp, Zea mays
cggaagtccggatcgaccacacgtccgaaaaaattatcgaggcaaaagtgagatataagaaataaagtttacagcatgaaatggattgaaaaaaagtggaagtaaatgactgaaataaaaaggtggaagctctataggatgacgttactgtgttgtaagcgtagatcacaaaagtcttatctatggggacttgt

SEQ ID NO: 315368 - DNA, 409 bp, Zea mays
  unsure (1)..(409): unsure at all n locations
cccacgcgtccgtgccgatcgagcagagttgtgcggcacggactattcttaattgttttgttgtaaaatatgtactacgtatcttctttttttccccgatgtgtgggaataccaaggcactgtatgaactagcaagctcaacaacaaggatttcaaaataatcgaaaagagagatgggggtaggaagaacgggggctatgtagctagaaacaaaacgtgttgtggtttgagaggaacccacgaaacggcactagtttgagacagtgttcgagaaatagcaattgttttcaaacaattcaaagaacaacagtagttttatcaaatgaatttagaaaacaacactccatatatatttttcgtccttttatttcaggcctcacangcanatagaccagattgcccctatctt

SEQ ID NO: 315369 - DNA, 151 bp, Zea mays
cgctggtttgtattttctttcttctttggatcatcacaaaaccaaccgatgtaattattattagaccgacgcctcacaatcttggaacttattcattatgctagtgtatatctgtaatcccattccataatgttaatgttgatttgtggtc

SEQ ID NO: 315370 - DNA, 282 bp, Zea mays
tattaataataattaagctacatacacacgtactacctaagtatggccggccatgcccatgccccctcatctcgtcggtccgccggcgagcatcgatcgatctttttctttgcatgctgtcggtcgtccccatcattgtgcggatgtgtttaaagcgccgtggacttgcgtgtaacctgcaactcgtcttttgttctgtggtctgacgtataatctgtgtcggcatcccattctgataactccaagaccgcaacgagagggcgaccttggcaattctgaccg

SEQ ID NO: 315371 - DNA, 64 bp, Zea mays
ctggggttcatgatccatggaggcgatgtcactaagaggatgggcagtgtgggctagtcaatct

SEQ ID NO: 315372 - DNA, 411 bp, Zea mays
gaagccccggtccctcggtcgtcgcaaggcgccggcagccccgtcccctcctgttcttcaggacgtgttcatggagccccagcccgggtcgccgacgtcgtcgcccttctctccgatgggagcgccggacgagccagaggaggaggccaccgaagtcgatccgggcaggaagtcgacctccagctcgtcctcctcctcgtcgtcatccgcgtcgtcggctgatgacatcccgtgccacatcgacgtcgagctcgtcaaaccgtttggcgcggtgctgcccgagcacgaacacggagcggaggccaaaacggtccgatcggcgacgccgaaggaggaacgagccggagccgcccacgtgcacggcgagccggcggactgcgcggtgacggaggacgtacaacaggccggtcc

SEQ ID NO: 315373 - DNA, 219 bp, Zea mays
cccacgcgtccggagatatcaacccatcggctcacatgggcttctactcaaggcttatcgtgtgttgtgcctccgttgcgactacggggatattaggttgtgtgtgtatgtggaccgacaccactgttgagctgtcgacccattagggctatggtcatttgagtctatatattgtaccccatctcctatgcaatacaatcaactactacagattcctgc

SEQ ID NO: 315374 - DNA, 333 bp, Zea mays
atggcctctaccgcaaagtcatcgcaatcatccacaaggacttcgacgccacgataataatcagctgctttggcgctacaatcatcgtcgatgtcatcttctctatgaaagggtgaatcaaattcttctcccattcctccatataaatcgtcactgtcattagcgtcaacatcatgtaaaacatctactatgtctaactctcaacatgggaagactaatacgtcgtcttcatcgtcttcatcgtcagatcatacagctgcagtgataactggccttgtacttgacgtcgtgggcttcgatctgctcatgttaaatccaggtgtacgtgtgttg

SEQ ID NO: 315375 - DNA, 349 bp, Zea mays
gtgagctcagcacctcaagtagaggtgactcctcgatcatgtccagtcataccaccaccatctccagttgagacactagttccaccatcacagtcatcgccaccggaagaagcagttagctcaacacctcaagcaccagtgtcgtcatctccacgagctcctgtacgctcagtacctccactgaagtcctcgccgcctcgagtagtagagagcgcaccaccaccgacaatatagtcatcacttccactggctccactgagctcaccagctcatgtatgagaagacttctcgcatgacttgcacgagtcaactcagcagctccgtcatctacgtcatcagtaccagtagc

SEQ ID NO: 315376 - DNA, 225 bp, Zea mays
ggaactcgcgcgcacgacaacaaggcgcagcataggtacacccgttgcacccgcgttgctggccctctgcgcgtgttgccggcatcgccgaagaggtcagcggccgcagatttcaaggcagggacgagcaacggtaacgcagtcagcgtcaaatcaatccatgacgacgtctgatagatcctgtgagatgacctgaaggtgacgttactaggcgtgtgtattttc

SEQ ID NO: 315377 - DNA, 354 bp, Zea mays
gccggatctacagcatccatctgagcgtctgcgcgcggcggctctcacactgaacacacgcatggtgcgcataggcgaggccaaggccaccgcgagggatcgtgtggtcagctgggatggcaatgcgatgcacctccgccgcgctgctcgtgctggcgctcgtcgccaccgtagtgcgcgcggaggacccctaccacttcttcgagtggaacgtgacgtatgggacgaacagcatcatggggactccgcagaaccgtgattctcatcaatgatctgttcctcggacgtaacatcaactgcacattcaataacaagatcgtcatcaatgtcttcaatatgctcgagcaactgctc

SEQ ID NO: 315378 - DNA, 157 bp, Zea mays
caagtgccggcctcgccattagatctccaagcgaatcatgtcgagatatcaccatcggtccaggctcttgcagaaacgaggaaaaaatacatgtcatctcgctgggttagggcggctgtgtatccgatgttctcgacgacaggggtagtgctgggga

SEQ ID NO: 315379 - DNA, 393 bp, Zea mays
  unsure (1)..(393): unsure at all n locations
caaggttgctatcatccaccacaaggcaagagctgcagacgtcaatccagaatacgaggctgcagggatcgatacctggccagaagatgagggagcaatcgtagagtcatcagacgacgcaaggcactggacgtcagacaacgttgcaatgtccaagtctagaatgtcagctcattggtcagaacagatcggctgcacagaacgctagattgatatcagcacaaagacagctcatccattcctcagaattcaaggcctctcgtggagtacaacagtatacagtacaaagaaggatatccagtgatgacagacaagtaatgcatagctatcacaaatttgctggcaacgacgatgaagacgatagtgacatggaaactgattttgctancatac

SEQ ID NO: 315380 - DNA, 385 bp, Zea mays
cgagtagatacctcgcgatggctggagcctgtgtagtgctcagcgtcctcgcagctgccgtcgcggtccaggtagcgcggccgcgatctgcacgcgggggagccgcgcgagttgcgcggcatcgcatgaacacactgtcacccgacctgtgcaccagaactgcggagaatcacgtcagtaggtataacgtggtagatgctgtgacggtgctagaaatgcaagtggacgcttacaagatacgtgtcaaggccgttcggatgctcgccaacgatgaggtcaacactgcagcgacgcccgacgtgctgatggagcagaagctctgcagtacctactatctggacgtcgccgacaagctcggtacctgcaagcgctccatcagtttccg

SEQ ID NO: 315381 - DNA, 331 bp, Zea mays
tctagagtgaatcgtattcatcgcgctgtcgcgggggtaggggctggtgatcactatcgcttgccgctcggtgatccatggccggctccgcggtggccgtcgtacccctgtcagccgtcgccctgctctgcctgtagtacgtccttttgcgctccctgtgcgtcgcggaagcggcatcagcgtcagcagccgtcccccggcgcgccggtagccaccgtggcagcaacgttccgtctgggtcacgaaccgtccaactcgtcctccgcttcggcctgtccgggcagccgctccgcctctacgactccgtccgccgccgctggcctcccggaca

SEQ ID NO: 315382 - DNA, 349 bp, Zea mays
gcacgcctctacagggcatcttgtcatggcgcaaggtggcgcccgctcctatggagccggtggcggacgggaccgccgcgctgacgtcaacgaccggctcgtgtagcgtcaagtatgactggcaaggttcgtggccagccgtcaacaagttcatggccgacgccgacgtcacgctggcctataagcccgtcaggaccagagcgatcgcgcgctcaatcagcagcatgatcgacatcacggggacctacagcatcgatctcaccgaagttgctcaacatgacatacggaaccatgatgcttatgttcagtggcctcatcgacgccactaccgcctagcacatcattgatc

SEQ ID NO: 315383 - DNA, 424 bp, Zea mays
acgggtaagagggctcgcttacaaccccaccctgcactcaaggagtgctttggactatcatgagcaaggtagcagatgcatccaaggaggagatccactccatcgagtcggtgaaggaggcaaatgcacggccggctcagaaaatcaacagccgcgttgttcgctactacaaagcagcaggagccacagaagcgccggcgccggcgccggcgccagaagcaacctgatcgaggagaacgttagaacagtagctcaccctcccgagagtatgggttgaaaatctttggcgaattgatgtctcgatgcaaattaaacaggcatgccatctttgtgtaaacagaaattttacacactaagttccactccctatactactaccataattttagtaatgtaaatactttgaaagaatgcttaaatataa

SEQ ID NO: 315384 - DNA, 366 bp, Zea mays
  unsure (1)..(366): unsure at all n locations
acctcgacaacctcgtcgacgagtacgaccgcatcgctgcgacctcctccggcggaggatcctcgcgcacctcncggatccgcctcttcctcttccccgccaagcccgagtcctcgtcatcgctcggctccctgctcgacgactcttcaaagtccgagaactggttcgtcgacgccctcaacagcgccatctccggctcgctcgacggcataccgagggggatctccaccgattcagcctccgtcaactgccttctcggcctcgaggacgactcctccgtgcactcccgtagtggagtaaccaactcggctcccacggaggaccagcgcgccagccagccgaagctccccggcggcgccgccgctg

SEQ ID NO: 315385 - DNA, 206 bp, Zea mays
aaaaaaaaaaaaaaaaaaaaaaaaaaaaaaaaaaaaaaaaaaaaaaaaaaaaaaaaaaaaaaaaaaaaaaaaaaaaaaaaaaataaataaaaaaaaaaagggcggcccccccaaaggtttaaaaactggggtaccccttaaagggaattaaaaattcttccaaagggtccccaaatttaaattcattggccgttgttttaaaattt

SEQ ID NO: 315386 - DNA, 99 bp, Zea mays
  unsure (1)..(99): unsure at all n locations
cgaaactgaacatgtgcgatatgtttatcaacctattgaaggtttatatcctctacttatcacanacaagcagagcaatattcttgaagatctggacac

SEQ ID NO: 315387 - DNA, 287 bp, Zea mays
gacccacccgtctacgcccggacccggccgttcgggggaccgcaccaggcgggcccccccggcggccgcacaaccgggtacccaaggccgcccgcgcgcgccttcaacctcgtctgctgtcgctcctccgtgatggccgacgtcgacgtggacgccaacaacgaggccgagcaaaggacgcgctcggagccggggacctccatgtcgccgtcatcggaggccgacgacgacacggccagcagtacacccaacgagtccccggcgcgcgccttcgcggggcaaacgct

SEQ ID NO: 315388 - DNA, 398 bp, Zea mays
  unsure (1)..(398): unsure at all n locations
acaagcatttgtatcgtaatgttgggcgtcatcagtgctgccctggggacatactcctccgtgaaaaagattgtagaaaactactaagctcttcgacaataattgcctgcctgcaccagactccacgtatggaactcgaaatgttgaggcatctatatatacggcgacgactactgtacaatcagagtacaccttatgtacagtcaggatcagctagcactatattcttagaacttggtcgagtgcagcgaggatgcatgttcgttggccttttatggtgccaccatggtcgaagccatagcctgagcatgataatggcgccatgcactgttgtcttgtatcatatgcgctgttctatctcaagttcnttttgaaggaagcaagcttgatttgtttgt

SEQ ID NO: 315389 - DNA, 336 bp, Zea mays
ccaggtcgacccgcgcgtccagcaggctcacggaggccgaggccgccgtgaaccgtgccgtcgccgggagccacgtggggaggtacttcaagctggacgcgcgcaagagctccttcaccaaggagctccgcgccggcgccgccacgttcctcaccatggcctacatcatctccgtgaacgccgcaatcctgaccgactccggcggtccgtgcacggcgcgggactgcacccccgtggccaccgccaccaactcgacgaccgcggactgcgcagtcgtcggggctaaggctaacccggggttacagcagtgcctggcgcgcaacaagagcgacctga

SEQ ID NO: 315390 - DNA, 267 bp, Zea mays
  unsure (1)..(267): unsure at all n locations
acaacaaacannnatcaaacgagtgggcaaaactgaaaacggcaaattggaaaacccaaatttccgggtccaacacaaggaccaggctaacacatttcaggatccccacaattacagtggcttcaacaactctggagaccaagcacgcttcaacacaagtaaagaatcacttccgatgcaattcttccacaggcaatccaattttaaagtttgagcaacatctccctactaccaagtgtcccctccccctgagcacagtttgtcccc

SEQ ID NO: 315391 - DNA, 185 bp, Zea mays
aaatcctcaactctggcacgcgtgcaacgcttgcacagtcatggttaccactagtccagtctcgttcaaattcatcactgcttgccactactcatgcgcctatccgtaatgtccttgttaggcttgggcgacacttatagcattttcacaggccacacgcctaccgctcagtcgcagttggccca

SEQ ID NO: 315392 - DNA, 400 bp, Zea mays
attccagggcgaccacgcgtcgaccacgcgaccgagagcaccctccacttggtgctgcgtctcaaaggtggcatgcagatcttcgtgaagacacttactggcaagacgataacccttgaggtggagtcctcagacaccattgacaacgtcaaggccaagatccaggacaaggagggcattcaaccggaccagcagcggctgatcttcgccggcaagcagctggaggatggtcgcaccttggctgactacaacatccagaaggagagcaccctccacctggtgctccgcctcaggggtggtatgcagatttttgtgaagacattgactggcaagaccatcaccttggaggtggagtcgtctgacacaatcgataatgtcaaagccaagatccaggacaagg

SEQ ID NO: 315393 - DNA, 332 bp, Zea mays
cgcgtctagcgatggcgacattgtggcggtggacatcaaggagaatggctccgatacgtacgagcctccagtgcactcctgcggctccatctcgtcggtcgcagacagagagatagtgagagagagggagggagagagggaacccggagaccgccaccaagcgtgaggcagaggaggagcatggcggcgccgccgtcgaggtcccggggcgactacgaccacctgattaagctcctgctcatcggcgacagcggagttggaaagaattgcttgctgctgcgcttctctgatgacacattcacaacaagcttcatcaccaccattggcattga

SEQ ID NO: 315394 - DNA, 147 bp, Zea mays
aattttttggtaatgtgatctggccaacaaccttttcctttagctgagaagatgaactgctacagcactgcagtgtagtggttcagctagttatccaatggattgtgtgctgtaacctgtaacatttgtttgaaattgaccttatgg

SEQ ID NO: 315395 - DNA, 56 bp, Zea mays
attcgctctcgtgtggtatctgtagaccctgttgtcggtttttagtcttcgtcttg

SEQ ID NO: 315396 - DNA, 135 bp, Zea mays
  unsure (1)..(135): unsure at all n locations
acgcgtccatcgtgttcttgctcctccgcttcgtctgcttcgctgtcgcggcggtcttgttcgcttccgtcgcgttggtngtgtcggctgctgggctcgtcttcgtcttccttgcgtctgcttcttcctccttcc

SEQ ID NO: 315397 - DNA, 238 bp, Zea mays
ccacgcgttccgccaatccatcttgggcgggcgccgctcgtcgagggctagccaatgcttgccatggcggacgtccggtctgcctgggtccagcaccatcaccgtcgttccgatgcgtcgtctccggcatcctccgcggttgtgccggctgcgagggtcgctgacgccctgcgccaacgcccgcggggtctcgtgcaggtgtcgtagcgggaccagggctcgttgtcgactgagcacc

SEQ ID NO: 315398 - DNA, 377 bp, Zea mays
agttgccgacgtcggattctgggtcatgaacctcgaattcgcgcgattctgaccttggtcaatgtctatcatgcctcacaagtcgaaccatcaggactgggagatgatgttagtgctggcgaagctgtctgacaaagagcgcttcatggtgtcagaccacgaccggctggcgaagctgaacgggtcgaagcaacggaggatggggcagctcgcgatcgactccgacatcttcaacgtgaaaccgatctttcacgtcgtcgacgtgacgaagtccgcaggcgagacgctggcgtatgacatgttctgcatcagcggcctaagaatttcactcagcgacatcggcatgggcacccgatgtgacgtcaacatggatccct

SEQ ID NO: 315399 - DNA, 211 bp, Zea mays
  unsure (1)..(211): unsure at all n locations
gcatggtgagaaggaagagtcaaagggcatcgatgcgaaagcgtccgggcctggtgggtccttcgacatcaccaagttgggcgcctccggcaatggcaagacagacagcacgaaggctgtgcangangcatgggcatcggcgtgcggcggcactgggaagcagacaatcctcatacccaagggcgacttccttgtcggacaactcaacttc

SEQ ID NO: 315400 - DNA, 432 bp, Zea mays
agatttctcgacctcggctatggaggcggcggcgttatgagcgccgaggtgccgcacttccaccccggcgtgcttcttgaccagggcggcttcaggttcggcctcggcaacgcggcggtcggcggcggatctggacgcgcactacgcggcgaacaacatcgtgttggcctccttcgccagccagctcctcgctaacgcccccgcaccatcgcgggatgatcgtgctggcgggaggacgccgtcgaacgagatggacgatgagctgtacgacatcaccggctgcgacagccacgtcgcagcgagcttgcggtgccccagccaatccggggccatggcggtctggtcgtcgtccaagaagtcgtacgatatctgtaccagcgccggcggaccagtaaccatgccggcccatgacacataccacctcgccggggc

SEQ ID NO: 315401 - DNA, 140 bp, Zea mays
ccctcgtcccggagccccgatctgctccccgtctcctcctgggcaggtcccccttttccgcgtgtgcgtaggccggctggttcccgataagggggttgctggcggtggaggccgcgggcgcggcgtcggtcccggcctcg

SEQ ID NO: 315402 - DNA, 213 bp, Zea mays
acccacgcgtcagcgcgctcaccggcgccccgcccctcccccatgctggccgcacccgcaatggggtgcgcggcgtcagccgccaacggggccgggccccggcagcgggggtgggcgcggacgcggatgcggtggtacatccaggcctccacctcgggtctgccgccgccgccgccgccgacgcacgacgcggcggagtcgtcatccgggggc

SEQ ID NO: 315403 - DNA, 343 bp, Zea mays
atttttattttttttttttttttttttttttttttttttttgttggtagataacaacattgttttttttatgagaaaaataaagggtgtaattgggagttcaaggtcacgtacattagcattctcaggagtgggtgtgcacgcacaaatgccattttttttctctctgtttctttctctaatattgatccgcttttttgtggacatgttatctcgttcaagatttcgtatataaactaatactttgggcgggatatatatatctgtctcactcatttatatcatatgtattaaatatgcgtttttgttatgcaatatatatatgcagctcaatgcgtgttttc

SEQ ID NO: 315404 - DNA, 321 bp, Zea mays
ggatcgtcaactgccgccgccgccaaggacagcccaacgtcgtcgtggctcgagggcctcgtcacctcgcgctcctcttcctcgatctaggtcgtcttcgacgtatggcggagcatgaggtcgcccggactcgagctcgtgcggggcatatcagcattcaccgtggtcgaagatcaagtgctactatgccgcagtatgctcaaggaggctgtcgcagtaccggggcacgcgagggtgcaggcacacgggacatttcggtgcgcggaagaatgactgagtgtcccactggctggtagctcacagtggcagagggtcaggatg

SEQ ID NO: 315405 - DNA, 411 bp, Zea mays
gacgacgcgtccacccacgagtccgagcaaccagattaccagagccaccactactcgcctgctccgctcgcgcatcccatcccagcggcggcagacagagagcagggatcggcgggtccgccgtcgacatggctcggtacgtggagatgctggacatgggcgtgcgcatcgcggcgaggttccactcgcactgcccgcagacggcgcgcatgtactacaagccgccgcagacgcagacgcagtcgtcgtcgtcgtcctcggccgacgacgccaatgccgcgagctccacccccgacgcgccgtcggtccggcggcccttcgcgctcgcggcggcggcggcggcggcggcggatttccgcgccggcgaccggtcgggccatcatcagctgcacggcttggacaccgcgcaag

SEQ ID NO: 315406 - DNA, 292 bp, Zea mays
caggtcgtctcgtcgctgcagcaactcacaaccgctccaggaccacgtacgatgcccaccggtcgtcgcgcaggtagccacacgatcaccgtcaggctgcagcgctcaacagccgggatctgaaagctcatcgccgcctgtccgccttgcatcgacccgagtgaactacgatattcatattcgatcatcttttgtatcttcgacatgagtactatgtaaatccgtggtgaagacctgagtaattagtggtacgccagagcttgagtgttgattagatgtaactggtggcttc

SEQ ID NO: 315407 - DNA, 171 bp, Zea mays
ggtcgacgacgcgtcaaggcctaagcggttgtaggctgtgcccatgattccaggcgaacatgtacttatatcgccgtgggtaatcaggtgagcgcctgctccgtatcatcctgactgctgtccgatttaggaggaacggccatgcatagagcagagccacacttcgaatgt

SEQ ID NO: 315408 - DNA, 109 bp, Zea mays
agtcgccgtccggttagatcgatggatccaacgatgacgtcgaccagcgcgcgattggcgacgctggcctgactgaggaagacggctcgcaaatcgttcagaggtaatg

SEQ ID NO: 315409 - DNA, 159 bp, Zea mays
agcctcgacggccattacgcgctgccgggcgtcaaactgtgcgtagcgctggcgctgcagtacctctccgtagactctactacagacgtgagccatggaccatgtcgtcgcgtcgctgcagcagatcagtaatccccatatagcaccaaggatgcccac

SEQ ID NO: 315410 - DNA, 301 bp, Zea mays
cctctcctagtgtcaatgctgctcgtcaggctcgcctcagtctcctataacgacgaggaccgcggcggcgtaactaaggcccacgtcaaccacggcatgtttaaggcggcaccgtggtccaactggcacgcgacttactacagtggggcacagcggttagctgacacgaccgacaggggcgcatggtgatacaacggcgacctgtgcaaatcatgaatgtagctgtatggaggcttttcatacttcactttacaccaacggcacccggtacggtgcgtactactatctcaatggtcccagt

SEQ ID NO: 315411 - DNA, 281 bp, Zea mays
tgccccgcgttgcgtatcatgtgcgtgggcgccctctgtgctgtgctagtctgcagtagctgcgtccgggcctaggcacgtggcatcgttcgagatgataccagtctgtacacgcgcagagtggttcatcgggaggattacctggtagaggtcagaccaccggcttctcgctctctcacactagcgtattctcggggatgataagggaggagcgtaacgccatatccacaccataaggcatgacgtacagtgaccttctttaagggcatcacggtcggctg

SEQ ID NO: 315412 - DNA, 99 bp, Zea mays
agaaacatgcaaatggagaaggaattgtttctgcctttctaagattcttcttagcacaatgtgcaaaactttttcataatgtaagagagttctggcgtc

SEQ ID NO: 315413 - DNA, 75 bp, Zea mays
  unsure (1)..(75): unsure at all n locations
aancgtcntnttcttcgcttgttgtggcgctggtgcttgtcctgttgtcgatgctggtcgtcctgctatcggtgg

SEQ ID NO: 315414 - DNA, 369 bp, Zea mays
  unsure (1)..(369): unsure at all n locations
tcactttcacgggccgggtggccccgaccccggcccgttacccacccttgaaaagcccctcttgcaagaacaagtcaacaacggaaaaggccttcaccggaacaatcgcctccggggatacgcccaaaaccagcctggggataacggacgccttgctcaacttaaggctcgcaaccgacgccaacatcaacaaggccaacccggagggggacaaggacaagatcgcaaaaatccttgctgcatacggcaagacggccgacgcggtcgctgcggccccgcttcccgagaagctcacagtcatggagaagaccttctcggcggtcgccgccgccgctcatcaggangccgcagcagctgctgctgctgctg

SEQ ID NO: 315415 - DNA, 341 bp, Zea mays
tttcttccctccgtcataataccgctgcagcttctgtgcttgccttgcctcttcacgttcttcatcctcgccgacgcggcggcgccacaggtcggcgccatcggcatcccgctcattcgcggtggccatagcaggccaggagcgccggccaagctcgcgccaccgaagccgatacctctcaggcacgcggcgccggcgccaccgaagctgacgccgattgcctcaggcgcctacatcgtgcggagcctgtgcctgaagaccgactactccgacctgtgcatgtcgggcatcgcgaagctgccgcagtcgcagctgccggtcgggaagcggctggacagcgc

SEQ ID NO: 315416 - DNA, 111 bp, Zea mays
cgtcaatatgagttaagtttcaggagccggtagaaggttgccaccagagtgattgcgaacctttgacggtacaccctttcttcagacaacccgggccctgggccttgcggg

SEQ ID NO: 315417 - DNA, 199 bp, Zea mays
acacataccaaatcatcgtcgccatcgcatcgcaacacagggtcttccagggttcctgcatcaatctatttccagacaccaaaggcaacaatacatcgatctttcaatacttccacctccatcttcggcatggccatcagatctccttcatccatcctcatccacatcatactcaagccaaccgttagtaaatgatgtg

SEQ ID NO: 315418 - DNA, 317 bp, Zea mays
cccacgcgtccgcccacgcgtccggtcgtgcggccacatggcgaccccgcccaccgagacaccgccgatcacgcccagcaagaagcaggacgacaagccgaagccggggccggatgccgccaccgcggcgaactaggcgtcgttgtggtcgcgcaagagcttcaggcagcgcgctgcccgcgctttccgccgcaacatgtcgggcgtccgcgtcaggacggtcacggacctcgcccaggaacgggactcagtgcgcgccgtcagcaacaaggtctccgatgaagccgagggcgctaccgcggtgccgcctgcaggtg

SEQ ID NO: 315419 - DNA, 335 bp, Zea mays
ttctttaaaaaaaaaaaaaaaaaaaaagaaaaaaaaaaaaaaaaaaaaagggaagaaaaaaaaaaaagaaaaaaagaggaaaaaaaaagaaaaaaaagaagaaggaaagaacgaagaaaaaaagaggggagaggaaagagcgaaagaaagaaaggtggggggggaggggtgggggggaggagcttttccgggggtttggtgtcccccgtgtgtgagacgtcgggggggggggttgttggagggggggtttcggggggggcggcgggggttttgggggggagagtttgtggccgggtgcctctgggctggtgtttttgggggggggtggcggcgcg

SEQ ID NO: 315420 - DNA, 406 bp, Zea mays
agcagtaatagctcacatgcaagaaaacatggatacagctgagaagaatcctagctgccacgagagtgaagtatccaaggccaatgttcatgatagcgttctaatgacagagcaaagtgagcgagagcataatcaatgcgaaggtgaatttgcaaacagtcatgtcccaggaagccctgtcactattccggtcaccgtgtccactattgacgggaactctagcaacagtcccaagaagcctgattctgctgagggttttctatgatatgttattgtaaatctagattgggggtgatgatgatagttcatttcagctctttctattggatctgtcatccttcttgcataaatagttttgttcagctcttcagctaaatttttcaccctttagtgttgctttcgggca

SEQ ID NO: 315421 - DNA, 418 bp, Zea mays
agctccggcaacctcgctggtccgaaccccgacccgtccaggatgctggaggaggcagagatgggcgtgacgcaggggcagttcaaagccaagcaaagcaacctccaggccatggtgatcggcggcgcggcgggtggcgcggcggcctttgggatagtagcggccatatgcgtcgtggcttaccactcgaagaagaggcgggcgctgggtaacagcgtgtcgcattcatcgggatggctgcccgtctacggtggcaactcgcacacaaacgccagcaagtcgtccggcggcaagagcgcggcgctcaacccgaacatcacggccatgtgccggcacttctcgttccaggagatcaaggcggcgaccatgaacttcgacgagtcgctggtgatcggcgtgggcgggttcggcaaggtgt

SEQ ID NO: 315422 - DNA, 381 bp, Zea mays
tgcaagcgtctacacagacgtcgtagtatccctggctcactatatccaggagggatcatttggtccagtcgatagacatggacatgcgtcacgtcgtcagatccgtcctctgcaccgtttccttgggaatcgccgtgctaggactctgtcacggttgatgtgcagtgtcatgcctgcggggttttggctatgtctagcgtgcggatgaatgcaagaagagccttgacctgagcaatccacacattgagcacgtcagacgtcgctgtcagtattgaattttacttggcctgttgacacttttggcgagatttgtagattttacagtatcatggctaccgtattactcagtagcacaggtgatgttctttgtatatttgtggt

SEQ ID NO: 315423 - DNA, 288 bp, Zea mays
acgcctgatcggccactacccgctggcggtcgtccaaagggctgtagcgctggtgctgcagtgcctcgtcgaggactcgaccatcagggcagccatgggccacgtcgtcgtctcgctgcagtacctcacaatcgcgcaggagcacgacgatgcccaccggtcgtcgcgcatgtacccactcgatcaccgtcaggctgcggcgctcaacatccgggatctgaacgctcatctccgcatgtccgccttgcctctacacgagtgagctaccatattcataatcgatcatct

SEQ ID NO: 315424 - DNA, 230 bp, Zea mays
gtgccagcctacgtctcacccttcgctccttcaacacaaactaattaaggagaaggatcgtgccctctttcctctgaccatcgacaggggaggacgggaacgtcacgtagacttcaccctgtagggaaatagtggcctctgattccggcatccggacgactgattaccgctcgtcgttaatctctatgccgaggtggtcctctatcaccatgtgtcgcggactgaccact

SEQ ID NO: 315425 - DNA, 384 bp, Zea mays
  unsure (1)..(384): unsure at all n locations
acaataaaatgaagcttattgccttcgcatgcagttagcatcatcactggacgacaacattgttggttttattagaacacttaatttgtgatgtctcgacataattgccggtcacttaaaggaggagtgggctgctgcatttctatgaaaactcatatgtgagcaaatgctactctcctagtgacatctttaatcattatggtctcaaaaatattggacgtaagctatgacaacatttttcttttgaagatagacactgtcgtcatttgatcaaccctatctacatgtgggttgcgatatttccatattatgtggacagcttacacacagttaaatcagactggatcaccaatngatgaatcataagcttgctctgaacgggaa

SEQ ID NO: 315426 - DNA, 393 bp, Zea mays
acggacgcgtggggtcgccgagccatgacgatgacaatacccgcctgccccggctggtcctcctccccgggcgtccccgccgcggcggaaaaaacttccgccggagccgaaggcgaaggcaacggcggtttgaaggccgttggcgaagcggccggcggcggtataccaaccccaaccgaggaagccaatcacacccggcctctggagacacgaagacccctttcgacacgcggcggtcactcaacccatagcgaggcagcgcaatccacgcgtgccgctgaggagacgacgacgactctttcgacaggcggcgggggttacggcggtgcaaccggcaaggcttccacaagcggcggcgggctggaccccgacggcgacccagaggttgggctg

SEQ ID NO: 315427 - DNA, 423 bp, Zea mays
acccacgcgtccgccgggccatgcgcggcagggacagccagcagggaaggagccattcaggttgcctaccgtcagctgcctgacattaggaagaccgaggtggtagaacgtacatgaccccggcgtcgtcagggaagtatatggattattacagggggcttcggcttcggcataaaggtcttctcttatggcaaagacatacaatgtgaagatgtaacccgaaggtgataagaatggtcaccgaaggtgtagccgaaagagcttcggcttaatatgatgacgaagaccaaatatgatgctgaccgaaagggggaagaagactatttagtccttaatgattcatgttatgataataaatagatgtcagggacataaatgtacttttacccgggttgcatctcgtgtctataaatagatgaacag

SEQ ID NO: 315428 - DNA, 66 bp, Zea mays
gtccggaatctgcgggaggtcctaacctgcacagatatagaccacgagcaagcttcctacacttcc

SEQ ID NO: 315429 - DNA, 221 bp, Zea mays
aataaatccccggccccaaagttaaggcggagttcaagcaatttcggaacgggaagctccaaccctccaaccaccgggttgaccgccggaaccgcaacttcaacattcaaccccaaggccagccacaaggaggaaaccgccaaggtggccttgcggaaaaccccccccaaggactgcaacaagttcaaggcggacaggaacccccccggcttctggctcac

SEQ ID NO: 315430 - DNA, 99 bp, Zea mays
cttcaaccggaacccaggacaattgcacggcttccaacaagacggtcaacttcatcgacctcctcacggccgacggcgccatctaccataagacatgct

SEQ ID NO: 315431 - DNA, 413 bp, Zea mays
ctgagcctggaggagatcgagtcgaagatcctgaagtaattaaaaaccgttcgtgggatcacaagccccatttggagatatgtaagtagcgatgccattttcaaaacgggcgctcgctcactcgtaggatcggagccaaagctttcagacatgggagtacatatgcaaagggcacgtctcggtgtaaagcttggacatctttctcttatattagcgtagtgaatatttccgaacatacttggtaaattacatctgcagttgagtcataatcacgcctctgtagactgtagtccactgtgagctactgtagtagtatgcatgtcactagtaaaagctggtaagctgtgcgatggactgatggtgtagacttgtgcagttgtgctctcataatggtgggcatcagatcctgtaaa

SEQ ID NO: 315432 - DNA, 414 bp, Zea mays
tgggttcaaggctggatccgttggcttaacaaaccttaccggcaaccggaaaccccgtccgggcaaaaaaggattgggcctaacccgccaacctaggcaatttggtggagaaccgaccgggtccgggtacttaaatgcctaaattttgacggcactcccgcatgctcaaaataatactaactgacagcgtgagacagaactggctgctctgtcggacctgctagcccaatgatgggtgctgtggagaggaagactcatgacaatgaacgcaagcaatggccacgacaggattgtttagaaccatttctgttacaacgttcatgatatctctctcactcactgctctcatctcattaagtactagctatccaatgcaatgtttccacactgggcagtcatatcaccctgttttgg

SEQ ID NO: 315433 - DNA, 294 bp, Zea mays
gacgcatggggtctacgacaacgacggcatcgccaagcacggctaccagctgcgcatctggctcagcgccgtgatcgcgaacatggagacgtgcatcgaagggttccccgatgaagagttcaagaccaaggtgaacgagtcgttcaccgaggggaaagagctcagcaaaaacaccctggcgctcatcgagaaggggtcgtcgcgcctctccgcactcaggggcgtctcaaaacggcgtttgctggaggacgagaagggattgcggccgtggccgcggcctcccaagccggggcg

SEQ ID NO: 315434 - DNA, 113 bp, Zea mays
tttctgcgatgtgatcgagcatttcctgcaagttgcgggaataagccattccatgcactgcgagtctggtggttatgccccgttctagcacgatggcaagtcttaacggtgct

SEQ ID NO: 315435 - DNA, 398 bp, Zea mays
agtgctacggttccggccagggggccacgccggggccgggcgagcgccggcagccgagctggacgaggcgccgcgggagggctgctgggcgcagttgcctctcgatcttctgcgtatgattaataccatgggagtgatatacagatggttctaccaatcatggttggaggttacacagacttcttttgttctatgctccatacaaggaattgtggattcatcttccgagggtcgtagactccgatcaatccaaattgatatgtgttttcttggtcaatcatggttggattcatcttccgaggatctagactccactaagactgtcctttgacaagctggacggtgttgacgttgcatggagtcagtcaaggatcaacgactctgtcatggtttgctca

SEQ ID NO: 315436 - DNA, 412 bp, Zea mays
gtccagctagctaaccagccagccagcagccagcttgctcgccgcgcccgtccttcttcctcgcctccgttccattccgtcccgccctccaccgccgccgccgcattcagggatggagatgaagaagatcgcctgcgccgtcctcgtcgccgcctcggcggccaccgtggcgctcgccgcggaggctccggctccggcccccaccagcggctcctccgccgtcgcgcccgccgtcggcgccgccctcggggccgccgtcgcctccttcttcgcctactacattcagtgagccggccggggcgcccggaggccgaggaagagaccaacgggagagagagtgacatggctgcgcgcattccgatgcgtgggcatgttttttgattcgacacacctttttgtcccccttttcttt

SEQ ID NO: 315437 - DNA, 292 bp, Zea mays
acgcgaaaaaaaaaaaaaaaaaaaaaaaaaaaaaaaaaaaaaaaaaaaaaaaaaacgaaaaagaaaataaaaaaaaaaggaagaaaaacaaaaaagctacaaaaatcaaataaaaaaaaaaaagggggggccgcccaaaaggttcaaacctaaattacccttgcatggaacgtcatagcccttcaaaagggccaccaaattcaaattaaagggccttcttttaaaaacttcagaactggaaaaaccctggctttacccaatttaacccccttgaaaaaaaaccccctttccc

SEQ ID NO: 315438 - DNA, 145 bp, Zea mays
cgcgctctcgccctcgcctccttcctcctcgtcgcctccgcggccgtgggtttcgccgcggtggccccggcggcctctccgggcccttcggcctctgtgccgttgggggcgcccgtccgttcgcctgcgtgtgtccgggcgggcc

SEQ ID NO: 315439 - DNA, 248 bp, Zea mays
aggcgccgacgaggaagggtctgtgcgccaccgcgacactggctggggatgatgatgcgccgtggatcgttggatcgattgcggagggcacacattagatctaggcgtataacccatcgggccgtcgatcattgaatcgatggctgcgatctcgttctggttcggtggtaagaaaatttaatcgtggcccttgttgcaggatccaactgctagacttaaccgataccctttcgaagacatccatccca

SEQ ID NO: 315440 - DNA, 191 bp, Zea mays
aaagacgcgagggcggacgcgtcggatctacgtggtacaccttcaggatagtctatctccacgataaggaatgattatgctcgacgatgactggccggggtaaggagtaggcgtctgtttgcctttactagcagggtttccagggggtgcttcctatagctctccacttgcgtgagcggcgacatggattt

SEQ ID NO: 315441 - DNA, 399 bp, Zea mays
actcagtcatctacgatccgacaccatggatcgtcgatcgttcagcagcacaagagacgacaatggagacgacagctcctcgggtccggtccgatcgattcttgcttacgtgtacatagctgaggcgcaggcgcagcacctacttacccattaacgtcattgccagtgagagtttcatcataattttatttttattaaacaagatgatacatcacgatatttgatgacatgacacggtattataataaaaaaaacacaaaactaaaaaatctcaaacaaataggaaaacacactaaaagaatcatacatacataacacgagaaaaggaaataaatgaaccggtcaaaggcgccaagtcaattcaattcaaggggacgacacaaaaaagggggggccccc

SEQ ID NO: 315442 - DNA, 205 bp, Zea mays
aaccagcccacgacgcacgcctctcctgatccatctgatacgtccaggatgacgttcacccctgtcgtaacagttcccacacggatcgaccacgatcactttcgcaacacgcgacgaaagggaagggtggatcgaacttgcatccaacatcgatcccaaatggtgcttcgcacgtacatgccatatcaatacctatcttcgaccg

SEQ ID NO: 315443 - DNA, 335 bp, Zea mays
gggcaaccgcaatttcctccgtcccccccctccgattctcccctggcccaaggaaaaggaaaaggaaaaggaaagaaaaaaaaccgcgccgtccgcccaaggaaaaaagcaaagatccggaaccactgaaccgcgctacgcgtggtcgtcgtccggagccacgcgtggcgccgcggcgatgggcaactgctgcgtgacccggccgttttctggcaagcggcgaagcggctcccgcggtggcgctggcgggaaccgttgcgggcgcctcggcggcgccaacgtgcggtcctgctccacgctgtcctccatctccgacgcggcgcgcaccgccgcga

SEQ ID NO: 315444 - DNA, 83 bp, Zea mays
agtacgtcaccgttcccaagaacatggccaacatcttcatgtacggcgacgggccgacacagacggtggtcaccggcgacaag

SEQ ID NO: 315445 - DNA, 455 bp, Zea mays
gtacgctcgagaatcccaggtccaaccaagcctccgagaacaataacccaatagaaccatttaataaattcaagaatttggataaattaataaatccaaacaacggtgggttcaaggtggacccaaccaaggccaacggcaatccatccaaaaacccaacggcaacgctggtcaggcccctttggccctccaatggggggcgatcacaatctgcaactgccaaggccgccttcaatcgggaaaaatcccgttgccggagaagaagtccctgttcctcaacgccgccagcgcgtcgccccgggcactaccagcagcaacaaggcggcgcctcctcgcacgaagcgcccgccgtgagcgtcacgccgcggacggccacgaataagcagcagctgcacctgccggcgagcccccgggcgtgcctctgctcaccaaccgtgcacgccggctcgttccgg

SEQ ID NO: 315446 - DNA, 98 bp, Zea mays
aaaaaaaaaaaaaaaaaaaaaaaaaaaaaaaaaaaagaaaaaaaaacaaaaaaaaaaaaaaaaaaaaaaaaaaaaaaaaaaaaaaaaaaaaaacaaaa

SEQ ID NO: 315447 - DNA, 72 bp, Zea mays
  unsure (1)..(72): unsure at all n locations
agggtgccctcttcgccggtggccggaaggcgatggggaagccngaggacgctgagggcgggcgaaggctcc

SEQ ID NO: 315448 - DNA, 236 bp, Zea mays
cgaaagaagtcgcctaatgctttcaatcgaattacgtgccttcttcgtcacaggctccgtccttatttgtagattgaagcttacatgaacatttgactagatcatcgaaggattggtaggcctctttaaagttggggtcgtgaagggcaataaacttgcctagcggtattcaagatggagcgattcgtagttcgtcctaggacttggggagaagaagtttaacaagaacgtgaaga

SEQ ID NO: 315449 - DNA, 342 bp, Zea mays
acaaaaaaatcaaaaaaaaagataaaaaaaaaaaaagaaaaaaaaaaaaaaaaaaaaaaaacaaacaaaaaagaagacacgtcaaacgtggggaggattcacatggggcttcaagttcccgtgcgcgcaagtgctgctggacgagttcaccatgacgtcagctggctgcacttacaaggtcatctcttaagcgggcaacttctggtacaccgtggtggtggccaaagttttccaccatgtgttaaacaccccttgcggcatgagtcatcttcgcaacggggccaactcgcattacctttccaacattttgttcctgctggtggtgtacggggacctgctgct

SEQ ID NO: 315450 - DNA, 230 bp, Zea mays
gtggaggtggaggatacacaccgggggcgccacgacgaacgccacgccgaggtcgtttccgagaagattatactggaggacgcgccggcagttcttgcggataccgctggcaccccccgcaccacggaggtggaggtggagtccctcaggaaaggagcggcgccggttccagtactcatcctcgttggcgccgcagtggacgacgtggtggccgacaacgttcctggccg

SEQ ID NO: 315451 - DNA, 148 bp, Zea mays
aacatgcatcgggaccgtctatgggtgtgtgtgtcaaaagcatgtggacgtctttgtgggcacaggttgcgatggttatggcgttggagtacttggtgaaaaggtcattgtgaggacctcccaatctcccaccaggcataaacatcac

SEQ ID NO: 315452 - DNA, 394 bp, Zea mays
aagccccgtccagcccccaactccagcactccagaagctccccctgatccgacgtcgtggtggccgacggctggatccctccacccccgcgcgcagatgcccctcgcgccgcggtcctcctcgtcggcgaaccggcacagggaagcaccaccgcctccgacgcctagaaattctggagcgtagcagggtaccgtaccgcgcgtcggcgagctctgtttgcggcgtttggtactgaagatgaagaagtccgactgatggtttcttataataatatgcatccaagacatcgtacgttacagtctcccatgatctgtgtatgtaacgtggatatacaattgaatatgtggaggactgtgcgacatgcgttgaagtcggagggaggattgtatgctgt

SEQ ID NO: 315453 - DNA, 75 bp, Zea mays
ttgcctctcgctggcgtcgtgtaactcgctgccttctgcggcttctcttgcgccaggatgccttggtcccgttgc

SEQ ID NO: 315454 - DNA, 201 bp, Zea mays
catccgtggttgagccatacaacagtgtcctgtccacccactctctcctcgagcacactgatgttgctgtcctgctcgacaatgaggccatctatgacatctgccgccgctcccttgacattgagcgcccaacctacaccaacctcaacaggcttgtctcccacgtcatctcatccctgacggcttcactgaagttctatg

SEQ ID NO: 315455 - DNA, 416 bp, Zea mays
agctggtcctcgaggccatggattgcgtcctcatcgagatcttccaggtgtacggcgagatatgcaccggcatcgcgcggttcctcatcagcggcgttcagggcggaccggcgatgctgacgacccgcaaggaggtcatggcggcaggggtgaaggtgctctggcgggcggcggagcagagcgctcagctctcgtcctacttcgacctgtgccgcgagctcggcgtggccaacgcgcgcaagctcccgacatcattagttcgcttgaaagacgacgacgtccgggacctcgagcggatcctcatgagtgagagtgacatccagaacgaaagcggtgaggaggcggaggcggaggcagaggcagaggcagaggcggcggcggacgtgaaggacgcggggtcaacgtcgacgaacact

SEQ ID NO: 315456 - DNA, 403 bp, Zea mays
ccccgggtgcccgccgcgtcgtactcctctcgtcactcctctgcgccggagcgctcggtttcttgcccggctcccatgccgccgcggtggcgcccggctacgtcgccgtctccgccgccagcttcgtgccgtcctcaacgtgcagctcccccgaccgagttccgccgcagcggcggaacggcacgtccgccgtgctgcggctgacgcacaggcacgggccgtgcgccccctcgcgggcgtcctcgctagcggccccgtcagtcgctgacactctgcgcgcggaccagcgccgggcggagtacatactgaggagggtgtcggggcgcgcgcctcagctgtgggactccaaggcggcggcgacggtgccggcgagctgggggtacgacatcggcacgctcaacta

SEQ ID NO: 315457 - DNA, 161 bp, Zea mays
gcgtccaggtgtctttggagtctgcggaggtgctcactctgctggggatacataactagactatcaaccatgcagaatcacgtgatctgagctagcagggcactggctctgctcgcgcgagtttgagtagcgctcgtggcacctgcagtgccacctcaagt

SEQ ID NO: 315458 - DNA, 423 bp, Zea mays
ataaaaaatcaaaaaaaaaaaaaaaaaaaaaaaaaaaaaaaaaaaaaaaaaaaaaaaaaaaaaaaaaaaaaaaaaaaaaaaaaaaataaaaaaataaaaaaaaaaaaaaacaaaaaaaaaaaataataaaagggggggcccccccaaaggttctaattttattttcctttcaatgcaatttcttctcttttcaaaagtttcccaaattttcatttaaggggctttttttttaaaactttttaaggggaaaacccttgggtttcccaatttttaccccttttaaaaaaatccccttttcccaacttggtttaaacctaaaaggccccaccctttttccctttcctaaaattttccaaccttaaagggcatttgtgaccctcttttttaggcgacttaaactccgttggttttgggattttcccc

SEQ ID NO: 315459 - DNA, 371 bp, Zea mays
agcctccccagcatgcatggatgtgacgacgtctcctcctcgctgtctctctgcagctgcaactgcaagcatggcaattacttcagacaagatctgcgccatggcggcaacgacgacggggatgcagatgatgcacgcggcggcgttgccgctgtgcctggctgtgttggcagcatctacgcgggtcgcgctgggcaactgccgcgacgactgcatggctgcatgcaacggctggaccaacgtctgccagctcacctgtgccagcgcatgctacagagaactcgggatcagaaccttacgtacctcggctgtattagctaaagcagaatgccctgcatcagcaccacatgcaacacaagagcgaagcgccg

SEQ ID NO: 315460 - DNA, 425 bp, Zea mays
accacgcgtccggctagctagccagccagccagcagccagcttgctcgccgcgcccgtccttcttcctcgcctccgttccattccgtcccgccctccaccgccgccgccgcattcagggatggagatgaagaagatcgcctgcgccgtcctcgtcgccgcctcggcggccaccgtggcgctcgccgcggaggctccggctccggcccccaccagcggctcctccgccgtcgcgcccgccgtcggcgccgccctcggggccgccgtcgcctccttcttcgcctactacattcagtgagccggccggggcgcccggaggccgaggaagagacgacggggagagagagtgacatggctgcgcgcattccgatgcgtgggcatgttttttgattcgacacaccttttgtcctctttttcattgttccct

SEQ ID NO: 315461 - DNA, 291 bp, Zea mays
ggctccacgggggtgacagtaagccgggacatggcgcgcggtggcctcgcccgcctgctcgccaggctcatcatcttcctcctgctcgccgccggaccttccctcgccgagtcagaggcggaactcgctcggggcgcgtcagaagcgtgacgggacgctcagcagcatttcctgccgcgcccgctcatcatcgagctcccgtcggcgcgggccggggccgagctcgacgcctaagccgacggcgacgccgtggtaacagtcgacgtacgctgcgccagctggcagctcgcg

SEQ ID NO: 315462 - DNA, 365 bp, Zea mays
acggacgcgtaggtgcctccactgagctggccccctcagagcaacgtatttcctctacagtgtcgccccctcccggtctccgcctaccacatgctgtttgcgagggcttcttacagcgctcaaaaccgtactttcatcttactgcacatctttaatgaagatctagacttctcatcggacacttcgttcacctctccaacactcacgtctctaatatcatgactcctgaaccggtaatcgagcagtaggctccgctaccccggagggccagacaacgtcccgacccacccttacttctcagctctaacatgggacatgatcacgtctgtgtgcacaccaccttaaagttctccttatggtgatca

SEQ ID NO: 315463 - DNA, 378 bp, Zea mays
gcgtccagagtgactagcatccatggatgtgacgacctctcctcctcgctgtctctctgtatctgcacctgcaagcatggcaattacttctgacaagatctgcgccatggcggcaaccaccacggggatgcagatgatgcaggcggcggccttgctcctgtgcctggctctgttggcagcatctacgcgggtcgcgctgggcaactgccgcgaccactgcatggctgcatgcaacggctggaccatcgtctgccagctctcctgtaccagcgcatgctacggagaactcgggatcagatgcttacgtacgtcggctgtattagctatagcataatgcgcctgcatcagcaccacatgcaatacactagcgaagcgccg

SEQ ID NO: 315464 - DNA, 294 bp, Zea mays
agtacgatatcagcgcattatcgggatggttcacaaaatggtagacaccgttgtatttctcgccgtgggctcactggcggttctgggcggctacgatgttatagatatcctggacgacatccgcatctgatccagatatcagaatctcctgcaagacaggatcgtagcgggagaggcaactgatctacggtcggctacgcaactgctcgtacgcgatcaagttgacaaaccgctggtttcacctgtaggcgataaagtcctgcctgccctggagaaacatgtcattctcattta

SEQ ID NO: 315465 - DNA, 409 bp, Zea mays
gcacgcctctacagtgacgtcgtgagcagtacaggggcatgatggacgccgcgcgcgccggcgaggccggcagcggatgtggcgtcgaggagtacctgagtcgcggcctccgagcgttccaggcggcgcgaccgggcggcggcaaggagctggaggaggtcgaggacgcgctgctcgccatgcacatcaaccgggagagggcggacacctccgccgacgatctcggcgacctcgacctcgccatcgaaggcgagtatcgcgacttccccggcgagcacgtcacgatccctgccgggtactcacgcgtcgtggaacacctcgtcgcggcgcttccgccggataccgttcgcctcggccaccgcctccgccgcctcgactggagcgagactcccctgcgacttcacttcga

SEQ ID NO: 315466 - DNA, 211 bp, Zea mays
gtgggacgtattagagcaggtgctgataaatcaccggcatcgagatcagtcagatggacgattaccttcggctttacgtgcatctgaactctacttgtatcgtgctccagcatcaagcgcatctaggactataccgtatgactacgtcggttggagtctcacatgggaccttcactaggttcgtcatcgattcaggttctgacatgcatat

SEQ ID NO: 315467 - DNA, 94 bp, Zea mays
agttctaaatcgcgagcggccccctttttttttttttttgattttaaaaggaaatatcatatatattccatcacaagattacagaacgacttga

SEQ ID NO: 315468 - DNA, 429 bp, Zea mays
agcacagagctagctagccagccagccagcagccagcttgctcgccgcgcccgtccttcttcctcgcctccgttccattccgtcccgccctccaccgccgccgccgcattcagggatggagatgaagaagatcgcctgcgccgtcctcgtcgccgcctcggcggccaccgtggcgctcgccgcggaggctccggctccggcccccaccagcggctcctccgccgtcgcgcccgccgtcggcgccgccctcggggccgccgtcgcctccttcttcgcctactacattcagtgagccggccggggcgcccggaggccgaggaagagacgaaggggagagagagtgacatggctgcgcgcattccgatgcgtgggcatgttttttgattcgacacaccttttgtcctctttttctttgttccctctttctcc

SEQ ID NO: 315469 - DNA, 338 bp, Zea mays
acccacgcgtcagctaacgcgtcagcccacgcgtccgctgatgcgtccggcggaacgtctaccgcctcgtcgacaaagttcttaacatcttcgacgtcgtcaaccagccggagcaagcgcacaagcacgggtactatccgcgtgcgcgctggccggcctggcagttgtaatagccgggatggtgttgtatcgatctcctttctgcacttgaatatatatgtgaataacgcttgagataaatctgtattgctaggtgtagtgtaacttgatcaggttactgctaacacggaatttcaggtttaggacaggaggccgaagaaagagacaaaagggagaga

SEQ ID NO: 315470 - DNA, 254 bp, Zea mays
acccaaacgtccagcctgccgcgacgcgtgccagcaggctccaaacgcgcacaccacatcaaactgcaagaggtcgagcacacccctaacgccggccaactgacgaccttcaaacgcgccaaccctacagacatgtgtagatgattgcgacgatcgtcacctccactctaccccatgtcctcatctaggctacagcagtgtcggccaccactgacgacgcagccgacggcgatctaacatcgtccgagtcatct

SEQ ID NO: 315471 - DNA, 269 bp, Zea mays
aatcgattcgcacgccggtggacggcgtctcactagccaacaacgcgacgatcgggttaaaattctcatctaccggccagggcaattctgtggctcgattgatcggtctgtcgtaaggcaattgatcaagctagatatatatataggagattcgtcgaacgagctactagcgaaatgggttccgccgtcctcttttactgcatctggatcgccgtcatcgtcacattgtcctcgtccatggtcgctgtcggggacggagacccggggga

SEQ ID NO: 315472 - DNA, 352 bp, Zea mays
acccaggcgtccgcgtggacgccgtcagcgacgctgatatcctcgcgcatctcttgctggtggtgctgctgcccgctgagctgctcgctctcggcgcgctcctgttcgtcagtatattcaggtgcttacataggctcacacgccggttcatcactccgttcgttcgttcgtaagccgtctacatacacgattcttttgtcccacacacacacatacacatacacgtctgcaaagtacatgcgacattgcagctgcttcgcatgtatgtatgatgaatgaaatgaaaactcaaacacattctctaattctttggttccgtccaaaacaaaatcattcggaatcaccatcaacc

SEQ ID NO: 315473 - DNA, 192 bp, Zea mays
aaatcgccagcaggagctatggggcagggacatccgccgccgccgtggcaccatggtcattgcgattcgctagcgtctgattgagggtcgtggcctagtgatcttcgcaaaggcacgcggatggttatcatgccctcaccatgcggttctggggcccaaacggtaatgaattgtcaggacgcacccctcaat

SEQ ID NO: 315474 - DNA, 73 bp, Zea mays
accttgtcaccacacgcaggtaccaacaaggcgacgatcatggcgaggctgtccttggaacgggcggtggttc

SEQ ID NO: 315475 - DNA, 183 bp, Zea mays
acgagcgccggcttcggaatgcctccctttgcctgatgtttttgtgggggacaaagggaggccagaagcggtagcaccgccgccgcgtcatggttcgccggagacatacacaaagacaggaagcaaaacatgcaaaattgccaccgcttctcactcaattttatgctcgaatgtgaatctcat

SEQ ID NO: 315476 - DNA, 406 bp, Zea mays
gactccgcgctctcccctgctcttgcgctctacatggaaggcgagaccggcgcccaaatcaacggaatcactgctccgcgctctccagacgcggacgggattgcggcctcgatccgcgctctccgggttcgcccagatcgacggcgtccgcgccgcgcttgcccagattgacgaaatttgcagtctccagacgcgagtctggcgctcgctattcgtggaaggcgaggagagacgacgcatcggctctcgatccgcgctctacatggaaggtgaggcagattgggggagtggctcgtggccgtcgcctcggcggcgtcctccgtgccgtccggcgaggtgtcgtccaagcacggcggcgacgactacgtgattgtgggcgggcccaacggcaacgccgtcgcgcgcc

SEQ ID NO: 315477 - DNA, 98 bp, Zea mays
gacccaaacgtccagccttggtctcgtgcccgaaggacgcctgccttcggttcctcactggcatggatgaattagtcgtttcggcgacgatcactgcc

SEQ ID NO: 315478 - DNA, 332 bp, Zea mays
aacagaactagctagccagccagccagcaggccagcttgctcgccgcgcccgtccttcgtccgcgcctccgttccgttccgttctgtctcgcgcgccgccgccgccgcattcagggatggagatggacaacatcaccggcaccgtcatcgtcgcagcctcggtagacaacatggagctcgcagcggaggctcccgcaccaggacctaggacgcgctcatccacgatcacgcctggcgtagtgtccgccatccgagcagcgatcatcgccatcgtctgataatagaatgagtgagtcgggtgtcgtcgattaccccgtcgactcggaagaaac

SEQ ID NO: 315479 - DNA, 144 bp, Zea mays
cagccagcaggcagcttgctcgccgcgcccgtccttcttcctcgcctccgttccgttccgttccgtcacgcccaccgccgccgccgcattcagggagggcaatgcagcagatcgcctgcgccgtccacgacaccgcctcagcgg

SEQ ID NO: 315480 - DNA, 321 bp, Zea mays
agcatgacgctgcgcgttgcgtgccgccgcggcttcgccgaccagcacgctaagatcgactcgatcatggacctgtgggacaacgtgttcgacacgcactgccggttcgacgtgcacgtcatgctggtgctcatccaggtcagcatctgcgtcagctaccgcatctgcatctccatcatcatggcgcacatcaatccgcatgccgcgtcgtctgcctccgcgctcttctccgcgatcgtgctcgtcatcggggtcatgatgcctttcaagctggggctcaactcgatgatcacgctgacgctgctcgcgccgctcagcatc

SEQ ID NO: 315481 - DNA, 395 bp, Zea mays
acggacccatccacgcatcgacctagcggccgtcgcggtcatgcacacattcaaagcaggcaagcaatctaggctcagcatgattcacaacgcaatgcaggagacgcccaccatcagcatcgacggccacgacatcatactcctggacctggagggctcatataccctgcacgacgtgtactactcgctgaacgtgcacgtctgccactgcatcgccctcctgtactacgacgactacccgcccggctactacaacatggtgtccaccaccctgttcatcgacaacgccaagtccgcctccgccgtcatccgctactccagcgccagccgcaccgcgccggcgaccaacatgaacaagccatcggacaggctggccatcgccatcaaccacacca

SEQ ID NO: 315482 - DNA, 234 bp, Zea mays
gcgagctcctgacatgggaggatcactagcccgtcccacgaggttctgcccgtcgtgggtgcacaggcgctgccgtcggtgttagagtcaccgcatgtttacattcgtcatgaccccttcgttcagtacgcctctgtgccatgcatgcacatagatcatgctcactgaagtctacacgtttgccatatctcgttacgtacactacgcttctttatcccctcctccctttttttt

SEQ ID NO: 315483 - DNA, 267 bp, Zea mays
agtggccatgtagatgatgggtgcccaggcatcacattccacattgctgataatcctgcatcaacagcttggaccacatgactagcttttcggtggtgggaatgacctctactgcctgcgattctatgttggggtacctcacttgcgtgatggtgaaggtcttgtggctctcgaagatgctctcgtttccagcactttgcctcacggccacttgcgtgctcaaggcactcagtcgctctgcctcagctgtccagtccaccgtgatat

SEQ ID NO: 315484 - DNA, 390 bp, Zea mays
gtcgaggggccgcgtcacgacgtcaaagttcgaggccgcctgcggcgggcccgtgcgcgatggctcttgcagctgcagcttcctccaacgcaaatatcatggagcatcatccatagcaccatctccttggccgtgacgcccgtgatcgtcctgatctgtgccgtgtcttcccgaccgcagacacctcggcgccgtacatgacatgcctgccgggcttgcagaactattcgtcaacgttgcggggctgccctgagcacacaagagctctctctccgacggtaacgcactcgattatgtcacgcagccggagcaggcagctgggacatgcacgtctcctgcaggagccgcattttcgcctggcccgccgtatcacccaccttgacctccgcc

SEQ ID NO: 315485 - DNA, 295 bp, Zea mays
tctcctatcccgtcgcccggatccggcgcgccgccctcctcagcgttgctacagccacctcaacatcagggagcacagatcctgtatcgacgtggccggcgtcaccgtggcggtctgcgccgctgttttctgctgcatcgtctgcgtcacggcggacgtctccgtgctctccacgtgtgcacgcgcacgctgcgatgtgctgcaaggccgcccgcttgcgcacagtccacaggcactctgcctcggtcggtcacgggagggggatatagtaactcgtctaggaccacacaggcgt

SEQ ID NO: 315486 - DNA, 120 bp, Zea mays
ctaaaccacaaatcctcttcacctggattacaaatatgtaactgagaaaggaaaggaaaacaaaaatgtaactgcgtggctgtaccaaattctgagtgctggattcttgctattgtcacc

SEQ ID NO: 315487 - DNA, 171 bp, Zea mays
agggatgctcttgtcatccacgatggcactcatgcatgcgcgggcgcccatctgcatcaagttcatgtctcgtaccgataatgtaaagctacatgccttcttagctacactgcctgtgacatagctccgtgcatgtatgcaatgtatcataggagggaacccattccgtat

SEQ ID NO: 315488 - DNA, 182 bp, Zea mays
taacctcgtcgcctcctccattgaccatcaattaaccctccccgatcgccatatctatcatgtgcagtcatgggtgtctgtgcatcgatgcctactacgcttgacgggatatcaccaactgacgctaccatctccacacgtaacgttggacctaacaccatctagtatccacattgaggttg

SEQ ID NO: 315489 - DNA, 138 bp, Zea mays
agggcatgcaaggtcacgacgatgcccgttttcatccgggataccgcataggctgtcgcccatgggcaccatagccaggacctcggctcacaaaaaggtcctccgattctcaaaggccgttttgctcggcatcacgta

SEQ ID NO: 315490 - DNA, 63 bp, Zea mays
ccctcaagtaccccatcgagcacgggatcctcagcaactgggacgacatggagaagatctggc

SEQ ID NO: 315491 - DNA, 163 bp, Zea mays
atgtgaatccggtcatcgcatgatgcactccgacccaagtggcgtgcatgttctgcaacatgaccgtcgaaatgggatacggcatggccaattacggtgacagctactacaccgcatgcgctagatgctggctatgcaaatgcgacgacgcgtgctccgccta

SEQ ID NO: 315492 - DNA, 72 bp, Zea mays
acacgcctctgcactgattcgtaatacaagatcgtctgtgaatgtgagaaccatgtggtcgtccactccggc

SEQ ID NO: 315493 - DNA, 185 bp, Zea mays
acccacgcgtccgatcgtcgactgctgctgcgttctgttccgtttcggaaaatgtccttggaaaccttccggttgaaaaccccccggttaaattacggcaacggcaagatcaattcggattaccgctacgacacaaccgaactcttccccccggagaatggcggcggcgcggtgtgtgtggtgcc

SEQ ID NO: 315494 - DNA, 338 bp, Zea mays
atttgtgtcacaatgcaaggccgctgatgctttgccatgtggtgaagtttcagacagatcgattcagctagcttctttccatgattccatccacggagctcagctagctcggcatggacttcagccctcaaagaaagagcgccgaacgcaaccgcggcagcttcgaacacgatgacagtgatgatgacatcagagctgaatccaacgcctctaataagccatctgcgcattcgcacgacagcaccaaatccaagcccaagacgagccatggcggttcaacccgaagtatctccgaaccgacagcgggcaacaataatgctgacgccaccaacttggac

SEQ ID NO: 315495 - DNA, 65 bp, Zea mays
agggccagccgagctcaactggtaagcggatttggccggacatatcgcttacgagcatagctgtc

SEQ ID NO: 315496 - DNA, 128 bp, Zea mays
aggagatcgccgaggtgtacattgagtcgctgccaatgaaagggaagacgagcctaggcgacgccatctaccgtatcatcaccgaagacacgttcgaccccgtggagttcttggacgggatggacctt

SEQ ID NO: 315497 - DNA, 423 bp, Zea mays
cgggccgatgcgagcctccagccggtctcgcgtccgcccacgcgtccgcgcgagcagccaacgatccctcgatgggcgccatggctcgttccgtctccctcgtcgtggcgccgcctctcctcgtctctgtcctcgtctcagccgctgccagtgcgcggaccgtgggggacaccgtgcaggacgcgtgcagcaatcacccagttccccaagatgtgcgtggacagcctcgccgccaagccggagaggcacacggcgacgccgcgcacgctggcggcgctgttcgtggcgatcccggccgagaagggatgcgggatggggatcttcgtgcaccggcacgtgcagcgacagggaggacagggacatagtcaggtgccacgacagcggcgcctgacacgtggaggaggccgtcggccaggtgagcgg

SEQ ID NO: 315498 - DNA, 356 bp, Zea mays
  unsure (1)..(356): unsure at all n locations
cgcgcttggatccccttccatccttgacgccattggcccttccatccttggtgccctccgtccaacggcagcgatcccattccattggccagccatctccgcctcccttccacaagaacacctacgcgcctcccttccatccaccatcttcacgcttggatccccttcgaggcattagagcttgccatctaccttaggtctacaacangcacagattacagcangcccaccatctatttaagaaatcctccttgtgtaacacccgtgggaattccacaggcaaggccgccacccgcccactccaacctcatgcacaggcaaccgtgaagcatccacaagcaacagttaaacgtaat

SEQ ID NO: 315499 - DNA, 231 bp, Zea mays
agatccagcgagcgaacatggcccgtgctctcaccctcagcgtcgtcctcgtcggcatcgcctccgctgtcgtgtccttcgctgcggatgacgcaccggcagcctcaccaaagcattcggcatccacatggtcaaaggcatgcaccacgtcgcgcgacaactccgacaatgtcaccacagggtctttagaggatggtgcagctaccctgacataagattcactgacggagg

SEQ ID NO: 315500 - DNA, 341 bp, Zea mays
acgcacgcgtccagttctagatcgcgaacggccccctttttttttttttttttttttttttttttttttttttttttttttttttttttttttttttttttttttttttttttttttttttgtttttttttttttttttttttttttttttttttttttttttaacccccaaaaaaaagcaattaagccacaaaaataaatgggaaacaaaaaacccatatataaaacacatgaaaaaaatgatggaaaccgttttcaaaacccccacaaaatttgagtttaaaatccaaaaccgtgattcaaaaaaaagggccataaaaaaccggttcacaatgaaggaa

SEQ ID NO: 315501 - DNA, 103 bp, Zea mays
aatgtactgccatctgggcatcaaatgtcaatgtcaatgatctcaccatcatgatcatcatcggcacctcttcgatatcggtcgcattgaccctgctctgaac

SEQ ID NO: 315502 - DNA, 200 bp, Zea mays
tccggctcgaccaagcgtcaagtcccatccatgtgcgctgaaacatactcactaacatgtctgtcttcatcgtaaggatgtagcagtgcctccacagcttcggccacaacatcgatgcgcagcagcacacgaaaggctatgtacagcacgagacgggctaggagcagctcatgatggaccattgggaccacatggagggc

SEQ ID NO: 315503 - DNA, 71 bp, Zea mays
ttccaaaaccttttcccccccttaaacttttcccttttcctggcaagggaaaaaaactttccccggcaaaa

SEQ ID NO: 315504 - DNA, 134 bp, Zea mays
agctcagcctcctgcaccaaccgaacctcgacaagctgccgagctagagcatggactctaatgaacggtttcaggacgactagtatatgcccatcggtacgctggaggaccatctcctgtacgtgcccccaatc

SEQ ID NO: 315505 - DNA, 189 bp, Zea mays
gacccaagcgtcaaggttacttcactgctcatacaaaagctccacagattgtcgagactgatcatgctatctcccgaatgttttcatgtcgattccaatgtggtattcagtacggtacataagctcatcttgtatgttggtcaactgcttgcaccacttagtcgtggactttaaatccgaattcggttc

SEQ ID NO: 315506 - DNA, 190 bp, Zea mays
aatctgagaactttcttattcattctactagtgtggttgttcgttttccgtttcgcctacgctctttctctgtcctctcccggtctccttcccatggcttcttatcggggtctagggggtcctttcttcctagtgtccagggttcttcgcgctcgcctcctctgatcgtcgtcctctttcacgtctccat

SEQ ID NO: 315507 - DNA, 187 bp, Zea mays
tctctccatcgcactcactcatcgttacgtctcactcgtcgtggcttcccttctcctcctcggggtcctcgtcgtcggcgcggtcattgtgcgggatgtaggcgagacctttcatgactcgtgtatcaagacccagttccccactatctgcgtccacagcctcgccgctaatctgtacagccacaat

SEQ ID NO: 315508 - DNA, 231 bp, Zea mays
agaaaaaaaaaaaaaaaaaaaaaaaaaaaaaaaaaaaaaaaaaaaaaagggaggacgctcaaaagagataaaaacttacatactcttgcatgcaacgtcaaaagctcttctggggggtcacccaaaaggatttcactgaccttcgctttaaagcatcttcactggtaataccttggggtacccaaatttaatcccctggcagtacatttccctttcgctaactggcaataa

SEQ ID NO: 315509 - DNA, 190 bp, Zea mays
gcatcgtgcacctcccatgactgatcagtcaagagagttcaccgactgggacgaaagccctccggagcatccggttcacctgcggcaactcatcgtgcggcttctctagggcccatgaccgtcgtcgaaacttgtaatcacacgttaagccccttggatgcaatggtattgctcgctgcagcatccatca

SEQ ID NO: 315510 - DNA, 97 bp, Zea mays
ggggctcccacggtcacctataactccatcagatgggtaatcatctgtaaaatataatataaaaaataaaataaaatatgatataaatagggggggg

SEQ ID NO: 315511 - DNA, 432 bp, Zea mays
accagcatctcgccggagacgctgggcaacatcgcagcgtcgcacgggcaactgcagacgaacgagatcctggccaccatcccggcggcgcaggcgcatggccagctgccggcggacctgccgccggacgtgctgggtaagctccctgacgtgcaaagccagctgctggcgaacattacgcccgagatgatgagcagtctcgccgccgtgcagcagcctgcggctgctggccagcctggggcggcccctgctctcccggccgacatccctcagatccctaagatgcccgacctctctgggctggccaatatctcgttcccagttatgccgtcggagcccatgatgccacacctgccgcccggacttctcgttgtacaggtacgatgtcgccatccctaagttcatcaccaacatggtcgacggcaatggcgc

SEQ ID NO: 315512 - DNA, 359 bp, Zea mays
  unsure (1)..(359): unsure at all n locations
acggacgcgtgggcggacgcgtggggcgaaggtctgggccagcttccagggcgccggcttctggcgcagcccgtcgcagcgcgaggagaggaggtgctagctcctgatcgacccccgccgccacatctctccgtgccggtttcttggacccgatcccgatccgtcgcatgccgcatacaatcctcatagggaaaagatgaacgaactccagcgattggttgatcgatcggctgcagattgctgcgacggcgacgaccggtttcattgattgctcgcgtgtttttcctttttccganatattttcttgcattgggtgngaaggaggaaggaactggtacctctttcaatgttgttcttga

SEQ ID NO: 315513 - DNA, 228 bp, Zea mays
acgcaaacctccagaacatggtgtaggcaatcaaaattgagcaagtcgatagtacaagagtgatgatacgcttaccattgctagcatgacgatcgctaccagtgccaccacaaggaccgcctcggggcgtgggcggtattggcgatcgtatcagcggtcgccgccgtgcgagatttcgtcgcggtgctagccgccgccacatcaggagagctaaccacgatggggttg

SEQ ID NO: 315514 - DNA, 345 bp, Zea mays
  unsure (1)..(345): unsure at all n locations
cacatgctgaataaaaataaaggcagagaggagaggaggaggaggctttgtcatgttgaccgaccggaggagaggagggatggaggtcatgggggaggaggacggtcncgccggctatcgtcatcgccacagccgcaacctcgaaggaggaggaggaggaggtggagtcgcccaagaaagaagcggctctgtcgccggcgccggagcctatcgtcatcgccgccgccttaacctcgaaggacgangaggaggtggaatcgcccaagaaagaagcggctctgtcgccggcgccggcgccggaggccatcgttgccgtatcagcagtggaagacgtggtggcggaca

SEQ ID NO: 315515 - DNA, 133 bp, Zea mays
ccctctcgtgctgttcttcctcaacttcgccatccgttactcgctctcctgcatcgcctgtcacaatatcaacatcattactgtctttactatcttcacggcttacggggttggtcatctattctctcagtcg

SEQ ID NO: 315516 - DNA, 240 bp, Zea mays
attcagtcgtccgttaggtgcgtccaccatcggtgcacagaacggtggccacgatgacgatcaacaacctcctcctcgtcttcgccctggtttctgcggtccttggtgcggcgacggccgccgccaacgcgttcagcagggcgttcagcatctgggtggagatgaaccagcagtgctacgcgctgtacgtccaggactgcgtcagggaccgcggcaacgagcccctgtacaaggagctgt

SEQ ID NO: 315517 - DNA, 197 bp, Zea mays
acgcgtccatactggattacaagcagtacatctagtacattatatgggtgtgcaagtcgcatgacgacatgttcctcaacggctccttcattaatcagtccagatgcggggaagagggggtctaggacatgttcgacctcatctataccaggggttgtcattacgccgtagtcgatcaccatctattctggtgcgct

SEQ ID NO: 315518 - DNA, 445 bp, Zea mays
tccggtcgacaacgcgtccacgggagcacagagctagctagccagccagccagcagccagcttgctcgccgcgcccgtccttcttcctcgcctccgttccattccgtcccgccctccaccgccgccgccgcattcagggatggagatgaagaagatcgcctgcgccgtcctcgtcgccgcctcggcggccaccgtggcgctcgccgcggaggctccggctccggcccccaccagcggctcctccgccgtcgcgcccgccgtcggcgccgccctcggggccgccgtcgcctccttcttcgcctactacattcagtgagccggccggggcgcccggaggccgaggaagagacgaaggggagagagagtgacatggctgcgcgcattccgatgcgtgggcatgttttttgattcgacacaccttttgtcctctttttctttgttccct

SEQ ID NO: 315519 - DNA, 103 bp, Zea mays
attctagatcgcgagcggccggccttttttttttttttttttttttttttttacaagaacagagagcattccaattatatgaatattcatgcacacggggggt

SEQ ID NO: 315520 - DNA, 416 bp, Zea mays
accacgcgtacggggatcaggagagcgccatgctgttttttttctcaccttcacaggaactccgacgtgcaacggcggccttcaccacgaactcctcttctgggctgatgatggtgcggcagagagtcagggtgatggttatttttttggagatgaactgcagcaggtcttgcggtgatttggaggcagcctcacggcagtatggaatggactcccccggaatgatcgctgtggcctgctatttatacactaccggaatttggctctttgccgagtgccaaattctttgtcgagtgttttatttcgggcactcgacaaagagctctttgccgagtgccacgcaaaaaaccctcggtaaaagaaaacactcggcgaaaaagctctttgccgagtgttttatttttgacactcggcaa

SEQ ID NO: 315521 - DNA, 421 bp, Zea mays
  unsure (1)..(421): unsure at all n locations
cgtccacgacgtcgtcattacgctgggcttcctcacggcgatgccgccggatccaccggcccctgctgctccacctgccgccgcctcggagccgaagaaagacaaagcagaatcggatcattcagactcatcgtcatcttcttcggacgacgaagaggacgaagaggaggaaaccgaggagcaatgataagggcatgcaggtgtgttcctaggcttcagatgtggaaggccggccacgcagatgaatgtggcttcatgcacctattctgtaaggagctcaatatgtagaccgtggattaattaatcctttgggggctagctacatggtgtggttgcggttgcggcagtgtaaatttggggtgttcataattttttntttttttgactgtcaacgggggaaaagctccccacctggattttc

SEQ ID NO: 315522 - DNA, 316 bp, Zea mays
aaagcagataagaataaatacctcgctaataaaaagggggggcgatctcttcgatcgatcctggcttacgtatgcatgcagcgtagttcgtcgtcgatcgtatgcactaacgtgcatttcattcgccgtcgttcgagatcctacgtcgtgcaagagatatgcagggcgttagctaaatcgatctcctacaaggagatcttcctttagctggctgaagtgctagcggtgacgcacacataggtcttcctaggaattagttagccagactgaatggtgaaaggcacgttgcctgtgtgcattcattatgctgggaggt

SEQ ID NO: 315523 - DNA, 331 bp, Zea mays
gacccacgcaaccgaggacgtaagaagtcgtctaattcttggatcgaattagacgacttcctcgtatctcacttcattagcacgcgcacgtgtcatcggcaggatctaagcatgtgacttgagtgactcatggtccgattggtaagcgtcttgaaggttcgcgtggtcatgggcatcaaccttgccgaacgcaaagcaagagggagcattacgtatgtcgtccgacagcatgtcacgattacgctgaaagaaggcgtgaccgaaacatgcgtgcacgacatcagggaccaagacaaatatccgattggcatacattttagtcaaacattga

SEQ ID NO: 315524 - DNA, 425 bp, Zea mays
acggccggccagccagcgcgcgagaggacgtacggacgaacagctataggcggaggcgatggacggccaacgacgacagcaatggccgaggtctcgctcgggggctgccgccgcgcctctcctcctcctgctgctcctgtcggtgtccttgggggggcatggtgatcacggcgcggcggctgcgggcgtcgcccctgcagccggcaacggcatgacggagctgcagaagcacgtggcgttcttcgaccgcaaccacgacggcatcatcaccttcgacgagacctatcaatgtctgcgggacgtcggagtcggcgatgtcacggccaaagccagcgccgcgttcataaacggcgccctcggccccaagaccagacctgacaattccaactcctcaagcacggatatctacgtagagaacattcaga

SEQ ID NO: 315525 - DNA, 200 bp, Zea mays
ccacgcatccaatggccgtcgagcgagcgtaccacttgacgtaccgtccactacatctatgcagtcgcgatggcagggtactgaccatatcagttgacgaagtcatgctcggaggcgggtgcttcgctctcagccttgtgcaggccatcgctgtctccttggggcggcatgctcactgaggagctgcggctgtcaacctc

SEQ ID NO: 315526 - DNA, 399 bp, Zea mays
acggcactgcttggtagcgtcatgtctgtccagatccaggtgttggccctgtctactcttcgtcgcctatcgcgaacactacttctcgctatttgctgtcgagggagggtaggaaacgaatggtgttcatgctgtcgcgaaagacactatccttcatgctgataaaggttactgacggaagagactgctcctcgcgattaatacttttcctgatcatcaagacgaaattaggaaggatattcatcagcttaggcacatctactatcatcatcacctgagacacagtatgaatgccaactcggatctgtctgtccgcgacatctggacatgattctaagccaggggaccgtcttgcccagttaacttccttgatgaagattaggtagtccaactacatat

SEQ ID NO: 315527 - DNA, 434 bp, Zea mays
agcacacacacgcaaccagatctcccccaaatccagccgtcggcacctccgcttcaagatgcagatctttgtgaaaaccctgactggcaagactatcaccctcgaggtggagtcgtctgacaccattgacaacgttaaggccaagatccaggacaaggagggcatccccccagaccagcagcggctcatcttcgctggcaaacagcttgaggacgggcgcacgcttgctgactacaacatccagaaggagagcaacctccaacttgtgctccgcctcaagggaggcatgcagatcttcgtgaagaccctgaccggcaagactatcaccctcgaggtggagtcctccgacaccattgacaacgtcaaggccaagatccaggacaaggagggcatccctccagaccagcagcggctcatctttgctgggaagcagc

SEQ ID NO: 315528 - DNA, 436 bp, Zea mays
atcctcccctcccccgtgcgaatgcgtctcctccctcggccggccgctcgtccgctcgctctcccccgcacgaatctccaggtgatggcggcgcgccgctgccactgacgtcgccagcggtggcggcggcgagcgcgcgatcgcgggcgatggccgccgaggccagcatggagcgcgcgcgcgacggccggcgccacgagcaccagcagaagcagcagcggcgcagccaccggcggtcggcttcggcgtccgtgacctcgtccacgaaggaattggcaacaaggtccgggtccgccttcggcttcagcgtctcggtcccaggcggcggcggcggcggcgcaggagtcggagcggcggctgcggcggtccccgcccgtggaggcgcggcgggagcgcgagcggcgtcgggcgcgcgagcagccgcggtgcggggagg

SEQ ID NO: 315529 - DNA, 452 bp, Zea mays
cacgcgtccgaccaagcgtccgagcgcacacacacacaaccagatctcccccaaatccacccgtcggcacctccgcttcaagatgcagatctttgtgaaaaccctgactggcaagactatcaccctcgaggtggagtcgtctgacaccattgacaacgttaaggccaagatccaggacaaggagggcatccccccagaccagcagcggctcatctttgctggcaaacagcttgaggacgggcgcacgcttgctgactacaacatccagaaggagagcaccctccaccttgtgctccgtctcaggggaggcatgcagatctttgtgaaaaccctgaccggcaagactatcaccctcgaggtggagtcctctgacaccattgacaacgtcaaggccaagatccaggacaaggagggcatccctccagaccagcagcggctcatctttgctggga

SEQ ID NO: 315530 - DNA, 258 bp, Zea mays
acccttggccgcaaccatagcaacacggctgcgctgtgtcgactccttctcgcccggcaacatcgatcgcggatgtggcaacagcagaaacttatcagccatggggaagtcggcgtcggggatggtcgtcaccaactagtggatgctcactttccaggagctcaaggcgaagctcaccatccggttcatcacattctccatcaacgatgacatcgaccaagtcgtcgtcgacacgatgtggcaacccggcgacgtcta

SEQ ID NO: 315531 - DNA, 76 bp, Zea mays
accacgcgtccgtgctcatgaacaacctcatcgagcttcggcgccgacaacgactacttgcgcccacatcgacatg

SEQ ID NO: 315532 - DNA, 345 bp, Zea mays
cacgcgtcctctgactcgtgggcggactcgtgggttcgtccagccttctcggtcttctaccccggtggtcatcacatttctcacacttcgcggccacctctcatctcggggtactggtcacgctcctggttaaataatgttgtcttctgcagttgaatttgcctcgtcatctgctcacatcacttcgtcagtttctattcgagatgacgaggtagctgatggataggcgttcatagaagctcttacatacgttaattgtgtgtcgcactgttatggctatcatagatgtgtatagacgattgacaatgataagattgggcacttctcctgttacggccagtactt

SEQ ID NO: 315533 - DNA, 375 bp, Zea mays
tgcaagattggggccttgagatcgttctcgctggagaagatacactactggagggagagagcgtccggcatgagctcgctggcatacttcctgtccaaagacacgatagatcacttcaacacgataatcaagcccatcgtctacctctccatgttttacttcttcaacaacccaaggtcatcgatctgggagaactatgtcgtccttcttgcgctcgtctactgcgtgacggggattggatacaccttcgccatcttcttccagccaagttctgcgcagctgtggtcggcgctccttccggttgttccaaccctgatagcaacccagcaaaaggacaccttcatcgcaaacctgtgctacacaaagtgggctctg

SEQ ID NO: 315534 - DNA, 210 bp, Zea mays
  unsure (1)..(210): unsure at all n locations
acccacgcgaccaaccacgcgtccgcttgatcacatcgctngcttgccgtccacctccctcgccttttgctccactcccgcgtccatcttcgtcctcttcctgttctgtcgcttcgttggggggggtggggctgccttccgagaaatttgccccggggagatcgtccttgccctcttcgacttgcatctctggtacaccgggtttatttt

SEQ ID NO: 315535 - DNA, 355 bp, Zea mays
agcgagctccggccggaacgaaggagtcaacaacctccggtccaaccggcggaaaaaggtccacaaggccggccggacccattccgaacccttccccggccggcggacggccggcgaacccggggccgaagcaacgccccaaaggcaacgcacgcacggttctaacggcccgtttccgttgaaccctcaagcccgggaaccctcgcggccggttccggtcgccccaaaaacttagtacgttcatgaacacgacccgcctggtcaggtctctggaaatgtgcaacctgcatgtgttttgcctgcgagcgtttttcctttggctgtcgaccgatcgtgaatccgtcacgcagcactc

SEQ ID NO: 315536 - DNA, 190 bp, Zea mays
acgcgtccacgagagcggcccccttttttttttttttttattctaacgttttttgtttgtttgtgtacaacaaatgagtacatgtgtaatttttcattacaggtgaaaatggacacggggtgtcgcgaaatagggctcaactcagatttacattttaaacgcgtatatgtgcatcatcacagggacacgc

SEQ ID NO: 315537 - DNA, 293 bp, Zea mays
cggcgagagagattgacgcaggatctgcggcgatcgtcaccgtcggacgctttagggactcctcaacgtccatctcacgatcgacggaggtcacatgtccgtcgaggactatgtcatccctgtcaactgggaagcgggaccctcgacaacggggcccaagtaagctttagagctgaaactactttaagcctacctatgctaactatactagattgcgttggcttccatatagtgcattatacatgcatgcatttggccctgatatcgatttgcgaccacttacctaatacaac

SEQ ID NO: 315538 - DNA, 68 bp, Zea mays
aaaaaaaaaaaaaaaaaaaaaaaaaaaaaaaaaaaaaaaaaaaaaaaaaaaaaaaaaaaaaaaaaaaa

SEQ ID NO: 315539 - DNA, 388 bp, Zea mays
caccggaaaacaagcaacttcaacaacaaaagccaaaacaacttgcaattattaattgccttccaaaccctaagggtccaccaataagggctgaaccaattgcacccggtgcacgcattggttcacaatctgatgcagctacaatcataaaagcggctcattcaaaaggtgcaatctacattaggcctggggaaataatcccgaattacctgaaaccactagcaccaaaaccactttcctcggtaccaccgatgaacccagggcagctcagacgatttggtgattctgctgtcaccaaggatgcaatcttcggttcttcggatggcacggacgatgacgacgaagaagacactgatgacgaggaagacgacgagctgactgacaacga

SEQ ID NO: 315540 - DNA, 302 bp, Zea mays
aatccgaggacgcctccggaggactctccccattccactcactatctacatcgatctcctctaacgtcacgttccgtggaccattatggcgaagggctcacagctggtccaccgtgggagtcatggcgatgctgtatgtcatctgctccgccctcgtgtcgggtacggctgtcagagccgtgctggcgtcagtcgcatcgtaggcgccgtcctaagcgtccaccagcacttccgctggtgcgggtgccacggccgtaagcggagcggcctacgcctctgtgcccactgccgggggctctctc

SEQ ID NO: 315541 - DNA, 352 bp, Zea mays
gcgtccgcacacacgtccgctggagctccgccccggcgatcacccgccgggaacgtagcgcccggctccacagccgcgccattcgagctgctgctcgcgcgcggctggttcttctcggggggattttctttttgcgggcaccctccgctccccctcaccgccctgccgtcagccgtctcgttttcggattcgtttgctccggcggtggccgacctgccgtgcggggcgcggtgatgccggaggtggggcagtacgggtacaagaagaccgacggcatctgcgacagcgtgtgcggcgagcctgtgttcacgacagctctgacgatgtcaaggctacagtgcgctctccgggg

SEQ ID NO: 315542 - DNA, 179 bp, Zea mays
agcacacgtaataatagctagtctcatcatccgttgttttatcttgcttatcttcatgcgtgccattagttttctgttcaattccaacgacgctcgctttcgttccggagggataaattacgtcacaattgtcacaacttaggtctcctacttcttctttttgtacacagtatcttaaa

SEQ ID NO: 315543 - DNA, 337 bp, Zea mays
acgcatccgaccacgcgtccgggccgctagtctgatgcgcatctgcacctacaccaacatcgtggataacacctccattgcatcgagcggatctgtgggcctgttgttagtgcggggctgggcccagcgcgctgatgccaatgccacctccagcgtctccgatctaggcggatcagctagcggtggcgccgctgcgcttgtggcgctggatgaccatctcgatgtcagattgtcaattgcgtcccgttatctgatcatgaacccttgactgggcatgaccatcgtcgactagttcatccatcttcagggactatctcattgttcagcaccattccct

SEQ ID NO: 315544 - DNA, 432 bp, Zea mays
  unsure (1)..(432): unsure at all n locations
atgcataccaggggagacttcacctgtgacgcttcaggggctcgtgtgggggggggatctgcctttaaaaaggggttgatcccccgggcagtagacatgcctcgctcctcttacgaccaccgcgccctttcgccttccgggcccccagatggggtgcgccggtgttctctggagggatccgtgtcaaggtcgtctcttccggcgacttcactgtcggagagcgtgcgctcgtggtggtgtcgccgatcttgtcttcttcctgccaccgttggaggggtgcaacccaatgggggttggcatccttccaccaccattcggcttcaaggattttcatcatgcagcccggctgcagtcccccgtcngtggtcatccagaaggatgactaccagccttgtggtggggagaagcaaaccgggctgtggcctccctcct

SEQ ID NO: 315545 - DNA, 282 bp, Zea mays
ggccggccccttggccggccccttggcctcctcaaggcggcggtaacccaaccccaaccaaggcagcgcaatcaaggcctgccgctgaggagacgacgacgactccttcgtcaggcggcgggggttacggcggtgcaaccggcaaggcttcctcaggcggcggcgggctggaccccgacggcgacccagaggttgggctgaacgggaaggcgatcgaggagatcgtgaacgagcacaacgtgttccgcgccaaggagcacgtgcctcggctggtgtggaacg

SEQ ID NO: 315546 - DNA, 370 bp, Zea mays
  unsure (1)..(370): unsure at all n locations
cgtccgaaccaagncgccttcacgccaccctcaccaatgtaaagttacagggaattaccgacattcacaaggaggaaaatgaactcaactggcagtgaactctagtccagcgaatgactatcgcagtaaacggggcggctcccctacagtttcaaagctgagatcaccgtcaaggcaactcaagaccccttcaataagcatcacaaacatcaattcatcgccttgcatttaaaaaatcctgaccagggaaacacccttgcgtctcccactttaacgtgctgtcagaaaacccccctttcgcaaccggggataactcatacatggcccaccaggtttcccctcccaaaagcttgtacaccgtaaaggtcaa

SEQ ID NO: 315547 - DNA, 267 bp, Zea mays
ttcttgtctctttttctctctctgtcctgcgcgccgggcagatacgatcgcctacacctccggtttcttgtgtgggtggtgatcggtgaaggaaggggaacttaagatcaccctcttcgggcttgggaggcaatctcagaagacattcaggcctaagaacgatgcaccgtctggcaacaaggctgtgcacctgacgaatcacattcgtctaaccttatgaagccggactttgaggtatgctgtccggttgccaccaggggacgatct

SEQ ID NO: 315548 - DNA, 428 bp, Zea mays
  unsure (1)..(428): unsure at all n locations
accacgcgtccgcgcgcctctgcctgtctggccatagccatccacagccacgcaagggcgccacgccgcaggcttttgcatgcccccgcgcgtggaaattcgaatgcgcagagcccaggcgccgcggctccgtgtcggcggcgttgcccagcggtccgcctccgcctccgcttccctgtagcacgccgccgtgcgcctggaaatattcattggcattggcaatgcaaccacgatgacgccctgcctttttgacgcccccgcatctgctgctggcgcctggctggctgcttcttcacaccacatctcgcccggccccggcctatctagttcccatgcgtgtagagatgttgttactgctcccgctggcccatgggccggcatggaccatggggatgcanatgcaattgtggccagcgatgcgtgcgtac

SEQ ID NO: 315549 - DNA, 367 bp, Zea mays
cagcagcctccaataaaagccagcacatccaaactaagaaccgagagacctcaggcctcaggcaagccgaccgccgacgtaccaccgcgccaacccgagagaaagagggggaggatcatgacgatcctcaactccgcgctcctcgtagtcgccgtctcggtcatcgcagtgctggaccccaacgatgctgccgtcgccggtgaccaagacgactccgactcatccgtatcagcaggtacccgtcacaggtgcaccgaggcgtctgccgcaagaacaggttcaggatcagggctggcagcacactatgtcctccaaactctcacgctggatttagtcgcgatcgtcgtcttgctattggctcagttcc

SEQ ID NO: 315550 - DNA, 357 bp, Zea mays
cgtccgaccatattatagtgctagaatggcttgttacctagaggccgttgatctaggtgtttggaaagtcactcgtgacgggatgaaacctctcaagaatcccgaaaaacccacacgagtgaggaaaaagaaattcatttaaatgctagagccaaaaattgcttgtatgaatctctcagcatggatatttttaatcaagtatttaccttgagaactgctaatgaagaagctaatttatttaattaataaagatgaataaaacgaagatacaaccagttgcacttcaggaagatgtgccataacttgacaaggctcccgaaggtgaccacacaaaaaaaaagggggggccgcctcaaa

SEQ ID NO: 315551 - DNA, 364 bp, Zea mays
aaaactgcgtacaccatgtccatcagaaatactagttccaattccaacacatgcgctgtgcatcaaggtcaacaccgggagttttttcgcacggtaatttgaaaatgaaattgtggtggaaactgtgtaatccgccaatccggtgcggatctgcacagagaaactctggtggctgctgtgactaatgaaaagtggttattctggcttggccgttgtccatcgagggagatgtaatacctgatcagccctgaaatcttaaagggctcccttctttcctcatgctgggacaacatttatttacatcgggtgtgtacttggagttctctccatcaccgaatatatgtcggcgtgattgctggtatct

SEQ ID NO: 315552 - DNA, 340 bp, Zea mays
gtcgtattacgatgactactaataagcccctcctcctcctcgccctggcgtccgcgctccttggtgctgcaccggccgccgcgaacgcgcccggcagtgcgttcaggaggggggtggcgatgaatcatcagagctaggcgctgtacgcgcacaagtccctcggggacgggggcaaggagcccctggacaagaagctgtcggacgcggagaataagaaggtcacgtacgttgtggaccccagcggcaatggcgactacaccaagatcaccgccgggctggaggatatcccggtgaccaacaccaagcccctgattctggatgtcaagccctgcgctcagtt

SEQ ID NO: 315553 - DNA, 361 bp, Zea mays
  unsure (1)..(361): unsure at all n locations
gctgttgangaaaccccgacgccaagcaccttccccaccggagcttcgctgacctgctgtccacgtttctcctcgctgtgcttcatcgtgatggtgtggtgaggtgaggtcgtctacccccttccctcgtctatctcgctctcgctccgccccgccgtagttagctgctgcgcgctcgccaccatggccagtgccggctccctgcaacgcagaccgcgtgggggctgggcgcatgtgtgttcttgctcctagccgccgatgcccgctccggcgagcagcagccccaccgcgcgtcnctggcgccactggccgtggtagcagccatggcattgctctgcgcgcccttgcacctggccaaaaa

SEQ ID NO: 315554 - DNA, 150 bp, Zea mays
agactgcaatcatcgtcattacttaaaatacgatcggagccatgtaggaaaagactacggggatgcacatgttccaggtgcaccaggcggatgcgtagctgctgttcttggttgtgttggctccgttacccgggtcacccaggggacctc

SEQ ID NO: 315555 - DNA, 354 bp, Zea mays
ttcgcccgtcgacccacgcgaccgaggtcgcgtggggtcacttagtctgtagtcaacgatgatgtgctcgagagctcccttaaattcgtcatcattggtactgatggagtctgagatgttgtcactaattaggagtctgtttgcacggtcaaccctattcatgagccgcaggatgtattactgaagcttctcaaagaagcgtcaccattgggagcctctgaacagatcaccgttgtacatcgtcggcgtcctatatcgagctacgggtcagtactgaagctgaaattctgagacgaccagtgatcagtgctccaaagtagttgcagctcggattgctcatgcatctgtgttctt

SEQ ID NO: 315556 - DNA, 403 bp, Zea mays
ttcgcccgtcgacccacgcgaccgaggcagcgtggctaaataattaagtcgaaaatgaacaacgatgcaaacaacagtagcagcaacacggcgtgtgacgctggtaactgctcggtctccgcatgctgggttctggttggtgttgctcaagcggtatttggagttggtgcctgctgatgaaaaatatcccggctgccgcggatggcacggccgtggacgatggttaaccgcctcagcattgggcaaccccggtgagcttgcatgaggcttgccgcggcgcatccgagatgcacacccagcgtggcctacgacaactgcatggcgtcgctgggcgccgacccgcacatcacggaggccggcagcaataacatgcacgggctggcggtgctggccaccaggatgg

SEQ ID NO: 315557 - DNA, 84 bp, Zea mays
cggtccggcatcacgggtgccccacgcgtccggttacacttcatggcttcaacgacagcaggcatcagacgctgtctcccctgc

SEQ ID NO: 315558 - DNA, 108 bp, Zea mays
cgccctccgctgcggcaaagtcctggggctgccgctgccgccgtcctacgcccccgcgcgctaagacgacgaaagccttcgtttctcctcgtggtctgaccatccaat

SEQ ID NO: 315559 - DNA, 387 bp, Zea mays
acctcctcctcgacgaagttgaacaagccggccggcggaacgggaaacccgcggtgggtgctaaatggctccggcaaccggagggcccctttggtataatgatctcggtaataaatgcaaggccttaggtcacggccatttccttgatcgattattttcgcggaactatttatgcagctcaaaatttatactactatatatacctacggaaagcaacaattcaaaccatatactggagtttgtttaaggtatcatcgagcagaaatatattcttgttattcgtagcattatatttgtattttattacacgttttgataataatcagtaaacatcccggaattcggcttcagctcacacatgtaaaacatagaaaacgtttgtgtgca

SEQ ID NO: 315560 - DNA, 312 bp, Zea mays
tctaaagtgactcgtggtaagtacaaggccggttacgttttgcaaggacttgaaggacaacaacctcgtcacgcccttctccgacaacaattacttgccaaggggctgcaacttcgaaggaaaactcctccccgcaagcaaaaccccaaaaaggacttgtccgtaaccaggcaagaacaatcaaaaccaccccgttgaggtggtgttgacgccggactccgacgagagctcgccgaagccgccgccgcacgcggaccaggactcgcccggaggctgcgagtcggggcgccgcagcacggtgccgttcaaggt

SEQ ID NO: 315561 - DNA, 295 bp, Zea mays
cgcgtccgcccacacgtccgctctcttcctgatggcggcggctaccacatattcggcggcgcggtgggtgcggacccagcggttgtgggtgctgccccggcggcctgcagccccggcggctcgcggccccgagccccggcctcggtggcggcacggacgcagaggctccggcctagcgcaagcgcatggcgcacagccgcacccccgacagcgcgggggccagtttactcggcagcccgtccgtgagtgcgcggactcctgggcgcacaggcgcaggtacaacctcaagcgcaca

SEQ ID NO: 315562 - DNA, 454 bp, Zea mays
acggtccgtcgattccgggtggccccacgcgtccgcttagagtggtccaccatggcgcagcgagcggtggccacgatgacgactaataagcccctcctcctcctcgccctggcgtccgcgctccttggtgcggcgccggccgccgcgaacgcgcccggcggggcgttcagcaactgggtggcgatgaaccagcagagctacgcgctgtacgcgcagaagtccgtcggggacgggggcaaggagcccctggacaagaagctgtcggaggcggagaagaagaaggtcacgtacgtggtggaccccagcggcaagggcgactacaccaacatcaccgcggcgctggaggatatcccggtgagcaacaccaagcgcgtgatcctggatctcaagcccggcgctcagttccgcgagaagctgttcctgaacatcagcaagccgttcatcacgttccggt

SEQ ID NO: 315563 - DNA, 293 bp, Zea mays
cacctacgagcataccctcacatccgctctggtgaggacgagcggccgcatgaaggtgacgcccgggtccgcaccaccgcagatgcgcaggaaaccgtagtgctccgcgtggacaaagccgccgggttaccacggtcatggggcatcaacatcgagaaatcggacgtgtccgctatacacctgacgctcaggccgtcccacaaggcgatcatgttcgacacggccactactgggccgtcgctgacgccgctgcccaatgtgaactgtcgcctcgatctccgaaacaagcatgt

SEQ ID NO: 315564 - DNA, 391 bp, Zea mays
gacgcgtgggcggacgcgtgggcgcgagcggccccctttttttttttttttaaacaagatgaaaaccccgatgaattatataattataaaggctagtttgacaacttcattttctcaagtgaatcctattttttcaagagaaaatgaattaaattcccttgaaaaaataaaacctcttagaaaaaataaggttgtgaaactagccctattaataaatttatgcagaatgcaacatcggtttccaccattttcctctttacagaatactactgctccgtgtatacggagaaactacatttcacggagtagtaaataaacagggattaattagcgccgtgtgcatgcatgcatacggcgttgggctggccgacatgatcataacaattaatta

SEQ ID NO: 315565 - DNA, 101 bp, Zea mays
attatggtgtgtacatttttttagtcgatattcttgttcttgtttgtgttgtagaaatggttggatatgctaattttcaatagccttgagggttcgtggta

SEQ ID NO: 315566 - DNA, 354 bp, Zea mays
  unsure (1)..(354): unsure at all n locations
agacggcgggtccgggtcgtcgtacacggcgcagatggagcggatcaggcgggccgcgcagcccagcccggattacagcaccgactaccccgtctccatcccggagttcggccacccgtcgcccgcgagcagcgccagctcagtcgagcgggatgaccggcggcatcgtggagggcgccggtgagtacgtgatcgacaggtgtgagcgtgatgtgctgacgactaattgactcctgcgcatccctgtcacgtgtgtatagcatatagtcgtcttgctgtaaaaggttatggcatactcccctgtttaaaatgtacaggttaaatttggcttacttcaacaanggattatataat

SEQ ID NO: 315567 - DNA, 195 bp, Zea mays
cggacgcgtgggaaaatcatcaaaaaaagaaaaaaaaaaaacaaataaagaaaaaaaaaaaaaaacaaaaaaaaaaaaaaaaacaaaaaaaaaaatctccaacacaagggttgacctcaacgatgttccacgattaggggccacctcaatccaacttcataacccttctaatctttcacggaacttcatgtcctc

SEQ ID NO: 315568 - DNA, 363 bp, Zea mays
acggacgcgtgggcggacgcgtgggcgaacgcaagtaagagaggctcgagctcatccaggccaagggcggccagtacgctgagtcgctcaccaagtacgccggcgcgctcaactgccgcgtccgtaggaagtgctagtgcgtgtgcatcactaggctgcagctttcatcattggagatcgatcgcaacagtgcacggttgtgttgtagataaatcgtgtgtttggaatgctgcccgtacatactggacaactcgaacagtgcttgcctttgcctgctggccagcatcaccattggcgatggcgcagcctgcggcgggtgctacgaggtgcggtgcgtggacagccccagcgggtgcaagccca

SEQ ID NO: 315569 - DNA, 347 bp, Zea mays
acgcgtgccactgctgtaactcaacctgccttcataccaccatcaccagtatagtgtcccgcccttttctgacattcgcagcgtggacaggcgttgctgcgcgaacggctcctgtcgggggagtagcttcggcgtcagcggatcagtccgcttctgtgcccctgctgggagcggctctctcaccgacctcggcggctacgtcatccacgagccgcgtctactgcgacagactgcggcgccgggtgtcggatcacctgtcaccggaatacattctgtccccggcggtgaggcttacgtgcatgcacttcggcttcggctcgatcgaccactctatcgtcggggtgccc

SEQ ID NO: 315570 - DNA, 331 bp, Zea mays
acatgcgtccggaagggcgctacacgacgaagtcatgcagcacgatgtagccgccactgaatctgaacatatgcgtgcgtgtaaaaccgataagaatcgaggaaaaacgggtttgacctacgggcctcatgtgtcagcgacaagagcatgtgaggcggttgcctcagcgcgatacggcgatggcagggaaaacgatgtacgcacaatcgttgcatgactacatgacatgaggtaagactgatggacgactcgacgtagacagttggtacacaaagggagtagtccacagctcgacgaggtagtcagggtatcagatgcaagcgacttgctg

SEQ ID NO: 315571 - DNA, 427 bp, Zea mays
aggaggcacccgaagcagcgcacagcaacagagcacacgccgcacaccgccgccgcctccgcagcagcagcagcaatggcgcgcgccggcgctctctgcctggtgctgctctgcctcgtggccgtgcactcagccacggcgcagaagtccacgacagccccggccgccgcgccggccgccgccaccaccccgccggcgaccccgaccaagaagtcgcccgcgcccgccgccgcgccgcccaccaccccggccaccctggccccggccgccgcgccgcccaccacgccggccacccccgcgcccgccgctgcgccgcccactacccctgccaccctggcacccgccgcggggccgcccaagtccgcccccaaagggtcccctcccggccccgtcgccaaaggccaaggccaccccgccggtggccgaa

SEQ ID NO: 315572 - DNA, 347 bp, Zea mays
gacaccgtaacagtgctaaaaatgcatgtggacgctttcaacaatcgcgtgaagcgccgctcagaggctcgccacggacgaggtcaagacggccgccactcacgaggcgcggcgggcgctgaacctctgtaatacctactacctgtacgccgccgacaaactcagctcctgcaactcgcgccatcaagtcttccgctcactctctcaccatcctcgccacgataaccatgctggttcatgacacgcaaaactgcaactaagaattctcgaaagccgtctccaggaaccccatggctgaccacaacaggtcgctcatcgtgatatccgatatctgacacacgcgctcc

SEQ ID NO: 315573 - DNA, 250 bp, Zea mays
cacgcgtctaactctcttccctctatcgggtttcgtcacgtgtgttctctcgttgtctaatgccgccatctacacttctctacttaatcatcgacatggctgtctcgcggcacgagaccggtgtacagcatggggagctcgatgaccatcgtggcgtcctccctgctccgccgctccctcctcctcctggctttcgcggcgaccgccgatgcttgcgttttcctttagctgtttggcgaggaccaattct

SEQ ID NO: 315574 - DNA, 241 bp, Zea mays
gttgatgggtgcttcattaattagcaagaccgatgaactagcaaggcttcttgcagaagcacttgcgcgtggccacgacctgcttgcactcgccaccgggaaagctctccttcatgcacacatcggtcttgctaattgttgatgggtgcttcattaatttgatttgatgggtctcatggctacgagaaacaaaactacttttgataaaatgcagggcatgaaaagcgtttctgcagtcctt

SEQ ID NO: 315575 - DNA, 139 bp, Zea mays
gcacacgatgtgttcccctgctaatgctcggtctcagtatgctggttctgggtgctatggcacacgtcgtattgaaattgttgagtgctgatgattatttctctgcgtccattgcaggcacggcatttagcaatcgtga

SEQ ID NO: 315576 - DNA, 417 bp, Zea mays
ctccaacggtgaaatctccttcaccaccatcacctccaccgatgattaaatcaccgccaccaccggtgccggtgaggtcacctccatcgtcagtgaaatcaccgcctccttcaccactgttaagttcgccgccgccaccagcgcccgtgaggtcacctccaccgctaacgaaattatcacctcctccaccaccgataaggtcgccacccccaccacaagcaaactcacctcctccatcagctccaataagctcacctcctcctccgatgcaatcccctccaccgcctgctccagtcagctcaccaccaccacctataaaatcaccaccacctgtaaaatcacctcctccaccggctccagttagctcaccaccgcctcctgtgaaatactcttcaccacctactccagtcaactcac

SEQ ID NO: 315577 - DNA, 307 bp, Zea mays
acgcgtgccagtcttcgtctcaagctccgtcgttatttgtaatctgaagcttacatgaagatttccgtggatcatggccgggttggcatgcctcttgactgctctgggtggctttggggatcatccttgcgtagcgcgatctccagacgcgtcgattcgtcggtcgtcctacgacttggcgcggggattcttaggacgatcgtgggtagcagatttgtgacccccatctggcactatgagctaactctctgcgttacagatgccagcgtatcgctcgagctgggtgtgtccgacatcagacacgttc

SEQ ID NO: 315578 - DNA, 431 bp, Zea mays
attcccgggccacacccacgcggtcgaacaggcatacaagcacacatacctcgcgagcaacaatgggatccaggtcatccattctacatgcaaccacgaagctggatgcactgtctgcggatgtgttgtgaactagacggctcatattcgacgttggcaacggatggaagcatgtacacgtgcatgacagacaaaccgcagctgccatgggccatcatccgcatcagtgtacatgatcgtgtacctgtagctgcttgctgacagtggccgtcgccgcgacagtgaacctggtgcgcgccatcggggacttcttcctctcacgcaccatgggccccatgttcgccatcatcggcgtcatcgtcgcccccatcctcgtgatgatcccgatgatcatttaccggaagcgggaccccgtgaaacctcgcgctcct

SEQ ID NO: 315579 - DNA, 214 bp, Zea mays
acgcgtccactctacctgaactacacaacaatgttgttgctgctgctgttgtacaagatctttttttgtgctcgcttgtgatgataatatgcatggcaagctccaaaatgtggtttccaatttatgtatagcaaggggttacaaaagttggtaatcataatgcttgtgccctgtagtatcatactattaccacgccaacttaatttcttgtttt

SEQ ID NO: 315580 - DNA, 92 bp, Zea mays
accggcgggggcatccgctgcctcctccttcggcccgtcggctccttctttgcttttgtgagctccctgtgtcgctgggtgtgtgtgctgcc

SEQ ID NO: 315581 - DNA, 308 bp, Zea mays
cacgcgtcgatcctccgtgaaagccgacgtcgacgtggacgccaacaacgaggccgagcaatggatgcgctcggagccggggacctccatgtcgccgtcatcggaagccggcgacaacacggtcatcagtacactcaacgatgtccccggcgcgcgccttcgcggggcacacgctcgaggatgccgcctcggcggcaggcgccgtcccggcggtctcgtctcgttcggatgctccatagcgtatgaaggtcgctcccgctgctggaccctcggtgctggcggtcgatgaagcaggccgcggcgtgccg

SEQ ID NO: 315582 - DNA, 387 bp, Zea mays
gaattagccggcacttaggccaagaatggcacgcctcgccggcgtggcagtggccctagcagccatcgccgcggtggtcggcgcccacgagacgtactacgcgtccgtggagaaccgccttccggcgctgggcatgaagctggcgtgccacgcgatgggcgggttcctgacggagctcagcgtggtgccgcgcggccgtgtgccccacggcagggccgggcgccgcgtcgccgagctgctggtggagcgcggccagcacggctgggttcgctgcaactgggcgtacgcgggcaactacgtggccgggatcacggtgctggactcgcggtggcccgaggctgggcggtgccaggaccccgccggcgaaagcctgtgccgcgtcgtcct

SEQ ID NO: 315583 - DNA, 83 bp, Zea mays
cacatgcatgtatacacatcttgtaacgctgaattttgattcatggcacactgtactggacgaggatcatttttttcttgcct

SEQ ID NO: 315584 - DNA, 314 bp, Zea mays
ccacgcgtccgacttatcttgttactgtactcaaggttcattattttattcatgtatgcagtatattcacattaaaaaaaaaaaaaaaaaaaaaaaaaaaaaaaaaaaaaaaaaaaaaagataaaaaaaaagataagggaggcagctcaaacagataaaatactagattgagcgaaaatgcaacttaaatggcgctcccctctaggcacgtactgtcaagtccagtcgccgtcgtttaacctggtacggccctgagaatcccttgctgttcttcaactgactcgtcttgttagaaaccccctttccgctggccg

SEQ ID NO: 315585 - DNA, 310 bp, Zea mays
ttccgggcaaaccacgcggtcaaagaaccaagaaagcagggtgtgggcgaagagaccccagccagtcgatcgttcaagaacattaccagcttaccaacatcagcagcatcagtctcacccgttcgatgacatggtccgcctcggcgccggcgccgtgttggcgctcctagtggcggtcgctgcggtggccgcgttcctcgcggtgccggcctcgtgcgacgtccggggagctgaacgcgatggggttgctggctgagaagggcggcagcatggcgggcccgcagaagtgctcgggctctgtgggcgagtg

SEQ ID NO: 315586 - DNA, 274 bp, Zea mays
aatatatactttcggtgtaagacgagccgccgcatctaggcggctactgcacagtcagcagaatgaacccatttctgaaagccttgggacgacacaggtttgttttgggtcagccacacgtttcacttgtcgctgtccctactttgatcccggagtactgatagcttgtgttctgttcacgattgattcaggtgtcattcctttgttttgcgtgttttttttcgtcctccttttaacgctgagccgatatatatgtactgggtctcctccgaat

SEQ ID NO: 315587 - DNA, 205 bp, Zea mays
cgcgtccagtggaggcggtgtccaatgcctgtggaacgctgtgtactaaacggacatcagccccaggtgttcatccactccgttcactcctctgtgctctccgcggtcaggaacttcggcaacttcatgaaggtgctcatcatccaggacaagatcagcagagctctgagtccgtcggtggatgacatcaccaagtaggcagaca

SEQ ID NO: 315588 - DNA, 395 bp, Zea mays
acgccctttttttattttttttctcacaatgggaaaaaaacattctgaagtaaacaactttttggaccacagttccaccgtccagtgactactctcttatgtactctgatgaatgtctgactaatgatagatggtgcaatgctgcatagggcacaaatccaagaacacctcgtatacaacaacctaataacgaatcagccaaaaaaaaattaaccagaagaccttattagtcaatcttgaggtcgttgcacgatcaaagattgggcgactctctctttgattcttaactctttcttgttagtcaatctttaggttgcaccatccaatgaatgctgacgatgtatatgtacgtggcggttaatggatgcccttgggccgtcttcgcatgcatgggg

SEQ ID NO: 315589 - DNA, 189 bp, Zea mays
ggcactgcggcgtccgggcgatctccggtcacctacactgcattggccgcgacgacaccggtcttcctccggggcgatcggcgggtggtagcacgtgcgtactgggagttcttcatgagctggtattcccatatgctcctgtcgcacggcgaccgcatcctgtcggtggtcacggtcgtcttcaccggg

SEQ ID NO: 315590 - DNA, 213 bp, Zea mays
tggctctctgtggcctccgccgctgtggtccgtgccgtcgccgggcgccttgtggggttgttcttcctgctggtcgctcgcttttgctccttctcgggggtgctcggggccggcgccgcctcgttcctcgctttggtgggcgtcctctccgtgtgcgcctctttcctgtctgtctctggcggtccgttctctgtgcgggtctgccctcccgtg

SEQ ID NO: 315591 - DNA, 204 bp, Zea mays
agacccgttttccctccatggggttctgataatacaacatcctggggcttattgaatgaatgttatctcggttactaaatgattgccatggattattcgtcaaaaaaaaaaaaaaaaaaaaaaaaaaaaaaaaaaaaaaaaaaaaaaaaaaaaaaaaaaaaaaaaaggaagaaaaacaaaaggaataaaaacttaaaataaaca

SEQ ID NO: 315592 - DNA, 278 bp, Zea mays
gcacacgttgagatggttgtggctttggtgttcttggtcctatgcttcatggtgcggtcctccgactctcgccccatgcatgtccatcactgtcacttagtgcacagggggtgctggtcgctaatctgatatctgtatggcgggcctaccggctgcctgtcgcgactatattcgtgtgctgctgcgggtacaccgacgttaacaatccccccttcaagagcatgggcgcatgtggcaatatccgcaatcttcaaggattgtctgggttgtgggtcctg

SEQ ID NO: 315593 - DNA, 417 bp, Zea mays
ggatcgcgagcggcgcacctttttttttttttttgacagcgccatttttggcgttttagaacctggctctgagtaagtgccatttcagcttcagctcataacgtcagacggtacgcgacgcaacctacccaccaatttcttcttcttcttcttcagtgttaatttattagaatcatcatggtggaatgaacacaagaaagaacgggacggactagcagtaactaaagaagcagcagggattgaatcgatccttctccttgttcttgtttccgtccgccgggcggtctaggcctatttacaaaaatattacagcagcagcagccgaatagctgaccatccaatccaattcataggtcctttgtgctggcggcgccgctgccttcgtcgacgccgcgcttgccgtagcaatgaaagaag

SEQ ID NO: 315594 - DNA, 416 bp, Zea mays
  unsure (1)..(416): unsure at all n locations
acccacgcgtccgatcagctcagttgaatcgccacgcccaaggcacacgtatgtctcgcgcgctcgcgcttgcgatcctcctcctggccgccgccgccgcggtggcgccgctggcctccgccggcaccgangagttcaccagcgtcgggtccagcggcggcaagatgttcgacagggcggtcggagccgatcccgacccgtccccggccggcggactgccggccgacccggcgcccgacgcacgcccctaaggccacgcacgcaccgtcgtacggccccgtttccgtgtacgcttcacgcgctggtactctcgccgcccgtttccgtcgcccctaagacgtagtatgttcatgaacacgacgcgccttgtacatgtctctggaatgtgcagcctgcatgtgttntgcttgcgagcg

SEQ ID NO: 315595 - DNA, 246 bp, Zea mays
  unsure (1)..(246): unsure at all n locations
ccggttgcatccaccaaatggtggatattggatattgaaaagttggggtcacaatttttgttcccatagtcgtcacgattagccatctgtcaaagtactccctctcttcgttgaataaggtctattgtcatttttatcacacactgcggtatttagatgaataatacacaagcatttgaggattcaaatagaccaatcctgtgcaaatgttcgtactctgagaatatagcaccagagtgntacatc

SEQ ID NO: 315596 - DNA, 398 bp, Zea mays
aggttctagatcgcgagcggctgccctttttttttttttttggctgtgttcctcgtgctgttgctatgcccttcatttccccatccctgcggaacgttctgatccttatgttttgattgcgaaatgtgttcggctcgactgaaacggacatgcgatcttacattcccaatgcaatgctgtggctgagatgggttcatctggcctccgcaaataagccaggattgccgttgttccttgcatgaatatcagtcgattcagcaacaactctgacaaataattttcaaagagaatgaatgatcatctcatatatgagttagacaacagggatatgcaaacgagaagaatgacaacttggggactagccaaagaaataaatggcgcctcaaataacttataag

SEQ ID NO: 315597 - DNA, 185 bp, Zea mays
gcgtccgcccacgcatccgcccacccttcggccaagccttcgggggcaaaatgcctccgtaacttcggaggctcacaacattggaaaatctgacatggaccggtcttagcctcgcggaaaaaaattgtaacttttgtaagcaagagccacttctttgaatatatgatcctaacaacgctgccctt

SEQ ID NO: 315598 - DNA, 267 bp, Zea mays
ccaacgcatccgcccacgcgtccggttctagatcgcacggccgccctttttttttttttttttttttttttttttttttttttttttttttttttttttttttttttttttttttttttacaaaatgcagggcttttgcttccaagaaaacaagggcaccataacacaaaaccgttcccaacacacaagcaaggattctacgacccacgggcatgcacgagccgatgcgcccctgcaactttcaagtgcaaccgccggggctgtttc

SEQ ID NO: 315599 - DNA, 350 bp, Zea mays
gcgggtcgacacaagcctctagagtgagtcgcactaagcaaccagcttgctcgaccgcgcccgtcattctgcgacaccgccgttccattccgtcgcgccctccaacggcactcgggcagtcagggatggagatgaagaagatcaccggccccgtcctcgtgcccaccgcggaggtcaccggtacccacgccgccagaagcgccaatccgagcctcatgacctggaccgccatcgtcacgatcgtcgtctgcgcctccctctcgaccgacgtctgctacatctgcttctagtacatgcagtcaacggcatgctgcgacgcgtggcccaagctcaaagcagcgtgacagata

SEQ ID NO: 315600 - DNA, 390 bp, Zea mays
  unsure (1)..(390): unsure at all n locations
tcgcctcccgctctacctcctacgatccgcagatacacaggcccgcgcttcccctcctctcgcagttctcgcgtccactgtaccggagctccaccacggcctccggaaagaaacagatgaaagacagcgacggcgagggcaccggcggtggcgtcgcccgctcgcacccctccaatctcccgcttccgactccacagtccgacccgaacctccagttctcgggtgggacggacgatgagtcctcgagccggaatagcagctcctctgccaccggcggcgcgagccccgggtactactcggactacccgtctagcttcagcggcgagtgttcgccgtacaacatgtcnccctggaaccagaccatggcgttcccctggtcgcaacacaacg

SEQ ID NO: 315601 - DNA, 236 bp, Zea mays
aaacactgtcaaaccaaaataattttaccaaggaaaacggaaacggaaccaagaaggacaacaacaacaataacatcttaaccgttgaattgccccaaaggttctctccaaccccaaacctgtcttcatcaataaagggtcccgcttcattgggaaaccaaacccctaccgtacgtgccttcggaagggtaaagcgacaggcagaactaactacaccggcaaaaccaacgagcatc

SEQ ID NO: 315602 - DNA, 425 bp, Zea mays
  unsure (1)..(425): unsure at all n locations
tcgcccaagccttcgccgacgccttggcccgggcctcccctttccgcaacaacaaattcaaccaagcaaccaaaatgttcccccttaaaactgccggggccctttaaaatccccgcctttgcggccctaaccccggccaaggccccggaaaattcaccgaaggaaggcagtgctgcaaaggcacctgaggctgcaaagagaactgctgcccccgctgaagcacccggagccgcgtccacccccgtcgccgccgctggcccatcatcgtcgtctaggaagtctggtccagctaccgcgccagccaccgcctctacacccccttcttccacngacgaggagttgagcccttccccgccagcatccaccgccgcggcgttccctgcggctganggaacggctgctgatgactccgcggtgctgctgcc

SEQ ID NO: 315603 - DNA, 98 bp, Zea mays
cggtccgatactcacgggtggcacacgcgtccgaaataaaacaaaaaaaaaaaaaaaaaaaaaaaaaaaagggaggaagcacaaaagagaaaaaaaca

SEQ ID NO: 315604 - DNA, 387 bp, Zea mays
ctgctcctcgtcggccagcccatgctcctacgattaccggtacaaggaaggatcggctggggcgctcggcgtcgtgggcaccgactcggcgaccatcgcgctgcccggcggcaaggtggcgcagctgcaagacgtggtcctgggttgctcctccacgcatgatggccagagcttcaagtcagtagacggcgtgctgagcctgggcaacgccaagatctcgttcgcgtcccgcgccgccgcgcgcttcggtggtagcttctcctactgcctcgtcgaccacctcgccccgcgcaacgccaccgggtaccttgccttcggcccagggcaggtgccccggaccccggcgacgcagacgaagctgttcctggaccccgcgatgcccttcta

SEQ ID NO: 315605 - DNA, 112 bp, Zea mays
ctaagacataaggaactacgtatgtttatggaactttctttaagccatatatttctcagcatgagaatgacatcgaccgaaatcgtcttgagctcagaactcgaaccaacga

SEQ ID NO: 315606 - DNA, 58 bp, Zea mays
aaaaaaaaaaaaaaaaaaaaaaaaaaaaaaaaaaaaaaaaaaaagttctagatcacga

SEQ ID NO: 315607 - DNA, 287 bp, Zea mays
aaccaagacttaagcctccccgtagcgccacatctagtaggtgcagccatgggtgcctgtgcaacgaagcctaacactcttgaggggaaagccccagctgacgccaccatctccatacccagtgttgcaccccagaccgctaccatccacattgaggttgcggcaaacacatccagtaggtgtgaaggtcgcggagtgaccgctgacgatggactaacatgttgctgcgaagcactagcgagcagccacgattgagagtcagcacattgcgagtgaggtgaccactt

SEQ ID NO: 315608 - DNA, 121 bp, Zea mays
acggacgcgtggggctagaatggacagggatatcgtcgatctgcaacgcccaaattctggatggatgctccgttgaactgaaaccttttgctgtaaaaaagttctctgggggttggagtgc

SEQ ID NO: 315609 - DNA, 209 bp, Zea mays
cccacgcgtccggcaagatgcatgtttgttttagggactaatttttagtccctttttagttcctaaactaccaaacatgccctaagatcacgtgcaagtattttagcaatccccttaaccccttccttttcttttctctctgatcttcctctgatgcagaggttgaagatacaaatttgtcagggagttctcagaccttcctttgtgtt

SEQ ID NO: 315610 - DNA, 422 bp, Zea mays
ccaggtatgcccgccccttcgattccattctgctgtgcgaaacggagcaccccaaccccaacctaagctatttggtttcggatctgaccccaaaaacgtggagctcagagcattggtgcctctttcctctttcaccaaggattccggtgccttatttcacaagacaaaaaaagtctcaagggtcttgattcttgtatgaactcaagatttatggtggatcttggagctgtgggatgctaagcctggtctagctactagattatgaactctctgctgatctaatagcatttctacaagaattcttttgctggaaggtttattagttatttgcaacaatgaaggaacatctaatgcttaatattgatgacctaagcattcttgagcctaacgaggtcattgggacagtcaagaataaatcatct

SEQ ID NO: 315611 - DNA, 74 bp, Zea mays
aagttttaagtgacaccaatttagaagggaattagagtggattaaattcgctcccggtaaaaaatgactcgaag

SEQ ID NO: 315612 - DNA, 60 bp, Zea mays
atgccaagcgtcccgttcctgggtttttcccaactttgaaaaaaggcggggttcccccaa

SEQ ID NO: 315613 - DNA, 90 bp, Zea mays
agcccacacgtccgcgacaagatggcgtgcacaaacaatgcgatgagagccttgttcctcctggtcctcttctgcatcgtgcatggtgag

SEQ ID NO: 315614 - DNA, 267 bp, Zea mays
agctggttcgtggatggcggcgccacaggctctcctgactatcgctgctggtcgtcgtgctagctgtggtcgccgttgtcgcaaacgtcagtcacaccaagcctctgactcctgacgggcgcatggtacactacatccacagcaacttcatggacgggccgtgggatccctctcacacgatcttctactgcggtcgggacaggtcctgcaccacggattgctcatacgggtaccatggcactcacgcgcatgggtacgagctgcata

SEQ ID NO: 315615 - DNA, 382 bp, Zea mays
tggtagggcttgctagctagcaaaaactgttggtatggtcccccgtcaatccgccggaaatggtgttcggcctcctcgcccacaatcgcggcgaaaggcagtccgccatgggcgtcgccgtcggctgtcaaattcaccggtccggtcatgatgccaaggctttcccgccttgctgctcctctcggaggcgcgtccacaggtcacggcggcggacgggtgggcgggcgtacggtgcgagtgcaacccgagtcagggtcgggtttcccagcgccgtcgccctctcgtctcgccgctccggtggatgatggagcgcgtcggcgtcggcgtcgttggatccctctctttgcgcggctgcggatgggttggagcgacagcgaccgaa

SEQ ID NO: 315616 - DNA, 347 bp, Zea mays
acgcgtccgaaaagcattcggaacaacaagaccaagggtatatgcaccaacgcccaagggaagaacaaagggtggctccaaggggcttgaagggtttaaaaacccccctgaatgggaccaccccccccagtaaaaatttttccccgccctgtgaattgccccaaaaaggggtccactggggagccccacacattaacgccaaaaaacccccagccaaataagttctaccgggggagaacccccaatttttggggggaaaattaatttcccaaaaacaaccaaaatcaaggggtgaaaaaacaaaaaaaaaaagaaaaaaaaaaggggggcgccccaaaagattcaaa

SEQ ID NO: 315617 - DNA, 403 bp, Zea mays
ggtcgagcccgcgtccggagatactggacgtcgcaaaatcacctcgttccgtcagcagcggaaaccaaagtcaggattccgttatgcttcgcgggagagagaagtcgtgattacagtcgagcatggagccacgggcattcccccacccaaccgcggcatctgccagtctgcgacactgccgccccagcagtggggcaaacactgtcgtcggcgccttggagctttggattggctgggcgcgcgaccggcctctgtctccaggctgcgaggcagcagcaacctccttcgctggctgatgaccgtcttcgccgcggatccaactcccaacgtggtcggcttgcttcccgtcgtcaccattgtgaggtcacgaggatttgaagaatcaccctggtaactgggatct

SEQ ID NO: 315618 - DNA, 236 bp, Zea mays
ttgagtcgtattagactcctctctacggtcatcatggtcgtgggtgtcgtccttgtagcgctcgtccacggcgggtcatgcggggcccccagggtgtcgcccggtcccaacagcagtaccagctacaatctggaaatggttcatcgggaccgccacctgctacggtcagcccaacggtgccggcgctcctgacaccggcggtgcgtgctgtctcaagaacgtcaacctgtcaccct

SEQ ID NO: 315619 - DNA, 230 bp, Zea mays
caatttcatcaagtgttttgtactactccatttgagatcatgcactattatttccacacctacactgtagcaagggactggtttagtcttctgtactttggttattatgttggaattgcaacgattacagtaaatgagaatgacatcacctggtgcctacgacataagacatgttgatttattcacaaccaacagcggcagaaaaggcatcaggaaacatcccaatcttc

SEQ ID NO: 315620 - DNA, 420 bp, Zea mays
gccatgggcgcgggatactttaaccatggcaggctggtgatgaacttgaccccagtgtgttttatagaagctctgcgaccttgtcatgtgacatgtggaagcagtctgaactgttgcagtccatcagcttagctcatttcaggtgagccagcagccataccttggtccccctgagaaggtcagtcagagactttgggtcaaagttcctacccttctgaacattctttttctcccaaggacattcacaaatagctacttgaatgtatgatcatgttcacccagtccaggcagaaatggggacgccgttggcagggagtattctgactccctttccgtggctgcaagtggtctccagaaataaagggcatggcctggacagcgttcaatcaactcctgggggcaaaggacaaactgccccaa

SEQ ID NO: 315621 - DNA, 351 bp, Zea mays
  unsure (1)..(351): unsure at all n locations
cggacgcgtgggcggacgcgtgggcgcgagggccgccctttttttttttttttgcgcatgtatgtgcgtaggcagcctatatacatgttacatgtatgtataatacaactatatatacatgaagccttgaactacagtgtaccatgcaggaagtagaatgctatgatatgaggcatcctgtttccaaacatataaaaggaggatgaggaggacgaaactgaggctacttacacgtacgtacctacagcacacgcgcaaatcacattcacgaatcacgaatcgagctgagaacggcatttaatttgcttcntctcgatcgattcgacccctcgtttccatgcgcgcgctcga

SEQ ID NO: 315622 - DNA, 277 bp, Zea mays
ccaaggccgatcattttttttgactttgtgcatgtatatccgttcgcagcctatacacatgttacatctaagtttactacaggtagggatatatgaatccttgaaatacaatgtaccatacctcaagtagaatgccatgatatcaggcatcctgtttccacgcatataacatgaggattacgtggacgattctgatgctacatacacatacgtagctacacaagacgggctaatcaaattcacccatcatcaatcaacctaagaacggcatttcatt

SEQ ID NO: 315623 - DNA, 202 bp, Zea mays
acggacgcgtgcggggagttagcgattagaaatatcgcatgaggtcagtagagccagaagaatgcgcaggcagaagatagaatcgggtaaagatatgagtaaatggacgaagggcaaggtgacgagcttttagagcaggtgaatcataccttgcttgacagatgtctcgagcaggaatcatagatcatggtagactacgaga

SEQ ID NO: 315624 - DNA, 425 bp, Zea mays
gcatgactcccaaccgccatggccgcgggatactttagcacaaaatggtattactgtatttccaccagcacctgcctcctctgattcagtctatgccagcccctgaccagaaaccccaatgggtgggcttaaaagccatcaggggaggagtctgggcaaaggggcctcacgtgggcctgggaagacagcatagagtgggcagacacactgaaggagggataaagatgctatagccagacagacagcttcttcccaagggacaccaggcacgatgctgaagggtccacctaaagaagcaaggcggcgccatgtgggtctgaacctgacacatgtccctggtggcaagaggggtctgtcacagggtcctgggctattgacctctccagaccgtctcctagttccttctgtcttcacggggctcccct

SEQ ID NO: 315625 - DNA, 375 bp, Zea mays
gcatgatcccgaccgccatggccgcgggataccttactggtcgctgtgggtctgggcgggcctggagccaaaaggcgactactgttcctccccggagccattccaggtggggagggaggggggtttcagacttgtgttcctctccctcgtcctcctgtctccttaggctcagtagaagcggtggggaccctctaccagcttcctgagccctgcctgcagttggccacccagcactgattggggacaagggctgaactgctggccaccagccacacctaggaaggagctggggcctagaagctaggcagccttcggcctcaggggccgcttcgtgccctcccagctgggaggggtcgctgtttcgccttgtctgtc

SEQ ID NO: 315626 - DNA, 296 bp, Zea mays
cacacgcgtccggcgccatggcgacggcgctacgctggggagtagcatagtgctggtgatgatcgccgctagctccatcatcagctgctcctgcaccatcctcctggagctcccgagcgggtgaacatcacgagtaggggcatccatcgtcgcatgcgcatgatcttccttcgaagtcatcgccgccagcgccggcgcttttcactcggatgccggagcctaggtcggcacggatacggaagcgggcgtgggcaccaactgcatggtctgctgaacgacgttactcgtgaccgtgg

SEQ ID NO: 315627 - DNA, 277 bp, Zea mays
accagatgtcgattgagacccgccttgacaagcaatcatatacgtttgggccgcaaacacgtctcagcttacgatgatcttgctcaaacaatacaatgagccattgtcacacgaagctgtcataatcgtgagtctcctcatcacagcacacgtcgtaagcagacgatcaagcatgggagtactgcagctcatacatgcctttgtatcagacaaagttactgattatgagaccgagtcgacggacgataccaccactattaaagaagagactcaatgc

SEQ ID NO: 315628 - DNA, 396 bp, Zea mays
accattttcttttttttttttttaaaagacagtgacgttggttttatggatcaaaaccagaattttcatgtttcacaattttggtgctagagatccccaaactgcctaactcactggggaaggtttctgaaggtgtgcattatagtaaacagcagcaaaatacccaacaacgttactgctaaaagcagctgctcctgcttgcgcctttagaatactagccgtaaaacagcaaaaacccgcacatctgtgtcagcagttgggatgtgagctactctaaacaacaaacaactgtgaacagtccaaggcaggacctctacaatcatactgggcaagcgctgagctgtggggagaaaatgtcagcacatgcccaagaggagacaatgcacacgtttagta

SEQ ID NO: 315629 - DNA, 342 bp, Zea mays
cccacgcgtccgtccatgtcgtgactgcatgtgccgcttgaacagaacagagcactctaaatccaaacacagtagatagtatctcatagttgcatttccagactaaccctattctttctgacatccactttagtctgttcatgcctcagttgctgtgcggcttttcacttcatcagcagtcatagtcgccagttgcgacagcattgagagcaacctattctccgtatataacggtttttccatgtatagcatatgccagaagaagcccaaattcgtccgtggagtactgaagcaattgtgatgctaagtatacatcatctgagtatgattctcaacaaccga

SEQ ID NO: 315630 - DNA, 228 bp, Zea mays
agctcaagcgtcagtccattacgcgggtggaagcagacgcttgagagacatagcgaatacgaagcgtgtacgacggtacagaggctcgcatgctggtagtcctgtaggaactcgagacgttctgacaggcagatgactcgttgcagtcctgcgattctaaggtgacttacaggacaagatcactgatgggcgtgacttacaaggtcatcctcagcaacggcgacttcg

SEQ ID NO: 315631 - DNA, 423 bp, Zea mays
  unsure (1)..(423): unsure at all n locations
acccacgcgtccgcccacgcgtccgaatcaatcaagacacccttccaaatgcagatctcgagaagttgcagctccccacaatggaaggtctggctaaaaaactaaaaaagaactctgggagcaagatcgagtctgctattgttggtacgtacgtgctgtggaacagctaaccctttgtgtctgttgaaattctgaaacctgactgctatatgcttggcagcatatatcagtctgctattgttgcatgtcatccatcagaagcacctactatgactgccagctggtttaactccaagtcaggaaagaagattcctttgaaatcagtcacttcaatcgtcgatgggctaaagaaatcgtacattgagaagttgatgcccttggaaaaaacctatcagttccatgacttcgtgtctcncttgctga

SEQ ID NO: 315632 - DNA, 294 bp, Zea mays
cccacgcgtcggacgatcttgccattaccagctcagcttcacatgtgcatcgtcttcgcagcacacacatgtttaatagtttcagggactgggattgctcgattaactcaactcatgctgacgagcatgtatgccccctgtggtactggttccacatgtgtgcaggagtgcttaacccgcttctaggcgatgcctacgagacctgcccgaagtgtcacagtcagcgtcattgattgatagtgagagcatctacagcacgctcgaagcttgatgacggtgattgttactgctcag

SEQ ID NO: 315633 - DNA, 452 bp, Zea mays
gcatgatcccgaccgccatgggcgcgggatacaagttcacctcggcccgtctgcccagcaaggccccaggttcaaagtgctgggaggtgggcccttcgttccgaccccagcgcacacgcagctccaagttgccggaccaggaggcttcctcaagcacgatcttccttcccccacccatcctcagagacctggcttggagctgggacaaggaggtcacagggaggccccaaaccagccgtttgggtgtgttttgactggtaggtggtatgctgtcccccgggttgacttgatgttctgaaaccagcctcgcactggcagattcacccatgctgaccccgacgtatacagcttctgaccgttagcacagacacactcagaggggtcacacatgcacacatgccgtgtggatgggacctttgcagtcagtcatgcttggaccacatggacactca

SEQ ID NO: 315634 - DNA, 199 bp, Zea mays
ccacgcgtccgcccacgcgtccgttttttttttttttttttttcttatattttttttcggttttttttttttttattgtttttttttttcccacgcgtccgcccacgcgtccgccgacgatggcgtcgaataagacagtcctcatcgtcgcggggatgcttctcatcaggctcgtgctggaggctgcccctccgggggg

SEQ ID NO: 315635 - DNA, 136 bp, Zea mays
agtgcctccagctaacgaggccctgacatgcatctgctgcattgctacacgttcgttcgtgttcacaactacgctttgttctttcgttcaaaatcaccgaccgcagcttgttcagctagtactttgttatttggcc

SEQ ID NO: 315636 - DNA, 306 bp, Zea mays
cggacgcgtggggcgatgcctggatttggagaaccacttcatcgtgacattgtcctaacaatacgtactttatatatgatctctctcagtgctattactggagtaaccagcaggatactcacactgcttagaggtgacaaagtccgcatacacttacaggcacatgaataaatgagaagcagtcagcgcctgttacgacgaagagccataccatccgtttcgttgtagttgtagctggatacgtcagttttgcactatcgaacgacaactaagtcgaagctgatagagtaagtgtaacacgtttat

SEQ ID NO: 315637 - DNA, 454 bp, Zea mays
gcatgatccctaccgccatgggcgcgggatacgggagagggctgttcccctctcccccagtgcctcgggaggctgagactgggttgtgcgtcttgctctgcctaggtcccacagcaagaggagggctccgtgcaggggtgatccttatcacttgaagtcctctctggccagagtccctcaccttcccacagcccttgctaatgattaccataaaagctgcctccggcctggccttctagcctcagcccagtcaaaagtcccacctttaccatttgatttggtgtgtgcccttagagggaattcagagctccgttaggctcatagaggggcccagaccaaagatatggagggaggggtcccatatcagcaaacacctcaagtttcctgcactgtgactgcatttaagaagcaaagctttgtcaggtctaccagagcagctgataagcctgcagaa

SEQ ID NO: 315638 - DNA, 449 bp, Zea mays
gcatgactcccagccgccatgggcgcgggatactctagtttaaggcagcatttgaatggaagcagctgacttctgacaacagtcctttgtcttgaggcggtgagtatcttctgtgtttattatgccaggatttcactgctgactatagattcttcccagactgaggggctgaagatcgatcatgtttcaaagagttctttgaactgggctgtaggctagagcagagatgttttctttttctgatcataaatacttcaggttcacaaactacttcttcataatgccaaaactggaatgttctgtagtggggacattatagcagcatacacaaatgctaggatggaaacattagtgctggagatgtttgacagagtgatttgcactacaaatgtaaaacaaaacacaggctttgacaagaacaaaggattataaaaacatgcctaaaaatc

SEQ ID NO: 315639 - DNA, 357 bp, Zea mays
acccacgcgtccggctggttccatggctggaaccatacatgaaactttccttgcaatatacagtgggaaacttctacagagcttggctgtagcaactagccaagggtcattcttgtcggtggatcagattatctacaatggaatcggctttacaattgctgcaacttccactgctgctatcactatttatgcaaagaaagcgcttcaaaagctccaagcggaggacgagatattttgagaggtccaaggccaggatcaaacccgtaacgctagttttctttcaggtgtactatatatgaacagctggtactaatctggtttcctgtgtcgactaccggactgctactaacatccatc

SEQ ID NO: 315640 - DNA, 422 bp, Zea mays
gtcagagcgagggcatttaaattagatcgagcagagcatctaatagtaaaaatctagactatattacttatagaaataagcggggtccgtgccctcactgggctacacataggtccgcccgggcggggcggagccgcggaggcgcggaccgcggagcgggagcctgacccatatccatccctccgggcgcggagaggagggggaagcagagcagcgggcgcggcggacatgacgccgatgcggctggtcgtccgagcctgcaccgcaccccccatccgcgtactggaagtcgaggaagtcctggaagctgctctccctgtacattgctgggttcacctcgtcgaccagctcctcggcgcagcagaccttctcgtccttggagagactatggatgctggcaatggaaattcttgcttcatcag

SEQ ID NO: 315641 - DNA, 292 bp, Zea mays
aaccaggggcctccaagtgaaagctcttcctgctcccactgctccccagccctgtcccaacatggcatatgtgggaaagcggcaggcctgaagcaaacgatgttctggctgtggtaagcagtgtcacagcatccctagtcagtgatcacagagtcacctgggttaaaagtctaggtctcacagtcaaggcaaggattatgaaggtgacacggcaaaggtggtctgaaggtgctcataattttctcaaattcagtggggaagggaaggttggaatgatgtccttcaaggccac

SEQ ID NO: 315642 - DNA, 330 bp, Zea mays
gcatgatccctaccgccatgggcgcgggatacaatcaccatggatgcacaagtctcatatataaaaatggtgtagtaattgcagaaaacctaggtttatcctcccatatacttcaaatcagctactagatgaggtataatacttaatacactgtagatgcaaggtctatagttgtaattacaatgtaaatgctatgtaaatagttgctgaatgtgtaggatgttcaagtgtttgcatgttggtacttgactgaactttttttcttctttcgaaaggatgtcaacccattggttggctgaatccgtgaatgtggaactcattgagtcgagt

SEQ ID NO: 315643 - DNA, 308 bp, Zea mays
ctagatcgcgagcggcgccctttttttttttgtggttattgtattcatgtcgtggttatgcgcatgtgcttctgtattaagccttgttttttatgggaacagaaaagtgttgataagtcccactataatgagtgttttttaaaccccattatagtgatttgagaggggattttaagattatgtcaggcaatataaccgtgcgttctcaattgggtcaaccccaaccaacgtcccttctcccttcccgaaggttggatcgtccttggtccttttgaaagaggttacttccccaaaggatacaaggttgg

SEQ ID NO: 315644 - DNA, 237 bp, Zea mays
ccgacgcgtccgttcacgcgatcagatctgagagcgtgcactcgatgtggcgtcaccgatattatcgtcgtcctggtactgtttgcagggtgcaacccaatgggggctggcatccttccaacagtattcggcttcaacgatattcatcatgcataccggctgaagtcgctcatcggtagtgatacataatgatgacaaccaaacttgttctggggacatgcaaaccggggtgtgtgc

SEQ ID NO: 315645 - DNA, 347 bp, Zea mays
gggtcgcagcgcacgcgtccgcccacacgtccgagaagaatcagatcaccttctttacctctgcgtacgatggttcttgtaaagatgctgcagattcctgaaagacggtacttgaactgcccggagcatgttgtattttcttaagatgctggaactaagacggcttagttgaattttcactatcaagtgagtctcggtcttgccccaaaaagaatgttttgtacctcctctgtcccaatttatacgacaatttataattcgtaaaaaaaaaagtgaccgaaacaaaaagcaaaaatcaaagaaccataacagaaagaagaagaaagagggggatccgccaggagttc

SEQ ID NO: 315646 - DNA, 377 bp, Zea mays
aggcgcacacacacacaaccagatctcccccaaatccacccgtcggcacctccgcttcaagatgcagatctttgtgaaaaccctgactggcatgactatcaccctcgaggtggagtcgtctgacaccattgacaacgttaaggcgaagatccaggacaacgagggcatccccccagaccagcagcggctcatctttgctggcaaacagcttgaggacgggcgcacgcttgctgactacaacatccacaaggagagcaccctccaccttgtgctccgtctcaggggaggcatgcagatctttgtgaaaaccctgaccggcaagactatcaccctcgacgtggagtcctctgacaccattgacaacgtcaaaggccaag

SEQ ID NO: 315647 - DNA, 77 bp, Zea mays
aaagcgtcagcagcactgatgggtagatcattgagaagggagggcacaatatctcctttacatgcgccgatggtcca

SEQ ID NO: 315648 - DNA, 287 bp, Zea mays
acccttcggccaaaccttccgctcacccgtcagccaacgcgtccggtggaggcaaatttcctttgtaccctggctcaaggcaagtaattacctggaaacccggttggtggggcttctctcagattttatccctccttgtagcaacttccaagaactcgtccattgattcatttgttgtcttgtacgaaacatttgttccaacatgtgtcatagatattttcaatgggttaatttctaataaaactatgtttacaagcaacaacatgcaatcgtgacggtgatcagag

SEQ ID NO: 315649 - DNA, 74 bp, Zea mays
tctttcctgcccaaaaataattaaatgctcaacgagatggagacgtgtgaaatgaatagattttcttgctgctc

SEQ ID NO: 315650 - DNA, 64 bp, Zea mays
aaataaatcataaataaaaaaaaaaaaaaaaaaaaaaaaaaaaaaaaaaaaaaaaaaaaaaaaa

SEQ ID NO: 315651 - DNA, 368 bp, Zea mays
gaagatcgcctgcgccgtcctcgtcgccgcctcggcggccaccgtggcgctcgccgcggaggctccggctccgggccccaccagcggctcctccgccgtcgcgcccgccgtcggcgccgccctcggggccgccgtcgcctccttcttcgcctactacattcagtgagccggccgcggccggtcgcccggaggccgaggaagagacgaagcgggagagagagtgacatggctgcgcgcattccgatgcgtgggcatgtttttgattcgacacaccttttgtcctctttttctttgttccctctttctccttaatttaacgaattgatgcatgccgctgatgttcttccccctgagagagggattaacac

SEQ ID NO: 315652 - DNA, 412 bp, Zea mays
accacctccctttacagtatttaaggatcgctgaagctgcagaacggcatgaagagatgaaggaactgaatctgatcatggatcaatctacatgttcatgtcaagtggaggatgccaaaaatctggaactacgatgccctgtatccgaaattctccaaaatagagaatgtatacattttcaatgataagatcctagccaaacatttctctttctctgtatagttcttgtcaaagtttgaagagtttggagttgaacctaccttgttgagtggaaggggattgtgttcagaaaactttagagatgctttttagattgccgggatgtaaattgttgccagctggaaggccttgacttttaacagtctcaaacaataacatttaagcatggattacctcttgcatagtaatttcc

SEQ ID NO: 315653 - DNA, 117 bp, Zea mays
aaaagtcagcagacgccacgtagcagcagctagatagtgccactgggcgctcgtcgacgtgattcagcacgaacaacactcgcgagactcatcgtgagcgtcatccggcagcaagtg

SEQ ID NO: 315654 - DNA, 268 bp, Zea mays
atccgtcggtacagtctaccatcaggcagtcgttccaggcgtgcaacggcgacgcgatggcgagtacgaggcgtagcacgcggggcagtcgggccaagacacggccggaaccaagaaggacagcgcgcagctgcaggagcacggcgccaccggcaccgtggaccaggtggcccaggccggcgagggcgtggcgacaagcgtcagcgacaccgcgtccgccgccgtcggtggcgtcatgagcacggtggtgggcgtggtcggcggcgtc

SEQ ID NO: 315655 - DNA, 325 bp, Zea mays
gacacacgccactaaactaagtcggatcaccgcgcacagatcatcgacatcgccgctgccatcgaggtcctgaccgtacggacgacctccacaagcggaggatccgccgcgctcgtggtgatatgcatcacgacactgtccgccaacctgtgaaacataacggaggcgaagcacaccagcacgtacaaggtggtggacgcggtgacggtgctaaagatgcaggtggacgtctgcacgaagctcttttaggccgcgcaggggatcgccatggacgaggtcaatgcggcctccacgctcgacgagcagtcggcgctgaagctctgca

SEQ ID NO: 315656 - DNA, 318 bp, Zea mays
gggatatcattttccttgttttgttgccaagtgaaatgattgttgggcactactacttcccccttaattcttgatcccgccggacagaatgcagaggcagctgagcgtctcctcgatgcccaagctcctgccggaggaagccgccctcggcggcgacgacgacgacgtcgaggccaagcccgagaaggcgccggccccgcggccgtcggggaaggagcggtcggtgcacctcgtaccgctcatcgtcgtgctctgcttcctgctcctcttcctctgctcccacgccccctctccctctgacatgtccagttttgggaa

SEQ ID NO: 315657 - DNA, 401 bp, Zea mays
acgggagtccgggaaggagctgaccagcaacgcgctggccatcatcgagaaggcctcgtcggtcctggtcgcgctccacattcccgggttcacccatcggaggttacttggcaacgacgaagaaggaaacatggagaatcaacccaaagtcaaacactcgggtagtacgttcctgggcgagctcaaagacgacgtcacggcggccgacaaccgcaggctgctcaacgtcgacgaagaagaaaacatggagaatgaacccaaagtacaacactcgggtagtacgttcctgggcgagcgcgacgacgacgtcccggcagccgacagccggaggctactcagcattgaggaagacaccccgcagtgggtgaacggaccagagaggccgctgctcaaaggcaact

SEQ ID NO: 315658 - DNA, 415 bp, Zea mays
  unsure (1)..(415): unsure at all n locations
tcccgggtccaaccaagccttcaggaacttcttcttcccccgccggcaaacaatcaaccgccgcaaacggcaaattaaccaatggccccttggcaaacaaacccaaaaacccttaaggggaaggcccaacttaaggccgcgttttcaaaaccaaaggttccccccaaggcaatccaaaccccctttaaggttccggctaataaacaggtacctaaaaaggtgttgttggagaacccggttgcggcggccgacgttgagcatcagaaagctaatgaggtggtcgctccagaagcggccgtcgccgagcccgatcacaangangaggaagccgtggagaagaccgtcgtcgaagangagaagccagcggcagccgccaatgcagaggaaaaggtcgccancgccgccgagaacacga

SEQ ID NO: 315659 - DNA, 77 bp, Zea mays
aaaaaaaaaaacaaaaaaaaataaaaaaaaaaaaaaaaaaaaaaaaaaaaaaaaaaacaaaaaaaaaaaaaaaaaaa

SEQ ID NO: 315660 - DNA, 350 bp, Zea mays
cccacgcgtccgcccacgcgtccggcgcgccgtcgtccccgtctggcgtcgcgtcatgtaacgatgagccgccggcgccagcggtgctgcaaaaggtgcgagcggagcatctgctctacgactactgcgaggatcagaaccggttcaaggacacggggctccctaaggaatgtaccgcagactagatgaagccctaccaactaatagtgtgattagacatgggcatagttcatcgaaacagagaaatcgatccgaaatcaaaaccaaaagaaatgatatacggagtacatgaattatgattcacttgtattgtataactatacttcatttatgtctgatgtctcacattg

SEQ ID NO: 315661 - DNA, 269 bp, Zea mays
cagatcgcaaacggtgcataccattacccaggaagctgctacaaggcgtcagatggccttgtcatacgcattctctcaccagtggaggagcatgaacacctcttctgcgcgagctgcgcagtggacatgctcccatgtacatggaaacctggcaggcccgaactgggggctgttgctgggcgagagcgctgggatggcggctaccaggccgtgggagaaccagaccatgccaccgccggccactggccgcgcagcatccaaaagcgcta

SEQ ID NO: 315662 - DNA, 399 bp, Zea mays
tcgcgggccgacacaagcctctacagtggttcctgctatgaattatatggtttctcacatttcttactaggcgactttgggttctagttatattccaggacctgccggagaggatcaagctgctgcaggaagagatcgggcagtagcaggaggaggcgccgggcatgctcagcgttttccgggacctcaaccccgacgagatggtggccaggaacaccccaagtccgacgtggtgcggaaggagggcggcgacacccgggtggagatctactgtgccgcgtgcacttcaacggtgatggctcgtgggatgtgattagggatggtaatggaattgtctcttcacaatttctttgagcccttaattaattttagttcaaaaatgaatagaaatagaacctg

SEQ ID NO: 315663 - DNA, 342 bp, Zea mays
agccatggaccctggcctcgtgtgcaacatgacggtcatgggctacgtgccggagctgtgggggctcaactacaaggacgatcaggtgaacaggatcatctacccggagcatacggtgtcgttcgcgaagctgtcaaggatcaaaaaggacgacctcatcgagacgtccatcaacgtcatcctcaagcagccgcccttcatcgcgacggcgaaccggtctgtcgcgaacgtcagggctgtgagctcggcgtagaccgtggtggtgtacgtccatgcgacggtgacagtggcagtgaccccgtcgaagaagatgttcagagtgtccaaataggtcgggtactc

SEQ ID NO: 315664 - DNA, 393 bp, Zea mays
tacagacacttgtgataaaaaaaaaaaaaaaaaaaaaaaaaaaaaaaaaaaaaaaaaaaaaaaaaaagggcggcggcccaaaagggttcaaaccatgatttagccttaaatggaagttattagcccttcaaaagtgtcacgaaatttcaattcacggccgttcttttaaaaacttcttaacgggaaaaaccttgcgtttaccaaacttaacccctttgaagaaaagccccctttcacaaccgggtgtaaatccaaaaaggcccgtacaattgacctttccaaacatttgccaaccctaaagggaaagtggaacccccctgttatcggagaatcattcacgccggttttggtggtaacccacaccttaacggcaatatttgcaacctcccaacc

SEQ ID NO: 315665 - DNA, 390 bp, Zea mays
aatcggacggtcgatagatcgatccacgtacgcgcatacccatgcaccacctctagctagtttcggtttgatttcattccatttcttctttccatccatccacccaatccaatcaaattagtaatgagcaaaggtgctatcatcggcgcgtcgaccgtccttgtggtggcggtggtcgcggccgtgtgcgtggtgtccttcaagggcaactccggcaagggcgatggcgacgagaacctgtccatgtcggtgaagtcggtgaaggccttctgccagcccgcggactacaaggagacgtgcgaggcggagctgtccaaggcggcgggcaacgccagctcgccgtcggacctggccaaggtcatcttcaaggtcaccaccgacaagattcac

SEQ ID NO: 315666 - DNA, 109 bp, Zea mays
aggtaggcgtggctcagtttatgtgatactgctagcgatggatgatgatgatctgcgtgtaattgaattaaagaattgtgctgatctttctacaacactgttccacatc

SEQ ID NO: 315667 - DNA, 378 bp, Zea mays
atctggacaacgggttcaagttcgacgccaccaccgcgcgggggcgtgacgtccacaggctccagggatgtctaggcgagccacgcagtcgcgacgggctccacgtgggcactgaactgcacaggtcacgtcggtatatcggtgctgctgcccgagaagccgccgcgaccgtctggagtgaaggccacgtggtgggcatggcccgtgggtgtccgcgccggtggggtgctgggaaccagcgccttgacgctctctgtaggcggcgcggtgagctggaccaggatacgggcaatggatgagatggatcagcgggccatgggcggggaggagccggggaggatgacggtgcgctggagcaggatgccatcggcgaccgtg

SEQ ID NO: 315668 - DNA, 57 bp, Zea mays; identical to SEQ ID NO: 55796

SEQ ID NO: 315669 - DNA, 236 bp, Zea mays
actccgtcaggcaccacggctgggcagggcagctgctccacgtcatccgtgaggttcacagtgtggctcctctggtgactcgcggcttgctgggggtcggagccatcatcgacgctgaccgcagatgccaaatcttgtgctaacaccatgaacgtgacaacgtgggcgctccactcggatcatcacctctcggctgcggtggcacacctacgctctggcgattgagggtctgagac

SEQ ID NO: 315670 - DNA, 387 bp, Zea mays
gcaactcctcctcccacgcctgccatcaacgcagccgccgcaaccgccacatcatccatgggcgcctgcgcagccaaacacaccacgcatcatgagcaagacgtagcagatgccgccgtctctacacccaaggttgctcccgaagcgactccaatctccgttaatgttgctcgctgaagaacatgtacctgagagtgtgctagtggaagaacctgatgcggctgccgatgttgaacatcataaagctaaagatgtggtcgctccacatgctgccgtagccgagcctcatcacactgaagaagatgccgtggagaagaacgtcgacaaagatgacaagccagtagctcccgcgaatgcagatcatcacgtcgctagcgccgccgagac

SEQ ID NO: 315671 - DNA, 124 bp, Zea mays
gatgaagtccgtcacacgcgtgaaggaggccacttggaaatgcatcttcgtgcaggttcatctgcacagctctgtaccaacattcacacggcgagcgtcggacgctgttcaaaggcaattcaga

SEQ ID NO: 315672 - DNA, 398 bp, Zea mays
aaaccctgaccggcaagactatcaccctcgaggtggagtcctctgacaccattgacaacgtcaaggccaagatccaggacaaggagggcatccctccagaccagcagcggctcatctttgctgggaagcagcttgaggacgggcgcacgcttgccgactacaacatccagaaggagagcaccctccacttggtgctgcgcctcaggggaggcatgcagatcttcgtgaagaccctgaccggcaagactatcaccctcgaggtggagtcttcagacaccatcgacaacgtcaaggccaagatccaggacaaggagggcattcccccagaccagcagcggctcatctttgctggaaagcagcttgaggacgggcgcacgcttgccgactacaacatccag

SEQ ID NO: 315673 - DNA, 347 bp, Zea mays
ccgacgcgtccggttaagctcgtgctcctatcgctcttcaccgtctgcatcaccttcgcatttcagctgagctgcctgaccgctaacgggccagtgatactgccagcggaggcgatcacgattgtggtggtgctggggctcaccttctacaccttctggtgctgccaataagggctacgagttcgaattcctggggccgttcctggtgtctgtctgcctcatccacatgctcttctagcaccagcgtatcatctgcgtgctgggcaagacccggaccatggtgtaacgctgcatcgctcagctcgtcttctccggtttcatgatctatcatcaccgacaaccgcatc

SEQ ID NO: 315674 - DNA, 405 bp, Zea mays
ccggcgtccgcctcgccgtcgccgtcgccgccgcgccaccagcagcccccgctgccgccgcgccccaacaagccgtcggccgtgccgaggttcggcgtgtgggacgagcagaacgccgcgatggcggcgcagggattcacggtgcagttcgagaaggtgaagcgccaccgggaggaggccaggaccgcccccgcgccgcccgtgcagccgccgaagctgctgtcgtcgcccgaccacgcagcgccgccacgcgcgcggcgacacgggaaggggaaggccaagaggtccttcatgtccaggatctacaggtgcctgttcccaagggtcagagagtgagtgatccgacgatggttatacacaaccgctcagccgtatacggtgtactacgtgttcttcgacagagac

SEQ ID NO: 315675 - DNA, 406 bp, Zea mays
tacccacgcgtctgggacggcagcgcggcggctttcggcgacatcgtctcctctcgcctgccgccactgccaaccgccagaacgcaggcggagctacattcgaaccaattcgacacctccagcagcggcgggctgctggatcagtcgatgctgatcggcgacgaacacctgctgcggcccaacccgagtatggtcaaggtctcctccatgcccgcgctctcctaccgtgagccggatgggtccaggatgctgccagcccatggcgccgggagcgacggcgacgtctcctcgctggggcactgccctccgggacaggacctccaccgtggacgaacacgaacgtgcgtacacgcggcacaaacacgatgatcatcgtctcaccatgtggttgcatgcatcgggaaac

SEQ ID NO: 315676 - DNA, 82 bp, Zea mays
aaaaaaaaaaaaaaaaaaaaaaaaaaaaaaaaaaaaaaaaaaaaaaaaaaaaaaaaaaaaaaaaaaaaaaaaaaataaaaaa

SEQ ID NO: 315677 - DNA, 404 bp, Zea mays
gcacagagctagctagccagccagccagcagccagcttgctcgccgcgcccgtccttcttcctcgcctccgttccgttccgttccgtcccgcccgccgccgccgccgcattcagggatggagatgaagaagatcgcctgcgccgtcctcgtcgccgcctcggcggccaccgtggcgctcgccgcggaggctccggctccgggccccaccagcggctcctccgccgtcgcgcccgccgtcggcgccgccctcggggccgccgtcgcctccttcttcgcctactacattcagtgagccggccgcggccggtcgcccggaggccgaggaagagacgaagcgggagagagagtgacatggctgcgcgcattccgatgcgtgggcatgtttttgattcgacacaccttt

SEQ ID NO: 315678 - DNA, 280 bp, Zea mays
gtgacccctggtttcttcagccttagaatctatcggtacgaggccatgattatcacggacttaaacgtttgcgatcacggggactgctccaaacgtgacgacaggatccagggccacacactttgcatggagcttagcacttgtgtcgatgatctcagcgatgatccgtccgacacgcagcacgatacctccgatgtgttctaggagctgcctgaagtggagctatgctcacagaatcgtcatcagcagtatacggcggtccatggtccagtctgacatc

SEQ ID NO: 315679 - DNA, 300 bp, Zea mays
tctagcgtcattctgtgtaacctcgagtacgcgctgcagctgcaggacgccatcccgcccgagggcgctcggcagggcggcgacggggacgaccaggacggcgccgctgcggcgggcggcggtcgcgctttcgttccctcgggcggtgccttgtccgtcacgtccacggcctctgccgcggacttcttctctctgttttcctccttgctctacattgtccgtcgctcgctaatcattcctctgttttcttcccgctcttctatctgtttctttaattctccttcgtcatcgcttttctcg

SEQ ID NO: 315680 - DNA, 295 bp, Zea mays
acccacgagtcaaaggctccccaaggatagcatagcagcagcactcacaatagcaaaaaccaccatccgtcgtcgccaagcgtaccaatgagccaacgacatcaccaccgcccagcgggaatggggcacaacatgaggattgtcgcgctggccttggtggacctgctggtggtggcggcggcgccgcccgtcgccaccgcgtacggctgctacgaccactgctacgatccctgctccaacgggagcagagacccctgcctgcatcaagatgtgcaaccaggcatgcggctctact

SEQ ID NO: 315681 - DNA, 393 bp, Zea mays
cgccgtggccggcgcccgagcccgcgaccgggtcacgcccgcgccgccgtgaccggcgtccgcgccggggactggccgtgtcctctccgagaccgagcgtcgcgcgcctatgccgccggccggacctgcgcctgcgcccgcaccgtgccgccgccgagcgcggtcgtgccgaggagcgctcgcgccctgtccacgccggctgggccgtggccgagccaccaggatcgctccagccgaggagccgcgcccgtggaggaccgccgtggtccgtcggggctcgccgaggccgaccggccggtggccagccgcgccggggccagccgcgcccacgagccggtggccagccgcgcccgcgcgccggtggctggatgcgccaggctgctgcggccagcg

SEQ ID NO: 315682 - DNA, 67 bp, Zea mays
tcccgggtccatacaagcccccaaaatgaatccttataaccgcccccttggccttgacccgcccggc

SEQ ID NO: 315683 - DNA, 86 bp, Zea mays
aaagcgtccgagaaaccatccattttcttacggccggttattcgagcactactcacacctgatcattgtcaagtttttacttgctg

SEQ ID NO: 315684 - DNA, 363 bp, Zea mays
acacgcgtccggggctggcatcgctgccctcttgtccctgacctttctgcactgatctttccttggcgtggcttccattcacgttttccttcttcctctccgtgtttccctcttactcctcaaatgtagctctaactgtaacataatgttccttaaatagatataaattgtcatcaaaaaaaaaaaaaaaaaaaaaaaaaaaaaaaaaaaaaaaaaaaaaaaaaaaaaaaaaaaaaaaaaaaaaaaaaaaaaaaaaaaaaaaaaaaaaaaaaaaaaaaaaaaaaaaaagggggggccccccaaaaggttcaaagcttacttacccttgaatgcaagttcaaagcccttcaaaaggtgccccaa

SEQ ID NO: 315685 - DNA, 385 bp, Zea mays
ccgggtccaaccaagcctccaatactccggtgctccaccaacattaacaacctccgctccaacaaccgcaaacgggaagaaagggttcccaattggccaaggctgttaccggctcattggtggtaatcatcaccaggggcccccggcatgtcatcaacgtcggatgactaggacgctacagagaccacaaggagctgaacgacatcacggtacgagcactgcgtgctcaaaaatactaacaacggcgtgcgcaacaagtcgtacgtgaatcccgactccgttctgactgattcgcatcgcaccttcgacatcatcatgatggaggacgtagccaaacccatcgtcatccatcagtacttctgcccgcataacgtatgccctggca

SEQ ID NO: 315686 - DNA, 313 bp, Zea mays
taaacacgcgtccgcccacgcgtccgggcctcgtcgccgccccctccttttcccctccctcccacacgcaccgccgcgtccgcccccttcgctgcccctgcccggtcggttccgatggggtacgtgctgtcggcggtggcgagggtgctggagcagcccacggcgtggggggcggcccgggagatggcgctcctcgcggggccgctctgggcggcggtcctcctcgggctcctgctcggctgggcctggcgcccgcgctgggcagctggactcgtcgccgcccccgcgcccgcagccgccgcgcaaccgccct

SEQ ID NO: 315687 - DNA, 71 bp, Zea mays
aggccccggttcgctgcgccggcgcctgcgcgtccgcgtccccggctcgcgaggcccccgcttctccgctc

SEQ ID NO: 315688 - DNA, 301 bp, Zea mays
agtaggtgcattgcttcggtggtccaccatggcgcaccgagcggtggccacgatgacgactaataagcccctcctcctcgtcgccctggcgtcggcgctccttggtgcggcgccggccgccgcgaactctcccggtggggcgttcatcacttgggtggcgatgattcagcagagctacgcgctgtccgcgcagaattccatcggggatgggggcactgagcccttggacgagaagctgtctgacgcggagaagaataaggtcacatacgtggtggacccgagaggtactggctactacacc

SEQ ID NO: 315689 - DNA, 88 bp, Zea mays
aaaaaaaaaaaaaaaaaaaaaaaaaaaaaaaaaaaaaaaaaaaaaaaaaaaaaaaaaaaaaaaaaaaaaaaaaaaaaaaaaaaaaaaa

SEQ ID NO: 315690 - DNA, 72 bp, Zea mays
aaaaaaaaaaaaaaaaaaaaaaaaaaaaaaaaaaaaaaaaaaaaaaaaaaaaaaaaaaaaaaaaaaaaaaaa

SEQ ID NO: 315691 - DNA, 364 bp, Zea mays
ccgccacgtcgcgggtgggtttccaacagcgtcggatcgttgttctcccgtccttccgccctatcgcccatgccgatactttctaccagcatatatggaatccctccgctggtgtcttgctttttccctcggtctggtggcaggagttcctttctcctccttggctccattgtcgtccgttccttttcttcgtaccccgatttctcttgctttgtttccttgtcgcctgtgcaccggatccatgtgtgttggctcatcatttgtattgttcttgtccgtccaactgattagagtttctggcttggtagaagatcaccccgaccttgcttatcgcctcgtgttttccgtattttttgatattgag

SEQ ID NO: 315692 - DNA, 389 bp, Zea mays
cggggccgaccaacccgtcgggttagatgccgcagcccgtcggcggcagctgccactcctgacatgtttgacgctctcgagagcggcccaggacctcctctagaagtgcctccctcgccatcgtcagccaagaagcgtttgtcccaggcgttcgaggtcaacccgagtgcctcagcgccgatcaaggtggcgttggagagggtaaagcggcactcgcagctaatttccagtcacaggatgtcgctgtcctgagtcaaagcaggagatgggacgcaaagtgttgtgattatacgatacgtcgggtgacacttgtgttttccttttgcgtgtgtacgtattacttgttacgtgtgacatggtgggattttttgtgcctacatatggtgggg

SEQ ID NO: 315693 - DNA, 352 bp, Zea mays
acccacgcatccggccgtgaggcctcggtcgaagagtacgggctcacccgttgccgacattcacaccgggggagaggtgatcgaggggcatgggcaccattccggcgacaaccttcgcagtaatcataccggtctgcttccgtaccacgtgtggtacagcagtcgacgacaattgcactaacggagtcttgtagcgccacatgtattgacgacactaggcgcgccggtgttcgtgaataatgtcatgcactagatccatggcgcgaacgtgaaggtggcgtgcaagcatctcatcagcgggactgctcgagcgctccatcgacagggtgatggactggaaccgtacgtacac

SEQ ID NO: 315694 - DNA, 251 bp, Zea mays
atagtgtgtcgtattacacggggtttggcgcggcggcgctccttctgctggcgggtcgcgccgctgccttttggtgctttgggaaattggtgcgtggattgcgaggaaagttcaggggcacagatcaatctgtgggagtagccaaccaacttcaacatcgtgcatcgattagtcaggttcgtgacccaaagctacatgacgacctagaaactcttggcggctgtgactagctttttgcgtgccggctgttc

SEQ ID NO: 315695 - DNA, 85 bp, Zea mays
tctatattgaatcattgtattatgctcaccaatgatagttctactaaaggatgaacgagatactctttggttctttgaaagaatt

SEQ ID NO: 315696 - DNA, 199 bp, Zea mays
agccctcgcgctagtggcggccaccgccccacaggtagcggaggcaaagaagaagagagcggcggagagcggcgaggcggcggaggcgaagaagatccaggacgacttctgctcgacgctgtgcgagggcaagaaggggacggacctggtcgtgtgcaaggagtcctgcgcgctctcccagcagttcaacctggtgctg

SEQ ID NO: 315697 - DNA, 425 bp, Zea mays
tcgtgggccgatacaagcctctagaataactcgtagaaacagagcaagagcatcgctctcgaagcaaaacgcgcaccacgccgtcgccggccggccacttcgcacgtacgtaggacgcgcacgcaccggtgcatatatggggctcctgaaccagctgtgggacgacacggtggccgggccgcgcccggactccggcctcggcaagctccgcaactgcagcgacgacgcccaggggagagggctggacgaagaagctgcgcgggaaagccaggatgggcggcggcggcggtgacgacgcccccggcacgccgaggagccccaccgtgtacgactgggtggtgatcagttcgctggacctctgaagcccaagccaagacgagaactgcacaaggaaacccaccaccaccatcaacacagctagcgaa

SEQ ID NO: 315698 - DNA, 357 bp, Zea mays
cgcgtccgcgacgatggcccggccgcgcctcctcctcaggttcatgctcgccgacggcggccgtgctgaccacggtgcccggcgtcgcgctcgccaagtcgaagctcgccaatatgagcgacgacgtcttgaacgggcccctcctgaccgagaagatctaggcgaagaacacgctgatcgtgaggccggacgaggagttcaagaccgtacagtccgccatcgactcggtgcccgccgggtacgcgcagtgggtcatcacctacgtcagctctgggctgcacaggggcaaagttgtgatacgggagaaaaacccttcatcttcctgaggggcaacgggaaaggccgggactccatctc

SEQ ID NO: 315699 - DNA, 386 bp, Zea mays
agctagctacccagccagccagcagccagcttgctcgccgcgcccgtccttcttcctcgcctccgttccattccgtcccgccctccaccgccgccgccgcattcagggatggagatgaagaagatcgcctgcgccgtcctcgtcgccgcctcggcggccaccgtggcgctcgccgcggaggctccggctccggcccccaccagcggctcctccgccgtcgcgcccgccgtcggcgccgccctcggggccgccgtcgcctccttcttcgcctactacattcagtgagccggccggggcgcccggaggccgaggaagagacgaacgggagagagagtgacatggctgcgcgcattccgatgcgtgggcatgttttttgattcgacaca

SEQ ID NO: 315700 - DNA, 390 bp, Zea mays
  unsure (1)..(390): unsure at all n locations
acccacgcgtccggagataattcagtagatctagtagtttaactccataattgttggatttcaatacattcaggaccgaggccggcgaatcaatcaagaacgccacctcctaggttagggcgtgttggacctgccatgggggacaggccggcgccgatcgagaaggtcgcggtgccggagaagatggccttgttcctccacgccgccgtcacgtcaccgggacgccagcagcatcacggcgcctcgtcgcacgaggcgcccgccgcgaacatcacgccgcggacaacaacagccaggaataagcagcagcacctgccggtgagccncggggcgtgcctctgctcgccgaccgttcacgaaggctcgttccggtgcaggctccaccgcggc

SEQ ID NO: 315701 - DNA, 81 bp, Zea mays
tctacagtgtgtctgattcaaaaaaaaaaaaaaaaaaaaaaaaaaaaaaaaaaaaaaaaaaaaaaaggaggacaaacagga

SEQ ID NO: 315702 - DNA, 380 bp, Zea mays
aacccaccacctcccccaattgcctcttctcttctcccagcagcagccgcgacgcagttcgagttcgaggaagtcatgtcagcgatggacagagccgacggcgagtttctcgaggacctcgacatctatgtctcaagcttcttagcgtgatctgctggatgtaatgtaaccgatgaacgctagggaatgggaatctgaggcagctgttactgttaccatgagttgctctctgccgtttgtccaggggcagagcagggaagaacacatgttcttcctcggcccgtcccgttgtaaaccttaggatgtgagaatattgaatgtcccatctctctctctctttttcttcggtcgagggtttgcaaggaaaacaatttcataat

SEQ ID NO: 315703 - DNA, 262 bp, Zea mays
gccgtcatcgtaccactctctctcgcttcttcttcttcaatcgtccctccccgcgccggaattggaggaaggagaggggacaagctttccggcgccgacgccgacgcggacccggcgccgacacgatacggtgcatcacgtgcatcacaccgttacggaggccccttggacatcactttgtgctgcaacttcgatataactcagttgcagcatggcctcagtgggcgtggcaagcacatccttgggatttcagagtggcaca

SEQ ID NO: 315704 - DNA, 199 bp, Zea mays
acgcctctacacatgacgttgtgctaacgcgtccgaaaaaaaaaaaaaaaaaaaaaaaaaaaaaaaaaaaaaaaaaaaaaaaaaaaaaaaaaaaaataaggaaagacaagggaggtggtcctggaggattgttagcttgcatgcccgtccatgggatgtcaaatcacttccatggtgtcacctaatttgacttccttgg

SEQ ID NO: 315705 - DNA, 125 bp, Zea mays
ccgcccaagcctccgccccggaaccaaaaaaataaaatggcccccggtccccggtccccggcgccggttaacgccctccccgattcgaaggcctcgcctccgccggggggccgggccaacccgga

SEQ ID NO: 315706 - DNA, 127 bp, Zea mays
agttggtgtcaaaataaaaaaaaaaaaaaaaaaaaaaaaaaaaaaaaaaaaaaaaaaaaaataaaaaagaaaaaaaaacaaaaaagtaaaaagggaggccgcccaagaggtctaaatcttacttcgc

SEQ ID NO: 315707 - DNA, 74 bp, Zea mays
agccacagtcggcctactcagcgactcctaccgctggggcaacccgaccgcgacgtctgcgcgccagctgtcct

SEQ ID NO: 315708 - DNA, 408 bp, Zea mays
  unsure (1)..(408): unsure at all n locations
ctcgtccctccctacccgcggccggccacccacgccgttgctgctgttctggcgcgccctccacctcttctctcgaatgtgccgtcgtcggagcttgcttttggggaggtcgtgcggcatgatctgctgaccgccccaaatcaacccggccgcgcatcgaccgtcgtcatccagtccgacgaggangangacgagagggagatggggagccacagaactaagatgtcttgctgcggtggcgccgaggaggacagctacggcccgccggccaaccaggcggttccaccacccaatgccaacgcccccggcaacagaggcgggccgagaggaccgggggcgccgatggtcggcggccccgccaagcccgtcagcattgacgtgcccgccaataccctttgacgagctcaa

SEQ ID NO: 315709 - DNA, 250 bp, Zea mays
  unsure (1)..(250): unsure at all n locations
agaacggcgancatacggctgggggacgttgaggggcgcttcacagatcgtctcggcgatggtgcgatcgtcggcgcgtgcttgtggggaggtcgtgcggcaggatcggcagagggcacttcggcgaggcggcctcgcatcgagagttgtcacggagtgcgacgatgaggatgaggagacggatagggggagtcacgctcgtaggatgtcaggcggcggtggcgccgaggaggagagctacgggccgccg

SEQ ID NO: 315710 - DNA, 266 bp, Zea mays
agtgacgtccgtattaaaagctgcaagtaacatagtgataaggagtttctaaatccaaactgcgaggactgcgccattttggcaagtggcataaagacaaggataaggaagatgataaaaatggggctgaggacggtgaacatggtccggttccgatttcagtcttcatggttgcaagtgtcctcaaggagaagagagaaaaccagtgagaagaatcgagacgactgcatcatcgtatcaggatattgaacgatgtaaatgggaac

SEQ ID NO: 315711 - DNA, 376 bp, Zea mays
cgtattataaataaactctcgccgccgccatccgagcgaacaagccaaccgaccccgtccccaaggcaatccgccgccgacgtaccaccaccaccgcaggagcgagatggagatgaagaggatcctcttcgccgtcctcgtcgtcatcgccgcctcggccaccgcagtgctggcctccaccgaggccgccgccgcgggcgccccaactgcctccgagtcgtccgccgaggctcccgctggcgctggcgctggcgctgccgctggcgccgccgccgcggggccctccgccagcagcggcgcgcccgccctcgccgccgcgcccgccgcgctcctcttctccctcctcgcctactacctccactaagcctgtgcgtgc

SEQ ID NO: 315712 - DNA, 138 bp, Zea mays
atcgtaagcgccgcccttttttttttttttttttttttttttttttttttttttttttttttttttttttttttttttttttttttcacgccaaaattgggggggtattatttggagtatcagtataatcttgggcgt

SEQ ID NO: 315713 - DNA, 367 bp, Zea mays
actagatcgcgagcgccgcccttttttttttttttttttttttttttttttttttttttttttttttttttttttttttttttttttttttcacgcgaaagttgcgacgagattattatgagtatcattaaaaacttggacgtacagaaacaatagcagagtgagagatttggatggatcccccgcacgcgcccgcagacgtcgacctaatataatgaacaatgcgggggcggccggaatcaatgaatcatcagtaacggggtagaaatcatgtcatgtcagggaaaaaacgaagcaccgggacacacacgcatgggcatggggacaaatgactgcgtggcgaggagctgcaatccacggacgggga

SEQ ID NO: 315714 - DNA, 91 bp, Zea mays
  unsure (1)..(91): unsure at all n locations
aaagggggngcgtcggctagcgcgggttgggtgccggttgcgtttcgctgcgcggtggcgattctactcgtagccagggatcgggatccac

SEQ ID NO: 315715 - DNA, 78 bp, Zea mays
aaatctcaagaactacccgaaactttggcgacagataactctgcattaactgataagttcaaccaacaggcacatgta

SEQ ID NO: 315716 - DNA, 190 bp, Zea mays
aaggatggcacgatacatacaagattcgcacggtccctgcgcacggaagacaagcataactcgagagctggtccatagtgttagtgtgtctgtctggcaatcgatgaatccccatgacgacgtccccgccgcgcgcacgcctgctcgccatggcacggggggctgccctgcaggatgcacgctaagttag

SEQ ID NO: 315717 - DNA, 349 bp, Zea mays
accttgcagtcatcccatcagtcacggcaacacatccggccatgtcaaggaaaatgtctcgcgccatagttgaggtcctcttcgacatcgtcgtcatcgctgccctcagagcggcagaggcaccggcagaatgaacgcatgcaagcagtcctgccaaggcaccggacgaatgaactcatgcaggtagtgctgcagctcctgccactgcagccaagtctgctgccacgagaactgcacctgctaaggcatctaaagccgccgttaccgccgccgtagccgctgcgtcatcgacgtcgtcgtctacgaagtctggtccaactgccgcgccgaccacagcctcctctacaac

SEQ ID NO: 315718 - DNA, 279 bp, Zea mays
acaagccactcatcgaagacggccgacgaccagaagcagaccatgcattcgccggctcgccatgtaagaaacaggggagttgaaagtgcgacacaccagagaacgtgtctgtgtatactgtgtaaaggtcctaaaggaaagagaagatgcacatattcaaagcctcggaactaattgctctgttgtccactatgttatccaagtatatatttgttcttcacttgtgttgagcaaaaataaaaaaaacataaaaaaggggcggccgctccaaaaggttca

SEQ ID NO: 315719 - DNA, 290 bp, Zea mays
cggtcgagcacgcgtctagcactatgcaatgaactttacacagtagtccgtgaagttttggatgccattcctccttttgagactacacggtcaggatgcagtcctgggctcctggcattgagttccttgaggatatctgttgagaaagccaagaatttactccagtattgctcagagagtagcaagctttacttggctgttacagcagaaagcgttctaacaaaatttgagaattcaagacaaggacttctggaaagccttcaccaagtagaagaaacaattccggaagc

SEQ ID NO: 315720 - DNA, 350 bp, Zea mays
tacggacgcgtggcggacgcgtggcggacgcgtgggcgaggtgatgcgcggggaagggaagggcgccgcggtcagggccaaggtggccgagctgcagaaggccgccgccgaggggctccgcgacgggggcgccgccgccgccgcgctggccgaggtggtacaggggtggacgacgacgacaggtggaggagagaaggactaagtggtggtgactggtgatgccgacgcgattggcgcctgccacctgccgcctgccgcctggtgccacaacgattgtcctcatccagaccaactccaacttgggccgggccaaacgattcgtttgttccttggccttgggtaaaactttg

SEQ ID NO: 315721 - DNA, 85 bp, Zea mays
  unsure (1)..(85): unsure at all n locations
cgcgtctaaagtaagtcctattacncactatccaccaccgcgccgctccggtttaatttctcctcgaccggccagcgcaattctg

SEQ ID NO: 315722 - DNA, 195 bp, Zea mays
acgggctcgcacgcttggtgcctccttccgtgcctgataacgtattgcagtagcggatgacagtgacgatcggcaccttctgcaaaatctatcctgagtaccatgggtcgagcagcctgggagtcgagtccatcatcgacaccctccgcgtgctcctgctacaggtggtcaccacgccgccattcttggggatca

SEQ ID NO: 315723 - DNA, 374 bp, Zea mays
aggatcactatctcgctcgcgagggcactctctctctcgctcactcacaccgtgctgttcctcgtttgctgtcgcctcgaagagcctcctccgttccctctccctcgaccgatcggccggtctcacggggcatttcgcggcgctggtcgatctctccgcgctcattctgtcaacggattggtcggttgccgattccgtgcggccggataactcggatttattcagtttttcgggttcgctacatgcgtgtgcgatgccgggcagctccctcacggcgtcccacgacgccaccggcgacattggcgccgcgctcgagctcgatctcgatgatttcaccgccagcggcggcaccgactgcatcgtggcgctcgcct

SEQ ID NO: 315724 - DNA, 226 bp, Zea mays
gacccaagcgtaagggaagttccatgtggaacatgtccccgggttcctatgtgtgggaaaacaggggtgtactttttttaaatgggcaaccccattggtagggaaatccaagggggtatatcctttccacgaaaaggattggatagatgtatggctatctttatgttgtgttctccgaccacgggaaagaatggtaattgaaaaacactgtggtgctatactgagc

SEQ ID NO: 315725 - DNA, 404 bp, Zea mays
ggtcgagacacgcgtccagtttaaatcgcgagcggccccctttttttttttttttttttttttttttttttttttttttttttttttttttttttttttttttttttaatcaaacatatcttgttggagttagatattatttatagagaagctacgccacagcgacaatagaactggtagtatggttggtcattggtgtttgtatatactatcgtcgcgccgccgcctcctcctccgtcatcgtccgaccccaccgtccaacggcatggcggccggccgcgacgacgtcaatgcatggtgtgcgatcgagccaggccagctgcgtgccccctggccagccagccagcagggagattaaaccgccgggcgccgccttggggctcaattcaagctgcgggggcaac

SEQ ID NO: 315726 - DNA, 225 bp, Zea mays
aaaaccgcctagtcacgcgagtgatcggcgattgaggtatggaacgatcatcatcgacgcgggcaactagactgacggagcggactgctgccgggcgggtctgaacgtcctccatcagcgtttctcagcaccgcagtctgctcggtagcaggcacggcaatgcgtatgaatgggaaccggctaggaatccagaacgtgcatacgctgaccatcagaggcgacggc

SEQ ID NO: 315727 - DNA, 299 bp, Zea mays
  unsure (1)..(299): unsure at all n locations
ggtcgagnccgcgtccacccacacgtccgggcggtggcagtggcacaccttcgtcttccttttgtttgttttttttccttcctctttctacttgattttcatttaacgaattggtatcgctgatgcaccagtttaatttggtgccctgttatttgttctttccctcgagtgagggatcgacacctgtaccattgcttgccatttgtctggaccagttcaacaattcgatttaaccatcaaaaaaaaagaaagtaacaggcagttcaagaacatcaagcaaggcgtggaaacagataacc

SEQ ID NO: 315728 - DNA, 254 bp, Zea mays
atgccgatgagcatggactgcctagtaactcgatgatgtgtggagtaccatggctgactcgtcagagtatgtgagagctcataactaggccaggcataaaatgtggactcatcttcatgaatgattttcattcgcgatttgagcgtatatcgcattttaatttgttttgaactgtcattgtacgtcatttatgacgttcaaccgtttagtcatcacgtatataattcatgtatcgagatataggggatttcggg

SEQ ID NO: 315729 - DNA, 229 bp, Zea mays
gacccacacgtccagagctagctagccagccagccagcagccagcttgctcgccgcgcccgtccttcttcctcgcctccgttccgttccgttccgtcccgcccgccgccgccgacgcattcagggatggacatgacgaggatcgccagcgccgtcctcgtcggccccgctgtggacatcgtggcgctcttacctgaaggtggagacgttggatttcatgtcttcggttg

SEQ ID NO: 315730 - DNA, 217 bp, Zea mays
gacccacaagtccaaaggaagtcgcgttaatcacggtggtcatggacgccctccactacgcctaccgggtccatgtcgtcctcatcggacacgtgaaccacgtgcaagttgatccaacgggcctgtgcaaatacacgcatgcaacgttctagcggcgtgcagaactcgtctggcaacacggcggagacgcgctgagagtatcagcgacagcccacgc

SEQ ID NO: 315731 - DNA, 185 bp, Zea mays
actgcttcatactctcgtagagagatccccgcggcccaataaaaacccgactcgctagctgcactacacactcgcagatggccggcctcaggatgaagttcgtcgccgtcgccgccatggccgccgcgctcgtggcgtccgccgcagccgccgaggcccccgccccggcccccgcctccgacgcc

SEQ ID NO: 315732 - DNA, 94 bp, Zea mays
ctgacagcgacgatgatgccacaactgcgtcgcctcgtcgcgctgggcctcgtggccacgggcagtagcgcggcgcccgggcgttgggtttgtc

SEQ ID NO: 315733 - DNA, 355 bp, Zea mays
tacaaccctctatactgacgtcgtagtatgaccgtcgttttgtacccgttgagatcccaggattcagactggtgccattcgatttgatttggcgcggggtactttcctatggccgcctccatcgcggcctcgcccttctttccagggtcgccggcgccggccgctcctaagaacggccttggagagcgcccagagagcctggacgtccgcggcgttgcggcgaagccgggagcctcgtctaatgccgtgagggcgggcaagacgcgcgcccacgctgccgtccccaaggtgaacggtggcaagtctgcggtggcggatgtggaacacgagaccgtaactgtaccttcgtcggtgc

SEQ ID NO: 315734 - DNA, 354 bp, Zea mays
  unsure (1)..(354): unsure at all n locations
gttacatgcagatctttgtgaaaacccttactggcaagaccatcactcttgaggtggagtcttcagataccattgacaatgtcaaggccaagatccaggacaaggagggcatcccgccggaccagcagcgtcttatctttgccggcaagcagctggaggatggacgcacccttgcggattacaacattcagaaggagagcaccctccacctggtgctgcgcctcaggggaggaatgcagatcttcgtgaagacattgacaggcaagaccatcaccttggaggttgagagctccgacaccattgataatgtgaaggccaaaatccaggacaagganggtatccccccggaccagc

SEQ ID NO: 315735 - DNA, 300 bp, Zea mays
acacgcctcacacacgctctcgcgctcaccggcgcctcgcacctctcccacgctggccgcacccgcaatggggtgcgccgcgtttgccgccaacggggccggggcccgggcggcgggggtggcccggccccggtgcgcggtaaaccaagggttcactcggtctgccgcgcgccgccgccgccgcagggagcggcggagtcgtcgtcccggggcaagaggcgaaggcgcaaggtggcgccggaacccaaggagccggcggaggaagggaccgccgcgctgccgccgatgcccggctcgccc

SEQ ID NO: 315736 - DNA, 317 bp, Zea mays
aaaagatgctattgactacgtcgagtggcactacagggagcccagcgatgacaagttccggcatcgcaagtcgtggctcacctccagtcgcggcggcagctccagctgcgacgacggctgcatcgacctgcccatcaacggcgacaacgacgacgtcatcaacttcatcctcgacttcgacaaactgcaccgcgtcaggctggaccgcatcacccacgcatgcggctgcatgtgcgcaagcatcgtcatgcgacactccatcggcggaacgctctcctacagcgcagtcgggttctgcggaggtttcgcagacgcat

SEQ ID NO: 315737 - DNA, 322 bp, Zea mays
caagcctctaaataaactcttattagtgggatgaacatatattctggattggatccaacaaatgtttgtgaggatcatacgggtatgatgatgcttgtgagttgtgtgtaagggggaaagtgcatgtaacatttcaaggctgtggtattattggttggacgtctatgctcattgggtttacacttttatttcactttctttgagttacacaaaagctcacgagtttgtgtatgcatattccgcgtaggtagtcttcatctacagaggaggttgttttaattttctatgcactctacagtgcaaaaatatattttacacagcc

SEQ ID NO: 315738 - DNA, 354 bp, Zea mays
aaaagggccgcctccgcaagcagagggtcagctacggttcacgcaagatggcgtgacattatcgttctaccctgggttactgggtggcagcgggggcgtgggtcatctaggtattcgcgttgcgggacgtacgcctcatgagcgtagccatcctgcagggggggagatttcaggtttcacctggaacgcgcacgcaccgtctggtaggtgaagcagcagatcaggaaggaacagcccgcgtcggcgcgccccgacgtagcaagagggcgtgctcgagggtgaggacctcgacgacagccacctcatccagtatatgtgcacggcttagggcggcgtgagagacagtgacgggtg

SEQ ID NO: 315739 - DNA, 270 bp, Zea mays
attccggccccggcgacaattagcgccgccgtagtcctaagcggatgcatcgtccacacgagagccgcaggtgatgaccacagttgcgacgagtagttgatcaatagcctcatgtagggctagacctgacttgacgggttcgtgaccaacgtcaccgaggtagatccccgacacgaatgtgacgcaggtgtgcatgcacgtcagctcaggcaacctcgagcgcgtcatctacggtgtcatcgatgccagtggtatctacacgatgtaact

SEQ ID NO: 315740 - DNA, 312 bp, Zea mays
acaaatgtcattctaggacctaggaaggcgaaagtgctcagctgattcggcactaccaccaccagacaaactgaagccaattccgttcagcgtgaagtgaaacgttagcaattataggatagtcagtgtcttactgtctttaacctagttgtttctctatttccgcttctttttctagtttaccttatggtagagtggttttctagtttcccggtccatctagataggaaaaagcgcttggagggaagaatccatggccgacatctatttaaccttttcaccttggtactaagataatggagtattttcgag

SEQ ID NO: 315741 - DNA, 317 bp, Zea mays
aagacagtccttgctcagatcgcctcggtcaaccgaacacatcacggccaccggaaagaaaatgtcgcgcgctacatctgcggtcctcttctacatcctcgccgtcgactgatctcagcgcggcctacgtaccggaagagtcactatggcaggtagtcgtgcaaaggcaccggtcgagtgcaataatgcacgaagtcctgcagactcttggcacagcacacgactctgctgcaattaaaactgcacgcgctaacggacatcatgccggatctagaccagccgttgcagctgccccatcgtcgtcttcgtctaggaag

SEQ ID NO: 315742 - DNA, 418 bp, Zea mays
aacccagccgcgcgccctgcgctgcgtgctccaccagcttttcgtggtgccgcccggccgtgcctgtcggccagtggctggctggcgctcggccggtcgtcctcgcctgcctctgcagcgccagacaccgcaggacggccgcccctgttcccggaaccgatccgcagtgcgggcacggggcagatgccagtcggcaagagaaggagcgattgccgccgcggcgtggtgtgtggcgccaccagcgtgtttgccttttgcccgatcgggccggccgagcgcgggagtcgaatcgctgtcggatctagccccccccgcccgcgcgtggcccgctgcgctcgccgcgcgacatggcccgggcccccggccgacggacgggcccgcgcgcctttgaatgattgaatccggcccgccaagccca

SEQ ID NO: 315743 - DNA, 395 bp, Zea mays
tacaccggatcatcagagcctgatctttgctggcaagcagctggaggatggccgtaccctcgccgactacaacatccagaaggagagcaccctccacctggtgctccgcttgcgaggtggtatgcagatctttgtgaagaccttgactggcaagaccataaccctggaggttgagagctccgacaccatcgacaacgtgaaggcgaagatccaggacaaagagggcatccccccagaccagcagcgtctgatcttcgctggcaagcagctggaggatggccgcaccctagcagactacaacatccagaaggagagcactctccacctggtgctccgcctccgcggtggtcagtaagccatgggtcatttaagctgctgctgtacctgggtatctg

SEQ ID NO: 315744 - DNA, 94 bp, Zea mays
  unsure (1)..(94): unsure at all n locations
aaaangtacgacacactagagggtctcgcactattccgggatacgcaggggggagaggaagtcaccgtgcacggcgtcgattccggcgaggagc

SEQ ID NO: 315745 - DNA, 152 bp, Zea mays
aaaaaccaagcctcagctgttgtcgctgccatcagccgtgtcatcagtggcagccgctagagcaactgccggtcattcgactccactgccgacatgcaggcgagtggtatactacaagcagtcgaatatctacaggttgaacttgcaagtgc

SEQ ID NO: 315746 - DNA, 318 bp, Zea mays
  unsure (1)..(318): unsure at all n locations
aaaancgcggtccctctaggcgcggcgggagttcatgcggcgcggcggcggcggcgggaggggcgacgccagctatcgcaagtcggtggtgggggtgcggaggcgtggtcacggcatcgaggtgttcttgcaggaagcagcatcatcagcccgacgacgccggctgcggcagcagcgacgaccactaccagcacgacgtgatcatgctgaggacaacgaagagcgggcgggcgttcccgccgccgatatccgtgatctgcaagggcgggcgggcgtggctctgcctgctggcgcaccgcgagggtggacgcctcgtgc

SEQ ID NO: 315747 - DNA, 426 bp, Zea mays
acagtattcttcactcatgagtcagggcatcagcaagttaacttcctgaattactagataatatggaatcgaatcaaaccaagtactagctcccttgttccatcctctgcatggctccgatctagtaaatagcatataacccccatagaagaaaagaaataagtaagctcagacagtgactggaccgcacagaatcatatttcatcagctcttttttcttgaaattttattggttatttacctatttgctatcatatattcataatccctatcccctagccttttatttcatttttcttgttacagtggtcatgtgccccatgcacatattctttgaaatgcactacatgtcttttcccatgcacaaggataaatagtctatttcctttcggagtgtaagattcatcatgaaaagcacttctcata

SEQ ID NO: 315748 - DNA, 415 bp, Zea mays
tacaagactctaaaatgagtcgtattaactagaacacaaactgaacagagtggtgagtcctacgtacgtacgtgtaacaactagcaccggtcgatcgatacaatattcttcaacctgacacgtggggtctgcactaccggcgacggacgagggtgagctcgtcatattctcaaatttccaatatttaatatacgtgtgtgcgataatgtatttatttgtaatttcgcgattgtgtaatacttgggggatttgctatgtttcggtcgcctctaaaatacactatatttttagacaacgatctttatcgttaattagttcatgagcatgtaaagctaagattcattttaacgcaggaaaaaaaaacaagaacgaatggatacattgtctcttaaaaaaaaaaaaaaagggccgccgc

SEQ ID NO: 315749 - DNA, 338 bp, Zea mays
ctcaagctggctggatgacagcatggccccacaacgctacgggcagggcagacaatccgcatcgatccccaccgcaaattgcccctatctatccctccctacaaatcgaaacaaagaaagataaaatcgagaggacgccagggccgattctctgcgtgacttggggcgtcgtcgccgagttttctccggccgagggcggcgcgaccggacaaccagcgtgagcgcgaccggcgacatgactcgcggcaaccagcgtgaccgcgaccgtgagcgcgcggcggcgcggaagcccaacgccaagaactcccaggacgggctcaccccggagcagcgccgcg

SEQ ID NO: 315750 - DNA, 317 bp, Zea mays
cccacgcgtctgaaaaaaaatgaaaaaaaaagataagaaaaaaaaaaaagaataataattgatatatgataaaaaaagatataagctctaacttaaataaatatataatgctaaaagaggaaatcaagatgtacaatacataaaggataaaagggggggccgtcttaacggttttggccttttattgctttgagcgcctcatagaagtttttgcattggatcatcaaggtgtagtttatgtggattgttttttacatcttcattctgggaaaaccttggttttatgcagttttaggcgtttttgtcaaacgcccttt

SEQ ID NO: 315751 - DNA, 337 bp, Zea mays
cgggcagcccgcagacggagggtaggacgccaccgacttcagcgtgctgctgcatggggtgaaacacagctggcgcactcgcattgcggtggacaacgggttcatcgggtccaaggaccacctcgcgctccagctggtcgtggaggtcaccgtgcatgtgcacgtcatcgcgctcggagttcgggcagacgacgctatccgtggactgctggatcaccggcgatcggctgagcaacgacgtgcacattgcgtcgcacagttgcaggagcagcttctcggaacgacgacggtccagagcgcctgtggtctggaactctggatcgtgggggaatggcaa

SEQ ID NO: 315752 - DNA, 377 bp, Zea mays
gcgggggcttttcgaaattccgggccgcggcgggcgccgacaacgccttgattccgagcgcgacgccctctcgattccgacggcgacgggctgccctgcgccgctgcgcgccgtgccagagacgggtcgggtcagggtcagggtcagggtcaggccgtcagtcgccgccctgtactgcggccgggacgtgtgtcggggtgcgattcgtgccgcccgctcgtgctcggccccgcggttcacgccagcgattgcggtgtggcttccccaaattccagaacagcgtcgtttgctcgtttcgaatggagagatcgatctcactctcactcactgtcttcgcgcctaaacaatcgtccgtgcggccatcattcctattattt

SEQ ID NO: 315753 - DNA, 336 bp, Zea mays
tgcaatcgcgtgcgttgctagcttgctcgatctgcctctcctctggatcccctgtcctgtccctgttaatcgcgcgcgcttgcctatttacaaggcgaaacaagcgcgcagcagtggccatgtcgtccgacgcggtggccgccagcagcaggaagggccggctgaagcagcgctacgacaacgagttccgcctcgtcgcagggtgcgtgccgtaccgggtgaacaagaaagacgacgagggcggcaacccgtgcagcagcctcggcgacgacacggcggcggaggtggaggtgctcatgatctccacgcctaaccgggccgacatggtcttcccca

SEQ ID NO: 315754 - DNA, 334 bp, Zea mays
aatgcctgggccagcctgcatcttctacggccggaacatcggtctacacggacaagctgacggagatcggcgtcgtcgtggacgcgatgtggaagctgctcgacgcctggcctaacgagctgcccgcggtcgcttaagtcatccgagtttgtttttttgcaggattcttaaaagttggaccgtcctgctagtactccatgtgtcgtgttttcacattggaggacgtctgtatatgtaagaaaatcctctggcgcttgtgctcagcttgatgaaatatccttgtacggttggtacctggacccgctagagctggctggttcgtcaaattgtgttc

SEQ ID NO: 315755 - DNA, 381 bp, Zea mays
cccacgcgtccgggagtagcagccaaaattgttgtgatactgctcctttccaattgccttcgtctagtaagaaagtgcatggatattgcagaagcaatcggcatctggatctagcccttggcttctcatggcctagataaagactccaactttaaccaaagcttcaggagtaagctagtgaaggaatatctcaaattttttcagcacttcgactaacattctatgcgaaggaaagcatatcccagctttcatgaaacttcggaaaaccactactccgatccatctgactcgggaagaagaacagtgctctctcctccggctctcactatggatatatcatgaaaatattttcccttcattgtctcaatttgtcctttcttg

SEQ ID NO: 315756 - DNA, 372 bp, Zea mays
  unsure (1)..(372): unsure at all n locations
atgtgtactgaactcagaaggtttagcatttagggtattttagctaatgctaattcggtgaaagagtgtaacacccttcttgcagatatgaagttagtagaagggtgcaatgctctgctcctctttgttagtgaaaaccctatcagatcggggggaggggggatgtgtgctcggatcacctgtggcactgaactttttttgttgtggtgtggacattggctgccctctaaaatggaagtttgtttgcgcatcgagatgcgtcagctgatgaaagaaccaaatacaaggagcaggagtgatcttcctttttctcagatggaaactgcaaacgggaaacagtgtggtgtangaagaactctaacgaactcaaga

SEQ ID NO: 315757 - DNA, 66 bp, Zea mays
cccacgcgtctgcggacgcgtgggaaaaaaaaaaatgactcaatcagcaacaacataaataaaggt

SEQ ID NO: 315758 - DNA, 303 bp, Zea mays
actgtgatcgtaacggagcacgcccatgtggtcccggcagctcccggccgtcctccaaagtcacaagatcctcaccgtgatgcacatctacatggtagatcgccacgggttcagttcatggcatcaacaggcgctaaatgaaagcgacagggtcatcgagatcccgtacgacctattcctctccgtctacgttgcgctacagctcgacttcatcaatcacagccataatactgtcatcctagaatggtacctcgtcatcttacgtcattcgcataagcattcacccaacataatgttcgaaga

SEQ ID NO: 315759 - DNA, 361 bp, Zea mays
aaacactaacgcctacacggagggggacatggacacgatcccaaagctccgtgctgcagacggccaggcggacgacgcagtcactgctgcaccggctcgcgagaagcacacagtcatggcgacagagcttctcggcggtcgccgcagccgcgcatcaggatgcggggcggctgctgctgcaggtgcagtgattagcgtttaacggagagctcctgcatgaagttaaccacaagtccacacggtatacacgacggaacaagtgtttccatcagacgatcatcactgaagaatcaaccatctcatcactgtatgtgtgccgtgttcttgtcatttcatcgttccaatgcaacagaaacgggtt

SEQ ID NO: 315760 - DNA, 76 bp, Zea mays
ttttttttttttttttgagtttgcacattgattttccaacgttttgatacttataaaatgctttttttgttgtttc

SEQ ID NO: 315761 - DNA, 374 bp, Zea mays
gacacacgaatctacactcatgccgctaaccctcgcactagtggcggcaatagcaccacaagtaacggcagcacgaaacagtacagcggagaacagcggtactgacaacagcggcggtgatggtaaggcaggtattcgacacaatagcgcaccagccgaagccgaagacaacggcactgggttgccgccatcactgcaatggatcaagagcttgttctcacgcatcggcacaatcctccggtcattccagcggcagatcgcatcattgggagaattgagcaatacctcaatataacgataggcgactgttactgcttgagcccattggtgccaatgtacatacgaacatcacgagcagttctgcatgcaaattt

SEQ ID NO: 315762 - DNA, 186 bp, Zea mays
  unsure (1)..(186): unsure at all n locations
aaaanagtgtcactcttctcccggactctcatctacacggtggcgtcgatctcgggattcatcatccgcatcatctactgctgcacaggaggaggatagactgcccggtgctaatccagctgtcgagcagtggtacacttcaccatccaggcgcccgctcacactcgcagactcgcatcctacgtg

SEQ ID NO: 315763 - DNA, 209 bp, Zea mays
gagatgctcatcctgcagggccacgcgcagcaagggtatgtggtgaggcaagttgcatcgccctcgacatcctcacgtcgtgttcgggcagcgtgagacgcatcacgggctccgcagcggcggctagcacatccattaccaggcgtaggcgcctggggtgacgtacgactcccaacggtacgaggccgtaccaggctatggtcatgttg

SEQ ID NO: 315764 - DNA, 351 bp, Zea mays
  unsure (1)..(351): unsure at all n locations
cgacccacgcgtccacccacgcgtccggtnagagttgatgtacttggatgggtagtttggggaagagtatgggtaagggacgttctgaggtcgtcgaaatcctcgcgtcgggttcgatcagggtgacccgcctctcgggctcggtggtggcggctatcacaaccagcagcagccgtacgcacctgcggagacatactatgcccattggtaccaggccgtaccaggctatggtcctgttgctgaaggaagacctgtgagaatgaggcgtctcccatgttgtggcctcagcttaggctggtgtctgttcataaacgggtttttcatggctgacattccatggttcattggagc

SEQ ID NO: 315765 - DNA, 269 bp, Zea mays
agtggttctacatcgcgatggccgcccttttctttttcatatcgagtttgcaacctgtattgaaattactacgtggacggagagccagcggcagcagcccatgcatcggaaaaggtcgccaccgccgccgagaccacgacgacggtggaggcgaataagaacgccgaggaggccgggaaggagaagctggcgcagcaacgctgatcgactgtccgtgcatgcgtgccaattaatataattggctgatgatgcctgatgttcagtgtgtg

SEQ ID NO: 315766 - DNA, 116 bp, Zea mays
tcaacacgtaggagatggccgcacctattgcggctctaccgaggtttcaacctgtgtcaccagtagcacgcacagtagaagccaacgccaacacgacaggcaaaggtataggacgc

SEQ ID NO: 315767 - DNA, 268 bp, Zea mays
cccacgcgtccggcagcggtggccgtctccacctctgtgtgcacgtcctcaaggcgtagcacgggctgtccgaacgtgaggccccaggcccgtccgctcctaggcaggccgtcgccgcgccggaggctgcagacggccttggccgcgacgggcaagacgccgggcgaggcggaggagcaggtccccgcgtgggccaagcccggcgcggacgagccgccaccctgggagcgcgagggcggggccgcgcgtggacaggaggcccggcagg

SEQ ID NO: 315768 - DNA, 267 bp, Zea mays
cgacaagatggcgtgcacaaacaatgcgatgagagccttgttcctcctggtcctcttctgcatcgtgcatggtgagaaggaagagtcaaagggcatcgatgcgaaagcgtccgggcctggtgggtccttcgacatcaccaagttgggcgcctccggcaatggcaagacagacagcacgaaggctgtgcaggaggcatgggcatcggcgtgcggcggcactgggaagcagacaatcctcatacccaagggtgacttccttgtcggaca

SEQ ID NO: 315769 - DNA, 113 bp, Zea mays
aaaaaaactcagataacaaacaaaagttacaactctggtacaacatggctgcgtgataacatgcatgtatctgaccaaacaaaggtgacggcggcaagcaagcacacgcagat

SEQ ID NO: 315770 - DNA, 400 bp, Zea mays
atacaagcctctaaagtgagtcatcttactccattagttgccagcacatccaaatataaccgatagacctcagccctcatgcaagccgaccgcctacgtaccaccgcgccaacccgaaagtaagatggagatgatcatgacgatcctcatcgccgcgctcctcgttgtcgccgtctcgggcaccgcagtgctggcctctaacgacgcagctgcagccggtgccgaatccgcatccgcgtcgtccaattatgtggaatcctcccgctggagcccccggttacgtctacagcactggcaccgcctcgaggctgacagctagaggtccagcccttgccatagccacggcattcatcgttacacgatgcatcatcatctgtaaatctgtgaaactcatcggttt

SEQ ID NO: 315771 - DNA, 250 bp, Zea mays
gggtcgacgcgctgctgcacgatggctactgccatacgcggatccgactggtcgtcggccgcggcgagcttgtaaacgaccggcttgccgccgatggtcggatgcttcgcgttcgcgtcgtcgatcgcgagttgcgcgccgttctgcaggtccttgccgatccgcgcggacgggccggtgagcggcgcggcgagaccgatcaggatcgtctgcggcgcggattgcgcgaacgcgggaacggatgcggcca

SEQ ID NO: 315772 - DNA, 236 bp, Zea mays
cccacagcgtggcctcttaacgccgcacgcctatgtgctcccggaagctgccggccttcctccaaagtgacaagaacgtcaccgtcatggacatcaacatggaaggtcgccaagggttcagttcgtggtaccaacaggcgataaactaaagcgataagggcgtagagatcccatacgacatattcgtcaccgtctccgttgctctgcagctcggatcagtcaacctcagccatatt

SEQ ID NO: 315773 - DNA, 244 bp, Zea mays
agcgtccccgaaccaagaacatgaccataaccggcgtgctccggccgctcctcctccctgggcctccccccgccgcggataaaaatttccgccgaaggcgaaggcgaaggcaacggcggtttgaaggccgttgccgatgccggcgccggcggcaatccaaccccaaccaaggaacgccaaccaaacctggccgctgggaaaacaacaacccctcctcaaggcggcggttactcaaccccaacca

SEQ ID NO: 315774 - DNA, 268 bp, Zea mays
cgacaagatggcgtgcacaaacaatgcgatgagagccttgttcctcctggtcctcttctgcatcgtgcatggtgagaaggaagagtcaaagggcatcgatgcgaaagcgtccgggcctggtgggtccttcgacatcaccaagttgggcgcctccggcaatggcaagacagacagcacgaaggctgtgcaggaggcatgggcatcggcgtgcggcggcactgggaagcagacaatcctcatacccaagggtgacttccttgtcggacaa

SEQ ID NO: 315775 - DNA, 406 bp, Zea mays
  unsure (1)..(406): unsure at all n locations
cgtggncttgctgagcgtggccctagtgggcctgctcctctgaccagctcgcaattaccgcatccgcccagcagaacagacttccacgtcctcggtagcgtcgacggctctagtgactgcagcaggtgcgtgtcagaatgtcgcgtcctctaatcagatatgaatctggctgagacagactccgagtcgccggcacatgcgccggcgccagggccgtcgtccggttgaactgagaatcgtgcgtccagccatgcaaggtggtcagaatgtacaactaattagtggctcaatcatgtgtcaggctaatagtgctcttgccataattatatagatatacgcacagtgtgtgctaagctacccacatgcattctattgcagggcgccgcagatatattaaacaactgtg

SEQ ID NO: 315776 - DNA, 268 bp, Zea mays
taaacagacttgcagtcatctcctccaccaccaccaccaagctcaacaacagccagctcgcgaaaataatgaagagccgcagcatggcatcatcggccgcgctcttggtgctagccctcgcgctagtggcggccaccgccccacaggtagcggaggcaaagaagaagagagcggcggagagcggcgaggcggcggaggcgaagaagatccaggacgacttctgctcgacgctgtgcgagggcaagaaggggacggacctggtcgtgtg

SEQ ID NO: 315777 - DNA, 246 bp, Zea mays
gcagcatcgacgacactcgggtcctgtgtggtcacgccgacggtcctgctaggtagctggatgcgctcgtctgctgctccgagatcgatggagcttctgaatcctaggtagctcacgctcgttcacctatcggtcccgtgcatgtacatagttggggacacacgtcgctaggacgatgagagagagagagagagcatggtagggtgaagactggaagatgcttgtaaactgtaatttgatcttggc

SEQ ID NO: 315778 - DNA, 379 bp, Zea mays
acacacacgtccgctgcgcggcgccaatccgctcggctaactcaacgacgtgccgctggccatctgcgcctcactgctcaaacacttggactctgacaacgaccacgatcagtaataccacatcggcgatcacgatcgatatgtaagagcacgtcgtcaacgacggagcgcagtcgtcgcagactggctggcactaaaccagatctcctcttcacgtgaatgacacatctgtaactgagataggaaaggacaacagcaatgtaactgcgtggctgtatcaaattctgagtgctggaatcatgctattgtcacccagtgttcgttttatcatacaagttgcagcgcagctcaagacggctaaggacctgttcgtttgtgt

SEQ ID NO: 315779 - DNA, 266 bp, Zea mays
gaagattccactaataggtatgcaactttttacatcgtttcatatctaataatccaaatttcagtagttatatatagttatttactgcaagaagttaatttttagtttcagttactggaacttggaagaactaaaactttttacacatgtatattattcctgcgcatggagactaaaatgaaaaaaagaacaatcggcccataatttatagctttcaatatagaactacatgatttggtgcaaaatatgtgattataatttttgtt

SEQ ID NO: 315780 - DNA, 262 bp, Zea mays
gggccgacacacgcgtccaagcggacgcccattatttttttttttttttttttttttttttttttttttttttttttttttttttttttttttttttttttttttttttaaaaaaaaacccaaggcattaaaaaaaaaagcggggtaaaaaggttgatcgatgggaaatgagaatgaagaacaaggcaagaagatacaaacaaagacccaccaggaggtcagacccggcattgacgactcaactacaagcctaggagaaaaa

SEQ ID NO: 315781 - DNA, 284 bp, Zea mays
gggccgacccacacgtcaagcgtggcgaggactacaggaggttcggagggataagactcagggcactacatggacgtcgtcacgggaggcgacatgtggcagttgctgaactattgcacgggggagatgaatgaggcgctggtcaatcttcaccacagccaaggcatgctgcagaagtgcaacctctacaagttgagcctgttcttgcacaggtggcaggaggagtcttagcccggcgacatcggctggaatctttcgacatggtcgccggtcaggacgatgct

SEQ ID NO: 315782 - DNA, 256 bp, Zea mays
cccctcccttccttaaccgcggcggcttattccccatggcttcaccgaacaacgacaaccgcaaggcggcgggcatcctgcggctgctgatggggatggcggcggcggcggcgcccgcctcggcattgcctcggggcggcggcctgatgatggtgcagcacgtcatcctcgacgtcaacggggaactgttctcgggcggggtcggcggcggcggcgtgccgccggcgtctaaggccgcgatcgccgcgctgaagga

SEQ ID NO: 315783 - DNA, 268 bp, Zea mays
aacgtgaggtccataattctcgtctgctccctctagtgcgattcagtcatatgacgtgtaggaagctgtggaaggtcctgaggagcagcagcggtggcggcgatctggatgaagactccgtcccccgacctgtgcaccaggacggcggggaagcacgccaacaagtacaaggtggtggacgcggtgacggtgctagagatgcaggtggacgcgttcaagaagcgcgtgaaggcggcgcggaggctcgccaacgatgaggtcaagacgg

SEQ ID NO: 315784 - DNA, 395 bp, Zea mays
tagggctcgtcgcggcaggtgccatgtccggtgggctggccgcatggcttcgtgtggggagcctgcatggccctccctgtgcatgagccgcatggccctgtgtaggcaggcagacgcaccgcgcatggccgaggcgcgctgctctgcgcatggccttgttgtgcatggcccgcaccgtcggtgcgctggggacagggcttgtccgcgccgagccttgccgtcgcggcgccgtccggtgtggtatagttgtggccaccgacgacataaaaatttcacgcatacagtgaaagcggagaggaagagtaggttccataccattatccttctccaactaggagcgatctgttttcttcctaccagcaatttctctccgttttctcgcgagtcgtgctgat

SEQ ID NO: 315785 - DNA, 66 bp, Zea mays
agaaatcgaacgacgacctgtggctcaaccgagccttcctccagcagtccgggggccaggacgaca

SEQ ID NO: 315786 - DNA, 62 bp, Zea mays
aggacgcgtgggtcgcccacgcgtccgaaaaaaaaaaaaatgcaagagaagcataccgacgg

SEQ ID NO: 315787 - DNA, 373 bp, Zea mays
  unsure (1)..(373): unsure at all n locations
caggcgtcttcgtactcgcctatctccgcgactcanagctttccccaattcccccccttctcccatttctcaccaccgccgccgctccccccgttcaacaacaccatgagggagtgcatctcgatccacatcggccaggctggtatccaggtcggaaacgcgtgctgggagctgtactgcctcgagcatggcattcaggctgatggccagatgcccggtgacaagaccattgggggaggtgatgatgctttcaacaccttcttcagtgagactggcgctgggaagcacgtcccccgtgctgtttttgttgaccttgagcccactgtcatcgatgaggtgaggactggcacctaccgccagctcttccatcctg

SEQ ID NO: 315788 - DNA, 378 bp, Zea mays
tcccctgttcctcgaccacctcaacgagcttctgctccgacgaacacgacgcccccccacagccacattgccggacaacgccgtcgccccccgaaccggcctttgccggcgcaagggccggcctcgcctgtctccaagcaaggaagcagcagcagcaaccccgacgacccccgctgcggcagcagcagcagcgacgaccactaccagcacgacgtgatcatgctgaggcggacaaggagcgggcgggcattcccgccgccgatctccgtgatcggcaagggcgggcggccgtggctctgcctgcgggcgcaccgcgagggtggacgcctcgtgctgcggcagatgcgcctgccgtcgcaggagctgctgcagccctgc

SEQ ID NO: 315789 - DNA, 404 bp, Zea mays
  unsure (1)..(404): unsure at all n locations
cgagcagctgctgccggcggcgctagaggccaagaagcgcgctgggctacggacgtcgtcgtcgttctgacttctgagtttctgaccgaagctgaccgtaccacgtactagtcaaccaccaccaccatcaccgtttgcatgcatgcgtgcgtgcgtgcgcgcttgcgtggacgcagtatttgtacacgtgtgcatgccagcttgacgggtaactgacgtgtatgtagctactagctcggatctggatgtcttttgtgtctacgtagggtacgacgaggagacgatactgtaaggtggcatgcatgctctagggagctgttctggaacacccttccaaagacgctgacgtgtcgagcaatgccatccgatactatggacagcaagtcagcaacgagccanaagat

SEQ ID NO: 315790 - DNA, 259 bp, Zea mays
catcactcatctcatgacattcatacgagacacacaaagggcatctccgtgtattcgacttccgaagcaagctttcataagatgcgcgcgaggaaccatccaagtgatcggtttgatatatgaaagaccagatgatgcaaaactatgtgtaaaggatctcatattgctgtcatcaactattcaaatgactgatagtcgacgtaaacttactaaaatatctggctgcacacaggagtgacgaatccaaggtctcaacaca

SEQ ID NO: 315791 - DNA, 199 bp, Zea mays
aaccgagccagtcgattgttcacgatcgatagcagcttaccaacaccaacagcaccaggcccacgcgttcgacaacatggcccgcctcggcgccggcgccatgttggcactccgagtggcggtcgcggtggtggccgcgttcatcccggtgacggtctcggcgaagtcctccgacctgaggccgatggggttgctggcg

SEQ ID NO: 315792 - DNA, 303 bp, Zea mays
gatacgcttgggcaagcgcagaaacctcagtgcgcatgacgcggcgatgattgcgggcgcggacaccgtctgagtccgatagcggacgtcgatcggctcggcgtcgtcggagccgagcgcgtaaatggtaactgcgtagcgcaataccgcgataaggcaaatggcggcacggagctgcgtcgtgtggagcacgtcgtggatcgaagaccgctagcaacgagagatgttgcaccctgccagcagggttgcgttgaatttgccgcaaccggacatgaggcagcgaatttatgtagaagtggaatg

SEQ ID NO: 315793 - DNA, 139 bp, Zea mays
tcaggagacgccgacgccaacccatcgatctctcaccgcaaactacagctcgccagcgcccggagatgtgcccaacgaatcccgatagctctggccaagccgccgccgggtcctgttagaacacctagtggcagtaggg

SEQ ID NO: 315794 - DNA, 346 bp, Zea mays
cggacacttgggcggacgcgtgggtcacgatgcaaaggacaccgcggcgaaaatgactgatgcgatggccgccggtgaataactccggctggggtagggcggtggtgccacgtatgggttgtctcgccccgacgttatccattcccgactgcgcacgaacctggacggcggcggcacgagtttttgcgcagagaggtcgccgtcggtgagatttttctgtcgcggtgatctgatccccaattgagttactgtagcatggcgaagttcagttcagacgcctgacagagccttttgaagcttagttttctctcaattttgaatggctacttaacccaatatctgcatc

SEQ ID NO: 315795 - DNA, 318 bp, Zea mays
  unsure (1)..(318): unsure at all n locations
cttgaagacctgcgttgtcaaccaaccaaccaagtttggggcgccaacaagttcaaccgttcctgttcctgataaaaccaaaaaaagattgcaatgtttcaaggaactgtcccaatcctgtttcccctcctcctcccaacaaaaggtggaaccaatcatgccaaaaatggaattgccatgcccatgcatgccttgataatggagaaagcgaaacagcaagagacggagaagaaggangagaaaagcacggagaaggaagagagtcaatgcttatcgccgagtctcaagttcganggcttctgcttcaacagcgacaga

SEQ ID NO: 315796 - DNA, 290 bp, Zea mays
  unsure (1)..(290): unsure at all n locations
gtcaccaccgtcgctgacaacatattagaaacagtccagaatcaggaggggtttgaatatgggtccaggagaatccagcaaagcataaaacaaaactgggaaccttaaggcaggatagcttgaccacaccgaagctggtccaagcaacaaattccttgagcctgcaaagtcatgaacttggtgagaaccactgggagtcaaattggttagacaagtggatggctgtacgtccatgggagaacatgttacttgactgtaatgccanagagagtctgccaacgcatgaagat

SEQ ID NO: 315797 - DNA, 329 bp, Zea mays
atgagatccatgtccgataagtcgacggaggctggtgtggcagtactggctccatgtgagacctccgcacgccgccgctgaggcatcggcagcatgcacggagttggtgcagacttctggcgtaactgcttctggacatgaacggcatcctggttcgaagcaacaacattctttgtgcctgcaaggtcttgaacttggtgagaaccactgtgagtcaaattggttagacaggtggatggctgtacgtccatgggagaacaggttacttgactgtaatgccaaagagagtctgccaacgcatgaagataaggatgacgaagcaaattccc

SEQ ID NO: 315798 - DNA, 332 bp, Zea mays
acccaagcgtcaatcctattatgatgtcatctctgatgtgtatagtggtaattctgacgtattatgatctcgctgactgaaacttctacaggccagttgatagcaggttggattccttcacgggacctcgtaatcattcgtgctagtgagtaactcatgtaatatgctctcaaaccaagtgtatcctgcaggaattttcgagacacacatatctgcgaatgtgatctcaatccagtggcatataaatttctatcatggaacgagtactcgttgcatcattatgagcacatattgaatccggattatccctgcctctgacgagaatggatttt

SEQ ID NO: 315799 - DNA, 177 bp, Zea mays
  unsure (1)..(177): unsure at all n locations
aaacaaagcacctctctctagctagctactagacgacagctagagctagctcctcaacgacgacgcagtagtacatatggagaaggcggcgggcgtgagcgcggcgaggctggccgtggcggcngcngcggtgctgctgtgcctgctgctgctgctggcggcggggccgcacggggt

SEQ ID NO: 315800 - DNA, 65 bp, Zea mays
gcgggctggaaccctttgcctcctgctttacctctatcctcttccgtctctactgcactctgctc

SEQ ID NO: 315801 - DNA, 263 bp, Zea mays
agaaaaaaaaaaaaaaatttaaaaaaaaaaaaaaaaaaaaaaaacaaaaaaataaaaaaaaaaaaaaaggatggccgttctaaaggaataaaacattaaataagcgtggatggcagggcagatcgattctaacttaaaaaaaaatttgaattcattggccttcgttttaaaccgtaattacagtcaaatgcctgtcgttattcaacttaatccctttgaaaaacatcccgttttcaatataaggcgcattgctgaaaatgccc

SEQ ID NO: 315802 - DNA, 311 bp, Zea mays
ctgccacctgccattgccattgtgtgagggacaccacgtcaaaggataccaatggccacaagatggctctgcgcggctacctgcccgtgccgccccctttggtacgcgccgcggacaccgcaagcgataaatccgctacgctcgactttttctcatcagcaccggcagcatctgtaaccgcacgggccaagggcgaccggcgcaggcacgcgtacatctccgccaatctcacgtcgcgccggggcagcaggcatacggttgccactgaattagagtcatcatccgcgatctccgttcctatctcatcgggg

SEQ ID NO: 315803 - DNA, 327 bp, Zea mays
gaccacgcgtcaactacgagtccggtccgtccagcgtccagtcgcccagcgtttcagcgccatctgcgggtcccacatcatcgttcgacacacgagcaccgagcattcaatccgtcatcgggggcgatgacggcgacagtgattatacatgcagcggctctcgcagtcctccagctggcgtcatcgtcgtctaaaacggcacgcatggccagcgtcgcccaggacgaactctcagcattcgtagcagtggccgttacttcttcacatcacctgcataaagattgatccgaagctgcagatgaacggaatgggactgataaggagtgc

SEQ ID NO: 315804 - DNA, 61 bp, Zea mays
aaaaaaaaaacaaaaaaattaaaataaaaaaaaaaaaaagggacccaaaccaaaaaaaaaa

SEQ ID NO: 315805 - DNA, 315 bp, Zea mays
aacatgcagtcatctcctccatcaccaccaccaagctcaacaacagccagctcgcgaaaataatgaagagccgcagcatggcatcatcggccgcgctcttggtgcgagccggcgcgctagtggcggccacagccccacaggtagcggaggcaaagaagaagagagcggcggagagcggcgaggcggcggaggcgaagaagatccaggacgacttctgctcgacgctgtgcgagggcaagaaggggacggacctggtcgtgtgcaaggagtcctgcgcgctctcccagcagtccaacctggtgctgtaaggcagga

SEQ ID NO: 315806 - DNA, 304 bp, Zea mays
agaaaaaaataaaaaaaaaaaaaatataaataaaaaatggcggccgcactaaaaagatataagcttaaatactcttacataacaactctatagctcttcaataatatcaccggggattgggttcaattggcggtcgaaaaacaccgtctttaatcgggaaaatactcttcgttaacatatttaatcacctttcaacacgaccccctttcaacagctagcgtcataattttaaagcccgcacctatcaaacttcccagcattttctcagtctgactcttcaaagtgatgccccctttcacagcct

SEQ ID NO: 315807 - DNA, 124 bp, Zea mays
aggttctagatcgcgatctgccgccctttttttttttcctttctttttttttttttttaattttcttttttttttttttttttttttttctatattcattgggttggtgccatttccacccttt

SEQ ID NO: 315808 - DNA, 368 bp, Zea mays
aatggctagggagagatagttccgagcgccaccaccgcgaagaggagagaggagggtagccaccatggttgaatcacgtgtacgacgccatagagacctcaatgattggtctaggtgcttcgccatcatgtatagagcgtgagcgcggagttgttgggggcggatcaaccgaaacaccatggattcttcgccggagtctgatcctcaccgccgagccgctatttgctatggagagccctccccccaccgatccattatgtgacgagcaagtgactgaggaacccggagctctgcaggtggaagactttaaggaggagctcgcagaagaacatgaagaaccatctgggaaaacagtgctaccacaaggg

SEQ ID NO: 315809 - DNA, 167 bp, Zea mays
ctgttcctcgagcaactcaactatcgtctgctgcaactaccatgacgtcactcgacacttatatgacgaatgattcagtagcggttggaacggttgtatgctcctgaaggactggctcgctgtcgtcgaccaagaaacagaatcatcagccagacgattcaggctgc

SEQ ID NO: 315810 - DNA, 56 bp, Zea mays
cataaccctcaagatgaagggaattgccggtaaaaaaatggcaatcgtgttcatgg

SEQ ID NO: 315811 - DNA, 189 bp, Zea mays
ccggtcaagaatctacggacgcatccagaacctaataacaaaggttataggaacaacaactattggagcagtgataacaataacagcaacaatgcctggagtaacaacagcaattttaacaacaataatgactggagtggtaacaattcctataacagcagtactgagaacggtaatagcagctacaac

SEQ ID NO: 315812 - DNA, 228 bp, Zea mays
gacaaatattcagggctctgttatctatcatctgctagattttttaggaggatccctcacatggcaggaccttaaagctggcactgaggaagatgtctacgtatccgattagtgacaaggagtatgcttacctcggcacacattctgtgcagatcatacacgacggagttcgtctcatatttccactattgtcgctccctgcaatttgtatacatgccagattactct

SEQ ID NO: 315813 - DNA, 96 bp, Zea mays
cacaaacctccgatcatccctaagaccacgcttccgttcatgagtacggtcacacttcaggtcgccgccaatcccgcgatgcatgaaggtcacacc

SEQ ID NO: 315814 - DNA, 369 bp, Zea mays
gtacgcatcttctggctcacgacgatagccgaggaattcgaaggaccgaacgagaagctcctgcgtggtgtcaacgtctaccctaccgtaccagctagccaccacacgcgtagcgcgggaaatgccggcggcggcggccatgacgacgaggcgggtggtgctggaggtgctacggtcggcctcccgcgacgccttccaggtggccttctccttcgcggcgaggccgcccgtgtccaccatgctcaagccggccatcaccaagcccctctaccaccaccaccacgacaacgactaatctggcgcagatctacagcacggccgtcggcatgccttcacactttcacagcccggtggggtgtgccgactata

SEQ ID NO: 315815 - DNA, 401 bp, Zea mays
ttacataaatttattaaaagctcaagagcatctaaggtgtcgatcgggaggtctgtctacatagaaaatgcttttcagttcaactttctaaagtgagacggtgatgttaagactagaacagataaactatatccaattaaagacatgacccaaatatcttatgttgaacaaagagtttactttaccaagaacatgatagagtaaatatgagtttgcaatctaaactgttagtgtttacgtgtatttgttgttatgcaatatttataattgaaatgtatgtgtttattccgataaacatgacgaacgcactgatatcttgtcgtgattaatgtacgaaatatggagatacaagtgctcgattcacttagtacctaaatcgatcgcagaaacatcactcactc

SEQ ID NO: 315816 - DNA, 398 bp, Zea mays
agggagcggccaccaaccggaatcacgacgatgttggcggttcttcccatctccctctctctccagttgttcacgatggctcaggcagggtggcgacactagatcttcatgcaccggggcaagggtcccgtagagcacatatcgggtcgtgcgcggattcccagcggcgggcggatttcactgccatggcgacggcgaacgagcggaaccacatcggcggcacccttccagcacgctgcatgcccatggcgatgaggttcatcgagaatctctcgactttggtgtagatcgaaagggaagcacggctgtcccatatataccccgagggagtctagatatgctcggccaggagcaacggccaccccaagaatcacgcaatgttcccttggcttcaattc

SEQ ID NO: 315817 - DNA, 430 bp, Zea mays
ggactcgcgggccgatgcaagcctctatagtgcgtcataatagccgaggaattcgaaggaccgaacgagaagctcctgcgtggtgtcaacgtctaccctaccgtaccagctagccaccacacgcgtagcgcgggaaatgccggcggcggcggccatgacgacgaggcgggtggtgctggaggtgctacggtcggcctcccgcgacgccttccaggtggccttctccttcgcggcgaggccgcccgtgtccaccatgctcaagccggccatcaccaagcccctctaccaccaccaccacgacaacgactaatctggcgcagatctacagcacggccgtcggcatgccttcacactttcacagcccggtgggtgtgccgactatatatttcgtcccaattgatgacttactaccacatttcgtcgctactac

SEQ ID NO: 315818 - DNA, 226 bp, Zea mays
aacacgcgtgcgcacacctcgcgacagccaccaggagtacaccgtttcacgcgacagccgtcacgcgtcacgtatccaggctgaccgtaggagagacactcatcttcaggacggagggagacgactacacaggatgcacgggttcaggcagctgcagcgatcgccagctcaagagcaacatcaggcgccgtcggatcagctgtacgcctggggtgtcggaagtcgt

SEQ ID NO: 315819 - DNA, 378 bp, Zea mays
gcgtccgcacagagctagctagccagccagccagcagccagcttgctcgccgcgcccgtccttcttcctcgcctccgttccattccgtcccgccctccaccgccgccgccgcattcagggatggagatgaagaagatcgcctgcgccgtcctcgtcgccgcctcggcggccaccgtggcgctcgccgcggaggctccggctccggcccccaccagcggctcctccgccgtcgcgcccgccgtcggcgccgccctcggggccgccgtcgcctccttcttcgcctactacattcagtgagccggccggggcgcccggaggccgaggaagagacgaaggggagagagagtgacatggctgcgcgcattccgatgcgtgggc

SEQ ID NO: 315820 - DNA, 295 bp, Zea mays
cggcctgaggccacacacccacacggacgggaacccagatgagcctgtcgtttggatcggcgtccctgcctccgttctcgcgaggagaggaaggcctgcagaaaatggagccgatcaccagtgccacggcagtccatgagatgggcgtcgtcgccacgctcgccgccgctgctaacgccgtggtccccgccgcagcacctgtctaccactgacggaacatctgtactaccatcgagtcgcctacgtccacatgctggtggagcatgtcctcagctacctcagccaaccattggac

SEQ ID NO: 315821 - DNA, 412 bp, Zea mays
  unsure (1)..(412): unsure at all n locations
ccaggcatccgagtctgctgccagtggagagctccccgctcgtgcaggtcagcctgcctcaaccccggccgttgcggctgccccatcgtcgtcgtcgtctaggaagtctggtccagctgccgcgccgaccaccgccgcctctacaccgtcttcttccacggacgaggagttgagcccttcgccgtcggcatccaccgccgaggtggcgtcccctgccgctgatgggcctgctgagggaccggcggctgctgatgcctccggtgctgctacccttggaagcggagctgccatcgctggtgtcgccgctgctgtcgctaccatgatcttctactgagttcaccangggacgtgtcgtcgagggtgggcacgttattggctgtgcgggtaatgctcgtctggtcgggagggacca

SEQ ID NO: 315822 - DNA, 245 bp, Zea mays
agccgacgcgtccggttcagtgcagagggagacatcctcgccgccatctgaacttgccgcggccgtctctacaggcgcaacatgccagccgcatctagtgatgctgatgaagttgattctgtgaggcgtctccgacgacaccacctgcatcatgtcgccggacgccgacgcgatcgtgacgtcctccactataggctcgctcaccgtcgtcttgtaatgcatcatggacgtcgtgcacttgttca

SEQ ID NO: 315823 - DNA, 360 bp, Zea mays
caagaggacttgagaccatatttcagtgaaagtgagtactacacatcaccacaggttttccattagcctctctgtctgcctcgtaaagttactcaaccggctgtacatgttgcaaagatcaccttgtagatgctctacacatgttgtcaaataggaaacaaaaaaaaattaatatattatcataccattagagtattagaattgtttcctagaaagaaaatagtatatcagtatagttcattcgttccaacaacttttagtttcgggaaagaaacaatcaaattcattgtttataagtgcaaataataggagtttccttagttcaacacattttctttggaatgaatatacacctcccat

SEQ ID NO: 315824 - DNA, 250 bp, Zea mays
gtccagggttcaagggacccttcggacaaccatccggcaaaaccccaagggccgggggaactcccctgggctcaatcggctcctcctccaagaatggctcaacaacgggtgccaagcctccaatcccctggaagaatccgccgccggggaagttccaaaaaaaggattctccggcaacgggttcaacctggtccgggtcaaaaacaaccaaatccgcaaattcaacgttaaaggcaagttcccccggaaa

SEQ ID NO: 315825 - DNA, 214 bp, Zea mays
ttttacctgaagttaaaccatgggaacatgaaactgacatgggcaaactccaagaaactgttaagaatgtccaaattgaaaggctgctccggggcgcaaccaaacctggcccaatttggtaagggaaccagaaactggaaatccagaagaacaacctccaacaacctggccccggccaaaatcccaattaagaataaccgttcgcctaaccaat

SEQ ID NO: 315826 - DNA, 368 bp, Zea mays
acggacgagtgggtcctgaactacactctttcctttcagtaccattctttgctgcagatactgaactgtgttgcaggattgcgtgaatatttttcccaaacagatgaaatccatataatcccaagaattcatgtaatggaaaccatgtttgatgtggattcaaagccaaaatttcataagcttcaagaagttgaaaccaaggaaaataaaaacatgggaatcattgatgaagaatcagatgatgatgatgattatcaagttcctgaagctaatatagagaccttgaccaaaaccaatatacaggaagacccaaacacatctgacaatgataacaagcacacagatgagcctccagaaaaaattgattt

SEQ ID NO: 315827 - DNA, 132 bp, Zea mays
tcgtccgggtgcattgattccatggtccaccatggcgcatccagatgtggccactatgacgactaataagcgactcctcctcatctcgctggcgtctgcgggcattcggacggcgcaggcctatgcgatcgc

SEQ ID NO: 315828 - DNA, 401 bp, Zea mays
accaaggaagaaaacatttcatccccccgggttaaggccgatggttaaccgctgttccccaacaaaagggttgccgttgggaatttccttattcaactggggcccaacaataacaacaaacccgaaggtccggttaccaaaggaaaacgggcggccggggtctggaaaacacgacgaggggcgcgctactcgcagcaccgcgtgcgcaggttctggctctccagacgccccgactacattcaggccatggacaaggtgcccacggaccctaataagtagacgacgaccatataccccaatgcatggcaagaagatatatatatcagcacaacgcaactgcatgcgatgctgcatgttgctgcaattaatccactatactatatactataagagtattatta

SEQ ID NO: 315829 - DNA, 91 bp, Zea mays
aatctgacatcattgccatcaccacagcgatgaccactgtctcgagtggatctatgccccgaatctttgccgcgcaccacgccatctgtga

SEQ ID NO: 315830 - DNA, 255 bp, Zea mays
ggaggattctgcaggacgactgatgcatgcagcatgcactagctgcccctgttcgatcgccaagatcacaccacgacgaagatactgtacctagtagtacgtacgtacgtgtacacctgattatccgaagaagatggccagccgattattaaccattggctatcttcgatcggggccaatttcagaaggaatttcctttactttctgtagcaaatgatcgggttcctgcacagttcatcaggaattccattgtat

SEQ ID NO: 315831 - DNA, 434 bp, Zea mays
atccccgcgccgatggatctccgcctcgcccactaggcctccggcgcgaccgggggtgggcacggggatggggctcctcgggcggaggacgttgctgccgctcctcgccctcgcttccgcggccgtcgccgtcgccgtcaccgtggaagcctacgaaggcgacgctgatccgctctacagagcttgtgtggaaggatgccaaaagacaggctccctgaaggagacttctattaaacattgtatggtgccaaccgatggccaacctgttgacaagtcatggtacacgcatgagccactgtacttgcaatggaaggactggaactgcaagagtgaatgcagataccactgtatgatggaaagggagaatgaaagggcacagcttggcctccagcctgttaagtatcatggaaaatggcctttgaagcgtgcctctg

SEQ ID NO: 315832 - DNA, 417 bp, Zea mays
gccgggttggaagaacccccaagtaagaaaataaccgaaccaaaaggttgggcaaaggtgaataatgctcaaccaaaaggttccaaggttcccaagaaaccaattcctcctttccaatccttaaaaacactttaagaaaaattgcaaattgaaacaacacttgaagctgacatggagaagaaaaatgggacaacaatccacatgaagcttgtaaaaaagaaattaaactaataatttattctagtgtcaaagttcataatgactggacttgtactctgttattatgctataataatttgttgaatattagatgatcatgtcatgtgctgttttttttacatttttagtgatgtttcattgtgtttttgtttttctaaatatttcctatttttctttgatttttatgattttttgaag

SEQ ID NO: 315833 - DNA, 338 bp, Zea mays
cccactcgtgcagccagtcacgctatgggaccacatttcacatcacagaaaagacagatcacatcaatgccacacggatcacagtgctgctgtctcacgtcatgaaaggcactgccccgggtatcaactgatgtaagtccaggatgctcgacatcaagatcgagcacgcattatagcatgaccattaaggatatcaccgtaagcacgccatccgaagtagagagcactgacgccttcaacatctgaagctccacgactatgtctatcattacttcgacgatcggtacttgctaatagtgcgtttccagtgaacccgcatgaaactccatcatgctgaa

SEQ ID NO: 315834 - DNA, 319 bp, Zea mays
gagcccgcaacatgaactgagcccagcgctagctgctgccgggggcgcgccgtcgtcgccgagccggtcggtctggtctggtctggtctgcctgcctgccaagtcacgcagcctggctccaccgatcgcacaccatacattgacgtcgtcgtcgcggccgtacgtgccgttggacggtggaggaggcggtggcgctacgacagtatatatatacacaattacacatacacaccccaaaaagaaaagaaaaaaactactgccattgctgtcgttgtgcgtagcttctctctatatatatacccgtatttaaattctcgac

SEQ ID NO: 315835 - DNA, 401 bp, Zea mays
ggagcagagacaggcgtcttcgtactcgcctatctccgcgacccaaagcgttcccccttctcccattcttctctcatttctcaccaccgccgccgctaccccctttcgacaacaccatgagggagtgcatctcgatccacatcggccaggccggtatccaggtcggaaacgcgtgctgggagctgtactgcctcgagcatggcattcaggctgatggtcagatgcccggtgacaagaccattgggggaggtgatgatgctttcaacaccttcttcagtgagactggcgctgggaagcacgtcccccgtgctgtttttgttgaccttgagcccactgtcatcgatgaggtgaggactggcacctatcgccagctcttccatcctgagcagctcatcagtggc

SEQ ID NO: 315836 - DNA, 116 bp, Zea mays
gctggctatgtcagagccggatgtcctgcgagacctgcggcaccgggttctcgacgaccatcgccgtgtacaccgcggactgccaaggtgacgatcgagtgcatgcagtctctcgc

SEQ ID NO: 315837 - DNA, 119 bp, Zea mays
attctaaatcgcgagcggggccctttttttttttttttaaaaaaacttgtcaatcaatttcttaactcttcgctgttgtttaaaagagaagagttaagaaatggattgacaagttatat

SEQ ID NO: 315838 - DNA, 83 bp, Zea mays
cttcccccgccgggcatcagctcagccgccgtaaccgccacatcagctatgggcgcctgcgctatcagttgcagtagtcttga

SEQ ID NO: 315839 - DNA, 163 bp, Zea mays
cctccaatgtccaacaattaaacctcccccaacggcaaaaccaataagttcaaccaatggttcctgttcaaccaaacccaaaaacccttaagggaaaaccccaacttaaggcaacaacttcaaaaccaaaggttcaacttaaaacaataacaaccaaaattaa

SEQ ID NO: 315840 - DNA, 300 bp, Zea mays
aatgagcgtcacggtcgaaaccgatgggttcgtgcattctcttcctcacggacatggaggatataacagctgcgccaaggatagtgtcttcttccgcggtgaaaaccgtgggtgcagcaccggttacggggacttcatcctgtagtggtactcgcagatgctgctggagcacggctacatcatcctgtcgggcaccacttccgtgttcggatccgcgcccgtggacgtctccgtgaatgtgggaggcatccactgggactaaggcagacggtcgcagaccccatgtctcatcgctggcta

SEQ ID NO: 315841 - DNA, 330 bp, Zea mays
  unsure (1)..(330): unsure at all n locations
acttgntgaccatgtttccgtgaaagtgcgtagtacatgtcaccacaggttttccattaacctctctgtctgcctcctgaagttactcaaccgggtgttcggtgttgccaagattaccttgttcattctctacacatgttgtcaactagggtcacacggaaagtttatatattatcataccattagagttatagaattggttcccaaacctggagtagtatgtcattctaattcattcgttcctgcagctttgactttcgggaccgcacctcgtcaaagttcatctgttatcaagttcaaataataggagtttccttacgttaacacatt

SEQ ID NO: 315842 - DNA, 276 bp, Zea mays
gcgtccagtctcattctagacggtgcatgagcaatcgacgtaggccgtcgggtccagcatgtcgatatactccgttctgatggacacatggacatcgcagcctctgcggttcagccggacatgctgtatgctcgggagaacactggcatgacgtattcgactggacactttccacacggcatcaacgatatctacagtctggtacagtccacgatgactgccaagcctaacggaagcagtgttaagcacagcaacatatcatccatcagtatgcgc

SEQ ID NO: 315843 - DNA, 119 bp, Zea mays
acccacgcgtccggtgaccgcgcattattaatattatgaaaaatggcaaccgggtgtcggttattcttgtctgcatgtcgttactcggatgttatagtagaacgaactgttcgtactgc

SEQ ID NO: 315844 - DNA, 307 bp, Zea mays
acccaaacgtcaagagaaaggcaaggaaattgggaaggtaggagagagagggagacagggaaagctctcttcatcctcatcatcatctcgaattccgtctcttgtccctgtcgtgggcggggggtttccacggtttttgaaaggggaaagaggatgcggaggagagggatggggagggacgagaggttcccggtgtgggaggccgcgctcggcgcctgagtcgccgccgccttcgccgctggactcgtctgtgtctagctttccatgccggactcacactacagattcctcaagtttccacgtaatc

SEQ ID NO: 315845 - DNA, 264 bp, Zea mays
aaacctcaagcataaatcatattagtatcatagtattagcatcgatcaagcaggattacagaaacgaaacccccttggcgacccacacatcaccaaggaaggaacgaaggggggaggagcagacgatcacataattaagcaaccgcaggcaataaataaataaataaaacaacgattaattaattattaatcgggtgaaccaaacacgatgctccatcccaggtttccagcactccgcgcggtacgtcgctcagtcgaggaagg

SEQ ID NO: 315846 - DNA, 411 bp, Zea mays
ctccaatccccgcagaaaccaccggcgccgtcgaccgcaaccagcagtggttccgtcgccggcgcgggattgggccaccagccgcggttgtcgatcggccgattgattgattgatcgatcgatcgatcagtccaccgcggcaaggccggggagggagccgtcgtcggtggttcctggcggttgcatgtatgcgggcggggagagccggcccaatggtgggggcggaggcggagacgcgctcaggcggcggaggcagcccggcccgtccgcgtctcccgctgcgtcgtcgtccggcaggggagcggaggaggaaggcggggaggagcgtgggcgaggccagaagcaaccgcggcgcaagaagcagcaggggaggcgcgaggcggtggccagggcgatccggggcgggctgcc

SEQ ID NO: 315847 - DNA, 341 bp, Zea mays
agaaccgagacggcttgcggccggtggcggcgagcgccacgcggatcgtgatctacatccaccggaggaggaaggggaaaaaagagaggctcaccgggtgattgccgttgatgccgaggcgagcaaggcgagacgatcggtacaattagctcataggcctatgtaagttaggatttttttttttgcaggtaaagaattgcatagaggcgtgtagatcatatagcgtagatagatggcactggtagccatgccgatgaagatcttttgtgctgaactagaacaaaattaaagaggatgcattaagtcttgtgggtgtataaactagaggtgtctatatggtg

SEQ ID NO: 315848 - DNA, 200 bp, Zea mays
aacaagagctacgcaaactcacagcgatgcacaagcacgagataccagccaccatgcgcctgtccctcctcatcgtcatcgtggcagccatctcggcgcgcaccgctggggatactccgctggcaggcggcggctgtggagccctgaagccggacttctatagccagtcatgcccgcgcgctgatcggatcattgcggag

SEQ ID NO: 315849 - DNA, 107 bp, Zea mays
  unsure (1)..(107): unsure at all n locations
acccacacgtccaagcacggcaacctcaatgtctccgacttcggcctcagctcgctcagggantcccagaagcatgacgggctgctgcacaccacctgccgcacccc

SEQ ID NO: 315850 - DNA, 173 bp, Zea mays
ccggaaggggagagacagtcccatggctgcgcacattccgatgcgtcggcatgttttttgattccacacaccttttgtccgggttggcgttgttccctctttctcaaaaatttagcgaattgattcattccgcttatgttcttcccctgacagatggattaacacttgtatca

SEQ ID NO: 315851 - DNA, 121 bp, Zea mays
aaaaaaaaaaaaaaaaataaaaaaaaaaaaaaaaaaaaaaaaaacaaaaagggcggacgcacaaaaaagatcaaaaacttaaataaacatgcatgcaaaaatcaataactcttcggtaggg

SEQ ID NO: 315852 - DNA, 413 bp, Zea mays
tttttttttttttttttttttttttttttttttgttattttttgggttttgttggttttttttttttattttaaaattttttttgttttttttattttatttttttatttttgtttttttttttgtttttttttttttttttttttttttttttttttttttttttttttgttttttttttttttttttttttttttttttttttttttttttttttttttctttgtttttttttttttttttttttattatttttttttttttttttatttttttttgtcttttttttttttttctgtattttttttttttgtttttttttttttttttttttttttttttgtttattttttcttttttttttttttttttttttttttttttttttttttttttttttttttttttttttt

SEQ ID NO: 315853 - DNA, 96 bp, Zea mays
aattcccaggcaggcaggtccgcgaggatggcaggaacaccgaagaccgatccgtccgggggctctggacaggaacaggacaggacctcaaaatct

SEQ ID NO: 315854 - DNA, 249 bp, Zea mays
aaaacccgcggatcagatccggtctcctccgtatcgcattctccacagcagaggggccacatgagacagttaccgcgatgaaactgtctatcgaatcacgcgttatcaaactgtccctgccgtgtccgaatccgtgccgtggcagtatcgtctgggacgggacaaataagaagaaacgctcgctgtctcacggcgacacgacaatcgatcaccgtcatcatccatccacctcgatgatcatcgacgagc

SEQ ID NO: 315855 - DNA, 122 bp, Zea mays
aagagcgagcctcttcagctccggtatccccctcatcgcggacgcgccgccgaggcgcacggtgagaaacttcgcgcggtgcgacgtgactgtggcggcaggcgtttgcacaggcgatgcag

SEQ ID NO: 315856 - DNA, 450 bp, Zea mays
  unsure (1)..(450): unsure at all n locations
ctcgcgggtcgatgcaagcctctacactgacgcctggtaaaacgcgagcaaccagcgatcgccccatggccgccatggctcgttccgtctccctcgtcgtggcgccccttctcctcctctccctcctcgtctccgccgcggccagtgcgcggaccgtgggcgacaccgtgcaggacgcgtgcagcaagacccagttccccaagatctgcgtggacagcctcgccgccaagccggagagccagaaggcgacgccgcgcaagctggcggagctgttcgtgaacatcgcggccgagaagggatccgggatggccaccttcgtgcaccgcaagtacagcgacaaggaggacagcgacatattcaagtgctacgacagctgctccgacgacgtggaggaggccgtcgncccactcaacggcctcgtccgggagcccaccgacgccaagttcctcg

SEQ ID NO: 315857 - DNA, 437 bp, Zea mays
agacggggcgaggcagtgggggggggggggtgtgggttgaggagggggtgggggggggggggggggggggggggggggggggagggggcgggggggggggggggggtgcgcggcggggtggggggggggggggggggggcgctgggggggggggggggggggtggggggtggggggggggtgggggggatgggggggggccgggggggggggggggggggggcggggtgggggggcgggggggggggtggggggggctggggcggggggggggcgggggggggggggggggggggggggggggggggggggctgggggtggggggggggggggggggggggggggggtggagggggggggggggggggggggggcggtgggcggtgggtgggcggcggggggggggggggcgggggggggggtgggggggggggggg

SEQ ID NO: 315858 - DNA, 372 bp, Zea mays
catgtacacgcgtccgcagcgggccatcagctggtgacgcgccggcgtatggcgccagcgccagcggcccgactgctgatgctccggcgacggcggcggcggcggcgtcgtccgggccctctagcgcacccgcgccatcgtcgtctgagtcctccggcgcaccagggccgtcgtcgtctgatgggtcctccggcgccccggcgccatcgtcgtctgatgggtcctccagcgccccggcgccatcgtccggcgacgacggatcagcttgagcgtgagcgatgacgcggagtttgggtcatttcgtgcctactcagagacgacgatctcttcttccaattacaaattggccgtccgtttactcctcacaatgtg

SEQ ID NO: 315859 - DNA, 257 bp, Zea mays
aaaaaaaaaaaaacaataaaaaaaaaaaaaaaaaaaaaagaaaaaaacaaaaaaaaaaaaaaaaaaacagcaaaaaaagcaaagaaattcatggggggagacagagtgagatgggtgctcagctggccaggctcgcagcagccgcctgcgtcggacgggccgcgttgttcgccttcggcgcctcgctctgccggcgcgcgggccggagcgaccccggggggcaccgatggtcccgcgggtcctgccgcccgttccgt

SEQ ID NO: 315860 - DNA, 247 bp, Zea mays
aaaatgttcctcgcgccctcctcacgggcggtctccgtctgttctgtccaggcagcgcctcggtcgtctcccggccagatgcgtctcctgcagggttggggtgcgagtggcggcgcaggatgatgggtgggttcctctccacggtcggcctgctggccttgtggcgatgcctatcgtgcctatgcatgctacgggaccgttgaacgcgaggagcgcgcagagtgagcagctcagattgtggggtcag

SEQ ID NO: 315861 - DNA, 321 bp, Zea mays
aacgacgggtcatgatggaaatggacaaggccaattcccggtcctacagcgacgtgcatagacacctgatctagaagtacgtcacacggggcggcaaacccatccgcatgcgcaagggccgcacagtcatcgagtatcacgacgactacacgctcaccatccgcgacaacttcaccaccttcacgggcaaggcaagccagcagatccatgaccggacgggcacgcacggcaagctgcacacttcatcacagtcagcgtgctactgaacctgatccctcactgccatctgagagatcaagtgcgcagacaggtccaagctca

SEQ ID NO: 315862 - DNA, 406 bp, Zea mays
gtcgatggacgcctctagcctgactcgctccaccctcccaccacccggctctccacgccgccgccgccgccgccacaagcgaccgcgcatccgctcttctccctcccttcgctctcggcggccggcgatgggggagaccgtacgggcgggcgacgttgcaatcacgactcacgagatggagagccacaacccatcgcactctcagatcgccgaagtgacgatggacatcgcagcgtcagcttctggagcggcagggagcaagttctgcaagggcgcagcctgcgacttctccgacgccagcaactcctcgaaggacgccagggagaggtcggcgtcgatgaggaagctgatagtcgcggtggtcctctgcgtcgtattcatggcggtggaggtggtggggggcatc

SEQ ID NO: 315863 - DNA, 408 bp, Zea mays
ggtcgatgcacgcctctagatcgagttctcgaacgggccgcccttttttttttttttttttttaacttgaaattcgtgacacgattcatgtttacattggtaacacaggtacaacatatcacttgagcaagcctgcagaacaatattgtcctaccgtacactgcatacacgcttcgatcaagacaagtttatgtgacgcaatacacgctgtcgctaaggatacaaggcctacatcgcagctgtattctggggccagctcagctggcgtccttgagctttcgcttgagctcgtcgacgaagtcgtcgaagttgcgccgcgacgagccaccgggcgccacggcagcctcgagtgtggccctcagcttcctgacctggtccctgagcttgaggccgtgttccccggccatg

SEQ ID NO: 315864 - DNA, 287 bp, Zea mays
gacagcacttcctcgtgctgctcatgaagctgtgtttcaacctcatacatagttccgttatgaaatgtatcagaggagattaagcaaaatatcccatgtggtgtcggtgtcgtccaggctgatgttgtccccttctcctgctgctcgtttcttttcacatgtttgtgatgtaaatgcccatactagaatgtcaccaaagtgttgattatgctcttatcatttgattaaaaagaaaagcaaggaagagaaaaaaaaaaaataaagtcaaaatcaacagctccagaaaa

SEQ ID NO: 315865 - DNA, 384 bp, Zea mays
tcgttgcaccaccctacactgattcgtagtaggtcaggcccttctgctgggtcgtcctgctgcatgcgtcgccgtggtcggggacacagaggaggagatcgagggagatggagtgcctgctggggctgctcaaggttatggtggtacaatgagtgcacctgaccatctgcgacgccctcacccacaccagcgacccctacgtcttcctccgcctcggacagcagacagtcgcatcaagtctgtcataccccatgatcgatctgctgcaggacgagctgctcatgctgttgtcccagtccatggcgacgtcgtccggggatgagcactactacctgagcatggccaccgcctacgagaacgccgcgggcgccgtcatcgcggcga

SEQ ID NO: 315866 - DNA, 288 bp, Zea mays
aaatcttgcgactcacttgtgggatccagagaaaattctacgactcaacattgcaacgggtgaagtgctcaaggaacatgcaatgcgtcgacgtgcaggacaacgatctcagtcgtgctgcgagtgcacctggacatgctggcaatgtgtgcagcgttatgacgtacgacgagctattgatctgacatcgacagcatgtcggcaagtcaagtgcagaacaccccaggatcagtcgtggatggatcggggaccgcaccctgtccagcatacgacatgacgaccgcggtc

SEQ ID NO: 315867 - DNA, 61 bp, Zea mays
aaaaaaaaaaaaaaaaaaaaaaaaaggaaaaaaaacaaaaagataaaaaaaaaaaataaag

SEQ ID NO: 315868 - DNA, 203 bp, Zea mays
acaatcattcaggtccaatactacatcatagtacctacacgctgccgtttcccctttggcatcagatattgccatgaggtatacccttactcagcggcacatgttacttcgtcgctataccggtctcagcagctgctaatataactgtcatgctggctaggaacctgtggcttcgatctcataatttttctgtcatctatgag

SEQ ID NO: 315869 - DNA, 81 bp, Zea mays; identical to SEQ ID NO: 77277

SEQ ID NO: 315870 - DNA, 440 bp, Zea mays
gtcgatacacgcctctacatggaatcgtcatatagcttcgagaagccttggcccaatgctgcatccggttcagccgcaccaaggtccagacgtctataaaaggagcccaggtcactagggtttagttttgacgccccaccccggtgcacaagcggggacgagtaccgagaggagcacgacgatggcggttcccaaggggcgcgcacgacggctcccccaagcgcacgacggtgacggttcctgaggtgcacatgtggtggctgctctccaaggcgcatgttggcgacggttcccaagaggcgcgcgcggctggtcctcaggaggcacgaatagcggcggtggccagaagcatgcacaggcagcaacacctccctgttgtgagtgtgacagtaagggcctctacctcaaactattttcgagctccgacgaatcggacgcca

SEQ ID NO: 315871 - DNA, 410 bp, Zea mays
gtgtcgacggacgcctctaaagtgcatcgcatcagtgatccaccatgactcagtcaccagtgggcacgattacaactaattcgtggctcatcgtattagctgtggcgtccgcgatcgttgcagcgtcggctgccgacgccaatacaccgagcagagcgttcagcacctgattaccgatcaaccatgagtgctcaacactagtaccacagaagtccgtctcagatcgtaggtaggagccccttcactacagactgtctcgaagcgcaacatcgagagtcacatgattgatgaagtccacaagcacagggtaatagaccaatatctctgccgcgctaaaggatatcccggtaagcaacaccaatcgcctgatgttgcatttcaagacctgaacttacttacgctaaaaggta

SEQ ID NO: 315872 - DNA, 180 bp, Zea mays
aactgcgccgtcctcgccgccgccgcctccgccaccgtggtcttcgccgccgaggccccggcgcccgcccccagcagcacctcctcggccgcgttcccgggggtcagcgccttgctgggcgcctcggtgctctccttcatcgccgagtaggtgcagtagaattaaaggaggatcggaagg

SEQ ID NO: 315873 - DNA, 347 bp, Zea mays
ataagaaaacaaagcaaaaaaaaaaaataaaaaataaaaaaaatcaaaaaaaaacagagacaaacaaaaacagtttaacgcataacaaacacataaaacggggcaaggaaaaccacaaacattgtaaaccaaatctacatcaaaaaagggggggccctcccaaaggttatcgcgctagatccccctgcttcacaacttaagccctcttccaaggtccccccaatttacatttccgggggctttttttaaacaccttgcccgggaaaaccccgggcttttccaaaattaatgcctttaaaaaaaacccccctttctccacggggtattttacgaaaaggggccccctc

SEQ ID NO: 315874 - DNA, 186 bp, Zea mays
agtcccgttgttgtcccggcggctatcagcatcgcgctagctgtgggggcagtcttggcttcggggttgtttgggctggggggtctaggctcggtctcaggggtcctgggcgtactcggtgggactagtggtactgtgggggggggggtgggcgacgctaagcgccgtgtggctgacgcattaggc

SEQ ID NO: 315875 - DNA, 439 bp, Zea mays
acaaaactctagactaagtcgtattaccaagaccaggggcagtcggggcgcctgagaacgaggccaccgtcgccgactcgatagtgtgatccacgcaccagccatcgtggcgcgcgtttgactgctataggtacaagtaggatatcaaggcagaaataatgcaggaccctcttctgccgtgcaatcctttagtttttgcaaggagagggaggggataatgcatagatggacaattgctacctggcaccatttttcagcatatgtatagaaaggagctacccatttgaaactgaaagtcgtaggcattgtttaattaagtgcgctagaaataccccagccgcattcagctctttttatatatatgctaacaccgtaatctaatgtttaaacgctatccggttcattggctacaactgtcaatgatatgtaccgagactta

SEQ ID NO: 315876 - DNA, 276 bp, Zea mays
gtcgatacaagcctctaaaatgaatcgtactatatattgtatggttatcacatacattgacatggctgtgcgcattccgatgcatgggcatgttttttgattcgacacaccttttgtcctctttttctttgttccctcattctccttaatttaacgaattgatgcatgccgctgatgttcttcccctgagagagggattaacacttgtatcatttcatcgcttgccatttgtttgaatccattcaacaattcagtcaagaaaaaagtaaacaaaaa

SEQ ID NO: 315877 - DNA, 243 bp, Zea mays
atcttatgaaagttaaggaacccttccaacgaatcccgcaaccggactcccttacacctcctcctccctacggaagggttgccatcccttcaccaacggaaacggtggacgtaccgctgcagcagcggttcatccgctcaggaaccacattgataccggtcctttttcaaaactccatcatctcccaccaggattaatcgcactactgcatcctaaacgcgctcacacttccctgaaacaact

SEQ ID NO: 315878 - DNA, 123 bp, Zea mays
gtcgacagacccgtccgcaggatctcgacatacatcatagctgagaacgtaggtcccaagtggacgttgatatgaacacaagtagcaaccggcgtgttataccggtacagcgacatcgtcacc

SEQ ID NO: 315879 - DNA, 412 bp, Zea mays
acaccctagactgagtcgaagtaacgtcccagctgatgaccctggtgaacaacatctccatcaggatctccaaccgggagttccggccggggcactgcacgcactacttgaagcactcggggctgctcatgaacgtgttcagcaacgcgttcaacccggacatgagcccccgccggtacgcgcacgtcgacgtcgacttccgcaactcggagcgggactggtaccagttcaagtggcagaccacgtcgccgccgtggtccaagctgtgcgccatgccggggcgcgtgacgcgcgaggtgtacggccagatgaccgtcgcgacgagcgtcaacaaggggatctactacttcatccagttcctggagcagctgcacgactgatccatcgtgagatagatcatcaagttcaacag

SEQ ID NO: 315880 - DNA, 418 bp, Zea mays
gggtcgacacacccgtctacacacactccgagaaccttcacaatataaaggaaccaaatttaacaaaccaaacaaacctttaacccaaaattaacaaaggccgaattcaatttccaaggtaaaacctttggaagggaaaaacaattacaactcaaccggtgaatccagattcgaaaattaagattttggggcccccattaataaaaacacaattgggttttaatccaattggcccaagttcgccaaaaagatgcagatgaaaacacgagactctgcagcttattacagctgtgacgatcactttgttgtggtggacaaaacagttgactatggtcgaagaggatcaccgtcagataaaagcagtgcttcagaagtaagaactcatgttcggccactggatgctagcacagcagcccac

SEQ ID NO: 315881 - DNA, 401 bp, Zea mays
gccaaccacgcctccggccaagcctccgcaactaacttaccaatggtggaaccttggcaatggtcacactcctccccggctgccgtcccggtcttggccgcccggccggcgtctgcaggcgggggagccgcggcggtggcggagatctgcatgaagactccgtcccccgacctgtgcaccaggacggcggggaagcacgccaacaagtacaaggtggtggacgcggtgacggtgctagagatgcaggtggacgcgttcaagaagcgcgtgaaggcggcgcggaggctcgccaaggaggaggtcaagacggccgcgacgcccgaggcgcggagggcgctgaacctctgcaagacctactacctggacgccgccgacaacctcggcgcctgcaagcgcgccat

SEQ ID NO: 315882 - DNA, 285 bp, Zea mays
ggcggggatgtgcggcatgccgccctgctcgttgttctcagatgcagcatgcgtgcactacgtgcggttggctggcatttgcatcgctgcgcacttgcctctgggaacttgcattaccggggcgtacattgaggcgctgggcatctttcggatgcgtgcctatcggtacaaactctgatgttcactccggacgattcgttcgacgcagttgagttcctgcgtcgcgactctcgctctctacgctaatcacgtggctgacatgggaagacacatcgacgcctccac

SEQ ID NO: 315883 - DNA, 339 bp, Zea mays
agtggagatgcagatgcaaactgttgtatgtggtggtgcttatattgctatcctgttgcctgattgtacgtgttgtcgtcgtggcaaatgttcagtgggtgtaaaatatgaggtcgtaccgtgacctcaaactaagggaaaaaggcaattgtatgaccccagatgggttaataaaaataattggacagtttccggcaaaaaaaaaaaaaaaaaaaaaaaaaaaaaaaaaaaaaaaaaagagagcaaaaaaaaacaaaaaaaaaaacaaagggacacaagaaaagaacgaacaaaaaacaagcaggcaacacgtacaaacaaaaaaagggggggcccccc

SEQ ID NO: 315884 - DNA, 84 bp, Zea mays
aacacgcatctgcggacgcgtgggcggacgcgtgggaatcatgcgaactgcagtaaaggaatcggacaacgcgcggagaaaaag

SEQ ID NO: 315885 - DNA, 399 bp, Zea mays
ggctgcccgctgggctcgccatcgccatcgcctccgcgccgggaaccgcggacgggcgaggtcggactgggcggctggggtgtgggcgatcaatcatgcgctcgcccctcccaccgcgcacatgcgttcgccggggagccggggctactcggcgcggcacgcacgcaggcaactttttggtggcgaccaccacgtcgcgctcgctacctcgaccagtacgtgcccactcttgccctgctgcaccgaccactgcggctttgggagaacaacgaaggggggtcactttggggccggatcagagaccacacaagttcattgtaggcaatgtccacgcgggccatcgagtactacgaactacgtacgtacggtaacggtgcacggcgcgaataactgggagac

SEQ ID NO: 315886 - DNA, 412 bp, Zea mays
tcagtcgggttctttccgaaccatagcttccgcattctttaacccacaccgccacgccacctcgacacgatggccgacgatgatgctgccgctgctgcccgtcgtgctttggagcagcgtgttgctgctttcactgctgaagaacgccgcgaggctgcccgccaagaagctgcgcgcctggaggctgcgcgcctcgaggccgagcgccgtgacgctgcgcgcctggagcaggagcgacgcgatgctgacgcccatgccttggtcgccgccggcgaagttgctgcggctactgctgctcttcatgctcaagcagcggcgatcctcaacgtcaagtctctcgttcccatcgtcctcgacttcacgtcgccgcacttcaaccgatggcgtggcctcttcctcaacactctcgagc

SEQ ID NO: 315887 - DNA, 399 bp, Zea mays
cccacacgttctgcgaacgcgtgggcggacgcgtgggcggacgcgtggggcctggcctgggctggccgcctccgaccaccgtacgtcctccaccgcgtcgccgccggccggcctctgcccagcccgggctgcctgcgagggcttctgatggccctcgacgccgtcctttcctcctagtgcccagctttattgcagatccagccctctgatcctcgtcttctttcacctctccaacatgaaggtcaacaccaagatcaagctggagccggtcatggggccgtcgtcgtccctgccgcggagcgccagcgagctacccgacccgccgtcaacgttcagctccaacacggcgcaccaccccgttctcgtgcccaccacacctaggttgtccttatcctgctc

SEQ ID NO: 315888 - DNA, 175 bp, Zea mays
gaaatttccgcaagttcagcaccagaagcccaattccaagtggtaaaacctccaactccaagtcgtacccttcctaaaggtccaaccgggaacccatggcccggtcaaaaacttcaggtggaacaatcccaaaattcaacagttcaagggaccagcccgtaaacaagggggttaa

SEQ ID NO: 315889 - DNA, 222 bp, Zea mays
aaagcacgccctcgcgctcaccggcgccccgcccctcccccacgctggccgcacccgcaatggggtgcgcggcgtcggccgccaacggggccgggccccggcggcgggggtgggcgcgggcgcggatacgggggtacagcgaggagtcgacctcgggtctgcagccgccgtcgccgccgccgcaagaggccagcgagtcgtcggacgggggcaagaggcgag

SEQ ID NO: 315890 - DNA, 425 bp, Zea mays
acgcacgggtcgatgcacgcctctacaatgagtcgtcgacgtgcccgcgacggggcagggcagccggtgcagtcgcttgtgccccaccgtcgtgccgttggccacgggcgcgccgtccacgtacaccgcgtgccgctccacgcgctgccccagcgccacgtgctcctggatccgcaccacgttgaacgcccgcgcccgcgcgcccggccgccgccgcagctcgatccagtacccgttccggcgcccgtcctcggccgtcggcgcccagtacgtgtcgtcgcggccgtccatcacgttgcgcgccgcgaaccgggcgccgcgctcgctgctggccctggcctcgctgcccgcggcgaggtccgtgccgaagacggtggccacggcggccccgaactcgcgcagccgcgcgatgtcggcgtcctcga

SEQ ID NO: 315891 - DNA, 108 bp, Zea mays
aaactggtcgcgctcacggtgcgcgccgcggcccagcaagtgcctacgtgtagccgcagctccctgtacacggactactacagccagtcatgggagcgcgccgacagg

SEQ ID NO: 315892 - DNA, 423 bp, Zea mays
actcgcgggtcgacgcacgcctctgcacagagtcatctataccagccagccagcagccagcttgctcgccgcgcccgtccttcttcctcgcctccgttccattccgtcccgccctccaccgccgccgccgcattcagggatggagatgaagaagatcgcctgcgccgtcctcgtcgccgcctcggcggccaccgtggcgctcgccgcggaggctccggctccggcccccaccagcggctcctccgccgtcgcgcccgccgtcggcgccgccctcggggccgccgtcgcctccttcttcgcctactacattcagtgagccggccggggcgcccggatgccgaggaagagacgaaggggagagagagtgacatggctgcgcgcattccgatgcgtgggcatgttttttgattcgacacacctttt

SEQ ID NO: 315893 - DNA, 381 bp, Zea mays
gcaaccaccaagaatgatcgatgtctaaacacgcgtggtcgccgttgtcgtctgtcattcctcgtgtacagaagaagcttagtgcctaacacatgaattaacggtacactgaatctatcacatgtctcgcctatatatgttcctgttggccgtccatcgacttggacattttggaacccacaaaccacacagagcaatactgaaaaaaatgtgggtttacagagaaaaaaaaaaaaaaaaaaaaaaaaaaaaaaaaaaaaaaaaaaaaaaaaaaaaaaaaaaaaaaaaaaaaaaaaaaaaaaaaaaaaaaaaaaaaaaaaagggggggccccccaaaaggttcaaagcttacttacccttgaaggcaagttcaaagccctt

SEQ ID NO: 315894 - DNA, 403 bp, Zea mays
aggaatcacgcgatatccaataggtccgttggcccccacgacgagctttagttagatctactgcagccagccttttgcgagcagccacagcggtggcggccgcgccggcgtcggcttcacgctcatggctcgtgcccaacgaagctcaagacgagctcatgcttgtgatcgtcaagcaatcacgtcgtgatccgatcattttgtggctcagggaaggcgttgtaggaatgcagtgcgactgatgttgttgttcattgcgcggtgcgtaactacgctggctgagagattagaatgacatgttgccagtacattacaagcgctcctgtctgatctctgtttcagaactagtttgggaaatgtaagatgagaccgtggacgccaatgtttcagatcctcctccttt

SEQ ID NO: 315895 - DNA, 138 bp, Zea mays
aaaacgtgtgacatagggcgatcccgatcgtcggccggcacgtcttgcgctagcgaccagttacgtgcaacctcgccgggcgttgcgtcactcgggtctgattaatgcgcatggtccattacggggtgtcggcacgcg

SEQ ID NO: 315896 - DNA, 413 bp, Zea mays
attcctcggcggaacggggaagggccccaaatctcaaaaagctcaaaatttctgaggaacgggtgctgccttcggaaaaaacttggctttcccggcccggttccccgttgtgggtttccggaaccgccttgggcttaagaaccaaggtattcttgtggaagacatatccttcgtcgtcgcagacaatttcctggcaattccccagtgggggctaatgtctggtggaactacactcctgctcatgtacatgagcaacatcgtctattttcacaagctcaccctcttcttttatggtgtgcgtcgtcggtaataactaaccaaccgggtggaggtattcttcgcgccgtggatcgcctgcctcttcctcgccatcggcgtgccgccgtccgttgccactgagcccctgccgcagt

SEQ ID NO: 315897 - DNA, 331 bp, Zea mays
acccacgcgtctgatagagatgtcaatgaggacccgatacccgataacccatgaggaattcccctattagggtacgggtatgagacaaaaattgtcccatgggtatggatatgggacaaaatctccacccattgggtaaacgggtatgggtttgggaagcaataatccgaacccgattacccatgggtatttcatacgcgtacacctgtcctgtttgtatgaatgagttgaggccgagtcggccatcaaacccggcaggctccatttcttatattggtcccaagtactgatttcttttctgatggatggatgaatggataatggttcatgg

SEQ ID NO: 315898 - DNA, 401 bp, Zea mays
gatcacagctagtgaacttctgacactgactctccgtacagcaccacatccgccacgtgtcaaggccactctaacactgtggtctccaatcggttgacatagcacgcaagatctggctctggccctagcggtcctcctgctcgaggcgaccgccttggtgcctaatgataacgcatacagctgctagcaggactgctacgatcggtgagccaacgtcattcaggaggatcctgactgcacaagcatctcgaaccaggcctgagggatcatagtaataggcgcagctgcaggtgagccggattaatatagtcaggcttcatcggcgcgagatctcaagtcaacatcaccatagatactcgctgctctgtcacacacataaccacatgcatattctcttgacc

SEQ ID NO: 315899 - DNA, 413 bp, Zea mays
ctccaccggctcctgtgatttcaccatcacctccggtgaaaatcctcccaccaccggcaccagttagctcacctcccccgccaattcccgtgagctcagcacccccatttgcaaaatccccaccgccacagttcaaatcacctgcaccaccaacttcgagaagatctccacctccaccggtgaagcccccgccaccaccgccacttgtaagctctccaccactgccaccaatgacctccccacctccaccaacaccggcgagctcaccgcctcctccagtgaggtcccctcctccaccggcgccaataaactctccacccccaccggtcaaatccccaccaccacctgctccagtgagctcgccacctccaccagccatctcatcaccacctccacccgcaccatcatcaccg

SEQ ID NO: 315900 - DNA, 116 bp, Zea mays
  unsure (1)..(116): unsure at all n locations
gcgtatgacattactacaccctgatgtgagtcgtattaaaacnccgacatcnatcgacagatacatagggttgaagaaagtggcatcatcgtgagccggttcgcttcgcgctatcc

SEQ ID NO: 315901 - DNA, 299 bp, Zea mays
acaacgactacctcgacgtcgtcggccactgaaagctgccgcgcgcgcgcgcgcgccgacccgtggaccatgcgtgcatgaagaagaatgcagggggtgggcctgggcctgtaacctgttaatggatcggattctcggtgccaattcgtgatcttgaccggtctaagaagatggggacttgcgtctttgtttcattggttattatttctactagtgtgtatatggtaaagtcgtgtgctgtgaacctgcgatcatttatcctctgttcattgaattgaagcaatcccctctcccgtcac

SEQ ID NO: 315902 - DNA, 178 bp, Zea mays
gtcgaggccatgatcgatgcacggaggaggatgctgccgctgctctggcctaatcactagtataaagcatgcggagacagccggcccctctggcctcgctgctcccccttcctccccgtccccacccatatgccctgactacgaacctcggcgccctgcgcaatctgagttcacccac

SEQ ID NO: 315903 - DNA, 434 bp, Zea mays
tcgcgggtcgatacacgcctctaaatagattcgtatgatattgggatttaattaagcattgccgcaaaggatgttggtgcctttttggtttctctgttctattgcccacacttgataatttatctcatcaaccttgtgagaaggcttctcttttgaagaataatgaacaaccatgaggtgggcaattgaactcttgtatagctggtgaaaaagtcatgtcacgtcggtaggctatagtattaggcatgcggacaaaaatggtttctcatttaaggatctagacaatggtaccttgtgctcaaaagatgaaatccaagaccatggtgacatccattctaatgatgatgttaagaagaatgtgtgtggcaaacaagatttagatcaagattgttcaatggatatatccagtgacagaaagatgaatatacaatatg

SEQ ID NO: 315904 - DNA, 402 bp, Zea mays
cgaattcgaaagcatcaggcaccatgaactaaccagagaatcttgacacagtttgtacgacgacggtgatgctgttgatgccgagatttcagaatctttaattctctacactgttctgagttactttatgcactgtttcatccatatcaaattaaatcctgtgttgttcagataataatagaaatcaatacagttatttgtatccttagaatttgctccaaaatcttttttttcaacattgataattgtatgtatactaaataaactcgttcggggaaggaatgactgccctcccggtattatgctaagaagagaccgaaaaacaatggtcccgggcgagaaacttcccgaaccctgacccctatcattaacgagccgacgtcaaccgttcactctgcaacg

SEQ ID NO: 315905 - DNA, 321 bp, Zea mays
gattttgcttccctcgctcgctctctcattcgtttgtgcagctgattacgctaggtctatttacgcaactgtcgtgtgtcgaattttaacagcgacggccatgcaccaaacccccaccccacacatcattttctttcttcctttcttttgattcgacgacgcctgtgattcatgcatgctctcgatcgaagcaaagctgttgtatgttgttatggtgtactgtttttttattatttataaagttttgataaaaaacatgtaaacaaaacaatcacatacatcattcaaggatacaaggaactacagtatttgttatgtcct

SEQ ID NO: 315906 - DNA, 384 bp, Zea mays
tcgcgggtcgacgcacgcgaccggacacactcgtggtagactattaggttgtgccgcagtgctcctgctaccgcagctccacttgttcgacttgtagacaggcgtcgctacgtgcgtggctgccgcgacgcggttctagtcgccagtccccagcacactcgaaaccttcgcctccgatgcgcgtctgcggcaaaggggatggctgcggaagcgacgcacggcgggtgaggcgtcagcaatctgaggcgaagcccttcgtcgtcctcttcgtgtgcctcgggaagatgtgcgcggatcctgcagctgaagctgtggttcggaccctcgtacgtaaacatgggcgtgactccggatttctcatagagtctgctggtaccatcgggt

SEQ ID NO: 315907 - DNA, 358 bp, Zea mays
gtaggacaatacaacactctaaagtgagtcgtaatatcaactcctgctccaccaggggcacgagctacttcatcattggttctgccaagtcgttttactaagactgcgccactgtttctgtaaagcaaatggacgagatgatgaccttgcctgtggcaccagctcaccttgacattcatgacactccaatcaaggttgccccaaggaaaggaggcttctccttcagaacatgtaccaccaccggggaacggcatcaaatcttcctcggaacgatgggcacgccttccacctacgcctacacccaaactgctaacgaggttgtacccactgtctaccagagatggaacatcttcatgcc

SEQ ID NO: 315908 - DNA, 231 bp, Zea mays
gcgctgttcttgtcagtgtccctctggatgcgcaccaccggcgtcggcgccggcgttgacctcagtgtctcatgtgaagttactccagatccagatgtatgcctaccctcgctgcaggctgataccgagtctgttatgccacaggatttgtcggaggccgcactcctttcggtgacgattgcaagcggagcagcgggtgactacgttcggcacgacactgatgtagtgagg

SEQ ID NO: 315909 - DNA, 350 bp, Zea mays
agtgatattacctgtgatgatcggttgagttatgtcgccaataatcttgcgtgtcattcgtacatcctggtggcgatcgcgtccacgctccgtacggtgctcgcacaccacattaagtctctatggcgatgcagatggtcgcctgcgccgtactcaccgttggcgccactgccaccgctggtcgtcgcgaactatgccacggcgcccgaatcaagcagcttctctgcaggcgattacccggacttacgcaccttacttagctcctcattgcgcaccatcggcgcatattagtcgtgatatttctccaggacgctctgagggagatgctgcaggctgcaactggatgtatg

SEQ ID NO: 315910 - DNA, 256 bp, Zea mays
agaaggcagtcgcggggatggcgccgctggacgcgctcagatgtctccgtgggagccttcggctctctttcccacagtgcatatgagccgtgggggcagcgcggctggcgggcagagttctcagggtcacctcgttggggtcagtaagccttcccacgtaagcagtgtgactggctctaagtggtcgagctgtagccgcaggtgatccaccagatgagggggagagtgtgacggcccctgacggcaccagtcacat

SEQ ID NO: 315911 - DNA, 350 bp, Zea mays
agagtgagtcgtattagaagtagcaggtgagatcatcggttgatccatcttgcgaataatcctgcgtggccgtcgtgcttcctcgtctcgatcccgactacgctccgttcggctccgaggaagcacatcaagtcgcgatggagatgaagaaggtcgcctgcgccgtcatcgccgccgcggcctccgcgatcgtggtcctcgccgtcgaggccacggtgcccgccccgacgagcgcctcgtcggccgcgttcccggccgtcggcgcggtgctgggcgccgccgtgagctccttcttcggctacttgctgcactacactgagatgaggatcggagggagaggcagggggctg

SEQ ID NO: 315912 - DNA, 406 bp, Zea mays
tcgcgggtcgacacacgcctctacagtgcgtcgatctagagggcgagcgatggcggggcccctgtgcgggcaagcggcggcatccccggggccctgaggcggcgacactcccaaggctagcgagcaagcggcgctctccgacatgcgagtagctacggcaccgcacaaggcacgaggtttgagcagcgtcatggaaggcgcgaggtgtgtgcagcgatgatcgcgcgtgacatcctccgatccagcgcagttccggcggcctgagtgacgacctccatctgttcttgtgtcatcaacgacgtcctccgatgactacctcctctaattcgtgttgtctttcgattattatgttttatgcctaccacatgcactatttacgctaaaaactataacgattttatgcttg

SEQ ID NO: 315913 - DNA, 153 bp, Zea mays
taaagacacttgggccaatcagaagctcgctctctaactgactcatggggagagttcttttgttggacggagagttcaaaatccaaaaatcttggtgtatgtacagttgtctatgaggaatactaacacgtcttgcagtgcttctgcctctcc

SEQ ID NO: 315914 - DNA, 443 bp, Zea mays
tcgttggtcgatacaagcctctacattggttcgtcataccgacgagagttattaattaattcccgtcggccctacgtggccgacgggaattaactgggccgacgagcgttattaattaattctcgtcggttcgaccatagccgacgggaattaactgggccgacgagaattaccctatactgctacaaaaacagcactaaattaggtcactatttctgcacacataacatatatcacacataacataaatcacagataacagacacattacaaacacatgcatttagagatacaacatccacaaacacatgcatttagacataaacacatgcatttataattaaaatatccaccaacgagtacgacatagtattgaaacataacatccaccaacaagtacgacatattattgaaacataacatccaccaacgagttcgacatt

SEQ ID NO: 315915 - DNA, 369 bp, Zea mays
gcgggtcgatacacgcgtctaaagtcactcgtgttatctccccctgccccacgatgcacgcagcatccatcatcgcccagcgctagcgctccgcgcggcctgcgctcaccacgccgcagctaggtgtcccgggcaacgccacctcccaactgcaagccggtgtacctccgcagcgtgcaaccattgctgacagcccgcagatgccgcggttcgttaccctgcacgaccaggcctagcccatgctcgcggtctgcctgccagcgcagcggcacgaccagctaacagtatcgtcgtcatgctcgtgtcctagtcgctcgttcagtgcgtcgtgcacgcagcatgtcatcgtatctcgcctcatctcgccgt

SEQ ID NO: 315916 - DNA, 396 bp, Zea mays
tcgtgggtcgatacaagcctctacactgacgtcgtattagatctccgttgccgggctggtcctggcactggcgtcgctgctgataatcgcgtgcgcaaccggcaagcagggcaaccgggggaggaagcgggagcggcacgcgtcgcgcaggcacagcatcgtggtgccggaacgtcagtgtggcgcagccgcgggcgtggtgtcggcggacgtgtaccagccgtcgaacgggccggcgccgtcgccgtcgccgagcgggacgtcgagctcgtacgacctgtcgggggccaacaagtcgtggttcacgtacgacgagctggcgggcatcacgggcgggttctcggcggcgaacgtgatcggcgaaggcgggttcgggaaggtgtacatgggccccct

SEQ ID NO: 315917 - DNA, 255 bp, Zea mays
ctctacgctgtacatccccatccaggcaacttcccaacccgtcaaaaatgtcaccaatgttgatttcacgggcattacttttaacgcgtccaaccatggaaaaagcctggcttaatgtaactgaatccctttgcgacaaatgcccctttctgaagctggagtaaaaacaaacaggccggcaactatcgcctttcctaacatttgccccgccgcattggcaatcggaacgcccattgtcccggcccattaaccgcg

SEQ ID NO: 315918 - DNA, 417 bp, Zea mays
taagtacagtgacgagaagatgacctcctatagctccaggaccaacgcatcggtaggcgttcaaaccatctcgtagattcagccattcccgttaccattcctacgctagtcataatcatgcatgcgctgtgatccctcccaacttgcagaagaaatggttctgctgtgtctcgcccagtcccacacagtcttgaggaagctaatgagccgtgcagtgctgcagcagtttctgtgatggttatgtgtagctcttcgaattcaatcctatactgcttgccagtgacaggggctctatgtatagccattgcaaatgagaaaattactctgatgggtgtctgcttatagcgttcttagctgtgtataccatcagttcaagctgatgtctgcttgtaattttcttttctgggcccttctcta

SEQ ID NO: 315919 - DNA, 290 bp, Zea mays
gagtcgtattaaacagacaaaggtgacagcatgttgaggctcagagaagtgaagcaagtggctacgcaaatgatagcataggtagcgagggcaataatgatgttgtcgatcaatcatcaacagccgtcatggattcgaactcatccaatcacaggcatgtgctacgatctgatgtgaaaaacagcggcgtattttcacactctagagcctggaagccgaaaaccaattcccatcctcaggacatctcagacggcaagattgctgttgacgggcatgtggattcccatggt

SEQ ID NO: 315920 - DNA, 389 bp, Zea mays
ggccggtcattacaactccctaaagtgacgtcgtattacgcgtccgacctcctcctcacccgccggccaacaactcagccgctgcaaccgccacatcagccatgggcgcttgcgcaaccaatcccaagacgcttgaggggcaggccccagctgaggccgccgtctccacacccaaggttgcacccgaggccactctaatctccgttgaggttgcggctgaagaataggtatcttacaatgtggtggtggaggaaccggctgcggcggccgacgttgagcaatagtaggctaatgaggtgttctctccagaagcggccgtccccgagcccgatcacaacgacgacgaaaccgtcgagaaaaccatcttctaggaggacaatccaaccgga

SEQ ID NO: 315921 - DNA, 116 bp, Zea mays
tgttgatcgcgcatcactgaaggggagcagtggaatacgccggtttcagatctgccgtcgtcatccatggcatgggaacgccgtggtctcattggggggcataaccgtgttggcgt

SEQ ID NO: 315922 - DNA, 391 bp, Zea mays
agtcgtagtactgcagccagcgtgggcgcgcggccccggcgagcgcggcccggcgcaggcacagcggcctcgacgccgatcctctctggcgcgtggcgccgaccatggcccagcccgacgcggctgcggcggtccggtggcctggcccccacgcctagcatggggcccggcgcggccttagccagcgcggggcgcggctgcccagccacggcacggtggcacgggcgcgtaggcgacggccccgtccctgacggcgcgcgggcgcagccccggtgtggcgggcacggcctccagcgggcgcggccttagccgcggaggcgagcgcgcggcctcggcccgatggcgggcgcgaccccgtgggcgctaggccccatgcgcgacggtgcgggcg

SEQ ID NO: 315923 - DNA, 403 bp, Zea mays
aggcgccgccgattgttcatcccgcatcacggctggggaacagtggaagacgccggtttcagatctgccgtcgtcatccatggcgtgggcgctccgtggtctcattggcgcccgtatccgtggtggcctcggtgcgctgccccgcccatctacgccgccctgaaacaatggtgctgatctgtgtcgctcagcccatatgtgccgccctgctatttaatctgcacattatccttcaccacttgccaaaggaatctcatccacgaagtgctactgtgatattgttgcccgtgtttttttttctttctgcctggaatcctctcggacggcatacccacgtaaacgaagtgtaacttgcctcgaagaatatctcaagtgtcaaaggattgattattattctttgttt

SEQ ID NO: 315924 - DNA, 284 bp, Zea mays
agaacgaccaacgccatcagcggccgccgccacgacggacgagtcgcgtgcggcaggatgcactgatcgtcgtggcgacggtcacctgcgccgtccgcggcgttgcgtccgtcaccgtcgggcgggtcgacgacgaccctcggtcgatctgggttcaatagccccttgtcagtcacaatcgtaagcgccacggtcgcagtggagtcgctcctcgtatattctattcagatgcccgccagagcaggagcatcaacgggccggagcagatgaaggtggacggagat

SEQ ID NO: 315925 - DNA, 209 bp, Zea mays
aacgcgtgggcggtcgaagcccccgctggcgccgccggcgccggcgccggcaccgggagcgccgctgggccctccgccagcggcgccgcgcccgcgctcaccggcgcgccgggcgcgttcctggtcccgctacgcggcgactacctgcactaagcagatggacggatggacgctcgcatggcattggcatgcctggagtgttgaacatc

SEQ ID NO: 315926 - DNA, 176 bp, Zea mays
aatccgccgccgccgccgctcgtctccctgagaggtgccgggaccgaggaactggccgagtactaggtagagaatcggtttttcttgtctcagcccggggtctgctgcgtctggtggtggtgaaggggagaaattcgtgagatctgttccggatcaggcgtgcgagctcgggaatc

SEQ ID NO: 315927 - DNA, 296 bp, Zea mays
tacaagcctctacagttagtcctatgacggcctccgcgcgtcgagggcaatctcaagcttgccatgggagccgtcacggtccaagatggtccatcatgaccaccgcggcacgaatgcgtcgtgtccagtgacctccgcagccgttcctgccgccaaggccgatgacgcccggcgccagcgcccgcggatgcacgtgcacgtccgcgagcatgacaagtgcccgctctccacggggcaccagcacctgcaccaccatcaccatcagctgccgcggtcggcagcgttaccaaccctgc

SEQ ID NO: 315928 - DNA, 357 bp, Zea mays
gacccacgcctctagagagaggcataggacgtaagaagtggtctaattcctggatccagttaggcgacttcatcgtcgctctcttcattaccagatttccttgtcatcgtcaagatccaagcatagacttaatttagttatagacggattggtaagcctcgtgaaaattcacgtggaccggggtatcatccttgccgatcgcaacgcaagaggcatcgatccgtaagtcatcttacggcattgcatgaagaagcggaagacaagcgtgaagaagagatcagtgaaacccatatggcaacatgaacctaagctgatcctcgcagatgccacccaaccacagaatcttgaagtgttcga

SEQ ID NO: 315929 - DNA, 206 bp, Zea mays
  unsure (1)..(206): unsure at all n locations
gcctctacactgacgtctgccacgcgtccgcccacgcgtccggcggggctccctccagtccccggagttggtggccccaaggatngaggtcccggtgccgctgccgacgcgggagcgcggcatgacgctggccgagcagctcgccgcgtcgtgcaacctccgcgacctactcaagctccgggacgacggcgtcagtggcagtgaag

SEQ ID NO: 315930 - DNA, 207 bp, Zea mays
tacaacaccctagagcgagtcgtctcactagtggcggccaccgccccacaggtagcggaggcaaagaagaaaagagcggcggagagcggcgaagcggcggaggcgaagaagatccagaacgacttctgctcgacgctgtgcgagggcaaaaaggggacggacctggtcgtgtgcaaggagtcctgcgcgctctcccagcagtccaac

SEQ ID NO: 315931 - DNA, 216 bp, Zea mays
gcggggccatccaagcgtccgaaacaccttggcgcgagtgatggacgcccgtctcggcctcggcttcttccccttcccctgggcggcggctttcgcccggcgggcctcggcgaagttctcggaaaatttcaacaaaacttcgtgccccaacgccgaaaaaatcaccttgggcgtcgtcaaaaaccggttcaaggcggaccccggcaccgccgccgg

SEQ ID NO: 315932 - DNA, 370 bp, Zea mays
taaccaaagacgtcatatgctccttaaattttaagaggacatctggtccttagattgtaaaatctcatggcgtatgtttagagggtatcagatggggtggttcaagcagacctgacttcacatgtaaaagtaccaaagtcgtcctgggtgtcgtgcacgccactggagatgaaccttacatcccatcttcccatccatttgttttaagagatgctggtggtaaagttaattgtgatggatccaagaagacagagaacatgtgattgacctaaggcagtttcagctccagagaaggtccattactcatggaaatgctaagagcaagagtgaaaagttccctaccctcacattaaggtggtacggttggtgt

SEQ ID NO: 315933 - DNA, 308 bp, Zea mays
tacaggaacacatagcaagctagccagccagccagcagccagcttgctcgccgcgcccgtccttcctcctcgcctccgttccgttccgttccgtcccgcccgccggcggcgccgcaatcaaggaaggagatgaagaagattgcctgcgccgtcctcgtcgccgcctcggcgggcaacgtggcgctcgccgcggaggctcccggtcccgggcccaacagcggctcctccgccgtcgcgcccgccgtcggcgccgccctcggggccgccgtcgcctccgtcttcgcctactacattcagtgagccgggcg

SEQ ID NO: 315934 - DNA, 202 bp, Zea mays
tacaacactctatagtgatgtcgtattattggggacatgaagggccatgggatgacccctgatgtcaccacctacaacaccctgctgaacgcttgggtgcttgccggtgatctggaaagtgcccccaaggtgtttgatgaaatggctggggaggggaccgaccggaactcggtctcgtacaatgtcatgatcaaggggtacg

SEQ ID NO: 315935 - DNA, 74 bp, Zea mays
ctaaagtgagtcgtactacacgcatgttccagccggccatcacctggcttctcctgctcattgtgaccaccgat

SEQ ID NO: 315936 - DNA, 208 bp, Zea mays
acaagactctatagtgagtcttgtgagctccgacgccggcgccggcgcagcgctcctcgttccctccgaccgccactcgtggcacgactgcctcgccgaggcggacgcctgcttctccgacctcgaggagcgccaggtcgtgcgcgtccagggcaccgatcgggcccgccgaaccatcgtccgtgtcgtcggcaagttcttcccggct

SEQ ID NO: 315937 - DNA, 390 bp, Zea mays
caagcctctacacagacgtcgtattacgcgtccgcccacgcgtccgcctctcctctgtccctctacggtgcttctgctcgccggcccaaaatcgcctcatcgaccacgcccccttccaggctcccgtctccatgggtctcctctcaaacaggattgggagggagagcctcaaggcgggggatcatatctactcctggagggcggcgtgggtctacgcgcatcacggaatatatgtgggcgatgataaggtgatccatttcacaagaggaagaggacaggaggtcggaacaggaactgtcgtcgatattattcttgtgagttccaccccaaaacgaagcaacacgccttgcccggtgtgcaccgacgaaaccagcgacagcagcacagaga

SEQ ID NO: 315938 - DNA, 165 bp, Zea mays
aaacggcgttgcgggcgaggcaccagggttggggccgggagcatgttcacgcgtgcctgttcgcgctaaggcgagtagacggatggcagtgtcgcagggagctgtcgtagtcgtgtttctcggcgtcgcagcggggtgggaacgatcgatgccagagtggggagt

SEQ ID NO: 315939 - DNA, 182 bp, Zea mays
aacgagaacctttctccctcctccacctttctccttttcttgccacggcaaaacaccttcgccggcgagagcatggcgatggcgtaccgtgtcctggaggtcaccctggtgtcggcaaatgacctcaagaaagtgtcgctcttctcccggactcgcatctacgccgtggcttccatctccgg

SEQ ID NO: 315940 - DNA, 376 bp, Zea mays
aatactctatactaacgtcgtattatgggaccccgatccgccaccgcgcgaccgatcgtcccggatgcacgggccgtacccgacggctgctgctgctgctgcttcttcttcgggcgacatggcggcgaacggcatgaacgtggctctgcaccggcaggtctcggggggctcgatgaagcagaacgcggagctccggcgccaggcgtcgctcgagtccccgcggacggggcgggccaccagccggttcctgttcgggcggcagtcgtccatggacccgaaccggacgcgcggccggagccagagccccgtgcgcgcgccggacgacctgggcgtgccggacaacctggacgcgaccatgcagctgctcttcttcgcg

SEQ ID NO: 315941 - DNA, 60 bp, Zea mays
ataaatcgccgagagcgatcgagagataaataaagataaagaaagtggcatcatcgtcag

SEQ ID NO: 315942 - DNA, 235 bp, Zea mays
  unsure (1)..(235): unsure at all n locations
agtggtgcncgcgtgcggcgaggacgtcgcggcggtggtgggacacgccaggctcgccgggtgggagggtctgatgctgtgcctggactagtcgggcaccagcgggcgcatgaaagcggtggccaggccacgtggcgccatggcggtgggcatgtccagccgggacgcgtgggcggcggcgtacagcggggtcgccgccggggctgccctcgtcagtgggatcggcgtcatggcg

SEQ ID NO: 315943 - DNA, 284 bp, Zea mays
ccggcgctaataacccgccgcagcaagggattgggaccaacaacatcgcctgcaccgttctacgtacgcggcctctagtaaacgtggccctggacgcagaagcgccggctccgtatctatcagcggctccttggcggtcgcaccctacagcgtccgggacgccatggtccccatcttctggtactccattcactgaacccccggacaatgatccggtccggtcggaatacacaccgcagggggatatagcttgcagcgctgcactgcgctgctgctctcgcgca

SEQ ID NO: 315944 - DNA, 405 bp, Zea mays
ctctagaataaggctaaggcaaactgttcttggcctggatgcaaatggttaatctatggttccaagactaccagatcagattggtttaaggttgtcacttttatagatgagcattcttgcccacctaggagagacaataggttagtaacctccaacataattgcgaagcattatttcagtgagattaaggacaatccaacatgaaaagttgagttgataaagaaagctgttctaacaacatgtgtgagagttttaacaactccatcatggatgctaggtactatccagtcatttccatgtgtgaagccattagaaagaaggttatggtgaggatacaagagaataaggccaaggctgagaagtggacaggaacaatctgtcctaatatcttcaagaaattaaaaa

SEQ ID NO: 315945 - DNA, 399 bp, Zea mays
cacacgcgtctgcgctttcctcttggaccatgtgatgtgagtgagttcacggcattgctagttttcctcttctttattagtctttatttcggcacgtccattcaccctttttctttagcatctggccagccaaacagagcaagggtccatggctatcgttttcaaggtcccctactgggctataaatccacgacagcgaggctgtggtgcctttggctcatgtgaatgatcaaacgggaaatgtcaatttggttgttgctagttgctggtccttttcatgtgacatctgccttcgtctagatgcgatgtttgtccttggttcacatcgcttctgttggaacaattatcctctcgaccttgagcttcagctaatgatttaggtctgagttcagattttga

SEQ ID NO: 315946 - DNA, 194 bp, Zea mays
gaaaatcgcccgctcctgttctgcatcggataagctccttctgtgattgcaggctcacgcttcaccggtctgactgcactctcagagatagtacagtggcctttgtcagcacctgtgaagatgtcaatcgtctctgaatgatcaggacggtcctactcgcctagaacaggtacttgcactacgtgacgctcacc

SEQ ID NO: 315947 - DNA, 180 bp, Zea mays
tgcgcgcacagaacgtcaacccgtacgcagacgcagacgctgacaccgcccacgccaacgctaacgccaacgccaacgccagcgccagccttccggagccgccactcctctacgacgtcggaaacccgtccgcgttgcactccagcataccgtcactgtcacaaacagcctcgcactctc

SEQ ID NO: 315948 - DNA, 281 bp, Zea mays
  unsure (1)..(281): unsure at all n locations
ggggggggnggggnggggggggngggggggggggggggggggngggggggggggggggggggggggggggggggggggggggggggggggggggggggggggggggggggggggggggggggggggggggggggggggggggggggggggggggggggggggggggggggggggggggggggggggggggggggggggggggggggggggggggggggggggggggggggggggggggggggggggggggggggggggggggggggngggggggggggggg

SEQ ID NO: 315949 - DNA, 396 bp, Zea mays
acacggcgtcggcggggagcagcgcccggggcctggccaagccggagaacccgttcaacaagcggcggcgggtgctgcgctactgcgccacccgctggaggcccgcgcgtccgcctcgctcgccgccgccgccgccgccgacgtaggcagcggctgtggctagcactgaagaagacatgtacgcgcacgcagcgatgaagcaggcggacggacgaattgaaatgaaaacacaccagctagcaagcatgaagatggatcctctcctgttttgggaccccttctctcgtcttcatcagcatccgacggcgtcatgcatgcatggatatatacaccgtacctagtggtaaactgatatataggttatttcgttttttcttttttttgttgtgtgtggtt

SEQ ID NO: 315950 - DNA, 196 bp, Zea mays
gccttgttcctcctggtcctcttctgcatcgtgcatggtgagaaggaagagtcaaagggcatcgatgcgaaagcgtccgggcctggtgggtccttcgacatcaccaagttgggcgcctccggcaatggcaagacagacagcacgaaggctgtgcaggaggcatgggcatcggcgtgcggcggcactgggaagcaga

SEQ ID NO: 315951 - DNA, 336 bp, Zea mays
ctatctagcgccgacgagatgccgtggggcgcgtcgttgccgtaccaggtcggcccgccggccacgcccagcagcaccagttcggcgccctgccccgcttgcgcggctggcgcggccagcatcgccgccacgcccagcgccgcggcggcgcgacccagccagcggcgcaggccgccgactgccgaacggcgcgccggcaagcctgcatgcgccacgttcacgaagcgcttgccggcctcagacatggttcgtctgcggcagcacggtcaaggccaccagggccagcacgcgggcgcccatcaggatacagcgccggcgcgaaggccacgccggtgg

SEQ ID NO: 315952 - DNA, 373 bp, Zea mays
actcgcgggtcgatacaagcctctacacagacgtcctgttacgcgtccgcgttcgtcaagcgcatgacggagccgggcgcgcgggaggcgtgccgggagcaggtggagcgggaggccgagggcgtcgcgcacgcgacccagcccctcgtgcacgaggccgccgtcgcgctcaccaactgaccggaccggccggcgttccccgtcgactgtgttcgatcgctagacggggtggcacgctgcgatgactacctgtatggcgagtccctatacttactcatacatgagctgcgccgccgtgtcgtcggtgcgtgcaccgcgcagtagtgtgcgtacagcggagagctgcgacggctagcgaggtacggtggtgggt

SEQ ID NO: 315953 - DNA, 195 bp, Zea mays
gcgatgagagccttgttcctcctggtcctcttctgcatcgtgcatggtgagaaggaagagtcaaagggcatcgatgcgaaagcgtccgggcctggtgggtccttcgacatcaccaagttgggcgcctccggcaatggcaagacagacagcacgaaggctgtgcaggaggcatgggcatcggcgtgcggcggcact

SEQ ID NO: 315954 - DNA, 216 bp, Zea mays
gtcggtcgatacaagccactagactgagtcgggctagcgggaggcgtgccgggagcaggtggagcgggaggccgagggcgtcgcgcacgccacccagcccctcgtgcacgaggccgccgtcgcgctcaccaactgaccggaccggccggcgttccccgtcgactgtgttcgatcgctagacggggtggcacgctgcgatgactacctgtatggcga

SEQ ID NO: 315955 - DNA, 316 bp, Zea mays
actgagcctctgatgagagcagcagtaccgttggtcgcatcggcgacagcgggcggccggcggacgctatgtccgttgtggaggccgtggggcccaccgggcgcggcgtcatacgggcagccactgtgatgctgcggggcgaggaagatgaaggacgcgggcgtggtccaagaccaagaccacgaccacagatgcagggtcgtcgttgcggggtggtaagaacgccgcgctgttcctgctgaaaacagtggaggaagaggcggacgcggacactgaaacggcatccatcggcgcggcgtcccaagactgcgaccac

SEQ ID NO: 315956 - DNA, 195 bp, Zea mays
agagtcgatcttccaggagtacatcttctttgtggagtcttgcggttcgaaacaggagctagctcgctctcgcggccgccgctgatgaggtgcaaccagggatctgtcttcctccaactgttgtagaagggggccggtgacctccagggtgaagatgatcggggtcacctggggcccgtggccacggcattagca

SEQ ID NO: 315957 - DNA, 397 bp, Zea mays
  unsure (1)..(397): unsure at all n locations
agagnggngggggggggggtgggggggggggggggggggcggggggggcgaggcggcggggggggggggggggggtggggggtggggggggggcgggggggggagggggggggggggggggggggggggggaggggcggggggggcgggggtggggggggggccggggggggcgggtggggggggcggggggtgcgggggggggggggggggggagtgcgggggggggggggggggtggggcgggtgggggggggcgggggggggaggggcggggggggggggggggggaggggggggaggggcgggggtggtgggggggggggtgcggggggggagggggggggggggggcggtggggggggggtggggcgggtggggagtggtggggggaggggg

SEQ ID NO: 315958 - DNA, 197 bp, Zea mays
gcggctggcaccgccgtcgacaacgacctccccgactacgtcatccagggccgcgtctattgcgacacctgccgcgccgggttcgtgaccaatgtcaccgagtacatcgcgggcgccaaggtgaggctggagtgcaagcacttcggcaccggcaagctcgagcgctccatcgacggggtgaccgacgggaacggcac

SEQ ID NO: 315959 - DNA, 196 bp, Zea mays
cccacgcgtccgcccacgcgtccgccttgttcctcctggtcctcttctgcatcgtgcatggtgagaaggaagagtcaaagggcatcgatgcgaaagcgtccgggcctggtgggtccttcgacatcaccaagttgggcgcctccggcaatggcaagacagacagcacgaaggctgtgcaggaggcatgggcatcggc

SEQ ID NO: 315960 - DNA, 171 bp, Zea mays
aggcaaggtctcgtgcgcagacatcctggccttcgcggcgcgcgacgccgccgtggccgcgggcctcccgatatacgaggtcgctgctgggcggcgcgaacgtatgcgctcgagcatggatgacgtcccgggcaacttctccgtgccgggcgagtaggtgccgcgcctcac

SEQ ID NO: 315961 - DNA, 192 bp, Zea mays
aatcctctcggcccaagttggccagctctccccgtcgtcgtccgtccctctcctcgtctccgcctccccggactccgtcagggagggagggaggtgaacgggccggggagagagatggggccggactcgtcgcccaagaagttgagcctcaaggagcagcgcgctgcctacctccagtggttcgccctcgcc

SEQ ID NO: 315962 - DNA, 210 bp, Zea mays
  unsure (1)..(210): unsure at all n locations
cacgcatccgagacaagatggcatgcacaaacaatgcgatgagagccttgttcctcctggtcctcttctgcatcgtgcatggtgagaaggaagagtcaaagggcatcgatgcgaaagcgtccgggcctggtgggtccttcgacatcaccaagttgggcgcctccggcaatggcaagacagacagcacgaaggctgtgcangaggcatggt

SEQ ID NO: 315963 - DNA, 91 bp, Zea mays
aagtggctatcgtagaggttgatgcgtgagggaggacgcgccatggaagtcggtatgcgagcacggagtggaggtggtacccatggggtgg

SEQ ID NO: 315964 - DNA, 376 bp, Zea mays
  unsure (1)..(376): unsure at all n locations
acgtcaacctcgccgtcgccgtcgccgccgcgccattagcagcctacgctgccgccacgcgccatcaagccatcgcccgtgctcaagtccagcgtgtgagactagtagaacgctgcgatggcagcgtagggaatcacggttcaattccacaacgtcaatcgccaccgggagganagccangaccgcccacgcgctccgcgtgcagccgcactagctgctgtcatcgcacgactacgtatcgctcgcgatgcgcgcggctacacgtcaacgggaaaggcaagaggtccttcatgtccagcatctacatgtgcctgttcccaaaggtcatcgactgagtgatccgaagatggatattcacaatcgctcacccgtatac

SEQ ID NO: 315965 - DNA, 158 bp, Zea mays
attctaggtcgaccgacccgtccgcaacaggatggcatgcacaaacaatgcgatgagagccttgttcctcctggtcctcttctgcatcgtgcatggtgagaaggaagagtcaaagggcatcgatgcgaaagcgtccgggcctggtgggtccttccaca

SEQ ID NO: 315966 - DNA, 306 bp, Zea mays
aaaacaaccacgcctccatcacatcactgccgccgcggtcgctacagtcgctgataagccgctgcatccacggatggagatgaacaggatcccccacacagtctcctcctgcctctgcacattcacttacacctctgcgctagcgcaatctctgaccagatgatcgtccgccgtcttacacgccatcgccggggaaaacgttggcgttatcctcgcgaagcacattcacttaaccccccgattaagaaccggagccagaaggaagaaagccaggtccggtgacacatctcactactctgcgctgct

SEQ ID NO: 315967 - DNA, 121 bp, Zea mays
aaaaaaaaaaaaaaaaaaaaaaaaaaaaaaaaaaaaaaataaaaaaaaaaaataaaaaaaaaaaaaaaaaaaaaaaggcaatcaaaacaaaaaagttaacaacataaatatgggggggctc

SEQ ID NO: 315968 - DNA, 438 bp, Zea mays
accacgcgtccgcccacgcgtccggggatggcaaagcgccggcgccacgagttggcgccggtcgtggaggagctgatttcgccgatgaacagcctggacgacggctgcctcatgcacatcttcagcttcctgagcccaatcccagatggcgcttccttgcatgccaccctcggctatggctgcgtgttgagaggccaatcagagatgcgatggagcctggagtttatcctgatctcgaggctgctgtttctgctgctaggccgggtgacaccattcttattgcggctggtggttcccatgttgcatgtaacatccaaataaagaagcctatttgcataattggcgggggcgatcttcctgatgacactgtattgacctgctcacgtggcttcgacaacgcactggagtttctatcaacatgcaagattgcaaatctga

SEQ ID NO: 315969 - DNA, 152 bp, Zea mays
aagttgttgactgttcgcatggtcggtcatcgtgggtagatgaagcaatctgctactactggcagtggatcacaggaggcatgcaatgggggataggggtgtacccaggccagatcattcatctaaaggggttctttggtgccatagaaaat

SEQ ID NO: 315970 - DNA, 405 bp, Zea mays
cctcattatcctttgtgttctgctgtactgcaaactgaaagtgaatataatacaatggtgtagctgatatatgtacaggaaggcttcttgtagcagatacaaacaacaacgcaatcagatatataactcttagtgacaaaggtgctgaggtgaagacactagagttgatcggagtacaaccgccatcaccaaaaccgaaggtgttgaaacgcctaagacggcagttatcggcagatacagatgttattaatgtcgatggtggttcttcaaaggaaggattcttgtctcttgcagttacagtacctgatggttaccatttctccaaggtcatcaataaccataagacattgttttttcttatcttacttgcaagtttgcattattcatggtagtcactaatgactg

SEQ ID NO: 315971 - DNA, 209 bp, Zea mays
agcacgagtccgcggacgcgtgggcggacgcgtgtggcaagcaacggtttacgttttggaaacggaatttcttcgggaaccaaattaagcttggccttacgaaccttggccctattgggcgtgctctgctgcaacatggcaaccaccggttccgccaacaagaaaggaatcaaggtcttcggaagcttcgagggttcagaatacggaag

SEQ ID NO: 315972 - DNA, 351 bp, Zea mays
gggtcccagcacgcgtccgaaaagtatcacatgatcatcatttcttcctcaaagaatgtctgccttttctggcctcggcacaatttcacaagcatcaatagtaatgcaaatccataataccatgttgacaactcaagcagtcatgcttacaagacaagggaacttgggaagttcctgggaattttaaccttatatacaaagatgaagacaagaatgatgggcaaatttccaaagtttaataatgatttaaccttgaaggacattcctttacaaggtccgagtttcacttgggcaaatctgcaagctgattcggtgttggtaaagcttgacagtttagtgggaacaactgtt

SEQ ID NO: 315973 - DNA, 136 bp, Zea mays
tattaacattttgccctcctccaactttctcattttcttgcaatagcatgtcactgttcgtcatgatagcacctcaagtatgcatctatgtcatatcagtgagtcttggggcctgtaatatcagctgcacaatctt

SEQ ID NO: 315974 - DNA, 53 bp, Zea mays
aaataaataaaaataaaaaaaaaaaaaaaaaaaaaaaaaaaaaaaaaaaaaaa

SEQ ID NO: 315975 - DNA, 382 bp, Zea mays
acagcgcctcatcttcgccggcaagcagctggagggatggcgcaacctggcgggttacaacaaccaaaaagggaacaacccccaactggtggtccggctcaaggggttgcagccaaatttttgtaaaaacattgacgggcaaaactataaccttggaggtggagacctctgacaccattgacaatgtgaaggccaagatccaggacaaggagggcattcccccagaccagcagcgtctgatctttgcgggcaagcagctggaggatggccgcactctcgcggactacaacatccagaaggagagcacccttcaccttgttctccgcctcaagggtggtatgcagatctttgtgaagaccctgactggaaaaaccataaccct

SEQ ID NO: 315976 - DNA, 244 bp, Zea mays
accacgagtccgcagcaatggcggccaaggtgttcctcctcctccgactaagcaatggtcgccgtcgtccgggctgcaaccgcaacagtaccgctcgcggaggaagccgatccgcgggcactgccggaacattggaccaccgcaaaaaattacaaggccacaatggacgccaaaacccggaaggctttcaacggcttggtggccgccgctacggaaaaaaaccggtccaaggcgttgaaggcct

SEQ ID NO: 315977 - DNA, 336 bp, Zea mays
acccacgcgctccgaccatgacgtcgtacttaacgcgtgggcgagacgcgtggaggtcggaggaggcaagctgtgtcagcgcacgcagcagataggtcgagcgtgacgaccatcaggtgactcgtcgtaggaggggcttcgaggattgaggaggcagatcgccctcatgtacggatagttttaatggactaaaactcagttctcacaacacagtgatcagttgtaggtcgaggccatggcatttaatgttgttgcatagtagcttgcagccacaggcacagtggttggcgttgtgcctggatcaatgacttccttggcgtaggaatgaatgcagtg

SEQ ID NO: 315978 - DNA, 206 bp, Zea mays
gggtccacgcacgcgtccgaattcattttcaccgggaagatttgtaactgtcctcctccctccttgtaagttgctcctgtaaactcttcctgaattcatggcgtgtcgttgtagcaatcaccacttcctccctgtgaatgcccacagcgtgtcttggtaaaagcatgtatgtatgaatattggagtatatgttactactcagctcc

SEQ ID NO: 315979 - DNA, 203 bp, Zea mays
tgagacgtattatctcgaatctccacttaactcatacgcacctctctccggccatcctcgctgccgtctccatctccttcggccactaggctacgaaccccttcgggaccagggaccgtatgccgtatctctggcacgtcttctcgccgcctcgggcacctctcgtaatatcaatctccctgcacctggaacgccgctccagc

SEQ ID NO: 315980 - DNA, 123 bp, Zea mays
accacgcatccgaaaaaaaaaaaaaaaaaaaaaaaaaaaaaaaaaaaaaaaaaaaaaaaaaaaaaaaaaacaaaaagatcaaaaaaaaaaataaaaaaaaaaaaaaaaaaaaaagaaaaggga

SEQ ID NO: 315981 - DNA, 272 bp, Zea mays
tgagacgtattatctccagtctcgatggaactcagatgcgccgcgctccggccatacgcgctgccgtcggcgtcaccggtggccgccagggtcgcgagcaggagggggccaggcactgtgacctgcgtctcgagcggggggttccccgaagacgggcacctcatgtactacgaggcggccccccggttgaacgcagtggtggccgttgctacggaccttggaaagctccaggccatggggctcgtcccgcgggacccagtcaaggagaacgt

SEQ ID NO: 315982 - DNA, 303 bp, Zea mays
tgcacctctctaaattgggtcgtatttagatttgaaccgcctttgtaggcgtccggtggcgatcgacgattctgatactgctaggtcctattcagttggttccatctcgtcgtcagtcgtctgcccggtcacgtcgtggatcggacggaacaagtcggtgtgcagttgcatcatgaccgtataccttaacactttgacgctcggcacgttcatctgcaccgtgttagagatgcaggggatacggagcatctctgcaggatactagactagcaacgtctactcatgttacatagccagtttccc

SEQ ID NO: 315983 - DNA, 215 bp, Zea mays
aagccgccactactaccagaggtgctacctccacggcaagatcgacttcatcttcggtagctgccagtcaaccttccactggacctacattatcgcaaggcctgatcggacgactgcgatacgccgctccatcaccgctcaagtacctcaggatgaggaaagcagcggattcgtcttctctcaagggcatcgtgtacggcagtccgggatgtgta

SEQ ID NO: 315984 - DNA, 350 bp, Zea mays
aggacgcgtggggtggtggcgccggcgcatggatgcatgcgtacgcgctgctccagctgcggacgtccgatgccgcggggcagcccgcctcgcattcgccggcaatggtggtgtcgtctggcggctccaatcccaagtgcgtggccggcgccagtaacgaccacgcgtgccgcgtcggtccagtgcacgatccagtgaaccatgaggaggagggctctagcgtcaatatctacgcgcccaccgccgcgcccgactacgtctgacacgacgacggcagcgactacaaagatgccgacgtgcccaacaacgatcatctcgtcatcgtcagtcattgaaagctgtcgcgcgcg

SEQ ID NO: 315985 - DNA, 255 bp, Zea mays
ttatgtggctcccgttaacgacagggccgcagggggccatcaccatcgtcgggatggtgtcatttgcgaagatgatcaagttcaaagtacaggagaactgcgagatgaatctgggcccccaggcaacgagtctaaggacacccgccaaagattagaccagctgttgcaacccgatcaccggcgtctcgcagctgattatatctccctggccaaggtgcgctcaaagtgaatatcgcaaactcgttcatgtgccag

SEQ ID NO: 315986 - DNA, 410 bp, Zea mays
gcggattgcattggagatcagacttagtcgccatctcctatggatgtgttctctggcttcaatatttcatatgttgactgtggttggacgatcgtctccatcactctagccacatttgggtggcatggactctcatcgtgaagaatcatcaagtccatttgacataggatttgcatccgacgttgacgccaatgacatgttcatggttctgacatcactgcagcatacattactacatcatcacattctcaacatttattctgggagcttaacacagacatggatttctcacaattccagaactgtcatatattccttctgagcatcaaagctgtttatcctacgtcgcacgacaggactctcagatgttgcgttcaatacatcaacgagcttttacagctacgaatcca

SEQ ID NO: 315987 - DNA, 330 bp, Zea mays
tacaacaccctgacgtgagtcgtattacgtcagacttcgtcgccatctcaaatggacatgttctctgggctcaatctttcatatgtatgacgaggtcgcatcttcgtcaccagcactcggggcggatttgggtgacatggactctcatcgggaagaatcaccacgtccatttgacataggatttgcctccgacgttgatgccaacgacacgttaatagttctgccatcactgcaacatgcataactacatcaacgcattctcaaagttctactctgagacctctaacacaccaatcgatttctgtacattccacaatttcatatatacct

SEQ ID NO: 315988 - DNA, 359 bp, Zea mays
agcgcggttcgcatgagcgcgcggaatgttgggggcgcaccggtcaaacatgctcaggaggaggctctctcctgtcctacctgttcgctcccggctccactctatctctttcgccatacgcgcgagacggaggataggaaacagctaccatcgagcgaagaacaaacagggtgcttcacacgtgcatgctagatcaattccgatcgtcggccggcgggaattgaactaacgacgacctacttgcaaccggggcgggctttggattaataattccggcatgaccaatgggcaaattccattacggcttgttgccccacggcacgttgtttctggtggaccactacggctcggcagcagca

SEQ ID NO: 315989 - DNA, 369 bp, Zea mays
aaacagtctcctgccacgtcggcgactcaggcacaccgccttcaatccaccgtcagtacatgcggtccagttcatttcagtggttcaatgaggcggacatgttcatcagcgtgcaacggtctctaatccagggacaatcctcgtggattaccttaactttggcatccgtcccgcgagtgacactcgagtggacaaacaatgtaacaaactagtcatcgatggctccctttaatttcatccatggcattcctggtttgtaaccaaatgttccaatttcatctccgacgccaatgttaagctggaatgcaaggaatttggtcacggcaagctcaaacgcttcaacgaacgggttaccgaacggaaagggac

SEQ ID NO: 315990 - DNA, 400 bp, Zea mays
aggattcatcgtcccatagctcaggctctcatcagatgatcgatcacgagttggagatggctccattctatcaatatggcatcactctaccattcatggggttgcgagcgccaccacgtgcatcatggatcctttttccagcgcatcagctttgatcagggattcacatgtagggttttatgatacggtcagatctaccgtcaccgcgagactatatacgctagtgcatatgggattgggattgtactacatggaacaagttctgtggaatcgcttgtcgttacgtctagatcatacgaggcagtgccggctgcggctcatgctcagatgtgagattcttggcatgactacaatgctcgggatttcaatctctgtgtatatcactgacattagctacgag

SEQ ID NO: 315991 - DNA, 416 bp, Zea mays
agcggtcgcctctgcatccgtgctaatactggtccgccggccgcgcctgtcctctacacgggagttcgctgcggccgtcacgcactctggggcgctgttcgtcgccggtggctacgtcccctggtcccctttctacgccagggctctcgatctctccactctgaatgccaagcggagagccgtcgctagtcctgcacacctccgcgcgatgtggatgcacggctgcgcggcgctcgatgggagggtctctatggctgcgcgatggaggatactccaccggggctcaagtaattgctcgccggacttcacatccgccgctgtgcctctctacgtcgaggagcgactccaacgctcgctctatgccgagcgaggacacgtgtcatctgaaaatcatgttggtacctggattctcaagt

SEQ ID NO: 315992 - DNA, 264 bp, Zea mays
actgcatccttgctaatactggtacgcaggccgctcttgtcctctacacaggagttcgctgcagccgtcacacactcagtggctctgttcatcggcggtggctacctctggtgactaattttctaaggaacggctctctattcctatactctgaattctatgccgagactagtagctaattctgcacacttcggcgcgatgtggatatacagctgcgcgtcgcttgataggagggtctctatgggtgcgcgatgaatgatactt

SEQ ID NO: 315993 - DNA, 115 bp, Zea mays
cacgcctctaaaatgagtcgtattataaaaaaaaaaaaaaaaaaaaaaaaaaaaaagaaagaaacacataaaaagaaaaaaaaaaaattacacatacatacaaaaatcgtcaatc

SEQ ID NO: 315994 - DNA, 284 bp, Zea mays
ggtcgacgcacgagtgtaatcgccgtcgtcgtggggcttcacttctcctagaacgccgaaggtcaagaagagaagaaggcgagacgtgcagtccgtcaggcagcgctcgataagagggaagcaggaggaggctagacatcgaactcatcaacgaaccaagtcgtacgtcgtgctcatcatcacgtgacggcgcgtgccgcgtcaagctaagtgtccaggaaggggcactccgcagcgatgacggtggtggaggagtccgtggggaaggtggaggacactgcggt

SEQ ID NO: 315995 - DNA, 62 bp, Zea mays
tctcatacaagccagggcctcaccaggatggtcattgcaattatcactgcaagtactgggca

SEQ ID NO: 315996 - DNA, 193 bp, Zea mays
ctccctgacgtgagtcgtattaatacagccagcctccaataggagcgagccagtcaaactgatcgcactctctccgccgccatcagagcgaacatgctgactgaccccgtctccaaggcaatccgcagccgacgtaccaccaccaccgggggagcgagatggatatcaagatgatcctcgtcgccgtcctcgt

SEQ ID NO: 315997 - DNA, 414 bp, Zea mays
acaaccctctagaataagtcctattaacgggcacgcagtcgtggtcgccctggcctcgccacggtgttctagtgcggtggcgctgtgccttggcgctccgactgccttcgtggtgtagttcgtggacgggaaccgaatggcgctggggcaattgctcgccagacatggtgtaccgccgtggtgtagttcggcgacgggaaccgaacccacctcacccaaatcaccggtatgcgttgttcacctgtgttcgcctaagactcaaaatacgtaggatcgtgcgggtcgtgtgtcggttgccaggggacggttgtgcgtgcaccaaccatggcgccgccgggggctggaaagctggagctccgtcgagctcgagaattttgcaaacatgacaccatctacggagggcttcaaactttt

SEQ ID NO: 315998 - DNA, 456 bp, Zea mays
accggtctgatgatccgggcggccccacgcgtccacatggtccaagtgatcttgccaagttacgagcagcaagcagagatcagatcatccatcggcaatgtcgaacatcgggcagtccttccaggccggcaaggcggaggcccagggcgagtaccaggcggagcacgcggcgcagtgcgtcaaggacaccgccggagccgcggccgacagcgcgcagctgcagcagcaccgcgccaccggcaccgttgagcaggtggcgcagacgggccagggcgtggcggcaggcgtcaaggacacggtggcgggcgcggcggttggcgtcaccaacacggtggcgggcgtggcggcgggcgtcacgaacacggtgaccggcgcggtggcgggcgtcacgaacacggtgaccggcgcggcggcgggtgtcaaggacaccgtgaccggcggccactgatcgacgac

SEQ ID NO: 315999 - DNA, 191 bp, Zea mays
aagtgtcaggttacgagcaacaacgcagtgatgaggtcatccagcagcaatgtccagcatcgggcagtccttctacgctggcgacgccgaggcggagggcgagtaccacgtggagcacgcggtggagtgcgtcaacgacaccgccggagccgcggacgacatctcgcaggtgtagcagcaccgcgccacca

SEQ ID NO: 316000 - DNA, 115 bp, Zea mays
cgtattaggtaggatggcgttcatcatcaatgtcgcagtgaacgctgcggccgtggctgcgctgctgctggtctcagcggtgtcgcctgtcgcgctcgctgggggggtcgctgtg

SEQ ID NO: 316001 - DNA, 232 bp, Zea mays
tggagccggtcatggcgccgtcgtcctctctgccgcggagcgccagcgagctaccggacgcgccgtcagcgttcatctcgaacacggcgcagtaccgcgtctccgtgcccaccacgtgctaggttgtcggtatgttgctcgtcgttcggccacatggtgagcccgcccacccacacatcgccgatgacgcccagcagaaagcatgaccacaagcctaagccgaggccggacg

SEQ ID NO: 316002 - DNA, 70 bp, Zea mays
aaaaaaaatcaaaaaaaaaaaaaaaaaaaaaaaaaaaaaaaaaaaaaaaaaaaaaaaaaaaaaaaaaaaa

SEQ ID NO: 316003 - DNA, 268 bp, Zea mays
actcctctatcaagcttcatgctaatcggcgcgcgtctgcagttgcggccagccatatcatggcgatgatcagcacgttgcatgacgatagagccgcgatgcaattagaagcactgcaggacctgaggttaatcgaccagcaggttgaccacgaccacttagccatagacgatctgtatcgttcgctcacacacacggacaactggttgcccgatctggacgccgtacctgcacactgcctgtcgctcctgcgcaacgacgatccgtt

SEQ ID NO: 316004 - DNA, 192 bp, Zea mays
acacacgcgtctacccacacgttctgccaacgcgtccgggcaaggactggctgccggcgtactactactgatccgacgatcgactgctggatcgatcaagcatgcatgcatgcatgtatacacatcttgtaacgctgaattttgattcatggcacactgtactggacgaggatcattttttcttgcctaagt

SEQ ID NO: 316005 - DNA, 340 bp, Zea mays
acgcgtccagtagagttcagggcatgggcttcgatcctgtagttgatcctgtcgatagaccgtgatacgacttccccagccaaagctgagatcgcacatgtgatcaaccatatggtgcgtctcggagtgttggctgggtaggctcgtttcgaggggaacgtttttatggtagcaccactgtcgggcttcaccaaagaggattccgtcgacctcactgcggtgaggttcattgcgctcacgagcctatacggcacgcacgccgatgattgtgtgcacaccctgggcgattgccatgtgtactatgccgatgtacaacggtagaattagtgagacagcagct

SEQ ID NO: 316006 - DNA, 209 bp, Zea mays
agaagggagagcccaaccacgcgatcgttcaagaggaataccagcttaggagcaacagcaggagcaatcccacgcgttcgatgacatggcccgcgtcggtggcggcgccgtgttggcgctcctagtggcggtcggggcggtagccgcgttcgtcgcggtgctggtctcggggaggtctggggagctgagcgccatggggttgctggcgg

SEQ ID NO: 316007 - DNA, 212 bp, Zea mays
aaacgatgcgacggagtaaggggagtcgtgtgcccaaggagcaggcagaggggagggcgcgtcgtcccgtcgatgcgcggctcgccgagcctcaggtaggactgcgagaagaagagggctgccgtggatacgatcgtggctgatgcgggcgacgccgatgacagcgtcgggatcagagtgacggcgcgacagctaagcaatgggagcgaagt

SEQ ID NO: 316008 - DNA, 277 bp, Zea mays
acagggtcttccgcatcctcgtcgccgcggcgttcgcgccgctggtctccgcgcaactctctgcagatttctacaagcacgtcttgccgcgacgccgatccgattagcttgggcgtcgtcaagaagcggttcacggcggaccccggtagcgccgccgggatcatccgcatcatcgtccgcgactgcttcgcatgctgctgcgacccatcgagcgtgatcgagccgatgtcgaaccaggcctcctaaatcgaagcgggctcgcacatcatcctcgatg

SEQ ID NO: 316009 - DNA, 248 bp, Zea mays
  unsure (1)..(248): unsure at all n locations
agtcgtattaaacncgcgcacttggcgctggccctcgatatcggggagtgcatgtcgttcctcgtcaccgccgaccagaagcccggcgacgacgtgctgggggtgtccaccctgttcatcaaggtcgtgaacagcatcagggccgtgatctgctacgggggctccgacaccgcgccgctggccaacgtggcggccagtcgcatcgggtgggcgtcgtccatgcaagcactgcaggtccttccgctgga

SEQ ID NO: 316010 - DNA, 210 bp, Zea mays
ttgcaactccctgacgtgagtcgtattaaaaaaaaaaaaaaaaaaaaaaaaaaaaaagaaagaaaaaagaaagagcaaaaaaaaaaaagtaaacaagacagaaacggggaaggcacatctaaagggctgctagagggtcaactcacttgaggtccgtcggccgtcttcttttaagggagagtcctggaattccctgacgtaagcgaattg

SEQ ID NO: 316011 - DNA, 113 bp, Zea mays
  unsure (1)..(113): unsure at all n locations
tgagtcgtattaaaccggnacggatgcttctacgtgccggttcacctctctcgtttgatcggcgcttcggctcgggactggcgcttgtgaccgagtgatctgggatggcattt

SEQ ID NO: 316012 - DNA, 414 bp, Zea mays
gtgggtcgacccaagcctctacacagactcgtgctaacgcgtccgggcaaggatgtcggacgcgaagctaggaccaggctgccggagtcgccctgatctagcttctcaggaactccgaatgccctggatcctagccaatcatcctccttcccctttgaatggttgctagcttctcaagaactccgaatgctctggatcctagccaatcgtcctccttcccctttgaatggttgctagcttctaaggaacttcccattaataaattgatgattattttgtcattggtgataagtcacaggaaactaaccaaaacagaaacaactgattttcccctaattttgtgtttcatgcacagttttttaaatctacggtggatgtttcctggtaaaagtattgtgttccttgacaataatg

SEQ ID NO: 316013 - DNA, 159 bp, Zea mays
aaatttcgaggctaaggtcgcggatttcggacttgccaagctgacgacagacaccagacatgcacgtctcgacgcgtgtcatgggaagtttcgggtgggtggccccggagctcacgtcaagcggcagggtcacggaggagtcgtgggtgttctccttcg

SEQ ID NO: 316014 - DNA, 343 bp, Zea mays
  unsure (1)..(343): unsure at all n locations
aaaaagaacttccagacctcttcagtacttatacactcattggttagggctctcatgccatagtctaatttggagtactaaagcattgcacgaggcctgcacatcagaatcctgacgcaatgagacacactgattcctcattccctgtggaggtttcagtgtccgcaagatcaacttcatacgatcttgtaaaggtcatctgatcatccanctgaatggaaatccgcttccgatgcctatgagtatgcaactaagggatcattgcattatatcttcaaattctaaacatggtgtcacctgatcatcaccagcgccagatcactgtcaacgggtacaggccaca

SEQ ID NO: 316015 - DNA, 302 bp, Zea mays
acgcgtctacggagactcgcgcgatgacggggctgtacgacatgctcaagactacgtgggcccgggagaacggcagcgtcggcacggagcagcgcaagatcctggtcggccccatccccggcggcgtcagcccgtccgtcagcgacggggacgacctcgccacggtcaggatgcaggccgacggcatcctctccctcgccgagaacccgaactacgcccacctccgggacatcaccgcgcaggagacgctcagagagcgcttcgacatcccacgcgtcccggcctcatgcacgtccacctca

SEQ ID NO: 316016 - DNA, 292 bp, Zea mays
agcacgcctacggccttatccgcgacgtcgacaggtacgtgcgttcgcatcctccctgggatgtacgaaatagcattttctcctaggatcgtatccgccatagtgctggaaaagacttgcgcttacgcggtcgcctgcactaccatcacgaccgtatgaataagcatacaggagaaaggatgtatcaattgggatgttcgcacgatgatctcggccacaagcaacgaggaggaggcgttgttcagtgtcagttaatccaccaatgactatggatatcacatgacgatgggat

SEQ ID NO: 316017 - DNA, 68 bp, Zea mays
tctcgttgtctgatacacgcctctagctccattcgtattaatttaaggttatttaaatgtttgcatgc

SEQ ID NO: 316018 - DNA, 407 bp, Zea mays
ctattccgtcccgccctccaccgccgccgccgcattcagggatggagatgaagaagatcgcctgcgccgtcctcgtcgccgcctcggcggccaccgtggcgctcgccgcggaggctccggctccggcccccaccagcggctcctccgccgtcgcgcccgccgtcggcgccgccctcggggccgccgtcgcctccttcttcgcctactacattcagtgagccggccggggcgcccggaggccgaggaagagacgaaggggagagagagtgacatggctgcgcgcattccgatgcgtgggcatgttttttgattcgacacaccttttgtcctctttttctttgttccctctttctccttaatttaacgaattgatgcatgccgctgatgttcttcccctgagagaggga

SEQ ID NO: 316019 - DNA, 77 bp, Zea mays
agctggtgcatctgcacgtagcctagacggctagagagcgtaaccatggttcgggctaggatcgtccttgtcattgc

SEQ ID NO: 316020 - DNA, 389 bp, Zea mays
taccgatgctacagcacacgtggcagcagcttgccatggcgctgccggccccctccgccccgccgcaggtcaccgcaagacggcgctgcggagtgcctggggtgcgcacgggttgttttggcgaccccgagatgaagcggccagcgcgggtggcgggctacaatgcgtacgcggtggggggcaatgtgaaggcgtccctccgccggggcctcaggtggttcaagcgcaaatgctcacgcatcttgaatatctgaccaccgtgcgagtgcgcgcggcggcgttctcccactcgtcatggatcgcaaggccgctcttttaccgcaacaattatggcatgcactctgcggtgcattgccaatttatgcattgatcaagaactcgcgtgattg

SEQ ID NO: 316021 - DNA, 353 bp, Zea mays
gtcgtattatccgcgacgacatcaacgaacttccgctcggatgacgaagacgtgcagcgacatccacatggcggacgacgccgtcgccagcggagcggacgttcgccgcgcaggggcagcaccggcatcacgtcatctaccagggagcagcagcagcagcacgacgacgctggctgcggcggcagctaccaccacgacaaggactacatcatcatgcagacgcaggcgaggagcgggctggcgtgccagccgacgatctccgtgatgggcaagggcggacagccgtgacgctgcctgcgggcgcatcgcaacggtagacaccacgtgctgagggagatcgccctgccgtcgca

SEQ ID NO: 316022 - DNA, 430 bp, Zea mays
ggtcgagacaagcctctaaaatgagtcgtagtaggtgctggagtcggcggacctgctcgcgccgcggaagctggacgccaaggaggagctggagaagctgaacgaggccccggcgtcgatgacgctcttcgacttcatgggctggcacttcgaccaggacgagctgatgaagcgcagggaggacggcacgctggacgccgacggcgatgccatgctcctcaagaaggcgcccagcgtggcgcccaagaagttctcctacgtcgacagcctctcctccggcggcatgaggagcccctctgcgcgccactgataataatatatgatcgtcgtcgcgccactgaactaacagcagctcagtcatcgtctacgatccaacagcaccatggatcgtcgatcgtccactcacgagaaggagagacgtccattggga

SEQ ID NO: 316023 - DNA, 389 bp, Zea mays
aaacaaagtcgtgttcctggccatcagcgtccaggatctacccgtcaccatcatagcaaccgtggacgacgatacgttcaggatcgccgtagagcacagggtcagggtcgagtacatgaattagcagatcgcgaaggagcagcaccaggaggcgcgcatagacgatcagatgctcgtgcgctagggctaggatctctacaaccggcagcttatcaaggatgtctgcaagggcaactatgatgtcatacacttgctgcatccgcgctccctcgacgagggcaacaagtcatttcggaagacgtagttaccgctacggtgttacaacgtcaagatcaaccacatatgcagcggccataccgtcatgatccatgacaagctctacgaagcgc

SEQ ID NO: 316024 - DNA, 339 bp, Zea mays
atccgaaatgagtcgtatataagaaaagaataaaaataaaaagaacaaaaaaaaataaaaataatcaaaacaaaaagggaggacgagcgacaagtgtcgtctcgtttgtgcccgggtgtgcaagtagtcttggtgttcagtatcgtctgcggcttcgggttcagggtcagtgtcttttgcctatgccgcttgtaagacccctgggatttgagcgatatcacggtttggaactgcttgctctttagcatcaggaacgtgcgtgcgcatcaggtcgtacgtggtcgccttgtcattgctgacggactctcatctcaccttcgagaccatcatgatggcgga

SEQ ID NO: 316025 - DNA, 99 bp, Zea mays
agtcgtattaaagtagacggcgattgacacgcgtcttcgtcctcgcctacttccgcaactcggagcttcttcgatttcccatccccggtgctgcatact

SEQ ID NO: 316026 - DNA, 395 bp, Zea mays
atttgtacatatgaggctgaatacatatcacgactctaaaccatccatttggttatgatctttttttaagaaagagcatatagttttttgaccaagaaaataagcatgtagttatgactaccaattgttcgttttagattaaagatgattgtttgaattgctgcagttgtaatctacatagacaaaaaacaatgtaaaagcaataaaatccggtacaaacattgcaatggtccacctagcattcttaattctttgatcctttcataccgcgttcacgttaacggacggcagcagcgggcgggccggccggccggctcacgtgaacaacgcccacgaaacagcgctggctgttgcaaaagcaaccgtttccagtttcctcggcaagtgcaccccct

SEQ ID NO: 316027 - DNA, 369 bp, Zea mays
  unsure (1)..(369): unsure at all n locations
agccgccatcatagaaccgccgccccgtccgaggccggactgtgccctggctggggccggtagccgcgaccaggcaaggggcgaccgcgccctcgccgggatccaggcgctcgccatgcgccgtggtccgcgaccgccttggagagccgccacggcctccgtcgggccgcccgcagtctgctccatccggcgccaggagcagcagcgcctgngcgtcctcgtcatgcgtgccggtgtcagccaaccccgcaccaggaggcggccacgccgaactccgcgagaagccgaccgcgcccgacgttgccggatccgcaccggcggtcggtgtggcagggacgtgccgcttgcgcagagatgcagagcacccgt

SEQ ID NO: 316028 - DNA, 95 bp, Zea mays
taaaatcaatcataataacataaaaataataaaaaacaaacacaaaaaaaataaaaaaaaaaaaaaaatcagtcagaagaaaacaatactaaaaa

SEQ ID NO: 316029 - DNA, 434 bp, Zea mays
cacgcgtctgaacaagctggtggtaggcgtctcactatccaccaccgcgccgctccggtttaatttctcctcgaccggccagcgcaattctgtggctcgatcgatcggtcggtcgtaaggcaagtgagcaagctatatatatatataggagattcttcgagcgagctagtagcgagatgggttccgccgtcctcttttactgcatctgcatcgccgtcgtcgtcgcattgtcgtcgtccatggtcgccgtcggggccgccgccccgggggaaacccccaagttcatctcggggctgtgcccggtgcggttcgaccacacgcgcgggattagcgcggtggccagcagctgcaaggaccgcccgctgccgtcgccggagcgctgctgcggggcgctcaaggcctacgcgtgcccctacagcgagctcatcaacgaa

SEQ ID NO: 316030 - DNA, 181 bp, Zea mays
attataggtcatcatctcgtgggggtcatcagatctggcgggttggtggtgtgttgtaatttgtaaagagatcgattaggggtgatgcggtggaggggatactacacactaacaaaaccgagttgtatactgtactactaaactagagatggtaatggtgacgtgattcccgatttcctgg

SEQ ID NO: 316031 - DNA, 358 bp, Zea mays
aagcctctagagtcagtcgtaatatcatctggacaacgacaccaccaccggtggcgccgatgacgtggcacgcctgtccgcgcaacggctcgcactgccggatgaaatccgggtgcaagaaccagctgcggtggtcattagagttggcagactgttgaaggccgaggctgaaagccgatgacagggaagatcaggacgacggtgaccaagcggtttctggagatcgcctggatcatatctatggaggacttctcgatcacggaacgggaagcctcgctggcgcacgtgccgtctcattggactgctaagctaaccgctgactatgacgctgcagcttcagtcatgactctcttctagg

SEQ ID NO: 316032 - DNA, 393 bp, Zea mays
aggctcgtgtcgctcggcaggtacctggtgatgaagctggagcctgggcaggacgacacgttgctctcggaagcgatcactgacgccgtcctcgacctgttcgacgcgtggagcgagagcgtcgagaggcctttggtgcgacgggcgaaggagatctcttcttggttcctgcaggaaggaagagaagacacacctcctcctgttccgccgtctacgcgtccttgtgcggccgaagatgcagatgtgttttattccttagagaattgacagagcagcttgaagcaagagatcgagacattatgaaactacgtcggtagagttcatttacctaacgatgtcaggaagctgaaggcaaaggtctccacggctttgtacctgagatttgagtgagag

SEQ ID NO: 316033 - DNA, 416 bp, Zea mays
aaaccgcttcatgatgcagatctttgtgaaaaccctgactggcaagactatcaccctcgaggtggagtcgtctgacaccattgacaacgttaaggccaagatccaggacaaggagggcatccccccagaccagcagcggctcatcttcgctggcaaacagcttgaggacgggcgcacgcttgctgactacaacatccagaaggagagcaccctccaccttgtgctccgcctcaggggaggcatgcagatcttcgtgaagaccctgaccggcaagactatcaccctcgaggtggagtcctccgacaccattgacaacgtcaaggccaagatccaggacaaggagggcatccctccagaccagcagcggctcatctttgctgggaagcagcttgaggacgggcgcacgcttgccgact

SEQ ID NO: 316034 - DNA, 92 bp, Zea mays
  unsure (1)..(92): unsure at all n locations
aaacacaactgcccagattcangttctgggtgtcaagtatcagagcaagcttctcgaggtgattgaagccagtgagttgccagaaaattttg

SEQ ID NO: 316035 - DNA, 226 bp, Zea mays
cgggtcgacccaagactctagagagtgtcgtattatcagctggtggcaccactgcagctcctgtaatggtttaccgtgtacattgcataggttcatgtatatatatgctaggtccttggtacatgcctacaaggtacagttccattctgttcgagagatgtacttatgcacacgggtctctgtaacatcgatgcaataatggccgggtgactgtaagtgcacatac

SEQ ID NO: 316036 - DNA, 246 bp, Zea mays
cctggaaggaagacagctcttcgatgtcagtgtgggtgtcggtcgtagtctgcctgaagaccggtgatggttcaccttagaagcatgggatgctcatcatcacactaaaaacctgtgctgttgtgttgctgtgtctatcccagtaatagttcagttggtaccttatgttcgaggtttgttgtaagtagactgataaatcacaattgcaggacccagtctgctcattaaagctcgtggggaagaatg

SEQ ID NO: 316037 - DNA, 318 bp, Zea mays
acctgcgccgccgcgggttagcgccgtcgccgatcgggggctcccgcttccccctgagggcggcgcgcgcccggagattgaccgcggtgctggcggttgcgccagtcagaggaatgtcccatcgtcatctggatctagtaggagtgtcgtgcgctccgagagcaggcatggtcatgatctcgcaccgggttcattcggttctccgtctcggtcacccggggacaaatgacgtcactggctggcaagaggtgcgttctgctgctgatcgagtcgaccgtctcgacgatatcagatcacacaacggtgcaccaggcttgt

SEQ ID NO: 316038 - DNA, 197 bp, Zea mays
aaagctaacagccagcacatccagataaaaccgaggagactcagccctcaggcaagccgaccgccgacgtcagatcgcgccaacccgagagaacgacggagatgatcaagaggatgcacatcgccgcgctcctcgtagtcgccgtctcggccgccgcagtgccggccgccaatgaggccacagcgaccggagcgacg

SEQ ID NO: 316039 - DNA, 313 bp, Zea mays
actgacagcgaacaatgatgccacaactgcgtagcctcgtcgcgctggtcatcgtggccacggccataaccgccgcgggcggcgtcgcgttaggcttcacccttagcatcgcctgcaagcaactgtcacacccggttagagagacacctatctcaagctaacgggcgctcgattgtgaacatcgagtgcgggaaattccagtcgtaacagtccataatcacgttgaagcaaataccggtttcggcagctggtataagatcgaaatggcccgcaaccatcaccattacatccgcgacctcagcctgaacaggaa

SEQ ID NO: 316040 - DNA, 396 bp, Zea mays
tagggaaacaccttgaagacgggcgcacgcttgccgactacaacatccagaaggagagcaccctccacttggtgctgcgcctcaggggaggcatgcagatcttcgtgaagaccctgaccggcaagactatcacccttgaggtggagtcttcagacaccatcgacaacgtcaaggccaagatccaggacaaggagggcatcccaccggaccagcagcgtttgatcttcgctggcaagcagctggaggatggccgcacccttgcggattacaacatccagaaggagagcaccctccacctggtgctccgtctcaggggtggcatgcagatctttgtgaagacactcactggcaagacaatcacccttgaggtggagtcttcggataccattgacaatg

SEQ ID NO: 316041 - DNA, 349 bp, Zea mays
aatcgtcggagcacacagagacttcctcgcctccatcgcatcacgccgacgacgtcgctacggtcgctaacaagccgccgcatccagggatggagatgaagaagatcggctgcgccgtcctcgtcgccgcctcggccaccgtggctctggacgcggaggtgccggctcagtcccacagcagcggctccgcggctgtcgcatccgacatcgtcggggccgccgtggtctccgtcgtcgggtacaacagatactgactcgccggaccatgagtcggactgccggacggaacaaaccaatggggggagagacttggatgcgctgtcctgctctgccgccctggcgcagtccc

SEQ ID NO: 316042 - DNA, 347 bp, Zea mays
tccctagagtatgtcgtgttacgtcctcgtcgccgcctcggcggccaccgtggcgctcgccgcggaggctccggctccgggccccaccagcggctcctccgccgtcgcgcccgccgtcggcgccgccctcggggccgctgtcgcctcgttcttcaacgactacattcactgagcctcgtcgcggccggtcgctcggaggccgtgcgcgctacgaaacgggatatagagtctcatcgctgcacgcattccgatacgtgggcagctcttcgattcgagacatcttgtgtccgcattggcggattcagcccggtatccctcagtaacctccatcatgcatggcttgtcat

SEQ ID NO: 316043 - DNA, 366 bp, Zea mays
agtttgatcccgacggaggtttgcacactagaagcgtcctttttctcgattttgatgagaagcatgttggcaggaaaaaaacatcggcccttgccttgtttgtgcatgcgatcgagatccatgcatgcatatgagagagacttgcatgatggacgatcttacaggagaccgagtatggagcccttgatgatgccgttgacgcttgagatggtggcgactcagcattcttgcactcgccagttcttgcgtccggacggcagtaccggggatacacgcctatttctactctcaatggagcatctacttctctctgtattgttattgttttgcgagcagaattgctgatatcgtgttgtaacacagtgg

SEQ ID NO: 316044 - DNA, 64 bp, Zea mays
atacaagtcgagtcagtagggggcgtccttttcaggtgggctccacatcggcgatcggtaacgg

SEQ ID NO: 316045 - DNA, 165 bp, Zea mays
ataaccccagatttattgagattggcacagtgaagcatcaccagctatgccaaagagagcaagcagtcttcaacggtgcatatcagatcggagggatggtacggagtacgggttacacggagcttcgtcagcttcttgataagcaccaggcggaagtgtctggcc

SEQ ID NO: 316046 - DNA, 438 bp, Zea mays
tcgcgggtcgatacacgcctctagactacgtcgcggtaccacgaagtggcctagggacgacgataaacccatttggtgcgtaccatgtagtgtcttctgctgcctcttacctgcactcccgggccacggccatgggcgttatgccatttggtcccgggaatggcgtcaaggacgatcatccagcagccgtcacgtcgctcgtgagcggcgcgagcggtgacggattgagcgtggacgaggcttcgttcgtggccacgacgagttcggtgacctccatggtcgcggcgaaggaggagacgcggcaagccgttgcggatgatctcaactcttcgagatcttgcccttgcgagtggttcgtctgtgaggatgatcagaacagcacgatatacttcgtggttcagggctcagaatcaattgcttcctggcagggcaaccttt

SEQ ID NO: 316047 - DNA, 350 bp, Zea mays
cgcgtctgcccacgcttcctgggtacgtaagaagtcgtctaattcttggatcgaattacacgacttcttcgtccctctcttcattaggaggctaacttgtcatctgcaggatctgtggggtgacttgatttagttatggacttactggtacgcgtcttgaaagttcttctggttcggcgtatatgacttgcccaccgcgaggcacgagggtgcgatccgtatctcgtcctgttgcttcacatcatctgtcggcacatgtgagttgagaagcgatgcgtgtgatccttatcgcaggatgcaggagcatctgactgtcatagatcgcagcttaccatgtgaatctggaggtg

SEQ ID NO: 316048 - DNA, 382 bp, Zea mays
atgagccatgtaagagaaaccgctggcttggtagaaggaactgagcgtctgagccaactaagacagacagctgaacggatgggccagctatccactcagccatatggtcaaaatcgaccaactcttgatgcattaatctgactgccacacattttttacaaagttgttttgccttcacgtacccttcgcaataacaccatgtgttgtcactggtttcttctgtaaccttaacattgggttttaaggctcaaacccaacgaaacatgagaacttggtggtctatggtttcgtctgtaaccttatcgttgggttttaaggctcaaacccagccgaaacatgagaacttggtggttttaacgataaatcaccaaacctctacagg

SEQ ID NO: 316049 - DNA, 423 bp, Zea mays
acggcgatgcagcgggagagagaggagcgtggcggagacgaccggagcaacgacgagaaagcatccatggctgcctgtgtgggttccctgtgtgcgcgtccgccggcgccgccatggcggcgtccgccttctccttcgtgggcatggactccattctccatccccatgattcccttcctcgcctgctgttgaagatcattcctgccacaacgccagaggagaacaggaggaggaatccacagcccaggtatgctagaaatcccccagactagctgccgctggatccggtcgatggcccctcgccctccacctccaggctgcatgcgcgtgttcatcgcctgttgtctcaagtgtaaaagtgtgcccttccttcattgtcgcgatccccttccccacacgatccacttccccaatccctgcgcc

SEQ ID NO: 316050 - DNA, 219 bp, Zea mays
aatggacactactggcgcctctcctatcgtcgatgctgctcgtcgggctcgccgcgggctctgacgacgatgaggacggcggtcgtataaggaagccccatttcaactatggtaagtttaatgcggatccgtggaccgaagggcaggctacttcacaatgcgggcgtcactcgttaacacaacctactgagcgaggctcatggtgtgatgccgaccatc

SEQ ID NO: 316051 - DNA, 91 bp, Zea mays
aaaaaaaaaaaaaaaaaaaaaaaaaaaaaaaaaaaaaaaaaaaaaaaaaaaaaaaaaaaaaaaaaaaaaaaaaaaaaaaaaaaaaaaaaaa

SEQ ID NO: 316052 - DNA, 379 bp, Zea mays
aagcgctcccgccccacgcacgccctcgcgctcaccggcgccccgcccctcccccacgctggccgcacccgacagggggtgcgcggcgtcggccgccaacggggccgggccccggcggcggcggtgggcgcgggcgcggatcccgcggtacagcgaggcgtccacctcgggtctgccgccgccgccgccgccgccgcacgaggcggcggagtcgtcgtctgggggcaagaggcgacggcgcaaggtggcgccggcgcccaaggaaccggctgaggaggggaccgccgcgctgcttccgatgcccggctcgcgcagcttcaggtactactggcagaagaagacggccgccgtcgacaggatcgtggacggagccgacgcc

SEQ ID NO: 316053 - DNA, 117 bp, Zea mays
aaacctcacgacgctccattgtgagttgcacgtacaggccccgtcccaattggccaaaactgttacgtcgcctcagttcattggcacgtcgaatcgcaagttcgggactgagaggtt

SEQ ID NO: 316054 - DNA, 93 bp, Zea mays
aaaacagacacgtcgtcacgtccggcccatcccgccgctgccgtccctaaggacgctctaacgaccacgcaccgagtgagggatattcagggg

SEQ ID NO: 316055 - DNA, 80 bp, Zea mays
gaaaatcctcgcctcctccattgaccaacaattaagcctccccgaccgccacatctattaagtgcagcaatggttgcctg

SEQ ID NO: 316056 - DNA, 170 bp, Zea mays
cgaaaaggtgcaagagacatgtctggggcgtcatttgtatggctttaattttttttattatatatagataaggaaatattttccttaaaaatggagtacaagggattgttgagaactgcttttgttcatgatattaatatatatgatgaatatttcttgcaatttccttt

SEQ ID NO: 316057 - DNA, 466 bp, Zea mays
gagctgtccacgttaagcaatgggtcagcggcggcgtgggaaatccggggaagaagccagtggccgagagacaacagaccgcgtgaggcagcgacagtacgaggcacgccacctagcctgcagagagggtcatctgcacaccaacagggtttgcgacaatgtctagaccttcattctaacagatgcaaccttaaagagtgctgagattcaagaaacactgagcaagatgggtctcgatgccgtggtggccgcctgctacgtctttctagtacttgtctctgtgctcacagttcgcttcttctacgtactgtggcacagtggccaaccagagtcaaggttgtgcaccaccagattgcgttgtctcaatgtccttggctccgaaaaggtccagattaccagctccgggtgatgctgatgagctatctgtcattgaagaccaaattgcatggattgttcacataattac

SEQ ID NO: 316058 - DNA, 190 bp, Zea mays
aaaaaaaaaaaaaaaaaaaaaaaaaaaaaaaaaaaagaaaaaaaaaaaaaaaggaaaaaaacaaagggaggccgccctaaaagttccaatctaagctacacgtgcatcgcacgttcaatactcttcaaaagtgtctccaaacttcatttcagtgaccgtcgttttataacatcgtgacgtgggaaatccc

SEQ ID NO: 316059 - DNA, 191 bp, Zea mays
  unsure (1)..(191): unsure at all n locations
cggaagcgtggtgcgtgcctagcatgcatgcatgtgacgacctctcctcctcgctgtctctctgtatctgcaactgcaagcaaggaaattaattaaaagaagatcggcgccatggcggcaacgacgacggggatgcagatgatgcaggtgcagcaagcngcggcgttgctgctgtgcttggttgtgtttgc

SEQ ID NO: 316060 - DNA, 251 bp, Zea mays
actccctatagaacgtcgtattatggaggcgatgtctaggccggagatggtcgacaaggaggtggggatgcagtcattcctgtgcagccgggtgaatgacagcgatcggtccgcggtcatggtcgctgcagcggcggcgccgtcaggtgggtcggagcagcgacgttatgtacgcgccactcaccaggctgatgcgcgagcgccaggtgcagcagggtcaaggcgctctgtctgtgcgttcgagactgtca

SEQ ID NO: 316061 - DNA, 345 bp, Zea mays
tcgtataacagtacccagagagccatggcgggtcgtcctcctcgccgtcacggactttgactccttctcgctgcgcaaagaacgcgaggtccagctgcagcgcggcgcaaccgggacgtggcggataaggcttgatgaacggcgagcctgacacaggacctcggaatgcaacagtgtccatgaccggcgacgttcgtgccgatggacaactgccccaatgagagcatccagttttccagatgcaatgccagagtaaagttcagtagtggtaactgcacggatgacctcggcgagatcaggagcctgtcgctgaataaagttccggagtagctgtcgcttgcatgc

SEQ ID NO: 316062 - DNA, 162 bp, Zea mays
cacaatctggttctcagtgacacactctgcatctgaaaggaccgatgcacatgtaaagatgaaggtatgtgctcatgctgtgctagtgaaagccttaaattcagtgttctgttgtctctctggtggcgtactgtcactgttgactggcctacggatctgagt

SEQ ID NO: 316063 - DNA, 138 bp, Zea mays
tgaaataagtcgtattaataaaaaataaaaaaaaaaaaaaaaaaaaagaaaaaaaaaaaaaaagataaaaaaaaaaaaaaataataaaaaaaaaaatagggggggtcgtactaagggttcaagttttttttcaggggg

SEQ ID NO: 316064 - DNA, 85 bp, Zea mays
cgggtcgaccacgagtccgggaaaaacagcagcctcgaataagagccagccagagagtctaatagatctctcaccgcctgccatc

SEQ ID NO: 316065 - DNA, 186 bp, Zea mays
acgcgtccgcctgctcctcctcgccatcttcatcccggctatcaccacccccgtcgaggcccacattctcgcccaggtgtttggcgacgaccaattccaacgggcagggcaaccagctgcacctcacgaacatctcccaggccttgccgatgctcccgagggtgacaacgccgcgcgaactgctgc

SEQ ID NO: 316066 - DNA, 275 bp, Zea mays
gggtccatccacgcgtctaaagaaaatcgaatcaacaaaaacaatgaataacaacaaacacagaaattaaaagatgacgaattcagacacagaataacgcaaaagggggcggccgtactataagatcaaaacttaggtcaccatgcatacaatctcatacatcttcgaaaaggtccccgcaaatccaatccactggacgtctattataatcctccagcacgggaaaaccctgctctcacctaacttacgcgctttgcaccatacccccctttcac

SEQ ID NO: 316067 - DNA, 74 bp, Zea mays
agtcccatatcatcttctggcttgttcgtgttggtctcaatccatgtggattgggtgggactggatgggtttca

SEQ ID NO: 316068 - DNA, 163 bp, Zea mays
catcatctttcaccatttcgtgccaagcataaacaccctccacctcgacagcaaggccatcggctgccttcgcatggagcgcgcgacggggtcggcagatatgatgaagacgtactccctactggacacggtgcgcaggcacaccatcgagttgaacccccgg

SEQ ID NO: 316069 - DNA, 415 bp, Zea mays
aacagatcccgctcctgtcgccgctcgtcgtgtcgcccatggtgccggtctgggaggcggaccagacggggggcgccaggaaggagggaggaggggaccaggccgagggcaggagcggtgccgagcagcagcagcgcggcgccgccgctcggcatggcagcagtggggagcaccaggtgcacgacgtgacaccgaggccgtcggcgcccgcgctcggcatggggtggcggcacccagcgatgtcgacgcccgtggcggagccggcgtcccttgtgcccttattccagtcgcagtgcgcgttggaggtgcgcaacgcgcagcagtgagggggaatcatttgctcaaccaagcagccatgcccatagtgcgctcgagctcgtgctcacgacaggcgccgctacgatgtgagaagacg

SEQ ID NO: 316070 - DNA, 300 bp, Zea mays
acacgcctctaaagggattcctgctacgcttccctgcgtctcccctccaccgcgtcgcgtgggccctctgcgctacgagggcttcaaatggccctctgcgccgtcccttccgtctagcgccctgccataatgcacacccagccatcttctgatcctcctgacacctcgaacatgaacgtcaagctggagatccctaggcagcacgccatgccgtcgtcgcggtccctgccgcggagcgcaagcgagctgcccgacccgccgtcgccgttcagctccaagtcgggccaccacccagtctcc

SEQ ID NO: 316071 - DNA, 251 bp, Zea mays
aaacccaacacagaaacacagactagaaaaagaaaaaaaaactataaccacaaaataaaaaaaaaatccaaagacagcagcagaaaggggcaaccccccaagggatcacatccatctcaacatgtccgtgttcgctaacactccttcaatcttgtcccctaaattcacttcacgggccttcgtttaaaactttcgtgctggggaaaactctgtagttccccaatttagtccctttggagaacacccccttt

SEQ ID NO: 316072 - DNA, 392 bp, Zea mays
cgggtccagccacgcgtccgcacgattacaaccccaccctgcactcaaggagtgctttggactatcatgagcaaggtagcagatgcatccaaggaggagatccactccatcgagtcggtgaaggaggcaaatgcacggccggctcagaaaatcaacagccgcgttgttcgctactacaaagcagcaggagccacagaagcgccggcgccggcgccggcgccagaagcaacctgatcgaggagaacgtgagccttgaagacgtaccacgatgcttctttgttcggcttcctagatatactcgaaagctcgtgtgctgagtattgacagtttcgttggtgaaacaggttagaacagtagctcaccctcccgagagtatgggttgaaaatctttg

SEQ ID NO: 316073 - DNA, 406 bp, Zea mays
aggacgcgtggggccgccgccactaggggcggttccagccaccgtcgccatggcgtacccttcggtcaattcctggcggcatttcgcggcggcgcacggatccggcctgcgcggctccgcggcggtgccagcacgcgaccccgcggcggcgggcgggcacggccttggcgcgtgccccccacgcatcctggcgcccccgacggccagggcgcggcccactggcgcgtggccggccatggcggcccctggcggcgcggtcccgcacgggtgcgtcgcccgacggcctgcgcgctgccgtcgctcggctcagacgggcctcggtcagcgcgggcaggcacgacgagcgcgtgcgggcggcctcctccggccaaggcggcgcgtctcgtggcccaggccatgggcgccc

SEQ ID NO: 316074 - DNA, 352 bp, Zea mays
cgtccgagatgaagccatctgccattgccattgtgtgagggagacgacgtgaaagaagaccaagggccacgagatggctctgcgcggcaacctgcccgtgctgctccttttgttcgccgcggcggccaccgcgagcggtaagtcggcgaggctcgaccttttcccagcagcacccggagcatccgctagcgcgcgggcgaagggcgaccggcgccggcaagcgtacatctccgcccacctcccgtcgcgccgggggggaaggcagaaggttgccgcggaagtggcatcgtcgtccgccgtccccttgcctatgtcgtcgggggcctacccatgcacaaggcagtactttgtg

SEQ ID NO: 316075 - DNA, 388 bp, Zea mays
cccacgcgatccgaacagagctagctagccagccagccagcagccagcttgctcgccgcgcccgtccttcttcctcgcctccgttccattccgtcccgccctccaccgccgccgccgcattcagggatggagatgaagaagatcgcctgcgccgtcctcgtcgccgcctcggcggccaccgtggcgctcgccgcggaggctccggctccggcccccaccagcggctcctccgccgtcgcgcccgccgtcggcgccgccctcggggccgccgtcgcctccttcttcgcctactacattcagtgatccggccggggcgctcggatgccgacgaagagacgacggggagagagagtgacatggctggcgcgattccgatgcgtgggcatgt

SEQ ID NO: 316076 - DNA, 269 bp, Zea mays
cagaggagaccccagccagtcgatcgttcaagacaaataccagcttaccaacagcagcagcagcaagcccacccgttcgacgacatggcccgcctcggagccggcgccgtgggggcactcctagtggcagtcgccgctgtatccgcgttcctcgcggtgccggcctcggctaagtccggggaactgagcacgatagggttgctggcagcgaaaggcagcagaggcaccggcacgcagaaatgcacgggagccctgtgctactgctacgt

SEQ ID NO: 316077 - DNA, 294 bp, Zea mays
gggtccagccacgcgtccgaccaaacgtccgcccacgcgtccgatattgatgccacgccgcatgcaggtctttccaaggcgtacgtactatatcaaattattttaatttccttacatgtatatgtatgtgctgctgttggatacgtacgtatatatatatgttctagggtttccggttccggccttgttacatgcatgaagagaagaaacacaatgaataaggcttttattgattgtgtttcttctcttcatgcatgtaacacaatcaataaaagccttattcatttattatgt

SEQ ID NO: 316078 - DNA, 226 bp, Zea mays
aataggcatccggataataacggggatcgtgacgccgttccgctatatctcagccatcatgggtgcaaatgatgctgaaatgcacactgggttcccgactgatctaactcaagtagtacatactggatgagatcgacctcgatccacgaacaacaccaacactaacaacaccaagaccactactggacagacacctaactggatgaaagattaccactcggcaccg

SEQ ID NO: 316079 - DNA, 434 bp, Zea mays
ttcgcggggccacccacgcgatccgatccaggacaaggagggcattcccccagaccagcagcggctcatctttgctggaaagcagcttgaggacgggcgcacgcttgccgactacaacatccagaaggagagcaccctccacttggtgctgcgcctcaggggaggcatgcagatcttcgtgaagaccctgaccggcaagactatcaccctcgaggtggagtcttcagacaccatcgacaatgtcaaggccaagatccaggacaaggagggcatcccaccggaccagcagcgtttgatcttcgctggcaagcagctggaggatggccgcacccttgcggattacaacatccagaaggagagcaccctccacctggtgctccgtctcaagggtggtatgcagatctttgtgaagacactcactggcaagacaatca

SEQ ID NO: 316080 - DNA, 430 bp, Zea mays
atcctcgaccacctcaacgagcttctgctccgacgacgacgacgtgccgccacatccacatggcggacgacgccgtcgccggcggagcggccgttcgctgcgcagggccggcgccggcctcgctgtcttctagcaggaagcagcagcagcagcccgacgacgccggctgcggcagcagcgacgaccactaccagcacgacgtgatcatgctgaggcggacgaggagcgggcgggcgttcccgccgccgatctccgtgatcggcaagggcgggcggccgtggctctgcctgcgggcgcaccgcgagggtggacgcctcgtgctgcggcagatgcgcctgccgtcgcaggagctgctgcagccctgcaaggaacggcaagggaatgatagctagcgctcctaattgatcagctgatcagatgatctgccgcc

SEQ ID NO: 316081 - DNA, 328 bp, Zea mays
tctcctccccctccggttcgggttcgggttcgtgaggttctccggggttcggtttcgtgggtgggcggatcgagatggcggcgtcggatgttgagtaccgctgcttcgtcggcggcctcgcctgggccacggacgaccactccctccacaacgccttcagcacctacggcgaggtcctcgagtccaagatcatcctcgatcgggagacgcagaggtcccgcggcttcggcttcgtcaccttctccacggaggaggcgatgcggaacgccatcgagggcatgaacggcaaggagctggacggccgcaacatcaccgtcaacgaggccca

SEQ ID NO: 316082 - DNA, 288 bp, Zea mays
aggcctcccagggagccatcaatatcccaccataggttaagttacccagatgtcacaggaaggacagctggcttccgaactcaatacacacagggtgtctatgatcccaggctccggacgtgccatatgcacaacgagaaggacaagagccaacaaggaccatactcatgtagctaccctgtggcgctgctggaagcagcggccgcacgttcgagatcacgaatctctgcgcgaccatccaacgtaataccgcctccacaaaggcactccaatacacttcaacgtcag

SEQ ID NO: 316083 - DNA, 258 bp, Zea mays
aacacactccttgcaagcctcgactcggtcagtccatcatatcgggacagcctgagagagtgatgtcgcgcgcgacagttgcagtcctcttctacgtcctcgcggtcactgccctcagcatggacgaggcatgagcagagtcaccgcatgcaagcagtcttgcaagtgcatgcggtcgatgtcaccattacgcaggcatgtcttataaggcctgccaaggcacccacagtctgcagcaaccataactgctaccgttaa

SEQ ID NO: 316084 - DNA, 201 bp, Zea mays
agagacctgataccttctcaacatccgggctgtcagggatctatctcatctggtggatcaacaaaagaatgaatgccaatccgatgctgttcggatgaatctgatacagacagggtccgtgtacgtaggccgaatccggacccaaccaaacagtactagactggataacactgcacctaacttaaatgggtctttcttctc

SEQ ID NO: 316085 - DNA, 279 bp, Zea mays
tatacaagacgatacaaccctgcgggtgttggtcatgttcctaacctttttgcacactccacttgctggttgcaatatgcctgcttccagatgcagaaagacattgaacctgacaatattcaaatgcccatgcatcagacggacatgtacatccataataggattttgacagaaattgcggcgggtgcgcctgttgtaagcttttgttccggacattccggtattaaaagcaaaggtaacctgtttccggaaaagcgaaacaaaataaaggatccagac

SEQ ID NO: 316086 - DNA, 107 bp, Zea mays
acaacaccctgaggtgagtcgtattaagtcttctgcactgtgcatggtgtcaacgcgcactcacaagataagaattctgaatcctcggcgcctggtgggtcattaga

SEQ ID NO: 316087 - DNA, 100 bp, Zea mays
aagacgcgtgagcggacgcgtgggaaaaaaaaaaccgcccgaactaagcacaaagaattgactgaaagaaagggctgacgtccctagaggatttaactta

SEQ ID NO: 316088 - DNA, 330 bp, Zea mays
acggaaactctgaaaacgagaccggcggtcgacgagcacaaggcgaaggaggcgacgaccgtcgtcccagcaccgtcggcggaggaggagaagaccaccaccgacgaacaggccgctgccaactaactgattacaaggaggccaagacctagacgacttgcatccaccacaatccattttgtccaactgaattcggccgccggccgggcggtcccttttggtgtaccccacaccatggttcctttccctgatattggcccggtctggactcactcaataaaatgtgttctatctatagaccctttcgaaaaaaaaaaaaaaaaagggggg

SEQ ID NO: 316089 - DNA, 404 bp, Zea mays
cccacgcgtccgctgagccgttgatgagagcagcagtaccgttggtcgcagcggcgacggcgggcggccggcggacgcgatgtccgttgtggcggccgtggggcccgcggcggcggcgtcttacgggcagccgctgtgcggcggcggggcgaggaagaggaaggacgcgggcgtggtccaggaccaggaccaggaccaggatgcagggtcgtcgttgcggggtggtaagaacgccgcgctgttcgtgctggaaacggtggaggaagaggcggacgcggacactgagaggtcgtccatcggcgcggcgtccgaggacggcgacgacgaggacgaggaggaggtggctagccgcgggacgaatggcgccggggccccgctcgcctgcatggacatggggcccctcc

SEQ ID NO: 316090 - DNA, 359 bp, Zea mays
acacacacacaaccagatctcccccaaatccacccgtcggcacctccgcttcaagatgcagatctttgtgaaaaccctgactggcaagactatcaccctcgaggtggagtcgtctgacaccattgacaacgttaaggccaagatccaggacaaggagggcatccccccagaccagcagcggctcatctttgctggcaaacagcttgaggacgggcgcacgcttgctgactacaacatccagaaggagagcaccctccaccttgtgctccgtctcaggggaggcatgcagatctttgtgaaaaccctgaccggcaagactatcaccctcgaggtggagtcctctgacaccattgacaacg

SEQ ID NO: 316091 - DNA, 173 bp, Zea mays
acgcgctcgccgtccttcggtaggtggattgcttcggtggtccaccatggctcagcgagcggtggccacgatgacgattgtgaagcccatcctcgtcctcacggtggcgtctgcgctccatggcacggcgccggccgcggcgaatgcgcccggcggggcgttcagcaactggg

SEQ ID NO: 316092 - DNA, 320 bp, Zea mays
atctacccaaaccttgaaaattgctttgtcagtcacacacatgtgttcgtgcctccagcaagatgatccgatcgtggtcgtgctagtgttcttgatggacggcactgtctcacggacgccgtaatatccttgtatctcctcatatcaccaccagttataacaatgactgcctggatgctaataccaaatcgcatgcaaaccttactgatgccgatcgcgacgaaacaggtgacggctacgaatgcagagacgtgcacagacaccgcttcaattccatgcgtacatccgactctatagttatctggattgagcgtcagcat

SEQ ID NO: 316093 - DNA, 91 bp, Zea mays
cggctaagtctttcgatcgtgttgcgcggcttcttcgtcgcatgggccatctgtaggtgtagtctgaggcctgacaggagcatttgagtgg

SEQ ID NO: 316094 - DNA, 328 bp, Zea mays
aacacataaggatgttctttcattcttcttttttgttcccttgttgcatcaaattgtgccttaaccacgtcgatgtgctgccaaattgtcaatccctgatacggtcaatcatggatggaccgactgcaatataaatatattataccacaaaaaaaaaaaaaaaaaaaaaaaaaaaaaaaaaaaaaaaaaaaaaaaaaaaaaaaaaaaaaaaaaaaaaaaaaaaaaaaaaaaaaaaaaaaaaaaagggggggccgcccaaaaggttcaaaccttacttacccttgaatgcaacttcaaagcccttcaaaagtgtcaccaaaattcaatt

SEQ ID NO: 316095 - DNA, 404 bp, Zea mays
gcggcgacgagcgtcagcaaggggctctacgagttcagcccgttcctggtgcagctgcaggactgctccttcgtgcgagagacattcacgtccatcaccaactataactgccccggcctcgagcagtacagccgggacgtctacgtcggcctggtcgtcatctctgccggcgtcatgctgtccgtcgtcttctggatggttcacacacggcaccgacggcggcgcgccatgcgcaagcagctgtgactgagatcttgatggcgcgccaggccacgccacgattgagctttagctgttacaaccgtggtccacgcatccgtttcaaatttgtacaatactcactcggttctaaaattaatcgttgtcgtttaatttctaaaaaaaaaaaaaaaaaaaaagggggg

SEQ ID NO: 316096 - DNA, 210 bp, Zea mays
aaaaaacgtgcctctgcctgacgacgtacaatgttcatgggatgactgggaacatcactgcaccagttagcacatcgtcatgtgagctgggcaccaatccatatgatgggggttgtgtcctaccaggacagtatgagtattaccactgtattggagtagttcgcagttggggatacactcatgtccacacacagcacagcatcatgtgcc

SEQ ID NO: 316097 - DNA, 400 bp, Zea mays
agagcagcaaaccatgtagacagaagaaaagctaaaggactacatgttgaagtagtaatagttactgcagtactgcatctgatttgacttgttgtatggtaaattgcccgtccacgcaggttctatactttgaagattttgtaccttgtcagatatcacagtcctcttttgatgtgttgatgagcacagaccggcaaagctatggtttcaagttaaaaagaggtttgctggatgatgaaggaaatgcttttcttgagtgggatagtatgacatttgctcgtattgaaggtggattttctgtcgatccttgattttctctagccaatgctatgcaagaacagcagggatctcaacaagaaagataccttgtgaggaaggcactcaagtctgctctatctca

SEQ ID NO: 316098 - DNA, 389 bp, Zea mays
cttcgcatgctcagggttggatttgacgccccaaaaatcattggaatatgagaccatagtgagtgaacaagaagagaattactggtgtcttttactcgttgttggtaccgatctagacaccaatctagccaggtgtaccgtcatcggtgctttctgctcaggcgtggatagtccgcgacctgtgacaggagcgggatcttgtctacgccgaagccggacggtccacgggtgcgcagaggcggtggcgttcgccaacagcacctggatctaacctcccgaaagggaccccatcacgaagaagagatcatagggtttatcttgggattaacataccacccaagacacctttagacgacgtgaagccgaagagaggtgaaaataaagatgag

SEQ ID NO: 316099 - DNA, 231 bp, Zea mays
atgcgcagcaatcagtttcttcactctcgtggtaccatgtcaggatgaagtgcgcaatgagacgctttgcttcaaaagtacgtcgtgataaccacaaagagcttgattttaatcgtcggtaatgttcaaaggatcgcaaacgctcatcggatggatcaacacgagtgcgcaatcagacatcgattgaaccattgtcattgcagctttcatagcttcctgctgtgcgccatg

SEQ ID NO: 316100 - DNA, 408 bp, Zea mays
acccacgcgtccggcgcacacacacgcaaccagatctcccccaaatccagccgtcggcacctccgcttcaagatgcagatctttgtgaaaaccctgactggcaagactatcaccctcgaggtggagtcgtctgacaccattgacaacgttaaggccaagatccaggacaaggagggcatccccccagaccagcagcggctcatcttcgctggcaaacagcttgaggacgggcgcacgcttgctgactacaacatccagaaggagagcaccctccaccttgtgctccgcctcaggggaggcatgcagatcttcgtgaagaccctgaccggcaagactatcaccctcgaggtggagtcctccgaacacattggaaacgtccaaggcaaagatcaaggacaaggagggcat

SEQ ID NO: 316101 - DNA, 61 bp, Zea mays
  unsure (1)..(61): unsure at all n locations
aaaataaatcatattaaaaatnaacaatcagaaaaaaaaaaaaaagggggggcgccccaaa

SEQ ID NO: 316102 - DNA, 348 bp, Zea mays
aggaaaacttgaaatcagcaaaaaaaaaaaaaaaaaaaaaaaaaaaaaaaaaaaaaaaaaaaaaaaaaataaaaaataaaagaaaaaagaaaaatataaatataaaaaaaaaaagaaaaaaaatcatttaaaatagttaaaagaggtgaaggagatggatttttaagtaaagggatcgaattggaagtctgataaaaaagtcttcagcgttggctacattggtgtgttagcggatggggtgtgcttggattttctgggggggggggcttcgtaggtttcatgtttttttgcgggtgtggggttattgtgggggttgccgtggggggttttgcggtcaagccgtggggg

SEQ ID NO: 316103 - DNA, 414 bp, Zea mays
  unsure (1)..(414): unsure at all n locations
atcgacgggagcacagagctagctagccagccagccagcagccagcttgctcgccgcgcccgtccttcttcctcgcctccgttccgttccgttccgtcccgcccgccgccgccgccgcattcagggatggagatgaagaagatcgcctgcgccgtcctcgtcgccgcctcggcggccaccgtggcgctcgccgcggaggctccggctccgggccccaccagcggctcctccgccgtcgcgcccgccgtcggcgccgccctcggggccgccgtcgcctccttcttcgcctactacattcagtgagccggccgcggccggtcgcccggaggccgaggaagagacgaagcgggagagagagtgacatggctgcgcgcattccgatgcgtgggcatgtntttgattcgacacaccttt

SEQ ID NO: 316104 - DNA, 202 bp, Zea mays
  unsure (1)..(202): unsure at all n locations
agttcctctcncccctggttgtatggaagattaccaatatgcagcgattttctcgcaaagaaggagctcaatgcacatgcttgtttgttcacattcctttttctgctctgagtttctgctgatgcatgtgtacgacagtgtaatttgatgtttgtccacgctttcgagctaaggctttaatctaaaatatcttctattgttt

SEQ ID NO: 316105 - DNA, 211 bp, Zea mays
acgcactcttctgttttcttctacgataggattacgtcgacttcgcaagacgtctcgttggtccatccatcgactctgaggctgccaacggctggacatgcatgagctggacagcgaggatcacattagggttgttgccgccagtaatagcgccggacacgattgctactgcccacttgaaggcaggggacatgtcaggtgtattttctgc

SEQ ID NO: 316106 - DNA, 61 bp, Zea mays
ggccgacccaatcctccacaactcgttgctggagtagtgatcccggccgatcaccattcca

SEQ ID NO: 316107 - DNA, 417 bp, Zea mays
  unsure (1)..(417): unsure at all n locations
acaggccgccttcaaacggtagatctagccgatgtcgtcgtcgatgggacacgagagtagcggtggcggcgccgacgaagaggaccccgccggcctccagcgggtcatttggttgcggcagatgctccaccgctggcagtcctccagctccaggattgccgccgagaggaggtccagcgccagcgacgacggcgacagagccaacccagacgacgccaacgccacgacagaccaaagcagcaacggcgaccccacgcctgccgctgcagacaatgccagcagcagcagcagcagcaggaaccagatgctgccggcggcgccgcatggtgcggcggacgaagaggacgangacgangaccggcggctcctgtcgcgggtgctgctggtggangagcgcaggcnggggtgcccccccga

SEQ ID NO: 316108 - DNA, 123 bp, Zea mays
atcagccatgcgcaccagatgggcttcaacgtcaatgatgatgacaggcgtgtacctcgtgatccgcatcgacatcgggcatcggctcagcgtaggctccaacgtgttcccctccaacacgct

SEQ ID NO: 316109 - DNA, 119 bp, Zea mays
aacacgtccggtgcggacatctaacggacctgcacctgacgctgaacctttacaagcaaggcctgctctgggggaagatatcgaccgccaaggggggcaatcagttcaaggcaagggtg

SEQ ID NO: 316110 - DNA, 411 bp, Zea mays
tacacacgcgtctggcagcaagatggacatggacgcatcctccacgggcaccaacatgcagggcagcctgctgtcacgacgcgcctcagactggctcgcgctgctcgtcatcaagtccggctagctcctggtgcacctcctgctcacgatcctctacgtcgtcgtctccgtgttctcagtagcctcagtctactctgctaagcgcaactcgctgaccttcacgcgcgtggtctccgtagtacctcgcgtctggcggacgctcgccgcgacgttcatcgcggcgttcacgatcttcttcacctagcaggctgtcgccgtgctcgtcttcatcggcctcactttttcagcagacaactgttctgggtcgcgtacctgctcgccttcctcgtcgacgttgcgtatcagctcgga

SEQ ID NO: 316111 - DNA, 308 bp, Zea mays
gccgcaagccgctgcgcgggcactgccgggacagtggacaaccgtgaataagtacaacgccacgatcgacgccagaacgcagcaagctttcgacggcgtgggggccggcgctacggcacaaaagcggtcccacgccgtggccgccgtgctgcaacagcagctgaacatagacgtggtccctgtccaaagccacgtcttccggagaccagatcacataccttaccgtggcccccgcatacgagaaagccgcgggcaccgtcagcgcggccacgcccgacaagaagatccgcgccaatgagcttcccgtt

SEQ ID NO: 316112 - DNA, 347 bp, Zea mays
acacagagctagctagccagccagccagcagccagcttgctcgccgcgcccgtccttcttcctcgcctccgttccattccgtcccgccctccaccgccgccgccgcattcagggatggagatgaagaagatcgcctgcgccgtcctcgtcgccgcctcggcggccaccgtggcgctcgccgcggaggctccggctccggcccccaccagcggctcctccgccgtcgcgcccggcgtcggcgccgccctcggggccgccgtcgcctccttcttcggctactacattcagtgagccggccggggctcccggaggccgaggaggagacgaaggcgagagagagtgacatg

SEQ ID NO: 316113 - DNA, 386 bp, Zea mays
  unsure (1)..(386): unsure at all n locations
gcgcgtggtggagatgaggaagattggcggtgactcgcccgagttccgagagttctacaggcaggaactgaagccatcgttaggtgacattgtatggtcgtggcagggcagtgattcgcctcctactcccttgctgccgccggcgctgaggcaggcaaccaaccaacgtccatgatttcctctgcataaaaaaatttgcagtggaattttggcacttatggttcactaaaaacatgatgttaaacatattgttactattaagggtggctggcaaatgatttgtcactgtcatanggacgctgtactagtagcataacatttgtgataatatatcatcacgggctcataatagatatgacaatgaaaatgatttttattganaaaaa

SEQ ID NO: 316114 - DNA, 63 bp, Zea mays
cggctgctctgtacaaggggttcgacttctacgccaccaccgtgctgtgcgttactttcgcgg

SEQ ID NO: 316115 - DNA, 411 bp, Zea mays
  unsure (1)..(411): unsure at all n locations
gcgcctaggggcggaaggccgccgtgcccgttcttcccagctgcagcaaccggccagtgcgcgcggttgcgttgcatttgcatggctgcgcgctgcgctctgggagcttgcactagcgggtcggcggcctaggcgcggggcatctttcgagtgcgtgcgtgtctgttcaagctctgatcgtctctccggcccattcgccggaggaaactgaccgccgccttctcgctctcgctctctaccctattcccggggctgagaggggaggagagaaggccacgtccacaccataaagcaggacgtacagacacgtgtacganggggatcacggtcgggtgaggtgactaagctggcggacggaacgccgctcctctacgacgtcggaaacccgttcgcgttgctctccagcatacc

SEQ ID NO: 316116 - DNA, 401 bp, Zea mays
gctcccctgccgccctgcgcatgcacgcgcgatgccggccggctgctccggcagtccggccccttcccttcccttccctgcccgtgcctggcccttgagcccctgacgcgcgcgcatgcatgtggcgtacccgcccggcggtggccgtgcgtgccctcatgcatgctgccgcctgccgcgcgcggagccccgcgcgagccgcccacaggccacagccgagcgagggaggcaggcagagcagcggccagcgctgaagcccacggtggcagcaagcagcttgcgcatgtggcctgtctaccggccgccggcccgggtaggcgggcgagccccgtcgtcggatggatccgtcggctttcggtttcttcagccgtggagtctcgtgcgcgcgcgggacgggactc

SEQ ID NO: 316117 - DNA, 390 bp, Zea mays
cggacgcgtggccagattcagaggaattgaaaaaaatgtcagaaaaggcactgaaattggcccaaccagaagctgtctttgacattgtcaaagacatgcatgagctctcccaggagcaaggtgtcatatcacagatatctagttccttgacttcatccttcttcttaccatcgcctgaaagcacccctctccaacttatctgaaaccatcaagctaggattgatattgttgacatcgtgaacttggcattgtccctacagtgtgggcgtgctttcggctgatccgctcacatggtagttacgggcagggtcgtttgactgacaggttctcgcgtgtgatgatgtttgccttcatgttaacttttggtaaaaaaaaaaacattcattcata

SEQ ID NO: 316118 - DNA, 268 bp, Zea mays
aaaaaaaaaaaaaaaaaaaaaaaaaaaaaaaaaaaaaaaaaaaaaaaaaaaaaaggacagacacacaaaaaaggtaaagggttcaaaaggcgtaaacgcttacatcatcatgggtctaaggtgcaaccttcttctaaattgccaccccgttgcttttcaatggctttacttggaaaacctcgtcattgcaaaactcaggcggtttacaacctatccccctttgcacaaaatgccttttacccaaccggccgtaaacgatatcgggtcc

SEQ ID NO: 316119 - DNA, 319 bp, Zea mays
agcgtcggctgaacgctgcgcagtagctcatgacggccgatgtctcgacggccgccatgctctgtgcaccgcgggcgccgtgcctcggcttcaggaatgacatgtatgctgtcctttcatcctattgcctagcgtcactgcatcatctaccgctatgctattaatattctttcaactatcaacaatgtgggtcaggactcacataactctgaagaggatttcaggaccgtcgtcttcaataaccccatgtacgatcatatcatgtcactcaccgtcatgttcgatatctacaacacgctctcaagcattatcccttacc

SEQ ID NO: 316120 - DNA, 161 bp, Zea mays
  unsure (1)..(161): unsure at all n locations
aggcccccggggaaaggcccaaacagggacggatccacatcggcgactccagcaacgtgaccatcagcagcacaccatcggcgtcggcgacgactgcatctccatcggncccgggagcaagatgatccgcatccatggcgtcaagtgcgggccaaggccac

SEQ ID NO: 316121 - DNA, 349 bp, Zea mays
aaaaaaaaaaaaaaaaaaaaaaaaaaaaaaaaaaaaaaaagacaaacgaacataaaaagaaaaaaaattaaataaaagagaaatcaaaaaacaaaacacagcaaaaaaggcacagcaaattgagggcggcggccctaggggttccagcctcagttacgtgaaaaccctccgtttaaccactttaatcgggtctcagaatttccttcttgtggcactcgttttcaacatccatgattgggaaaccccgtcggttgccgacattaagcccctttcagcagatcccgcttcctcccgtgggtgtagctcctaagcggccccccccgtttacctttcccacaatttggccacc

SEQ ID NO: 316122 - DNA, 128 bp, Zea mays
ccggggccacccacgcgtccggatacgccggcgacatctggagcttcggcctcagcatcctcgagttctacatgggccgattcccgctgggcgagaacctggggaggcagggcgactgggccgcgctc

SEQ ID NO: 316123 - DNA, 377 bp, Zea mays
agcgccgccgccgctagggaccggcctacagccagcacgggcgcgtggccctcggccggcgcgggggcgcggcggtcatgacggctcgggcgcggtagcctcggccccggcgtctccgtcccggtgcgtctccccgtggtacggcggaccccggactcaacagctcgggggcgcgactccctgcgacgcgtggcctcatggccctgatggctcgtgcgctgttgcccacggtgcgcggccccacggcccggcggctcaggcgcggctgcctgctacgcacggcccccagccccggcagctcgtgcacggctgcctgcgacgcgcgcacccccggatccagtggatcgggcgaaggccccctgcacgcactggtgagg

SEQ ID NO: 316124 - DNA, 413 bp, Zea mays
aaaaaaaaaaaaaaaaaaaaaaaaaaaaaaaaaaaaaaaaaaaaaaaaaagaataaaaaaagaaaacatacataaatattaaaaaatttgtatacacatacatcatatcatcttaaattttctcgcatgtcactttcatttcgtttctttggccgatccttttgtttattcgcgtcgtggaatatccatatattcacccacttttatcatcttgctcggtgtcacactttttccttgtggctatattatttcttctctagctacgaattacgattcacatcttttctcgctgtctctctctctcgctcttctccctttgtttcggcgtatgtgccgcgctgtctatggtgcttacccgctctatgggctctttccttacttacgccttaatgccatttcctttctcttccctt

SEQ ID NO: 316125 - DNA, 117 bp, Zea mays
  unsure (1)..(117): unsure at all n locations
agccngnggacgccgcaccatgtcgatctggggatcggagcgcgggcgacgggatgccacgcggcggctggcgcgcggcttcgtcgaacccgagggcgttcgggtcggattcggact

SEQ ID NO: 316126 - DNA, 136 bp, Zea mays
accacgcgtccgcaggaacgaagcaaaggaaaagtgaaggaaagtttcccatatgttttatttcctgcgttttccctacaaaatcagccatatgggaaacgcaggaaataaaacattggcttggacctcttttttc

SEQ ID NO: 316127 - DNA, 146 bp, Zea mays
acgaaaaggaaagctctctcattgccaaattgcccccgactcaagcgcccggcgccgccggcgttggtggaatcgattgaaccggtcatcccggagaatctaaggacgttggtttcacctcacgtttttgtgcatggaatatgagg

SEQ ID NO: 316128 - DNA, 260 bp, Zea mays
aaccgcggctacggccattccatcttcgagtgccccgcgatcgtcgctgaggcgtgaccggcagacagacatccgcggcgccatcaacgagcaggtgcggcaggaagatgacagcatcggcgtcgccgtcctcaaggggaatgtataatgtgtcgaggaagtatagccgtgactcgtcacagcgccggacgcgcacgtcatcatcgctgtgaccggagtctccagcacgatccagacggccggcggggcagcgatacgcc

SEQ ID NO: 316129 - DNA, 426 bp, Zea mays
cacgccgcttgcgcacaccttgcagatctgcggttgtcacacatcgcatcgaggttgcgggccgcgcagcagtgttcagcctgttcagattcttgaggaaagcgagacgaaggatggcacgtgtttcagggaggctgtcctatgtcgtgtttctcctcctcagtctcagcagacagtgggaaccgatcgatgccatcaatgggagtagccatgcccatgcatgccttgataatgggtaaagcgacacagcaggaggacggtgaagaatgaggagaggtgcacggataaggaagagagtcaatgcttatcgccgagtctccagttcaagggcttctgctgtaatagcgatagatgcgccgaggtgtgcatgaagtgagagctttcgcggtggcgagtgcaggcgggacgtgggcatgcacaggtgct

SEQ ID NO: 316130 - DNA, 99 bp, Zea mays
acaatacaagactctaaattgagtcagagaatggatggccctctgctttgtggaccaaaaagtggttcaggaatagcaatcagttgggctacatttttt

SEQ ID NO: 316131 - DNA, 312 bp, Zea mays
gtgatgtcaatattatgccggtgcggtctccttggtcccagactctgcggaaaatgactttgatacttctcatgctactggctttctaagcagctccgccggcgagcgcggtggtccgcggtgacgagtgttatcaggtctgctacccagtccacatgattggcgtaggagtgatgtttcgaggtgaaagcagatctctgctagccacgggcccatggacacttacagggatcacgcttttgggttcctaacagccactattgtttcctatatcatttgcctagccatgcatgtcttgcattgcgtttttta

SEQ ID NO: 316132 - DNA, 441 bp, Zea mays
  unsure (1)..(441): unsure at all n locations
cgcgtccgatttgaggccggtgcggtctccttgcttcgtgttggtgcggaaaaataatccgcggcgtgcacggctattggcttcgtgttctgctcgattgcgccccccacccctcctcggtagcgcgcaagatgaatgaagattggtcctggtctggttggcgtatcagtagatttcattttcattgcgagtgtgccgttttctttgaattcttgggcgggttcgagtgaggttttggggtttcgccttgctttcangggcggtgttgttccgatgacgtctgccaagtagtaattaattttacaggattanttttggtgctgtttctttgaatgataaaccgaaatccttgtttttttttgaaaggattaacatcatattgctttttaagtgctgtttggttcatcaacggtaacatatatagcaacagtaatgattcat

SEQ ID NO: 316133 - DNA, 301 bp, Zea mays
  unsure (1)..(301): unsure at all n locations
ataacanggaggaactcctcatcctcctcgcttctgccctttccagagtgctccgtccgtgtgcctgtcatgtcgttgagacagcccgagcatctgggacaatctgctgtaaggttcattgcgagatggagtcgtccgtggactgctactgattataattcggaagcatgaggtggtaagaaacttgagcgtagctaacgagcatgttcacaggctgaaccgtgagagtggctgcgcattattgtacactcagcttgagacacattgccattcggaagagcttgcacgattcatcgatgtt

SEQ ID NO: 316134 - DNA, 288 bp, Zea mays
catgaagagcacgggcaggtcagcggcagccacggctcagacgatgtcgtgccacagatacttccacaaccgactcatatgacgacgattaatggccatcacctgcactccgctcggaatagtcggccatgaaagacgccgtgtgggcccaaagcaacgcattcccaaagttcagaagacacgagatgatcaagatcactgaaggacttcgacgagccccggttccttgcacataacgggatcttcgtccgacccaccaactagatggtcatctcaacgcgaacccgg

SEQ ID NO: 316135 - DNA, 126 bp, Zea mays
agagagaagtcgcctaattctctcgatcgaattaggcaccatcatcgactcacgctacgtctatagctagtctctcaagcgtataggaatatttcattggatcatggaccgagtgataaggatcat

SEQ ID NO: 316136 - DNA, 95 bp, Zea mays
aaagggcccggcacgtcagtccggtgcgcaccccgtcaggccatcgcccaggcctcgccagtcggcgctcccagcgtcgctgacaggaggagcaa

SEQ ID NO: 316137 - DNA, 154 bp, Zea mays
aacatgcgggcccccgacggtgacgcccggtccgaacatcaccatcacggaggcaggtgtctgggtcaacgctaaggggagttgtttgcgtgagcccaaccagtgcccgagatctgagactgttggggatcgtgcagggtccacaacttgatcc

SEQ ID NO: 316138 - DNA, 100 bp, Zea mays
acgagtgtggcgccatgggtggctgccactctgctcatcgctggcacaacgctgaagattctgcgccgcggatgccggggtgacgctaccttcctcgccg

SEQ ID NO: 316139 - DNA, 239 bp, Zea mays
tgcatgcactgcagtgcgtaagcagactgtgcgtgcctgcccacgcaattcgacagcacaccgatctcgatggagctgtgatcgtgtccactcgatcgagagatcgattgatgcttgagattaaatttgtagtccacattatatataagagatacagcttaaactaaatttattccatcaagcacgaccgccgcaccaccgaagtcgtcgccgtcaagtacagcgagcgtggaaaaagg

SEQ ID NO: 316140 - DNA, 187 bp, Zea mays
aagccgaggcatgcgtgccgagcgatgcgcacgcaggctgtgcgcgcctgcccacggagttcgagcacgcacccatcgccatggagatgagaccgtgtccacagggtgagacagatccatcgatgcatgatacgagagtcgagatccacatggaccacaccaactccgagatcgactgcgtgaaccc

SEQ ID NO: 316141 - DNA, 299 bp, Zea mays
aaacgcacaagcatgatcgacaggtcaggtcagcgaggcaaactctggtaatggatgtaggcacgggactcgcttcgatgacgacggtacttcacgcgcagaactaggtagccctgctcacactggatcgaacagtggatgtccatatgacttctgagagccagcatgctacatcagaggcaacaacatattgggaaaattcacgatgtacatcgtgacgaaactctcagagcagcattgaccgtatgaacagaatgctgaaccatcatggttcatccatgcatcattcagagaagctg

SEQ ID NO: 316142 - DNA, 410 bp, Zea mays
cagagatacgcgtcatcgtactcgcctacctccgcggctcaaacctttcccccttctcccaattccctccgtcggccgccgctccatcccgtacgacgacaccatgagggagtgcatttcgatccacatcggccaggccggtatccaggtcggaaacgcgtgctgggagctgtactgccttgagcatggcattcaggctgacggtcagatgcccggtgacaagaccattgggggaggtgatgatgctttcaacaccttcttcagtgagactggtgctgggaagcacgtgccccgtgctgtttttgttgaccttgaacccactgtcatcgatgaggtgaggactggcacctaccgccagctcttccaccctgagcagctcatcagtgggaaggaggatgcagccaacaact

SEQ ID NO: 316143 - DNA, 413 bp, Zea mays
atgaagatgaagaggggtcaacctagaagaggccatacatcaagaagacatgctttcaatgatagaaaatgttttgagtgtggggaacccggtcacatcgccatgaattgccctaacaagaataagaatggcacagatggagatgataagaagaagaataaattctacaacaggaagaaagatggcagagcctacctagttgaatgggatttggataatagctcggatgatgatgatgatgacacctcatccaaacttaatgccggaatggccatcaatgaagccccttcacttttctcatcccctcattgtctcatggcaaagggagatgctaagaatgttacgtgaggccgatgactacatggacaaagaaaaagaaaagttcatgaccttgaaggaattgtataaaaacc

SEQ ID NO: 316144 - DNA, 125 bp, Zea mays
aacgacaaggagccaggcatcaagacttcatgctttcaataatagaatctgttttgagtctcggcaacccgttcaaatagccctggagggacctaatttcaatacacaggggacagaccggtatc

SEQ ID NO: 316145 - DNA, 370 bp, Zea mays
aagggctccgcgtcgtgtcgcttctcttcctcctcctcctcctcctctctccaacaccccatccatcagcgctgcactccgcattgctcttgatcccatccagtacatcgattcgccccccaggatcaaaggccggaagaagaatcaagtttataattttggatctagccggttcctacctgaatgcgatgtcatctccaatcgcagaacatcatcaagttgagttctcagccaatcatccggaagggctgagcgacattacagcccccttcattagtgatgccctcaatggcgacggctcatatgccagagtctattttggtgtgctgagacatgggacgaaatctgcagtgaagaagcttgactccag

SEQ ID NO: 316146 - DNA, 164 bp, Zea mays
aaaacgcagcacatccaagtgtcagcgatagacctcagccctcatgcattgccgatcgccgacgtaccatcgcgccaacgagagagagggatggagatgatgacgaggatcctcagcggtgcgcgccgcgctgtcggcatgtcgggaaccgcggtgggggcgtc

SEQ ID NO: 316147 - DNA, 409 bp, Zea mays
cccacgcgtccgcgcgcatccagctcctgccttgcttcctctcctcccggttcccgaataaaatttcctggacccggagcgcgcagcgcgctcccccgcctcccaaggaaacttatctaagcattccggcggtcgatccatcttcccgtccagggagagcaaggaataatcaatcaaccggccagtgaaacgttaggaggaggaggagagccggagtccgtccagcgcggcgcgggttgatcccttgcgtctccgcccctgcccctgcgcatggcccaacagtgccaaccaagcacatcggtcacgggtcagtcagccacgggagaaggcgcgacgatcgatatggccaaaagtggaccgacagtaatggcggcagcaggcggccggaagcagcagtcaaattgtctgc

SEQ ID NO: 316148 - DNA, 270 bp, Zea mays
agcgaccaactactgcgttgtctcgcctcatccaggttctcgaacacaattgcgtggagccggagcgcacaccgcgctcacccacctcacaaggagacgtatctagacattccggcggtcgatccatcttcccgtcgatggagagcaaggaatagtcgatgtacaggggagtgtgacgttaggatgaggaggagatgttgtgtccgtcgagcgcggcgcaggttgcctcgttgcgtcgcaggcggtgcggcgtgacagtggggaggaatg

SEQ ID NO: 316149 - DNA, 161 bp, Zea mays
aagcgcgcgccgtgcatcatcgcctcaccgttcaggacgtcgaactacgaggacgtggcgcggggaccgcgctcagacacgaatgggagggagagctccaaggacggcggatggtctctacacctggacgggcagggtagagtcaacgcatattcaggaat

SEQ ID NO: 316150 - DNA, 63 bp, Zea mays
aagtcgcagcggcgacggcgggcggccggcggccgcgacgtccgttgtggcggccgtggggcc

SEQ ID NO: 316151 - DNA, 119 bp, Zea mays
aagcgctaccgtcctcctcggcgccgcaaagacggtggcaatcgtcgtccctctgttccgcgccgacagtgtcggcctgcggcccatgctgcggacgagcgcggatggcattgccgcgt

SEQ ID NO: 316152 - DNA, 278 bp, Zea mays
agaagctagcagcttcatgtgtgggtacgtcaccgcggccgtcagtgcataaacaccaacaacacagactcggggtagggcaccagggtcacgggggtcaactggagggggtcaagagttgccgtcgcagatctcgtctgggaaaacatcgaagggagctccagcagcccgcgggccagtaggctgagctgctccaagaacttgaggtcctagcgagatatcccaacaagcttcggccttgggtcgaaccggtccataagatggaaagcatgagtggg

SEQ ID NO: 316153 - DNA, 374 bp, Zea mays
aaagtgacgtacctactagcacgtgtggtaatgcgttgatacagcatgctaataaccctgagtgcacgtcgtgctcgtctcgatggcgacgacgctcctctcggttccggaataccatatcaggtcgcaatgggcatgtgcacagtcgcctgcacggtcatcacagcagccgccacggccacagtggtcctcgttcgcgaaggcacgtgcgcatagggtgacgagctcctcctcgggtacgtcaacgggcgtcggcacattactgggtacctccgtgctcaccttcttcgcctactacctgcagtaaaattaaaggagggtcagatggagatgctgctggctgccagtgcctgtattcggttggattccgttta

SEQ ID NO: 316154 - DNA, 298 bp, Zea mays
acccaatccgaccaaaccggcagagccggggggcggcgatggcgctgcgacgggcgctcctcagatcggcagagatctctttcgaacgcaagtagccgggagattcggaatcccgcgcgcgagttgggcctagccagctggcgtcgtagccgcactctgggaggcatgtgggttcgagccgcggagggtaggggtaggggcgggtttcagttgttggcctgttgctgtatttcgcgtggtgatggaatttaatctcttccggggcgacgggcatggttttaagggaaaatttttgggg

SEQ ID NO: 316155 - DNA, 210 bp, Zea mays
acaagcctctacactgagtcgtattaagcaatagaacacccttccgtgtgcatcgctcctccgtccacacctccctggtcagtcgtatacgaggatcatgccggctaacgtggacgccgcggcccagtaccggtaggaggttgcccttagcagcgttcccggcgtccagagagtgccggtgtgcagtggactgttcggtcatcgaggccc

SEQ ID NO: 316156 - DNA, 183 bp, Zea mays
cgcctctaatgtgacttgtactgcccttgcgctgttgtggaaggcgtctccgcttacgatctttgtcatgctgatcttggcgccttggctgggacctcctgccctcgtggtgttcaggtggatcatcatcacgcagctgcgctgtctgcggcgtcggctgtgttcggttgctttcttcagtgg

SEQ ID NO: 316157 - DNA, 231 bp, Zea mays
acccacccctcaacacggcgcacccttcaggcgagacagcagtccgactcgcccccaacgaccacgatgagcacagcggtgagcccgatcaacaggaagagcgaggcaataccttatgtggatcacgtgggacacatgcccgacaggacaagttccggctcagacgagatacttctgagctgtggtagcatgggaacatgcgtcaagatcacatccggcacgtgcgacagc

SEQ ID NO: 316158 - DNA, 307 bp, Zea mays
ctcgcgggtcgacacaagcgtctaaagggagtcgtattaaagagcaagtgtgatcatccgttgatacatcttgctaagaaacctgcgtgcccttcgttcacgtcgcgataccgacgacgctctcttcggctccggcaaaccacatcatgtcgcgacggagatgaagaatgtcacctgcgccgtcttcagcagggccgcctacgccaccgtggtccacgccgccgatgctacggctcccaccactacgagcaccacctcggccgcattacaggccgtcggctctgtgcagggagatacagtgctctcc

SEQ ID NO: 316159 - DNA, 273 bp, Zea mays
acaccgacaccgccgccggtcgccctccatctcctcgccgctgcctctcgtttctcttttcaataatcaagatgagccgtggtggtagtgccggtggtggtcaaagttctctgggttatctctttggaagcggtgagccccccaaaccagcagtggcaccagctgcaagtgctccacctgttgagaaaccatctgctgcaaagactgatgcggccaagcaggttgctgctggggttaccagccaaaccaataactaccacaggggctgatggt

SEQ ID NO: 316160 - DNA, 261 bp, Zea mays
cgtcatctcttcgccttcgctacgcaattccgatccacgctgcgggccacttgtgacgactggcggaacccgcgagaaacagaggcgggcgagcggcgatcggagatggcgccggagaagccccggaaggaacaggaggaggagttgatgctggaggatggaggcatcgaggagagcccgcgccgcagcttcgaggactgcggcgactccgaggaggaccgcggggagggcgatgacgaggaggagcgggacagcgaccgc

SEQ ID NO: 316161 - DNA, 108 bp, Zea mays
agttatcgcttgcacgtacaatgcgatgagagccttgttcctcctgttcctcttctgcatcttgcatggtcataatgaagattcaggggtcatgggggcgaaagcttc

SEQ ID NO: 316162 - DNA, 266 bp, Zea mays
ctgagcatcccagggacggcgacaaatggggtcgggagatccatcgtgtctgcgaatctgcgtgcttgccgttgcggcggatgggaacggggacgggatagtgcgggatctgctttggaaagtttcctaattcctagtactatgcttttacgcaaaattggtccaatttctgtatggttcctctaaaatgtgctgtccaaacggggccgtgttctatgcaatagaaatcatgctactcttaccatacttcgatggttttggcaaac

SEQ ID NO: 316163 - DNA, 403 bp, Zea mays
gcaagtcgccttcttcccatccctctccatcaagcaaaagactgacaggaaagctaaaccccaacaatcaccatgggattcttccaaggcaagacctccaagcagaccacgagggtcaagaagcttctcggactcgccctgtcgcgcctcgccattgcacgccgtccccgccttgctcgcaggtccatctgccgtaacgatgtcggccagctcctctccctcggctacctccatcgcgctctcctccgcgcagagcaggtcatagaggaggataacatgctgcaggcgttcgacatcattgagctctgctgcaagcgactcgtcgagcacgcaacacatttagacaaaccgcgggagtgcggcgaagagataagggaggcggctgccgggatcatgtttgcag

SEQ ID NO: 316164 - DNA, 334 bp, Zea mays
agcgaaaaggcgcaggcgaagccagcggggagagaaaacgggcgggatccccaccgcctcgcgcgcggcggcggcggcggcggcggcggcggcaatggaggtcacctcctccccctcgccttccgcaccgccgccggcctcctcgaagccggcgctccaactcaaccccgcggacgtcctcctccgtcgcctgccgaccccgaccccaacagcggcgacacccgtcaccgcgacggcgccccccgcgcagcccgccaccgcatccaaccccggcctttcccaacccttgggggccccccccctttttttttgggaccccccctttttccccccc

SEQ ID NO: 316165 - DNA, 63 bp, Zea mays
aaccaaaacgtgcacgagaatccagccgggagagaaaaccggcgggatccccaccacctcgtc

SEQ ID NO: 316166 - DNA, 264 bp, Zea mays
agggagcacagagctagctagccagccagccagcagccagcttgctcgccgcgcccgtccttcttcctcgcctccgttccgttccgttccgtcccgcccgccgccgccgccgcattcagggatggagatgaagaagatcgcctgcgccgtcctcgtcgccgcctcggcggccaccgtggcgctcgccgcggaggctccggctccgggccccaccagcggctcctccgccgtcgcgcccgccgtcggcgccgccctcggggccgc

SEQ ID NO: 316167 - DNA, 81 bp, Zea mays
aaatgctcgcttcgcgcctcgtcctctccctgtacacgatcgtctgcttggatgtgctctgggggccctcgcatatcgctt

SEQ ID NO: 316168 - DNA, 319 bp, Zea mays
agaggacgtccctcccgacacggggaaccccgctccgcgcgctcgcattcgtcgcgccgccatccaggtcccagccggccgcgcgcccgcgcccccctgccggcggccgtgccatgccgcagcggggctatactgcggtggtccccattgaggtggcgtgcgccggcggccgtcgacgccatcagcggcgcatgagacatcgacacccgaggtcaagggccggacgtcaccgtccggatcggtgtcgcctgtcaccgcgtccctcgcgggcgttaaggtcgtgctggagttcggtcccgtccctagcgccgcgcttcag

SEQ ID NO: 316169 - DNA, 337 bp, Zea mays
cgggccccccgtgccgtgagcaagtccatgcgatcccttggcaaaacaagttccccgggtcacgggcatgccgcatggggccggcgtcatctgcagcggcttgggcacgggcgcctggctcagccgcgtcgtttgtgcgcacagtcactgctgatgattctcagctgccggctcactgcaccgtgggcgcgtccgccgaaagccgtcctaatcatgcacgcaagtggaccactgggcggccgtggacctccgggatctctcacgcgcgcttcggctcggctcaccacaggtgcctcactacggttactttacgtacccgagtccattgcattggttg

SEQ ID NO: 316170 - DNA, 373 bp, Zea mays
ggtcgagtccgcgtccgatcccatgctccgatcgccgtggagcaatgtcaagtcgatgcatcggaaggggctagagatgtatgacttccgcttcgacgcggctgattcggctgtcaagcttcccagccagctgcgctgcgctccgcattgctcttgatggcatccagtagatctgttcgccccccaatatcaaaggccggaggaggaataaacgttagggagtcggccatgggatgcttttcatgctgctgtgtggcagatgacgacaacgttggcaggaggaatgagcatgacgatgcctatgttcctatccctgctcatgtttataattttggagctagccggttcccagccccaggccctggtcatctcg

SEQ ID NO: 316171 - DNA, 415 bp, Zea mays
cccacacgtccggacgcttctcccttctcggagcctgcctcgttggttgccttctgcggacgccgccgattaggatctcctgttcagagctctccccacattgcaccacgcatcatgaggttcgtaatggtcctcacaggatagaggatgcacgcgagatagagaacgtagaggtgatgcacgagtacgaccttcacatgcagtcttgtatccacattcttggccctaggactgttccacagctgctagggagtgtgtacgtctaagaggtcatagacagattcgatggtcaactgcatggatttcaaggagctctgcagcgacttctaatacataatcatcccctacgtggagtccataatgacgtatgtcgcgacggaaacctttgggctcctcaaggataaccgcccattca

SEQ ID NO: 316172 - DNA, 406 bp, Zea mays
ggaggcgcagagggaaaaggaagatgagctgctttccgtgcttcggcggcggaaagggcaacaacgacgacgccgacgcggagagcccgggcgacgcggccccggcgtctaacatgacgccgcccgcgatggtgcaggcgcccgccgcgtacttcccagctcccgccgccgctccaacggccgcggcgccgcccaagcccggtggcgggaaccaggcgcacgaggcttccgccgatgactcggcgctgcggctcgccatcacggggcaggcgttcgcgttccgcgagctcgccgccgccacagaccacttcacgccgtacaacctcgtcggtgaaggcggcttcttccgggtctacaagggccggctagagaaaagcggcagacggtggcatcaagcagctggaca

SEQ ID NO: 316173 - DNA, 389 bp, Zea mays
gctcccgaggcagcgggcaggcagcggtggttctcccctaagactgagtgatggcgacgctccagaggcgggcgggcaagcggcgacggcagtcccgagtcgaacgagtggcggcgtcgcaccctaggctcggtggtaacggtgattgtgcgaggcacgataggcttcggcagtgacggtggtggccatgggacacgcgggtagctccgacgggcgcgtgaggcgcggtcgtctccagcggtggtggccacatgaggcgtggttggctccggtgtccttcgatgaccaactccttcgatctgatggcctcggcggcggcgtcctccgatgacctcctccaattctttgtttatgcatgcggctgttggttgagcccatactaatttttc

SEQ ID NO: 316174 - DNA, 274 bp, Zea mays
ggacgcaccacatccgtcaagcaccaggtcatccctgccaactgggaggccaggacagcctccaccggcaggtgggtaactttagagctgactctccattccaccgacctatgcgatctcaaccaaagcgcggtggttcccgtgcatggcattagccatacatgcatcggcacttactgtcgagttgctgcgacaagccgattactccaatggtcccgtgacgagcagtcatcgcgacatcctccgtctacatcatcctcagctcgatccagtg

SEQ ID NO: 316175 - DNA, 228 bp, Zea mays
gcatcccacccatggtcaggccgacgcgcagcatcatccctgggaacgatcacggtgcagctatacgtggatctcctctcacacaaggtacatcatcagtcccatagcgctgaggcgtcgaacctatcagaagtcgctgtgtccgaagctgaagaagcagtcgctgcaccgctcatcgcaaagcttgaggagaatgtcagtgcagccgtgacagataccgcaatatat

SEQ ID NO: 316176 - DNA, 407 bp, Zea mays
aggcagagacaggcgtcttcgtactcgcctatctccgcgactcaaagctttccccaattcccccccttctcccatttctcaccaccgccgccgctccccccgttcaacaacaccatgagggagtgcatctcgatccacatcggccaggctggtatccaggtcggaaacgcgtgctgggagctgtactgcctcgagcatggcattcaggctgatggccagatgcccggtgacaagaccattgggggaggtgatgatgctttcaacaccttcttcagtgagactggcgctgggaagcacgtcccccgtgctgtttttgttgaccttgagcccactgtcatcgatgaggtgaggactggcacctaccgccagctcttccatcctgagcagctcatcagtggcaaggagga

SEQ ID NO: 316177 - DNA, 85 bp, Zea mays
cccacgcgtccgaaaaaaaaaaaaaaaaaaaaaaaaaaaaaaaaaaaaaaaaaaaaaagaaagaaaaacaagggcggtcactcaa

SEQ ID NO: 316178 - DNA, 210 bp, Zea mays
actgagctatcacttctccgtgaggcctgagcccctcaccgctgtgatctagagcggcccacgtcgcctcggggatcactctcactaccgaggcccacccatttagtactatatatatatctctaggatcgatcatcactacattggcaagctcctccgtcctgaggagcctactgtccctcctcgtctacatcgtcgccggcgtgcccg

SEQ ID NO: 316179 - DNA, 355 bp, Zea mays
cccacgcgtccgcccagcgctagcgctccgcgcggcctgcgctccccacgccgcagctaggtgccccggccaacgccccctcccaacggcaagccggtgcccctccgcggcgtgcagccatggctgccagcccgcagccgccgcggttcgttaccctgctcgaccggccctagcccttgcgcgcggtcggcctgccagcgcggcggcgcgaccagctagcactatcgtcgtcatgctcgtgtcctcgtcgctcgttcggtgcgtcgtgcacgcaacatgtcgtcgtacctcgcctcgtctcgccgtcgtcgcgaggtacttgatatatgttgggaatgaggggagtagcagcacg

SEQ ID NO: 316180 - DNA, 279 bp, Zea mays
aacgcgcgttggacgtcggcggtagcaaggctgccgacggcatcagtgagggcgcacgctaagtggcgccggcaagccttgccgcgaggacatgtcagctgctccgcatgtcgacaccagctatcggtcatccggtgagctgaagtatctcagtcctgagacatcatctcttcatggcttcgcacccaaagactgagtctccgatagctcgcttaggcggcagtttcgcaagcacgtgcgcatgaatctcaaggcaggttccaaggtggccgggctcac

SEQ ID NO: 316181 - DNA, 404 bp, Zea mays
tacacacacgtctgggacgatgcagagggggaggagggggtgtccgtggtgatcggcacggacgctgggtggctactgttctactcgctcgcaggcgatctattgcacaagcagagtatatatcctgcaaagatactgaaactcaactttcgtgagaggaaggagaacgcttgggaagattcaggctcagatgaactttctgtagtgtttcctggtgttatcgcgcgctttgatggtgctgaccttcaggctttctgtgcatgttcaaggataagaactgaattcttggttgctcacagaacgttcttaaaaaagcatttcaagatgtaaaatcacgcctgtggaaagataagtttgaagagcaagatgctgaggatgaggaaacttttggacgaatacccttt

SEQ ID NO: 316182 - DNA, 198 bp, Zea mays
caaacctcaacagtgagtcgtactaccccgccgggcaccacctcagccaccgcaggaacgatatcagacatcgacgccgacgcagctgcgacgaagaccctgatgggcacgtacgatgtcaggacgaccatccgacagggcaggttccccaaggtgaaacacgcgcccgactctcacatccggctcatccgcaccatc

SEQ ID NO: 316183 - DNA, 235 bp, Zea mays
ctcgcgggtcgacacaagcctcaacactcagtcctactacccccgccgggcagcacctcagccgccgcaaccgcgagactatccatgggcgcctacgcaaccaatcgcaagactcttgatgggcatgaccgacttgacgccgtcgtctccacacacaaagttgcgcccgacgccattccagtctcagttgaagttgcggctgatgaaaaggtacatcataacgtggtgctggatg

SEQ ID NO: 316184 - DNA, 407 bp, Zea mays
cgggagcacagagctagctagccagccagccagcagccagcttgctcgccgcgcccgtccttcttcctcgcctccgttccattccgtcccgccctccaccgccgccgccgcattcagggatggagatgaagaagatcgcctgcgccgtcctcgtcgccgcctcggcggccaccgtggcgctcgccgcggaggctccggctccggcccccaccagcggctcctccgccgtcgcgcccgccgtcggcgccgccctcggggccgccgtcgcctccttcttcgcctactacattcagtgagccggccggggcgcccggaggccgacgaagagacgaaggggagagagagtgacatggctgctcgcattccgatgcgttggccaggtttttggatccgacacaccttttgtc

SEQ ID NO: 316185 - DNA, 110 bp, Zea mays
tgagtcgtattaaactagttgttcgtcatgttcctcgacttttttgttaagtatcatatgtgatattgactctatagttcatggagttaaggatgtcataatgggggggg

SEQ ID NO: 316186 - DNA, 193 bp, Zea mays
atttggaatttgtggaaaacattcacaattatggcagtagaatttatttggtttggcgctggcgatggggtcgggagttgtcgcgtgggctagttgggccgcggttggtgattcggcccactattcctcccaaaccctagccgccctccctcctcacccctccccctttgtgcagccgcccccccacttcccc

SEQ ID NO: 316187 - DNA, 57 bp, Zea mays
gggtccgagcacgcgtccgaagtcacgtgggcggacgcgtggggttctagatcgcga

SEQ ID NO: 316188 - DNA, 419 bp, Zea mays
gttggaccgtccacacgggctatggcccctcctagaatcaattgttagggatatggccatggttcgtaagtaaaaccgtggctgcgccgtgtcccacgcatttagagggccgggatcgtcctggagattcgtcggcacaatcagatacgccgaatcctaaaacggtccaggatttttgagttggaaactgtgggaaatgcgggatatgatggtgagcagatatttgcaaatgtatccttggaaagatgtttcggaagatttcattgcaatgggttttcaaaattctccgtttattattctatgtttgttagctgttaaccgttgcctagtgtctacgtattgtcaaaccttcttacagtagaagtcaacgctatgcaccaagcagattaaattagtggacagtagtcaaatattgtgag

SEQ ID NO: 316189 - DNA, 406 bp, Zea mays
aagggccggctcgccgtcgccgggatggtcgtcatatatttttcacgaaattgacggagcatgtctctctacgtgccctgtacgcactcatggcatggtcgtcatggcttttccatttcaatcctagcctgaacagtgagtgaagtaagcattgattgtctccaccagcgaatcaatgtacgcggaacaggggagttttatctcagcaagtgcatggcgcagtctgcggcgtcaatgcaatagtactgaggcttctgtttgcgcgcgttcattgaatccttgtttgccgaaatggcgactgcgccggccccggctgcacttgccatttgccaagcagcaatcaggttcacatgaatggagcggacccccatttgaatccttctaggcacatcaatcattcgctccc

SEQ ID NO: 316190 - DNA, 387 bp, Zea mays
accacgcctccgggggcaaggccaagttcaagggccaaaagaaaatacaagaaccgggtgattcaatcaaaaagaaaggataacctggcaaaaccttgaaacaagtgggccccaagggtgccaagttctttcaaggaaaaggacccgttccaacggctgatggccacgtcgtcatgacgctaggcttcctcacggcgatgccgcctgacccaccggcccctgccgctccaccacctgccgccgccccggagtcgaaggaagacaaagaatcggaccattcagactcctcgtcatcttcttcttcagacgacgacgaagataacgaggaggaggaaaccgaggagcaatgataagggcgggtgtgttcaacttcgaaggcttcaaacg

SEQ ID NO: 316191 - DNA, 208 bp, Zea mays
ggaatgctagaagttcagtgagcgatttgttggggcatgcatgatcgcagacagctgcgccaatgtgtgccgcggtgagggcttcttggccggcaggtgcagcaccttccgccgccgctgcatctgcactacgcaatgctaaacaagatcgctcgatcgcttgccatgcatcgacaacctattcttaataacgttcattatctcgttc

SEQ ID NO: 316192 - DNA, 315 bp, Zea mays
ggggggaacccaggctgagaagcccgctgggggggcctaaggcgaagtcgccaccgaacaagattgacgttgtgaaggacaacgacatgtggcagtgcctgaaccagtgcgccggggagatcgatgaggcgctggaccacctggacgacaccgaaggctgcctcgacgacggcaagctccacgacgtgaagctgttcctggacacggcggaggaggacacgtggtcctgcgacgtctgctgcaagcacgccccatccacgcccgtcaaaaccacgctgctcgccaagaaaaaggacttcgaggcgctcatgcgcg

SEQ ID NO: 316193 - DNA, 435 bp, Zea mays
  unsure (1)..(435): unsure at all n locations
ggtccagggtccacccacccgtccgcggacgcatgggcgggagcacagagctagctagccagccagccagcagccagcttgctcgccgcgcncgtccttcttcctcgcctccgttccattccgtcncgccctccaccgccgccgccgcattcagggatggagatgaagaagatcgcctgcgccgtcctcgtcgccgcctcggcggccaccgtggcgctcgccgcggaggctccggctccggcccccaccagcggctcctccgccgtcgcgcccgccgtcggcgccgccctcggggccgccgtcgcctccttcttcgcctactacattcagtgagccggccggggcgcccggaggccgaggaagagacgaaggggagagagagtgacatggctgcgcgcattccgatgcgtgggcatgttttttgattcgacacac

SEQ ID NO: 316194 - DNA, 398 bp, Zea mays
gccatgaccttgagcaggccaccatgctggcctctgactgcctaacaaccagatggtgtgattctctgtcgccatgtgatacgtgacggaacagtcgaggtagaggaggaggatgcacggccggcattctcctccttcctgttgcaccgccgtttattaatccctaacttttcatccctttctatcaggccatcctactagcctcaatattgctagtcgttgccgttgtggcgtagatctaacagtactattggtaataaatttgtaatacattgaggtcgatgataatatatatatatatattatatagtcgttgtgcactaatattttattaaatatttatgtgccgtcgtaatgacgggcactttactagtaacaaattaacacacgtctttgtg

SEQ ID NO: 316195 - DNA, 84 bp, Zea mays
aaggcaggtggtaaggtggaggttgccgacatgcgacactgtgatactcacgagtcgccaagtactccgtgggcggacagtcca

SEQ ID NO: 316196 - DNA, 108 bp, Zea mays
aaatgagtcgtattaaaaaaaaaaaaaaaagggaagaagaacaaaaagagaaaaaaaaataaataaacaagaaagaaaaaatcaaaaatcaacaaaaaaggtcaaaaa

SEQ ID NO: 316197 - DNA, 324 bp, Zea mays
actcacgggtcgacacacgcctctagagggactcacattagagacaggatgtccaccgcgcacgcgctgcacaccctcccgccgctgccgctgcagaacggcaccgccggtgacgacgaccgcgacgaagacgttgatgaggacgaagtgggcgatggcgaagccatggaggaggatgacaacgaccatgaggacgatccgccggtcaagtatcagcggctaagctgcaacgtggcgcgaatggtctccatggacgcagctgttgacatcgccgtcgccgaacgcattgtcgcgctcggcactcacagaggaactctccacatc

SEQ ID NO: 316198 - DNA, 316 bp, Zea mays
cgcgcccgccgtcggcgccgccctcggggccgccgtcgcctccttcttcgcctactacattcagtgagccggccggggcgcccggaggccgaggaagagacgaaggggagagagagtgacatggctgcgcgcattccgatgcgtgggcatgttttttgattcgacacaccttttgtcctctttttctttgttccctctttctccttaatttaacgaattgatgcatgccgctgatgttcttcccctgagagagggattaacacttgtatcatttcatcgcttgccatttgtttgaatccattcaacaattcattca

SEQ ID NO: 316199 - DNA, 270 bp, Zea mays
ccacatattgatcacagcattgtcacttaccctccaacgttgatgccacatctacgtttacccgtaccagtgcttatgtctttcagacaaagatggaatcggttcaaggagatttgccagtctagtgcctcagccacggctgacttcacgtgggaatgacctactgaacttcgagattacctctgcacatgcatggacttgtcatggctcaaggcatcaagcaagagaatgtcaagaatgacgaatgtagctgctggatggtccagattc

SEQ ID NO: 316200 - DNA, 453 bp, Zea mays
cgcgggtcgacacaagcgtctacacacgcgtctgcgagagcggccgtcctttttttttttttttaacaaaatccaattatcgtaatgtcgtaattccaaaattctccttgtcaatagcaaatgacaaaacggttggatagagatccgcctcgttgatcagaggccgtccatcgcggaaccaacggtggatgctccttcacgcggttttgaacacttcagcccgacgaattgttcggttcgtcgacgacaacctccatttgttccacaatccacaattccccaccccccacggcccccgggcccacccaccctctccctcttcttcctcactcctctctccctctctctctctctctctctctctctcgtcctgcgccacacgccgcggccgtctccgggcaggaaggaagggggcgggaagatgatgatgacccggggcacgatggggcccat

SEQ ID NO: 316201 - DNA, 391 bp, Zea mays
atgccaagcggttttcttttgttataggcgacaagaattgcacggctgtacacacaaaagcaaacagcacgcagtgaatagcagcgtacgtacagataccgtgctagctagctcaaacgaagattattgccgcctgctgctgtgctgtgcctcacgtcgtcagctagcttctcctctgcgattctccgctactacgtataccgtcccccgtgcagccgcgcgccgcgtatgtagtggcggctggcgtgcggtcctttgcgcgattcgatcgacctgccgcctggactggatcacgtgtttgtggttcacgcacgcacgcgtgtcgtttcgattacttgtaccgcctggagctggagctggctttgctgctgttgtggtaccggtggtcgtc

SEQ ID NO: 316202 - DNA, 403 bp, Zea mays
caatttccgcccaaggccaatgccagagatcccggtggcttctgttgaagcacggtgatcccggggcggtgaagaccacccaggcgagctacaggctgactccgcgtgggcggttgccgggcagctcggattcgttgcgaggttcacggcgtgggttgcacatcaaaacggcattccgatctctacggcctccaccgcgttcatggtggaaggaggcttctgcgcgacagggcccaaacggcagagaccgggtcagtgctgtttttctgcggatggtccaaggagtggggtcgatccggtagcgttcggcccgtgattcctggtggcagcaacacattcagccgagcctgcgtgactttcgcgcgagatggggaagacgcacccgaccagcgggtcccacacg

SEQ ID NO: 316203 - DNA, 366 bp, Zea mays
cacacacgcagtctgcccaacgcgtgccgcttattttcttgtttttttttatttttattttttgtttttgtatttttttattatttttgtttctttgtttttgttattttttatttatttcttttttctttttatttttgttatttatttgtttcttttattttgtttaaaaaagaaaaaagcgggacttcaaaaggggaaacaaatgagtatcaaacagggcaacaatggcctcgacaaaagtcacattcaaacattggtgacttagacgggataatttaggtgaaaacacatttgggggccgggaaattcacaaatttggcgaggttttaaccttgcttctaaccaaaggaaaacatctgtggt

SEQ ID NO: 316204 - DNA, 346 bp, Zea mays
ggcactcatgacagtcataacttcacaacaccagcattgcctctgcacacaggtccacatggtaagaggaagcgcagtgcctcgcgggattaggtgtgacgacatattgcgcatctaatgcaacaacagacacgcagactacaaaacaacagtgtcatactaccatccaatgcgcgatgggttcataggatcacgacacgtctctttccaccaggaccaggacatcgtcgtcgtgaccacagccctctccggcgccaatatgatcgacatcaactgaaaacagcaagcagagatatctcatgtgcgactcctcagcagacgccacgtagactgatcagacattcaa

SEQ ID NO: 316205 - DNA, 51 bp, Zea mays
aacagccgtatcatggtatcacccgcagaactcttggagcgaaccgtcgcg

SEQ ID NO: 316206 - DNA, 55 bp, Zea mays
aatgcgtcgatgggcggccgttggtgtcggggagactccagagtgtgtgaggaca

SEQ ID NO: 316207 - DNA, 381 bp, Zea mays
tggactctgtcggagcaggagacgtgccgcgccgcggacttctcgcgcgatgcctggtcaggacggtgggcgcggctcgccaacaacgacagctgcgaggacgtcaacgcatcggggcggtaccggtgcctgtagccggaccacgcgtgcgatgcaccgtggtgcgacgggccgctcggcacgctggcgagcaacgggtgggtgtagtcagcgcagtgctccttcaagctctttacggccgatgcgtcctggcggtgccttgacgggaagtggctcttcttctggggcgactctaaccacgtcgactgcatccggaaactcctcaccttcgtcctcggcatcacggacacgtctgctgtgacacgccggtttgatgcagtg

SEQ ID NO: 316208 - DNA, 71 bp, Zea mays
gcgatcgccccatggccgccatggctcgttccgtctccctcgtcgtggcgcccctgctcctcctctccctc

SEQ ID NO: 316209 - DNA, 87 bp, Zea mays
  unsure (1)..(87): unsure at all n locations
accacgcgtcggcccacgcgtcngacgacgtatcttcatctacgtaccttcaactatactatatgtcgcatactaaatattctgtct

SEQ ID NO: 316210 - DNA, 237 bp, Zea mays
  unsure (1)..(237): unsure at all n locations
gcgagggcctgctgccagggtgtctggcgccaggcgactctgccgtcgctcccggcgctcatcttggtgccgccggccaccaccatctccacgcaccacacctccggcgccgtctagcagcncaggacgccgccggcgatctcggcgccgccgtggaccacgcccaccattcccgtcctgcaggctctctgcccctgcttggtcgtcgacgacgacgacctcgtcctcatcagcacc

SEQ ID NO: 316211 - DNA, 330 bp, Zea mays
  unsure (1)..(330): unsure at all n locations
gtccgctcgacaacgagaaccgacatcgctcatggangcccggactctgaatcctcatctcaccttcacctgtcgcactgtcagcgggaggttcatcttgcaacattgcattgcacagcgcgcacggcgctcgnaaccttcagaagtgcgagcattgcggagatatggttgccacgaagcttatggatgagcactacgatgagaaacatgctccgatgaattgctcacgttgcaaacacacagtaggaacgcgagctatcggatcttcatacaggcatacaatgcccacaaaggatgctcgcgtgccagtactgtcagtttgaactgcct

SEQ ID NO: 316212 - DNA, 101 bp, Zea mays
tcatagctaagcaggtctgacaggatgtcgtggcagacatacgtcgatgagcacctcatgtgcgagatcgagggccaccacctgacctccgctgccatagt

SEQ ID NO: 316213 - DNA, 122 bp, Zea mays
  unsure (1)..(122): unsure at all n locations
tcggcgcctggcctcnngctggcacctccgacaccgtacgtcctccatcgcgtcgccgccggccggcctctgtccagcccgggctgcctgcgagggcttctgatggccctcgacgccgtcct

SEQ ID NO: 316214 - DNA, 256 bp, Zea mays
tcgctcccagtcccacctaaccgaggcaaaaccggcccttcgcacttccgcagaacgagcactcgtgaaccaaatatttggcacaagttagctttgcctgtttcttgcgtgtacatccctcaaggtttctccgccacacgcgcttcgggttcgcgggagcttgccagatgaatggtcaaaccccgatggtgctcgccgcagtagcattgaggccgtgctgcaaccgcctcatctcgtccgcctcggccgccgcggc

SEQ ID NO: 316215 - DNA, 118 bp, Zea mays
tcgccacgcgtccggccgccgcaagaagagcagccgcagctggagcccccgtgtcggccttcatggagatgacgacggatgaggaacggcggaggggcgacgcggggtgctgctgctg

SEQ ID NO: 316216 - DNA, 241 bp, Zea mays
  unsure (1)..(241): unsure at all n locations
accacgcgtcggcccacgcgtcagcgcacgcgtccgttcgccttcgcctttgtcttcncgctcncgtcgcgaaatccgcccgccgattaagcttgcttgccctagcagatcgaagcccgagccctagccctagccgaggagcgcgcgcgatgggcgtcgcggtcgtgggctgaggggccgcggctctttgcatggcgtgaggaagcggcgtcccgaggcgcgggaatggaccctagcctga

SEQ ID NO: 316217 - DNA, 134 bp, Zea mays
acgcgtcggccacgcgtccgcgagaacgagtacagcatatggaagcggcgttcaaagatgagggcgacaagtacatcaactgggcagcgaagatggccatctccaccaacatcggcataccgtggatcatgtgc

SEQ ID NO: 316218 - DNA, 95 bp, Zea mays
ggcctgccggtgagcgacgagtgcaaggtgaagttccgggatctgaaggcgcggcggagcttccggttcatcgtgttcaggatcgacgacaagga

SEQ ID NO: 316219 - DNA, 247 bp, Zea mays
tgaacaaagagaagtagccacaagcatgtctggcatcatcgacaagatccaggagacgctccacatcgggggcgaccacaaggaggagcacgagcacaagaagggcgaggagcaccacaagaagggcgaggagcaccacaagaaggacgacggggagcacaaggagggcatcgtggagaagatcaaggacaagatcaccggccagcacggcgacaagtccggcgaccacaaggacaaagaccataag

SEQ ID NO: 316220 - DNA, 385 bp, Zea mays
aggaccagcagcgcctcatcttcgccggcaagcagctggaggatggccgcaccctggcggattacagcatccagaaggagagcactctccacctggtgctccgcctcaggggtggcatgcagatttttgtgaagacattgactggcaagactatcaccttggaggtggagagctctgacaccattgacaatgtgaaggccaagatccaggacaaggagggcattcccccagaccagcagcgtctgatctttgcgggcaagcagctggaggatggccgcactctcgcggactacaacatccagaaggagagcacccttcaccttgttctccgcctcaggggtggtatgcagatctttgtgaagaccctgactggaaaaaccataac

SEQ ID NO: 316221 - DNA, 294 bp, Zea mays
  unsure (1)..(294): unsure at all n locations
cgtcggaccgangtcactatggtcaaacattagagttcggcagtatcagcttcacgagggaaatcataatgcggcacacgtcgttccggtcaagaancatttgaatagtgtcaggaccctgttgccatgctttgcgaaactgaagctgttcatgcgcattgtggatttcgagccatctgggtggcgccatcatgcataagacatcgaattgcctcacaactaatggacgttgcaaagagtaccttctgcatatgcaagactttggggatttcacaatctgctttcgctcgtccg

SEQ ID NO: 316222 - DNA, 403 bp, Zea mays
  unsure (1)..(403): unsure at all n locations
cggaattacggaacgaccacgcgtcgcgcgctccgaaggggaagctctgataacatcaccgttgtcatcgtccgcttcctatatggaactaccggtgataaatcaggcgcagacaaagagaccaccaatgaccaaaactcctaattgcctcctgtagggatccatcatgcgtgtgttttcttctggctgttgtatctgatgctcaaagtagatgctccgtgtgtcttccgcaaggaaactgattcccccgaccgtcgtcgtgatgctgcccgctcatgctcgtagacgggaatgcctgccgcagaatgacgaatanggctggtgtgtgttatactatgagggccctcctcgnnncccccacccgcngcgtggacagccccagcgggtgcaagcccagcgcggc

SEQ ID NO: 316223 - DNA, 376 bp, Zea mays
ggaatcacggaacgaccacgcgtcgggcagcgcgaggatcatccaacccaccatgtaaatgtcgaaggtccactgtacatatcgccttctcttaccggcgaagttataggcagccggaataaggagagctggctgttggatcgaagcctacaggattccaacgttcggatcggcgccccgtccaaattgcaggcatttctttgccgttccctcttctttcttcaaacgagaacacgcacccattgctggtacagaacatgacataaaagattcagtaacatgatttgaccgtgtggcattgtggcgcctgcaaggccgtgtaaaaaaaaaagtaccccctatgcaaacgctttgctaccaaatctggcggctaccg

SEQ ID NO: 316224 - DNA, 334 bp, Zea mays
attgaacatcacgagcaggggcccgacacgcttcatcctcaccttcctgtgcaccgcaggtgacatgtcgaccatggtgtcaggtatcttgatctcaatgtccatcctctttaagaatagtgaacaggtaaatgaatgggcgttacctagattagacgatttacaggacatacaccttgctcgagctgccgtactaggaattcagcacggtgcaatcggccatcgaaacagtggccgacggtaaatcgcaatgggtaagcgtccagtaccggtctagtatgcacaggggctgtgttgtgaaaccggagagtagacgcttcatcttcgagagggg

SEQ ID NO: 316225 - DNA, 187 bp, Zea mays
gccgggccttctgggcaaagtcagaaactcgaatgttccgatcgctattgacgagccgatggcacatgtgactatgcaggacggccctcagtagcaggagacgcaacggatcttcttcacagatttcctaccaggtctcacgcccatcgacaaactgctgtacagcgactgacacgaccttgggtac

SEQ ID NO: 316226 - DNA, 370 bp, Zea mays
ttgcacctttttccattgttaagagcagtagatggtgaggaagtacctggagaggtcgtggtgtcaacggaaaacctggcaagggggatgacgaacgacttaatcctccccgtgcagtacttcgtcttggatgccatcttggacgtgttctgcagtacggcgatcggcaagcatgaccacttctcaaatcccggtggcccaggctgcatgcacctccttctcggacagacacttacctgcatgacagggtacctcttgccatcaccggagttcttgatgaccttgaagctctgaccgtaatatatccggaatatggtggcgtcctccaccctggacacgggccgggccatcacaggcccgggcccggcct

SEQ ID NO: 316227 - DNA, 362 bp, Zea mays
  unsure (1)..(362): unsure at all n locations
accacgcgtcgggcgatgcgtcggcactgcagacccggagggtaatcattcnagtgcagcggcgtcatcgacatcagctacgggagccccggcggtaacctatcactatgacacctcatgcattccacaagtctcagttggactagattttgtgcgttaaccatgtttgtaccgcaattatgagtactgctaatgactaacacaacatcatgcggactaaggcctgttgtaggtaaagcagcagctgtgacagatctcatgacaaatggtcgatgcaggatatgtgctgactgtcgtgcacctgatccgaagtggagcatctactaatattggagtgttgctctgcttaatatgtgcagatg

SEQ ID NO: 316228 - DNA, 91 bp, Zea mays
gacccacgcatccgaccacgcgtccgcccacgcgtccgcggacgcgtgggcggacgcgtgggcagcgatgaaaaaagttaagcgtaacaaa

SEQ ID NO: 316229 - DNA, 286 bp, Zea mays
acaatacatcaaaagaaataaaaaacaataaaacaaaaaaaaaaaaaaaaaaaaaaaataaaaaagaacaaagcaaaaaaaaaaatccagaggcaagattctctaggaaggtcagcgacaaaggggcgtgccctctaaagtttgagggtttcaattccctggcctccaacttcttccgtctcctacggtgtcccccaagtccattccaagggcctcccttttaaaccttttggatgggtaaaccttggcctttccccactttaacccctttgccgtaccccctctt

SEQ ID NO: 316230 - DNA, 328 bp, Zea mays
atcaagctcatcaagtgctagttcgatctgctgccggatcactgagactctgtatcgcagtccagtgactatccacagcagcagcagcaggtcctcctcgacgactcagtaggcatggactgctaactggtaatcaacagctaacctgcgctctgccactagtgcctcgaagaaatcctgcaagtcaacgacttcaagagagcggggctgcatttcggcctcgagcactgcaagaacctgctccacagcatcaactcttaaagaaccggttaggccgacctgcacgctgccctagaccgcgctgaacacatacgtctgctgtacaaca

SEQ ID NO: 316231 - DNA, 347 bp, Zea mays
ccacgcgatcgaccctccctctatggcgatggtgccattgttgcagtgtgcgttgccgataacggctttgacaggtgcgatcccctaacgcactcctggggccccatctcaggggaaggtgaggggcccaccgcttacgggacctctcaccgtcgggctcactacccagtggaggcaccacgtccgtctaccacgatctcatccctgccacctggtaatgcgatcaccgcataccccgcccaatagttgacttctactggtgacaatcctttacgccggcgcatgtctaccactaccacaattggttgggtcccacccaatgcattacacctgcatccattggcccg

SEQ ID NO: 316232 - DNA, 402 bp, Zea mays
ggaatcacggaacgaccacgcgtcgggcagcatgcgacctagcgagttgtgataccgactcacattctcgatgaacacacgtatgtcacgcgacgctcgcagttacagtcctccacctgaccgctgcagaatggcgaccgctaagcgtagcatacggcatgaatctccatcacatcacaagagccaaggacgacggaacagtactaaatatactatacgaaggtttaactcggtcacaatgacgacaaccaactccatgacgtcttcggacactagacccgttcgattagaaattaacgtcatttgcgacatctcaaggatcatggatcaactgaatgcagctagatacaattgtctgcgacgcatcttctgatacatacaactatacatacgttttgcaaa

SEQ ID NO: 316233 - DNA, 436 bp, Zea mays
agaaatcgggggtttcgagttctaaaaagtcccaatcaaagtcgaacaagaagaaagagaaaactcggaagaagcaaagttgtaagtctagcggtgaaaagaacaagaataagacaagttcggaaggaaaatatttggaacaaccagactcttgctacgaaagcaaagatgaagacagttggagtggtaacagtagtagttcattatcgaagagaccaactcagcatgcttttggcgcaacgagtcgattttcaaaggatacagtacactttgttcaagatgaatctagtcgttactccaatggacctatcatggataaagatttagaagagtgggaagcagatattgaggcggaagtggaagctttccgtaagagactcgaggaacttagtgcgccattgaagaataagccaaaggtcggtgcctttccgcatcg

SEQ ID NO: 316234 - DNA, 448 bp, Zea mays
ggcacaacgacgcgtcagcatttttggatttttggattcgtttgttgttggtctggttgctcaaggtgtgaaatggcagtagttgaagataacagagtctttgttggtggtcatccttggtcagttagtgaagaagaccttcgtgaaactttttccaaatatggagaagttgttgatgcaagggtgaatatccgtgttccttttgttttgggttaaacttggatcccttgactacctgcacctattctcgggttcccttttatttgccccatagttagtgtcactaactagtcgcatgttactttgagagggtagagagcttttcgagttactttataactgttcacacttgggaaccctcgaaaatagtgtgaatgatatgcacttgggttgactagtgtacaccaaagttgttgttactatatagtgctcacaactgtgtcgttgc

SEQ ID NO: 316235 - DNA, 420 bp, Zea mays
aaaaagggagtcattccaccaggggagtaaaggcgcaagaaagaaacccaaagcaattgacgggaatcggaaaaaggggtggatcacgtaaattaatccgatgtaaaccgagaaccttacctctccaagaaggtgttgcacggctgtcgaaagaacgtgctgtgaagtgagagaacgtacgagaaagccaagtgaggaaaagaaggcaagtagagggcggcccgagaaaggagagggcgtaagacgtgatacagagtaggaagaaaagagaagagagctagaaaggaggtaaaagaagagtaaaaggactagaagaggtacggaattcacgaggaaggagcgtgaaggaaggaggaatcccaagtaatcgaggaagaaaaagcttcggtgaaagcgtgaacggattttgtacacactgcc

SEQ ID NO: 316236 - DNA, 337 bp, Zea mays
agcagtcatctcctccatcaccaccaccaagctcaacaacagccagctcgcgaaaataatgaagagccgcagcatggcatcatcggccgcgctcttggtgctagccctcgcgctagtggcggccaccgccccacaggtagcggaggcaaagaagaagagagcggcggagagcggcgaggcggcggaggcgaagaagatccaggacgacttctgctcgacgctgtgcgagggcaagaaggggacggacctggtcgtgtgcaaggagtcctgcgcgctctcccagcagtccaacctggtgctgtacggcaggatccagtgcaagggcaagtgcaccgag

SEQ ID NO: 316237 - DNA, 435 bp, Zea mays
aaacacgcgtccgtgggccttccgaagagttttcacaaaacataaaatatgtcttttcttttagaacttttaaaagaaattcgctggagaggactttggggaacttttcaagcagccaaaatgaatagactgggtacaatgaagtactttgtcggcgaagacgagtttcacaaccgatactttcaaaaagtaaacgatgttatgttgaaggatcgttgggtggaatatgcttctaaggaattcacccctgatccttattcgttacctcctgagtggcatgcctggctgcatcatattatagatgagccacccacaaaagtaggtttccagagaccaaagtatcaagcacagatcgtcgcaaaccgtacaggcacaacagatgcgtattttcccaagaacaatcctcttagtaagaactttaagggcttggctaca

SEQ ID NO: 316238 - DNA, 445 bp, Zea mays
aaaccacgcgtccgcccacgcgtccggaacgcgtcggtgggtcgttcggtcggtcggtgaagagcacgacaagacgggatgttggtgtacaaagacgcttttacaggtgatgaagtatgttccgacgccatgaaaaacctccatgaagaggaaaacggtttgctgttggtatgtgactcgtacaacatttccaaaggaggggaagattatgggatagaagtaaacaacgatgaagatgaagaaggaggaggaggaggagcagataatgcggtggaacaagtgaatattgtggtcgagtcgtttggtttacaaccttttcccatcagcaaaaaggactttcaagtaactatcaagcgttatagcaaacgagtcaaggactatttggagaagaacaaccggatagagtggaaaagtttatggaaggaatgaagtcgtggttgcccaa

SEQ ID NO: 316239 - DNA, 257 bp, Zea mays
agttcaagcacctcctcttcccccgccgggcaacaactcagccgccgcaaccgccacatcagccatgggcgcctgcgcaaccaagcccaagacgcttgaggggcaggccccagctgacgccgccgtctccaaacccagggtggcgcccgacgccactctaatctacgttaaggttgctgccgtccataatttgcctagactgtcagcgtaccgcaattcatgtcaagcgatatgcacttgatacaccccccatttct

SEQ ID NO: 316240 - DNA, 329 bp, Zea mays
acattcccttcgcttcccttccctgagcaaacagaagtaaccacaatcatttcaggcatcatcgacacaagttactatacactccacatcgtgggcgaccaccaggatgagcaccagcacagaatgggccaggagcaccacactaagggccaggaccaccacaataaggaccacggggagcacaaggagggcatcatggataagataaagacaacatgacctgcgagctaccgaacttctccggcaaccacaaggacaaaaaccatacggagaagacagttcagaacacgtagacatagacgatgcacggcgaaggccaagaccatggt

SEQ ID NO: 316241 - DNA, 444 bp, Zea mays
cacacgcgtcaacacacgcgtccgggatgacattccaacttggcggaaagtgcgctgtggtttggtgtctcgttttgaacttgtgaataataaagatgcctcctgttgcaccattgtttggaatctcaccaaagacagttaatcgtgaacttgagcactggatgagcaacctaaatgaagtccaaagtgtgataaatagtgtcgaacccaagttgaatacaactccagccaagtggaaagctctctcccaacacgtgaaagaagtctctgaagagttgagtcatattcaataaggaggatcctcattatgatgttattgtggcaggagtacaagctagtaaaaattttgaaagtgcagaagcagacatttccaaaaacgatggtattagagaacgagcgatgacaaggttgagaaagtatcgtgacgaaatcgaatctcttcgt

SEQ ID NO: 316242 - DNA, 329 bp, Zea mays
acgcgtcaaccaggcgtccgcaaagtttggttcttttcttggtatgcagttctacatccaacatcatcaaatgtgtcagcggaggtatagaatgattcgccatcgatttacgccatcattacgggtacagcaccagattctacaaagattataggggattctggtcaggacgctacgttgaacggaactggtaccgagaaagactacaatgttgactattcatgttcctgtcacatcctgtaagttcagtttgatactttctatctctgcgcatgatactcagcagctatactggttatgcgcagcatgatcgctacttttgttaactc

SEQ ID NO: 316243 - DNA, 369 bp, Zea mays
aggcacgtgcgtgcgtgcgtacgtacgcagcccagggacaccgaccgccgccgccgcccgcagctcctcctcctcctccgaccctctcatcaaccgcacgtacacgtcctcgctccatggcgggcatgcccacggaaagcgcgacccggcgcttcgccgccgcgtgcggcgtgctcagccagtacgtccggacgaccggcgcgcccgcgatgacgccgccgccgccgttcctgaagccaccagccgccgcccaggagacgacggtcgcgccgcgcacgcagcagctgaccatcttctacggctggagggtggtggtgctggacgcctgcccggccgacaaggcggacgagctgatccgcctcgccgcct

SEQ ID NO: 316244 - DNA, 63 bp, Zea mays
tctttatcacgccagatgccatcgcccaagaccccgctacctgggatcactcccctgcggacc

SEQ ID NO: 316245 - DNA, 223 bp, Zea mays
cacatgcaagtaggtaaagcgaacgggtgagtaaagaggtgtgaaagagtggaagaacatgaatgcacagaagaatgtaagaaatggttagagtaacaaccatgaaggaagtaaaaccgggaatctgagaggaggaaagccagagtggaactgagaaaaggtccacacacgagaagtcaccaatggggacaattgggccatgtacacggaagtatgacccaat

SEQ ID NO: 316246 - DNA, 380 bp, Zea mays
acgcgtcaacacacgcgtccgaatcctcgtgcacaactttcttcttctagccctttgcgcatatcttgctgtttttggtttactgaacatgcaaaataccatcgacgaattttccctatcaggcgatctttccacactaaaagttgcagcagaggattggtcagacacgtatatcggggactttactagagagggcgtcaaggacagctttcgacacttatttttgttacacaactcgccaggccatgaccagtttttgactaacgacacctcaatatctggctcatctatagaacctcactaagtgcctgagtggtttccttttcacgatacttcttcggatatcactgtcagttcggtcaatttcaccagctcccgtg

SEQ ID NO: 316247 - DNA, 385 bp, Zea mays
cacgcgtccacacaaggcaaactattttctgggcgcttcgagttagtttgtatttgatggttttcatagttactagaattggaagtttgatcaaccgcttttatcagttgacgcatcagggatattcaccctttggtctcatggtgctccatgcagttacgcagagtttgcaaggttttctatttggacttatttatatttaccacgaaagagcactaggggaagttgttctattcattcgtcgcaagtggagtcgcagaggggatttgcgcgaggattcttttatcgcattagagaaaagaggacttgctcatttttcacaatttgatgaagacgaggaccacgaggacaacatggattcgcagagtagttcccttgcattttg

SEQ ID NO: 316248 - DNA, 370 bp, Zea mays
acgcgtccaagggaacgcttacatggtctgatcatgacctacattttgcatgcatccatggtatctcatccttgatgatgatctatctcactagttctttttaatttccgcttcatgggcgtttccaaattcgattgtgtttcatccgggtgtgtttagcgggacatctcttgtctgatcttcctgctaaatacaattggactcctatatatagaggccttccggcacatataatatacatcggaccaacattattgtgatcactaattatgtctctatatgttgccacggggataaaaaattttttttttttataaatactgaacgacacacatcaccatgatatataaaatttacctggcaaacatta

SEQ ID NO: 316249 - DNA, 372 bp, Zea mays
actgcaccgtcctcgtcgccgcctcggcggccaccgtggcgctcgccgcggaggctccggctccgggccccaccagcggctcctccgccgtcgcgcccgccgtcggcgccgccctcggggccgccgtcgcctccttcttcgcctactacattcagtgagccggccgcggccggtcgcccggaggccgaggaagagacgaagcgggagagagagtgacatggctgcgcgcattccgatgcgtgggcatgtttttgattcgacacaccttttgtcctctttttctttgttccctctttctccttaatttaacgaattgatgcatgccgctgatgttcttccccctgagagagggattaacacttgtatcatcgc

SEQ ID NO: 316250 - DNA, 340 bp, Zea mays
cacgcctccacggattcgtgggaaactgccgggagacagacggtcacaccgcgacaggaagggagtcaacggaacagccgtgggagaagaccatcctgaatcgcctcccgcccacggatctggcgtctctggtcagccctctccctctccttcccggggccattgccggtgcctcgcccgggccgctcgtgctctacaaacgactacgatgcgcggctgcgggagctgcagcggcatcgccactggtacttgatgagcaccgcgggtgcaggtccggaggaccccgcctacttgcacttgtcggtggcggcgggggatctttttatcgacgacccacagc

SEQ ID NO: 316251 - DNA, 328 bp, Zea mays
attccgggcagacacacgcgtccagaacggttgccaaattttggcgcgtatccactaatgcacagcattttaggattgcgttgacttctgtgcaccatcgcacgagacatatttatattgtacgttgagtataagacatctgggactcatcattcatcccaaacttcggtcgatggaagtcgaaacgtcttatcgttcaatatgagtataggggtttgacagcagtctgttgcatgagtacttcgtgttgataagtctctacatacgtacgtgcatgtattaggacaaaccagtggaacagtaagtttacgatgtccaggtgaccgtt

SEQ ID NO: 316252 - DNA, 385 bp, Zea mays
aacgcagccgctgccgctgccgctgctgccgtgccaagtcgccgggcaagctccggatcggggggcgcgcgcgcggggccgccgccgccgccattatattgggttagttaggccagcttgtcattgcatcggagagatgtatccggccactacgccctacgatacggcgtccggggtgggcgtggcgccggtggccggcttgttccccgtcgccggagaggccagggagtggtcgtcgaggctcctggactgcttcgacgacttcgacatctgctgcatgacgttttggtgcccgtgcatcacgttcgggcggacggccgagatcgtgggacaccgcatgacgtcgtgcgggactagcgcagcgctgttcgcgctgatccagtgg

SEQ ID NO: 316253 - DNA, 186 bp, Zea mays
aggagctcgtcgaggcgttggtcagggaggcgtacatgcgcgacccgtacgacgtcacgaagaacttcaacgccgctgtccatagatctgtcatcatcaatccgcgtgagaggtcggagaggccggggaatcactttggaggggggccaatgcttggctacgagccctagcaacatgtgttggcga

SEQ ID NO: 316254 - DNA, 76 bp, Zea mays
gaggccgggcccgtgctgtccatgtgcccggcgttcgccaagccagcacatccaaataaaaccgagaattaaatag

SEQ ID NO: 316255 - DNA, 331 bp, Zea mays
cacacgcgtcaggcgaagcaacagaacgtgaactaaaaggtaagaaagaggacaggtttacgagagaacgaagttgaaagaacaaagtgtaacgcggcgtcatcatagatatccgaaaggactacagcaccaaatatacaccacagagtgtaagagaagtcgccgtccggacaaacgtgcacggtacgccacgagcaccgcaacccacttcagtgtcatatccctcatcagactgaacacgatcctgagtaccggttacggagcgagtccacgtccggcaagagacggggcccaacgattcggatttcttcaccgatctcctgaagagggt

SEQ ID NO: 316256 - DNA, 90 bp, Zea mays
  unsure (1)..(90): unsure at all n locations
cgtcgggccacggcacgctgcgctggggcgtcatccancccggcccgctgtggatcatcttcgcgcggtccatgatcatgcagctctcgc

SEQ ID NO: 316257 - DNA, 196 bp, Zea mays
ccacgcgtccggatcgatgcacggaggaggatgctgccgctgctctggcctaatcactagtataaagcaggcggagacagcctggccgcctgaccgcagtgctcccccttcctccccgtccccaaccacatgccctgcctccgccccgccccgccctgcccaagctcgattccccagcccccaacaaacaattact

SEQ ID NO: 316258 - DNA, 400 bp, Zea mays
  unsure (1)..(400): unsure at all n locations
tgcctcacggggcaagggggctgagctcgccgcctcgtctcggcctggcctggttcgccctcgctccgacgcgtggtggacgcagccagtgcgcgacgcccccggctcctggtccgttccgcagttccgcaccccgcttcgaccaaccaggcgccgccgcgtcgcgtcgcgtcgcctccttttttttcgccgcccgcgcggacggcggcctcgtgcgccagaagaaacccacgcggcagccgagatcctcaggtctcggtcgtctgacnccagctcgacggcccagatgcagtcgcgcgcgccggccgtcgtgcgcctcagtccctcactccctcgcctcctcagcggcgagtagagcggccaagcgggccatttttaggcgggagcgcgggcggcggtg

SEQ ID NO: 316259 - DNA, 378 bp, Zea mays
cgggtcgaggcacgcgtccgacgcggttccctcgggcgtgcaagcggtggagagatctggggcaggccgccgtggtgccccgaggtgggtgactcatgccgatgctcccgaagcaccaggcacgcagcggtggttctcccctaagactgagtgatggcgatgctccagaggcgggcaggcaaacagcgacggcattcccgagtcaaacgagtggcggcgtcgcaccctaagctcagtggtaaccgtgattgtgcgaggcacaataggcttcggcaatgacggtggtggccatgggacacgcgggtatctccgacaggcgcgtgacgcgcagtcgtctccatccgtggtggccacatgaagcctcgttggctcccgtgt

SEQ ID NO: 316260 - DNA, 182 bp, Zea mays
  unsure (1)..(182): unsure at all n locations
tcgcccacgcgtccgccaccatccgacagtaagcgagtacaaaactgggtgtggaagtccaggacgactgttctcaacgggcctcttcagcagtccgggggcagaacancgcaagtaaacaggctcgactcatccangcaaagggcgcagtacccgagtcgctcacaagtaccccgcgcgct

SEQ ID NO: 316261 - DNA, 264 bp, Zea mays
cacgaagccgcccggcgcgtgctggaacgagaacgacccgccgtccccgtccccgccgcagcccgcctcctcggccgccgaggacgccaccgcactgtcgagcgcggcgacccacgcgcggcgccgcttcggctcgggcacccgctcctcctcctcctcctcggccccgccgtcgaaccccgggatcgggagcccgcgcttctccggagaagcagaagagctcccgcgcgccacgggccgaggaggcgctcggggcagcgcgcg

SEQ ID NO: 316262 - DNA, 401 bp, Zea mays
gggtcggccacgcgtccggactagacgtgcagcgattctcgatcatgcttgcgaccggctggcattttgtcccgacgctcgccgccggttggttggatccgtgccccccccgatcgatcgactgtgcgtatggtatgattgggtagctgttgccgtgttggaggtctggcgtccggcgatggcacaccacagcggcgcggcgcggcgcggcgggcgagccatggccatgaatcgatcgggtgtccagatccggtggagggaggtccggccaggcagagccgcagccagcctgcgttgcggctgcctgttcgaagtgatcgatcagccggaggatgccgcggaggtatcagattccgattcccggccccagccgcccccgtgctcgtgcaaacctgtccttc

SEQ ID NO: 316263 - DNA, 251 bp, Zea mays
cgcgtcggtcttttttttttttttcgatgagcatttaagtatttttgggcaggaaagaacacataccagagatgaggttgttggttgaatttgattcgaagtgctaatgaagagaattgtgagctccggcccggcggtgccgccctcggggttgtgcatgtagtacgtctccgagtcctgtggaccgacgaggcggtcgaaatgcgcgcgcatgtaagtgagctcgccgtccgacgggtgggacatatcgg

SEQ ID NO: 316264 - DNA, 55 bp, Zea mays
aaaaaaaaaaaaaaaaaaaaaaaaaaaaaaataaaaaaaaaaaaaaaaaaaaaaa

SEQ ID NO: 316265 - DNA, 372 bp, Zea mays
  unsure (1)..(372): unsure at all n locations
ctgggtgggccactggcaatggatcgtctgcggcagtgccaccaagctgggttttcttctgtttgtaacgtgttccgtagactgggacaaggaggcagtgaangcaacgtacagagtgttagggtcatctctcccgttagcatgaaaaaaatgccagtgttacatggaaatcncatttgaaggcagttgaacagaacccagcagagaaagcgtgggaaaaaaactttctatagtttgggacatctcaagatcatagatagctaccgggaaggcaagaagaaccacgaccagtatttttggattcatctgtactgttaaattttgtagcactgcaatgggttttcaggaaattatagtagcttggattgactc

SEQ ID NO: 316266 - DNA, 206 bp, Zea mays
accacgcctcggacctactataacaattgtagatttgcttgctggtcactctgataaaactagtgcattgcatgcgatcaaatgtaacgctcgatgctgcggtgctaccatgcacgtaccatattcgcgtaagtcagatgacaaatcaagtctatatcctgcagactgggcttaccactaactacctagtacctcctagcttgcta

SEQ ID NO: 316267 - DNA, 114 bp, Zea mays
gcgctgctcatctcaatcctcgagaaacgcatgcccacgcgatcgagagatagcgtcatcgccgactgcaacgacgatcgctacatcctcgatgctcactcccggacaactatc

SEQ ID NO: 316268 - DNA, 166 bp, Zea mays
  unsure (1)..(166): unsure at all n locations
accacgcgtcgggccgtacgagaanctttctgcctcctccaactttctccctttcctgccaaggcaaaacaccttcgccggcgaaaacatggcgatggcgtgacgtgtcctggaggtctaactgatgtctcgcaaattacctcaagaaagtgtctctcttctcccg

SEQ ID NO: 316269 - DNA, 73 bp, Zea mays
aaaaaaaaaataaaataaaaaaaaaaaaaaaaaaaaaaaaaaaaataaaaaaataaattatggataaaagaaa

SEQ ID NO: 316270 - DNA, 277 bp, Zea mays
  unsure (1)..(277): unsure at all n locations
accacgcgtccgcccacgcgtccggcctagcggaaggtcggcggcggcccgcctcgctgatcgcgatggagcggcggagcagcagcggcgcggggagctgcctggggctgctggcggtccccttggtgtcaacgagcgtcatcctcgtctcctaccgcctcaacggccgcctgnaggcggacctcagggtcataatacccggcaaaggcaacggacccccggacaagggccggcgccgcacaaggaagaccagaaaggtgcccttcccggccaactt

SEQ ID NO: 316271 - DNA, 96 bp, Zea mays
gcgtcggaccagatccggccagtcgaacgagaatgtcgcgcgccacagctgaggtcctcttctacatcctcgccgtcgactgccctcagcgcggtc

SEQ ID NO: 316272 - DNA, 235 bp, Zea mays
  unsure (1)..(235): unsure at all n locations
acgggcacgaacacggacacggccaccgagctccgcacgcgcacaggcagcactacgcggcgccggggccacgggcgcggtccgcctcgccgcagagcaacgccccgcgggcgtcggccgtgcncaggttcggcgtgtgggacgagcagaccgcttcgtcggccgcgcaagggttcacggtgcagttcgagaacgtgaatgcgaaccgggaggtggccacgtccggggtgccggc

SEQ ID NO: 316273 - DNA, 79 bp, Zea mays
  unsure (1)..(79): unsure at all n locations
cggcccacgcgtccggtccgaacaagacaagttcgtgttgccttanaaaatcaagtggcacggaaaaagattcctgaac

SEQ ID NO: 316274 - DNA, 198 bp, Zea mays
cgcgacggtctctgctacgcctacacgattgaaggcatcgtctgagcacgctccctttgggctatctcggttcacaattcccgtccagaagacgacgattagtcagtcggcagctaggttcgcacgcgcaaggccacgattgatggcgtcttcaagtccgagatcacgacactggagattccaggcaagcgtagcatc

SEQ ID NO: 316275 - DNA, 125 bp, Zea mays
gacgggctcgtgccttctcttcctccctgaaatggaagaagtagctgtttcgcccatgatcattgtcgcggtagtgctggagcacaacggttcctatgcggtcgcctgcaatgccatacctagcg

SEQ ID NO: 316276 - DNA, 277 bp, Zea mays
atgttcatgcgtcctgtgcgcgcccatcttcttcagaggctcagtgcttccggggagatcatccacgatcacgcttagctcgcacgccatgtgctcgtaggtgacgataccgcggatcactctgtgtcaggtcatcacacaggcatctgacccatccagattattcttgcgctcatcatcatgcttcgcgacggccttcatcgcaagatggggaaggcggacagacatcgcctccgtgttggctccgacggtgcaattgggtccacacacgcgggtg

SEQ ID NO: 316277 - DNA, 110 bp, Zea mays
gagtcgctgacgttccgggtgatgaccaccgaccagcgcagggcgacctcatgggatattctcgcggctgacaggaagttcggcgtcacgtaccacgcaaccaggacctt

SEQ ID NO: 316278 - DNA, 226 bp, Zea mays
tcgagtcgtcttcactcatcgatgctcttgcggaccatccggtccctcgctgtcgctttatagctgcctcttcgggtacaggctgtggttccatcgctcagtcaccctgtctcaaagctcccgtcccccagctggcgtcatagagaacctggctgattcgctcacttgttcaaagatcttcgcagtctcaatcgacagtgcgccgcgccttttccttgcgcattaa

SEQ ID NO: 316279 - DNA, 89 bp, Zea mays
gacgatgaggccacagctgcatagcctcgtcgcgctggtcctcgtggccacggtcatacccgccgctcccggcgttgggtttgtcgtca

SEQ ID NO: 316280 - DNA, 104 bp, Zea mays
tgtgacggagtcaacccaaacttatgtctcatggctgtgctactcattttagtgcttcaaggcaactgatttttccacaccaagtgctaacgctcggcttgtgt

SEQ ID NO: 316281 - DNA, 261 bp, Zea mays
atcgagagaagaaccagcagcctccaataagagccagccagagaaactaataaaactctcgccgccgccatccgagcgaacaagccaaccgaccccgtccccaaggcaatccgccgccgacgtaccaccaccaccgcaggagcgagatggagatgaagaggatcctcttcgccgtcctcgtcgtcatcgccgcctcggccaccgcagtgctggcctccaccgaggccgccgccgcgggcgccccaactgcctccgagtcgt

SEQ ID NO: 316282 - DNA, 213 bp, Zea mays
gttaaaaatgacggttcactcaccatagcttggcatgtaaatgcaagtgatggcaatgggaatcctactggtatcagttacaacaagagtgctcctgaacatccaaagctggatgcctcacacatcgggaacgcagcacccgtcaagctccagtttggtccttttgggatcaatggctggatgaatgacacggatggtaccagccatactggg

SEQ ID NO: 316283 - DNA, 433 bp, Zea mays
gggtcgggtccacgtccgtacacacctccatgagcaccaccacgaccacgatctcgcacacggtcccgcccacgtcgtcgaccacgtcgtccaccgggaacttgaccgggtacctgtggaatacgccgtgccacatccggagccccatctcgacgaccacctcgacgacccccacgtgcacctacaccggcacctacagggacagcgacagggagtgggtcaaggggcggatcccgatccggacgctgatccagtcggtcgtcccgtcctacatgacctgctacacgaccagcctgacgcggaccatgtccgcgatcaactgcgtcaggtaccgcttccggtcctcagacccctggacagtctcccgcaacgtctagccccacgacgacagccgcctcttcagcgcgggcatcaccgtcggcacgaccatccg

SEQ ID NO: 316284 - DNA, 281 bp, Zea mays
ggtacctgcacccggacatggtgtcggcaggggctccctctgaacacggacacttcctccggagacagctttttggtggggtccttgcgccatctcatgaatgatcgctgacaatcctgacgaagtcggttgaccttcacgtcacacagtttgagcacgagtcaatagatggtggacaatgactcaggaattctttacactaggatactaaatcgcgggctgatgcatcgtggcctgcctctaacaccaatgcttactccattgccggacaaccaaaactc

SEQ ID NO: 316285 - DNA, 403 bp, Zea mays
aatcatcacttctttctcagctcacttgtgcgctccttgtatggatgcggttatggcaggatgtggctgacctcccatttccctcttctctctctccctacctggtgggatgtggccttgctcccaatctctgcatgggaagtcatgccggaggagtgtgatggtgtcacattccgtttggcccgcaagcgtgcatgagggtggcagtggtagcacgagagggaaagaagaaagagattacctaacatttggatctcactgccacatctggtgtcacatccatattgtcccgcaagcgtgcatgagggcggcagcggtggcacgagagggaaagaagaaactacctaacattttttgcctcactggcacggcatcaaaagcatttaggaatagtcaagggggt

SEQ ID NO: 316286 - DNA, 230 bp, Zea mays
agcctgacatcagaccacgcgtcatcaatgaaggcacaatctaggtgcaagagatttgcttgtcaaccatcacaattcgcctcgcggtcatataggatgacagggcatagtatcgcacacactgtgagcagacttgtcgacagaactgtaacattcggttcattgaatgaagtttgctgacaagatgggtaccaagagcatcgatgttgtccatcgttttttggacgccg

SEQ ID NO: 316287 - DNA, 73 bp, Zea mays
acgcgtccgcacacgcgtccgcccacgcgtccgaaaaaaaaaaaaaaaaaaaaaaaaaaaaaggaggaagcac

SEQ ID NO: 316288 - DNA, 359 bp, Zea mays
atccgatcacgtcctccggccactcgtccctggcagatgctctcctgctcgaatctggacatggtgtcggccagaccgtcttcatctacgagggatacgcactcgccccacacgatctttcgtcggtacctggctggccgctagctcaggaacgatctcatgaaaattctgactgaatgcggctaatccttcagcagtacatgcttgagcagtaaaatgtcacggacatgaaggacaacctcgccatagattgcactggagctagactagaaaattgagactgccaagactagctcttcttgtgtataagagctacgacactgcatgactcgacaggtcatcactatttgtgctgaacg

SEQ ID NO: 316289 - DNA, 303 bp, Zea mays
gcgtccgcacacaagtctgcccacgcgtccgaaaaaaaaaaaaatacataaaatcaatacctcccatcactctcctactataaaaactcacgtccgcctccatgaaagttttctccttttctatgtgttggggtgggttcccctctccacatctgtttttacgacttcatgacccaggtccaacgtgatctctgctaaccactgtgcctatgcacccttaccccgactacagacttcacatcccactaaccacttgatgcccctatctcatctgcctatccatgcatccattgcattgcttct

SEQ ID NO: 316290 - DNA, 263 bp, Zea mays
ttgtgtcttctactacgttcctcatcatcatggcaatccttctcatctccctcatgctcttggcctcccctccttccacttctctttcattgcaaggtcctttgtgccggggtggatttcttactccacataaatatggaggacttcatcatcacgttcaatgacatcactgctaatcaggtacctttagacccttacttcgatcacacacttcacatcccatgacttatttattgctcctatatcatttgtctatccattca

SEQ ID NO: 316291 - DNA, 96 bp, Zea mays; identical to SEQ ID NO: 60659

SEQ ID NO: 316292 - DNA, 302 bp, Zea mays
atcaactcccacgaggttgggtcgagtcgcatgaaccaggagggcgccgctcagggtgaaattatcgtcgagaggcgagtgcacatctgtggctccatcgatcagtcggtcctagagaacgtgcacacagtgcacatcgataaatgatatacatcgacaagcaagtgatggagatggatttcgacgtcggcatttactgtagctgcatcgccgtcgtcctcacaatgtggacgggaaggaacgacgtcgaggccgccgcgccgatggaaacttcaaggtcagcacgactagcgcccttgagt

SEQ ID NO: 316293 - DNA, 267 bp, Zea mays
actttctactcctcatctttccattttcttactaagcaaaacaacttcgtttggacagcatctctatggcataccctttcccgtaggtcacgggggggtccacatttttcctcaataaattatcgctcttctcccagactcttcatctacgcaatggattccaactccggattaaacctactcatcccttcttacattacccaaacaaaccagatcaaaggctgctccctctgctaataactcattctactcttccccatcccttac

SEQ ID NO: 316294 - DNA, 272 bp, Zea mays
gggtcgagcacgcgtccggcaagatcgtggatgggggttccacgacctctcctgatgtcgctggtggccgccaggccagcagtggctgccgatatctcaaaatccggccatgcaaaacccctgacatctggagggtgcctggtacaggacaaggacagaaagttcacagccggggcatggaaaccagccaatccaacattctacggaggacgggacggatcagggaccacggcgaggacgtgagggtaaaaggacacgcgcgcacaagggta

SEQ ID NO: 316295 - DNA, 325 bp, Zea mays
aaaggacatcacccggtgccgctgccggtcgccctgcaatcggtggcagacgatgtcgccaacgccggacagacgaagcgcctaactcctggtgggcgcgtagcataggacaacgagaggggggttacggccgggccgtggaaacctgtcgaatcatccttctgaggaaggcgtacccgatccggcagcagcgcggccgcatgcgggtataacgacacccgcactcacgggtaacgctttcaatcagtgacccctcaccactgtgctgttcggtgactggcgcagcctgcggatgttcctaccatgtgcgatgcttgcacagccc

SEQ ID NO: 316296 - DNA, 404 bp, Zea mays
cgtccgagttcacgctaggtagattaaaagttatctcaggtgcttcactaggaaaaaatgaagtaccttagttaagttttgtaacaaggatatttgatcagtgcatgtcaaaggagggtatcaaaccaacgtgtcatatgactgtctagcttatgaatgttgctcctgttttatcacccctgaaggccaagcacacaatcatcctttattgatggctcacactggaaacttgagccagcgtgatcacacaatcgatataccaatgagtgatggtatgaccgcatcaacatctcaccaggatgatcatagtggctcggatgagctgcatcgcagcagaggtccttcgaatgaagtttcaccaagcccagatacatcttccggtacaaacgatgtatccaactctc

SEQ ID NO: 316297 - DNA, 317 bp, Zea mays
gacgccgccaccaacgctgccaccgtcgtccccggacgaccccgcggagccatcgtccatggggcgggagatggacgacgaggacctggtggaggagctcctgctcaccgtcaacgcggcgcgcgccttcgcggagttccggcgcacgcagcgcaaggagtgcgccaacctcctccgctggctgcagctcgtcctcccgctcctggaggagctccgcgacgccgcgccccggctcaccgacgacgcctaccgccggctcgcccttctcggccgcgcgctcgccgccgcgcgacgcctgctacgaacctgccacgacg

SEQ ID NO: 316298 - DNA, 171 bp, Zea mays
acccacgcgtccgccacgcgtccgggagtggaccggccggttaacggatctctcggtgctaattcgtgatcttgaccggtggaagcagatggggtttgcatgtttgtttcattcttgcattgattgttcgttgttaactagtgtatgatgaatcggtcgttaacgcttatt

SEQ ID NO: 316299 - DNA, 386 bp, Zea mays
cacacgcgtccgaaaaaaaaaaaaaaaaaaaaaaaaaaaaaaaaaaaaaaaaaaaaaaaaaaaaaaaaaaaaaaaaaaaaaaaaaaaaaaaaaaaaaaaaaaaaaaaaaaaaaaaaaaaaaaaaaaaaaaaaaaaaaaaaaaaaaaaaggggagaaaacaaaaaaaattggggggggcctttaagggtttctgtttttttttaccctttcttgaggtttcaaaattttccattgggggcccttatttttaatcccggggccttgttttaaccctgggttaccgggaaaaacccgggttttaccaattttaccttttttgaacgtattccctttttcgcaaggtgggtaattttccattgggccccattttttccccttttcaaaaa

SEQ ID NO: 316300 - DNA, 409 bp, Zea mays
acgcatccgattctaaatcgcggttcactcactattgcttggtatgtttatgcaaatatgggtttcggaaatcctctggcaactgttacagaaggagtgctccagcacatccaaagctcgctgtttccttcccatttaacgaagctcccgtaaagctccacttaggccggattgtcatcaatggctatatttatgacagggatcgtgccagctacactgggactgtagaaggcataaggccacagacagtcgcgatcggttcaaggctccagtcgtccgcacagggctacgccgatcgatgtcacattacactgtcaaccgatcgtatagacgactggtcattctacggtagttaccaagttactaattacccgcatgagtcttcaactgtcgatgatggactcgccga

SEQ ID NO: 316301 - DNA, 102 bp, Zea mays
agaaaataaataaaaaaagaaaaaaaataaaaaaaaaaaagaaaaaaaaaataagataaaaaaaaaaaaaataaaatataataaaaaaaagagataaaatgg

SEQ ID NO: 316302 - DNA, 417 bp, Zea mays
acgaattgtttcattgattcttgaagagatcgagcttcttttgcaccacaaggtcgaggatgtcttgcaactgcggatcaagctgcggctgcggctcaagctgcaagtgcggcaagaagtaccctgacctggaggagacgagcaccgccgcgcaggccaccgtcgtcctcggcgtggccccggagaagaaggccgcgcccgagttcgtcgaggccgcggcggagtccggcgaggccgcccacggctgcagctgcggtggcaactgcaagtgcgacccctgcaactgctgatcacatcgatcgacgaccatggatatgattattatctatctagcttgtggtggtggttgaacaataataagcgaggccgagctggctgccatacataggtattgtgtggtgtgtgtgagagagagag

SEQ ID NO: 316303 - DNA, 410 bp, Zea mays
agcggacgcgtgggcgcgccaccaccaccacctcctagctagcatgagtacacggatacacccttcgtcctcggacgcggccggccgtgcccgtcttcgggctgcggaggaacgggaacgggaacgccggccggcggtgtacacggtgtggaagaggtccagcatgggattccagggcaccgacggcttctgcgtgtacgacgacgccggcgggctcgcgttccgcgtcgacaactactcccgccgccgcaagctctgcgccggcgagctgctgctcatggatggcacgggcacgcctctcctctccctcaggccacagcttctcagcctgcacgaccgatggaactgctacacagcgacggaagacgccgccgtcgacaagaaggccacgtcgccggcgcagcagcaag

SEQ ID NO: 316304 - DNA, 263 bp, Zea mays
gggatttgctaccacgaggaagagtaccaccctcaggacctagccatcccccacccttggtggcgatgtcacctagcattgttggggatttgctaccacgaggacctagccatccaccacccttggaggaaatgatcgagtatagcaatgatgtcctcggtgcaaatgataaacttgttggtaatgtaaggatgaatacataaggataatgtgatgtaacttatagacaataacataaataaaaagaatatcctatgttgttt

SEQ ID NO: 316305 - DNA, 391 bp, Zea mays
aacggacgcgtgggcggacgcgtgggagatcatcctcgatcgggagacgcagaggtcccgcggcttcggcttcgtcaccttctccacggaggaggcgatgcggaacgccatcgagggcatgaacggcaaggagctggacggccgcaacatcaccgtcaacgaggcccagtcccgcggcggccgtggaggcggcggcggtgggtacggtggtggccgtggaggcggcggctacggcggtggcgggcgccgtgatggccgtggcggctacggcggtggcggcggctacggtggcggcggcggctacggtggtggtggcggcggctacggcggtggcaaccgtggccggcgctacggcaactccgacgggaactggaggaactgagcggtgggg

SEQ ID NO: 316306 - DNA, 411 bp, Zea mays
  unsure (1)..(411): unsure at all n locations
agacacacacagagagagacaagtggtttccaaagccaagtgtgtactagcagtctagcaaccagctagctcgggcggcagcaggcagccatcatgtcggaggagaagcaccaccacttcttcaaccaccacaagaaggacgaggagcagcccgccggcgagtacgggtactccgagaccgaggtggtcaccgccaccggcgagggcgagtacgagaggtacaagaaggaggagaaggagcacaagcacaagcagcacctcggcgaggccggcgccatcgccgccggcgccttcgcactctacgagaagcacgaggcgaagaaggaccccgagcacgcgcacaggcacaagatcacggaggaggtcgctgccgcngcggccgtcggcgccggcggctacgtattcgacgag

SEQ ID NO: 316307 - DNA, 212 bp, Zea mays
acccagtcgtccgagtagtcattcatgtacgcatggctgatcgatgagcttaaggctggtagtaacattggtatcactatgtggatgtttctgaggaacttttagaacagcacggtctatggtgcagttgttgatggtgctgtcatcagtgacatgatcactggtatgatacatgctgactgtgatgtcgatagtactgtctctatcattgg

SEQ ID NO: 316308 - DNA, 60 bp, Zea mays
aaaaaaaaaaaaaaaaaaaaaaaaaaaaaaaaaaaaaaaaaaaaaaaaaggaggaagctc

SEQ ID NO: 316309 - DNA, 63 bp, Zea mays
cgacccacgcgtcagcccacgcgtccgcggacgcgtgggcggacgcgtgggcggacgcgtggg

SEQ ID NO: 316310 - DNA, 194 bp, Zea mays
agctcacgcgtctcaacaacactgtctcgtctcactgtgcttcgaccaattgtcgtgtacgccagtcttctcttgtctggacacctctgtacgcctggcacgctggcatacagctgtctgcacgctttatggcctggtgtgcagtagtgagcctgtgcttctaccactactactattgatctgcaggttggcac

SEQ ID NO: 316311 - DNA, 171 bp, Zea mays
aaaaaaaaaaaaaaaaaaaaaaaaaaaaaaaaaaaaaaaaggaaaaaaaacaaaaagataataaaaagacatacacgtaaaagcaaatatactggaacatcgtcaacgtgcattaaagttaaagtcaacggacgttcgttttacaacgtttttcaatggcaataccctggc

SEQ ID NO: 316312 - DNA, 344 bp, Zea mays
aagttatctgtccgccaagataatttgaatgattcaggggatggtggaagagccccagtattcaaatggttctccgtattagaatttggtgggttaatcatctcttgcttctatggattaagtcaccactatgatctttcgtctgttgggtgtgacaacgatctcctaacccatctatatctgagactactcagagcactatatattctcacatttgagaatgccgatcaatatctgagacagtacacacattcatgtatacatgtgtcatatccacattagaaatatatattatgtttccattagtcacctcagagagtcttgcccaggagcttgttcagatg

SEQ ID NO: 316313 - DNA, 194 bp, Zea mays
acaaaaaaatccaaaaagaaaaaattcataaaaaaacaaaaaaaaaaaaaaaaaacaaaaaaaagaaaaaaaaaaagcaacatggcggcacacatcaaaatgatacaagtcttaatatagcggggcggcggctctaaaggtctatggctaaggttcccttgctttgcatgattgactgcttctacatagctgct

SEQ ID NO: 316314 - DNA, 354 bp, Zea mays
agcgtacgcatgcgccgagacatcagcacacgcgtccacgtacacagtcaactggacacgacaagcttgcataagtaccagtgatgactgcgctcgtcaaggttgctgatctagccgtgatgatcaccggcgccgccgtcaccgtgatctccgtggggataatcggtctcgccaggaggtccatctgctgaatgaagatggccgtcgcaacggcgttggtgggcacgatccgcaagcacagcgtagacgttgtggtggacaactacggcaacacgagcgtctagtttgacctcgacgagatcggaacgaccatcggatagtgggagctctagagctcggacgtccacacgttct

SEQ ID NO: 316315 - DNA, 352 bp, Zea mays
agcccacgcgtccgctcccaccccaccccaccccacccgcaagcgaggcagcctaggacgcagcagcgcacccccgatcctcgcctgtcgcctccatctccattcgcaggcctgagaccctcgcccgcaccgcgctgccgccagccatgggaatggggcctctcgagaacgccgcgtcggccgctgagtccgcggccttgccggaggccggcgccgcctcggcagcgggctcgtacgcggtgctgcagtgcggcgaggactcggagtacgtgcggcagaagtacggcggctacttcgccgtcttccgcgcgctgctggaggaggacggcgagagctggcgcgtgttacgcgc

SEQ ID NO: 316316 - DNA, 371 bp, Zea mays
aggtcatgtagagtatttctgtcactatattgtgtgttgcagctcgagaactatttcatattcaatgatcggcatagaggaatgaggatggatatcgacggcatgtcctacgaagtatgtctggatctctaccccttactctgacgacgccattttctgatttccttcgttacttcatcctcctctctctctctctctctctctctctctctctctctccagtcagcaagcagttcttgtttgtcatgcttttgtaagtgtagttatataatttgtgacactctgctttaaaggagttgcttgctttgggggagcgaattggtaccgtaaacacaggtctttcagacgacgcgttatccgcgtgcctgaac

SEQ ID NO: 316317 - DNA, 386 bp, Zea mays
aggaccaactagcaacatagaaagcacaatagtgtaccaacaatggcagccaaaatattttgcctccttatgctccttggtctttctgcaagtgctgctacggcgaccattttcccgcaatgctcgcaagctcctatagcttcccttcttcccccgtacctctcaccagcggtgtcttcggtatgtgaaaacccaattcttcaaccctacaggatccaacaggcaatcgcagctggcatcttacctttatcacccttgttcctccaacaatcatcagccctattacaacagttacctttggtgcatttattggcacaaaacatcagggcacaacaactacaacaacttgtgctagcaaaccttgctgcctactctcagcaacagca

SEQ ID NO: 316318 - DNA, 408 bp, Zea mays
agcggacgcgtgggtgattcttgaagagatcgagcttcttttgcaccacaaggtcgaggatgtcttgcaactgcggatcaagctgcggctgcggctcaagctgcaagtgcggcaagaagtaccctgacctggaggagacgagcaccgccgcgcaggccaccgtcgtcctcggcgtggccccggagaagaaggccgcgcccgagttcgtcgaggccgcggcggagtccggcgaggccgcccacggctgcagctgcggtggcaactgcaagtgcgacccctgcaactgctgatcacatcgatcgacgaccatggatatgattattatctatctagcttgtggtggtggttgaacaattattagccaaggcccacctggctgccatacataggtattgtgtggtgtgtgta

SEQ ID NO: 316319 - DNA, 397 bp, Zea mays
agaaaacccttactggcaagaccatcactcttgaggtggagtcttcagataccattgacaatgtcaaggccaagatccaggacaaggagggcatcccgccggaccagcagcgtcttatctttgccggcaagcagctggaggatggacgcacccttgcggattacaacattcagaaggagagcaccctccacctggtgctgcgcctcaggggaggaatgcagatcttcgtgaagacattgactggcaagaccatcaccttggaggttgagagctccgacaccattgataatgtgaaggccaagatccaggacaaggagggtatccccccggaccagcagcggctgatcttcgccggcaagcagctggaggatggtcgcaccttggctgactacaacat

SEQ ID NO: 316320 - DNA, 300 bp, Zea mays
agccagcctgtcctccagctccatctccccctcgtggccatggtgagctcccctgcgacgcgcctccacgtcacaggccagctcggcctcctccctagcaccgtcccatttcctccctgcaccggatcccctttcccctgcgtgccggactttcctccactcctccatccatggctctctgctgcttttactccctcccctgttcgcccatggtagtcgcgcccttgccaagctccctccgcgccgtggtgctccagctcggcctgcttcccagctcgctcggccgaagcgccctgctcg

SEQ ID NO: 316321 - DNA, 178 bp, Zea mays
agtgtagatgatgacacatgtaaaactgccacggcaccatcatacagcaacttgaaggagatttaaatttgttaggccggtggattgtgtaaaataagtgacacggtacagtagacgatactgcataatattgtttgtaacgtaaagtctgaaagaggagataagatatataagatgg

SEQ ID NO: 316322 - DNA, 350 bp, Zea mays
agcccacgcgtccgcccacgcgtccgcggacgcgtgggcttccgttctcaaaccaacctaggcaattcgccgcagcctctcaccctcgcgagtcccgacctcccgcagccgccgcacagatggcacccaaggcggagaagaagccggcggccaagaagcccgcggaggaggagcccgcgacagagaaggtggagaaggctccggcggggaagaagcccaaggccgagaagcgcctcccggcgggcaagtccaaggagggcggcgagggcaagaaggggaaaaagaaggcgaagaagtccgtggagacctacaagatctacatcttcaaggtgctgaagcaagtgcacccc

SEQ ID NO: 316323 - DNA, 411 bp, Zea mays
agcaaaagcatagagatccatcttctctgctcaatcaattacacaacaagagcattctagatttgagttcatcctagcgataccaatacacccatcccaacactccaaaccaaccaacacttcaaccaaaccaccacaacaatgccttcagtaacccaggcccgtctcatgtggcgtagcgtcgcccgcggcatggtagagccccaccccttcgctcgcaatcccatcaccatgacccctcacgcctggcgcgccgccgacctctccaagaaagtcgtgaagacaagcactgtcttcttccccttctatgcaggtatccttggatggccagtcgcagccgcctggtggttcaacggaaacatgtgactcttccaaatggaagtgccaaggcaggagaagaggaagggaccg

SEQ ID NO: 316324 - DNA, 356 bp, Zea mays
agggctgtggctgccagacaccaccgtttcatctaccgcctccgttctatatgccgcctccgttctatctgccgccgcagcagcagccgcagccatggcaataccccactcaaccaccgcagctaagcccgtgccagcagttcggatcctgcggcgtcggcagcgtcggcagcccgttcctgggccagtgcgtcgagttcctgaggcaccagtgcagcccggcggcgacgccctacggctcgccacagtgccaggcgctgcagcagcagtgctgccaccagatcaggcaggtggagccgctgcaccggtaccaggcgacatacggtgtggtcctgcagtccttcctgcagcagcag

SEQ ID NO: 316325 - DNA, 295 bp, Zea mays
acacgcttcatgtatatgaactggaatccacatacttctctcatacatcagtctatctctggctaccttcctttgccttcatgtcctgtggctatcatctgacttcaaaccatgaggggggatatgttgtactatacactctgatcggggcatggttcactgtctccgtagattctttcattcagactgggcacttcttctccccgcatgatgttatctccccatcattcttctctacaccatcttcgggaccagaaccagttgcacctcgtgtgcccactaactaatcttacac

SEQ ID NO: 316326 - DNA, 275 bp, Zea mays
ctcgacccacgcgtcagaaaaaaaaaaaaaaaaaaaaaaaaaaaaaaaaaaaaaaaaaaaaaaacaaaaaaaaaataaaaaaagaaaataaaagtggaggatacacaagaaagcacaacgtttaggtgagctctgaatgctccttcagtcctgcttctttaattctaattaaagttcaattcagtggccgtctgtttgacaaggcctttcctggcataacccctgcttatcccaatttagccgcctcttccatacacttccgctttcagcaactt

SEQ ID NO: 316327 - DNA, 368 bp, Zea mays
agcaataaccatggttcgaaatcccatttgttcataatttcaacctttttaaaatgtgggagcgcacgacaacggtggaaatcatggacccatagaaattggttttttgtatagtagagatagagattagtcatcaccatgataaattcgaccaaatttgaagatgatttggtatttggcaacaacaacttttactactatttgagaaaccccaagtaaaattgaagctaaactacactaatgattattttaggcaaataaatcgagacaatgtatttcaatcataaattgaaggcaatagtagtgaatctaacctagaacattgttggagtcatgagcttcatcacattctataaaatttttaaaaa

SEQ ID NO: 316328 - DNA, 252 bp, Zea mays
tcgacccacgcgtcagcccacgcgtccgaaaaaaaaaaaaaagaaaaaaaaaaaaaaaaaaaaaaaaaaaaaaaaaaaaagatcaaaaaggataacaaacttaaatagacataaagtaaatttggagggcttatcaactagtatcgcctctatggagttgaccgaatgtcgctttatcgtggtgcagtctagaaagcactcctctgtgagctaccgtacggtgcctttaaggatgccactgtttttgctaaa

SEQ ID NO: 316329 - DNA, 387 bp, Zea mays
  unsure (1)..(387): unsure at all n locations
agcccacgcgtccgggaatccagtagcaacaatagagcaacaatggcgaccaagatattttccctccttatgctccttgctctttctgcatgtgttgctaacgcgacaattttccctcaatgctcacaagctcctatagcttcccttcttcccccataccttccatcaatgatagcttcagtatgtgaaaacccagctcttcaaccctataggctccaacaagcaatcgcagcaagcaacatacctttatcacccttgtttcaacaatcgccagccctatctttggtgcagtcattggtacaaaccatcagggcacagcagctgcagcaactcgtgctacctgtgatcaaccaagtagctctggcaaacctttctncctactctcag

SEQ ID NO: 316330 - DNA, 332 bp, Zea mays
aggttgggaactggaatgagcatactaatctcaaagagcaatccatcactggtaacttcatttgccttcttgtcgtgtggatatcttctcagttcatatcatgaggtgagatctgttgtactaaacaccctgaatagggcaaggttcactgtggctgtggattctttcatcaggactgggtatgtaccctcgctgaaggatggaaactcacaagagacaatatttaatccaccttggcgacatgagccagttgcaataggtttgcgctcttagtaatcttatatattcctgtatgctggtgcaatgtagaacctctactcatcagttttgtt

SEQ ID NO: 316331 - DNA, 351 bp, Zea mays
tcgacccacgcgtcagctagtccgccccgggcgcccgcgtcgccgacctccgtgtcgacagcttccgcgcgcatccgcccgtcgtcggactcggcctcgcgctgcgagctccgcgtcagcaaccccggcttcttcctcccgctccgctaccgcgcggtctccgacgccgtctcataccgcggacacttgctcagggtcgctaaatcgtggcccgggtccggcgagcttgcgggcatgaatgaagtctatgcggatgctgatgtgtgagtggacgccgggaaagtgctggctgacgtgatcgagctcatctgggacttggcctcagggtcagtgccgcttgagatcgtatct

SEQ ID NO: 316332 - DNA, 165 bp, Zea mays
agcccacgcgtccgcaaaaaaaaaaaaaaaaaaaaaaaaaaaaaagaaaaaaaaacaaaaaaaaaaaaaaaataggtggacgtacatgaggattcatacttctttgagggtgcaaactaaggttcaatttattcgagagtcgtattataaatgtaattaatggga

SEQ ID NO: 316333 - DNA, 397 bp, Zea mays
ggctgcagaggtcggcgcagacattcaggaggtcgggctcgtcggggctggtctgggacgagcgcttcatcaccgagggcgccggcgcggcggcgccacgccagcagccggagctgcggcactcgaggagcgtcggcagcgtcgccatgctgctgctcggccgcgaggcagatcgcgacgacaagaggaagctgacgctggccaagccgaacctgaaagggccaccacaagaagcaggaggagctggtgcctggcaggaaggcgtttcggaccagggacgtagccccggccgccgagccaccgtcgccgagggtgctcgccatctgctgcgcgccctgctccatcttccgggatgccggcgccggtggctcgtcgtctctggcgcggcgggccaaga

SEQ ID NO: 316334 - DNA, 270 bp, Zea mays
acgcatgtaatcttgtagtaatcatgtatacggaaaatatgcatttcaattcaaccatagggtaggcctagatccggaaattttgcaaaaaaaaaaaaaaaaaaaaaaaaaaaaaaaaaaaaaaaaaaaaaaaaaaaaaaaaaaaaaaaaaaaaaaaaaaaaaaaaaaacaaaaaaaacaaaaaaaaaaaaaaaacaaaaaaaaaaaaaaaaaggacgacaacaaaaaggagtataaacaaaaagaaccctcgaaaaaagaccagaaaga

SEQ ID NO: 316335 - DNA, 392 bp, Zea mays
taccggtcgagaattacgcggtccgattcttcctttttataatctgatctcatgtattttctctgcaacaagacagttttaccccttataaatctctcctctggccaacgtcccagcaacgagtgagcatccacccgacttagattagcagattcgtttcctctggttccttcatgaactcatgctgaaatggattgctaattaatgctattgtgggttgttcattactgattgatgagtactatacattacctgacatgccgtcacgacacaaatttccttgctttactcaattactcagtgtacaattggtgcatcaaaattcaaaatggacttgctgctgtgatttattcatgcttggatcgattcaggtggcataagtactaactttt

SEQ ID NO: 316336 - DNA, 237 bp, Zea mays
tcgacttttataaaagcggatgccatgtattttctctgcagcacgagagttttatccctctagacatctctcctctggacgacttcgcagcaactagtgaccatggaccccacttagattaccacagtcgtttcgtccggttccttcagcagctcacgccgaaatggtttgctcatgaatgctattgtcggttgtgcattcatgattgcctattactataccttgccttggatgccg

SEQ ID NO: 316337 - DNA, 283 bp, Zea mays
attgctcatgtcaagacaacacctcatccacccttagctcaagtacctgcataactgtcaccctggacggcttcagtgccacggacttccatcgggggtgcgacttccagggcccctgcgtcgccggtgggtacatccacggcggcttccctttcggccggttcagcccggcggggtacccaagcaccgactatcactacgaaacgctggatgctttcctcttccactgcgcggaatctacgtgaggtccccgcgccccccgttgagcttcccaacgtgggcg

SEQ ID NO: 316338 - DNA, 56 bp, Zea mays; identical to SEQ ID NO: 55658

SEQ ID NO: 316339 - DNA, 388 bp, Zea mays
aaaaaaaaaaaaaaaaaaaaaaaaaaaaaaaaaaaaaaaaaaaaaaaaaaaaaggaaaaaaaacaaaaagaataaaaacttacatacacctacaagctaaaatccttcctcttccaaaatggggcggccgctcaaatggttgcaccctcatttacccttgtttcgaaggtgaaaccccttcaagtttgccacctaaatccatttccagggcactcccttttacaccatctggcctgggaaccccttggctttcaccaatttaacccccttgcagtaaacccccctttccccagatggggaaacaccaaataggcccgcactattcccccttccaatcattgtcacacccaaaatggcaactggaactccccctgtactagcgcattaa

SEQ ID NO: 316340 - DNA, 193 bp, Zea mays
cgacccacgcgtcagcccacgcgtccgaaaaaaaaaaaaaaaaaaaaaaaaaaaaaaataaaaaaaaaaaaaaaaaaaaaaaaaaaaataaaaagaaaaaagtgaaaaaagacttccaacggcagtgactacttcaagggccacagcgtcttaagttggctacgccggcggtgccttccgtttcggctggttc

SEQ ID NO: 316341 - DNA, 336 bp, Zea mays
atcccgggcacgacccacgccgtccgcgtgacgcgttgggaacaaataaaaaaaaaaaaaaaaataaaataaaaaaaaaaaaaaaaaaataaaaaaaaaaaaaaaaaaaaacaaaaaagcaaaaaaaattataaaaattttggattcaaaacagaacaaaaaaaagggcgccactcataaatggttttaactttatttaaggtggcggcccccttaagggttcaccccttatttccccttgatttccatctccgggcccctcttttggttccccccaacttgtgtatacggggctttttttaaaattttccccttgggaaaaccctctccttttcc

SEQ ID NO: 316342 - DNA, 324 bp, Zea mays
acggacgcgtgggcggacgcgtgggtcagaagagtaaaacataatgctggagtgagcttccaacaaggactaatcaccatgcgcatgctgcgagcaatgaagggtttttcctaccatacatgtttaaatgcaatgcactgcaacttgctggcagcaaagagtatgtgctcggttagcttcttgctcatctgactgagggtactgctgattggaatggcttttggatctataactagagtatccaggtcatttgtacttaggcaagtgtgtatactactctatgctggattatcgaaatgggggatggtttcttccctacgttgt

SEQ ID NO: 316343 - DNA, 116 bp, Zea mays
aaaaaaaaaaaaaaaaaaaaaaaaaaaaaaaaaaaaaaaaaaaaaaaaaaaaaaaaaacaaacaaaaaaaaaaaaaaaaaaaaaacacaaacaaaaaagaaaaaaaaaaaaaaaag

SEQ ID NO: 316344 - DNA, 297 bp, Zea mays
acccacgagtcaacccttccgtcagctcttttctgctactgcctctggtccaaacctttctacaccgccttaacgccgtctatcgaatccgtaccgctgggaaggatcactggggagcggagccaggctgccgacccactgttttgtcgacccgatggcagcggaccagggagactggcggcggttgaggcccggttttgggatgtagaagatctgcgatgtctgcgagatcgtaccggcggttctcttcagtgcggtggatcaggctgtgttttgccggctttgcgaccattaggt

SEQ ID NO: 316345 - DNA, 422 bp, Zea mays
tcgacgactaagttttcggtgtaacataatttagtccccttttttcatccgtgacatcacgtctacggattttaattgaattgttctctagtcgagtgttcgactagcgaacggaattcgtctaaattcaactaaatcaaacgtcgactaaaatatcgaatccgatatcgtctagtttaatccgtctacatctcgctcccgtgacgatgctgacatcgtctccggggggattccgattgcgatgccgcatccggttagcacagtttaaaatttacttatttctaaaagtgtcgggcctagtgccaatttaaaaataaacgattaaggacagactgaaattgtcacctaaatattttgcttggtttgagcactctctataaattcggtaaatacactacttggggtaagctattagataaacg

SEQ ID NO: 316346 - DNA, 131 bp, Zea mays
cacgcgtccagaaaaaaaaaaaaaaaaaaaagaaaaaaaaaaataaaaataaaagtatcaaaagaatatatataaatgggtaaaatttacaatgagcgaagaaaccttaaaaatggtaattggagcgttta

SEQ ID NO: 316347 - DNA, 120 bp, Zea mays
aaaaaaaaaaaaaaaaaaaaaaaaaaaaaaaaaaaaaaaaaaaaaaaaaaaaaaaaaaaaaaaaaaaaaaaaaaaaaaaaaaaaaaaaaaaaaaaaaaaaaaaaaaaaaaaaaaaaaaaa

SEQ ID NO: 316348 - DNA, 345 bp, Zea mays
acccaagcgtccgcggatgcgtaggactctgcgtacgtcaacgtgcagtgtgagtttgggttctttgatcaggaccgggtatgtaccctcattgatggatggacactcacagtatacaatatttaatcgaccttggcgacattcgcccgtcgcaatatgatcaagatttgaggacgcgtttcaagaacgtgcttcgtttactgctataaaacctttgttctcggatcagaggtatattgttacatataacccgacaaacgacaacgtctatgctttgctcacggaccactcagtgcttgatgacattcgcaagtgtacttttcatgcacatgtgctactgcattt

SEQ ID NO: 316349 - DNA, 376 bp, Zea mays
acccacgcgtccgaaaaaaaaaaaaaaaaaaaaaaaaaaaaaaaaaaaaaaaaaaaaaaaaaaaaaaaaaagaaaaaaaaaaaaaaagataaaaaaaaaaaaaaaaaaagaaagaaaaaaaaaaaaaacaaaaaaaaaaaaaaaaaaaaaaaagggggggccccccaaagggttcaagccttatttcccgttgcaggcgattttaaaccccttcaaaggtttccccaaatttcatttcaggggccttctttttaaaagttcttaaggggaaaaacctgggctttacccaatttatcccctttgcaacaaatccccttttccccagtgggcttaatcctaaaaaggccccaacgttttgcctttccaaaaatttgcc

SEQ ID NO: 316350 - DNA, 393 bp, Zea mays
acaggcaatcgcagcaggcatcttacctttatcacccttgttcctccaacaaccgtcagccctattacaacagttacctttggtgcatttgttggcacaaaacattagggcacaacaactacaacaacttgtgctaggaaaccttgctgcatactctcagcaacatcagtttcttccattcaaccaactggctgcattgaactctgctgcttatttgcaacaacaactaccattcagccagctagctgctgcctacccccagcaatttcttccattcaatcaactggcagcattgaactctgctgcttatttacaacagcaacagctaccaccattcagccagctagctgatgtgagccctgctgccttcttgacacagcaacagttgttgcc

SEQ ID NO: 316351 - DNA, 83 bp, Zea mays
aggaacccttaggtccggaattcacaaaacaaaaaaaaaaaacctaccttcaacaaaaggaaaaaccaaaaaacctgacaaaa

SEQ ID NO: 316352 - DNA, 381 bp, Zea mays
cccacgcgtccgcccacgcgtccggagaccaacaagcaacatagaaagtggaatccagtagcaacaatagagcaacaatggcgaccaagatattttccctccttatgctccttgctctttctgcatgtgttgctaacgcgacaattttccctcaatgctcacaagctcctatagcttcccttcttcccccataccttccatcaatgatagcttcagtatgtgaaaacccagctcttcaaccctataggctccaacaagcaatcgcagcaagcaacatacctttatcacccttgtttcaacaatcgccagccctatctttggtgcagtcattggtacaaaccatcagggcacagcagctgcagcaactcgtgctacctgtga

SEQ ID NO: 316353 - DNA, 181 bp, Zea mays
agcggacgcgtgggcggacgcgtgggatcaaagctatgttatcgggttcagaggcagcttacatatcctatctaaacaactcattagcaaatagtataagtgtgtaagcactgtctacgatggtgttatgatggtggtatttgagatggctctaggttctagatccataatataataaaaa

SEQ ID NO: 316354 - DNA, 430 bp, Zea mays
cggacgcgtgggcggacgcgtgggtatctttgagattgaagccgaagtggaggcagtaaaaggtgtcaccaagaatttgtgtccgcttaaaattgtattggacagagtggttttgacctcaaccggtgtgcttcttggcctgtggcaggttgaatctggtactgatcctgcagaaatccgctcaagattgagagaagctcttcctcgtgcacctcaaaagcaactgtatgaccctgttctgcttcacacctcgtttgcacgaattctgcgacatcccaggctccctaaagagcaaagtgcatcatcgtttgataatgtcaagttcttccatgagctagttgctcaaattaatgagaagatctgtggctttcaggcgacgatatcagagctatggtatgtcgaagagtacgatgttcttgcattggcactg

SEQ ID NO: 316355 - DNA, 71 bp, Zea mays
acgcgtgggccgccgcggaccgtctcggtcgccgaccacgtgtatgtagccgtccgcagcaggggctccag

SEQ ID NO: 316356 - DNA, 315 bp, Zea mays
gggtccagccacgcgtccgaaccatctaccagcgactcagcgagcgagagcagcacacactgcacgcagctagctaggagcagcagcagcggcggcgatggcggcctccatgatctcctcgtcagctctggcggtggcgcctcagggcctgccgcccctcggccgccgcgcctcctccttcgccgtcgtctgctccaagaagaagatcaagaccgacaagccctacgggattgggggtggcctgaccgtcgacgtcgacgccaacgggagaaagggcaagggcaagggcttgtaccatttcgtcaacaattacgg

SEQ ID NO: 316357 - DNA, 290 bp, Zea mays
accacgcgtccgcgttgttatactgctgtgtactgttagtctgctgctgatttccgttgttatactgctggtacatgtgtcgtgtgatagatgtgtcaactatatatcaatctcgtcgccggcagctctggcatgtttgagtatgtgttgcttctctgtggtgccggcgacgatggctgctagtactgttaatgtgatcgggtctccttgaacaatggcataaatatgttgcttgtttaaaaaaaaacatgatggcaaactcagtggtaaaagccggactaaggaacaag

SEQ ID NO: 316358 - DNA, 238 bp, Zea mays
cccacgcatccgaaaaaaaaaaaaaaaaaaaaaaaaaaaaaaaaaaaaaaagaaagaaaataaaaaagatcaaaaaaataaaataaacttcgggaagcagtcctagactgcttcaatactatactctacgtttttcttaactcgttatccttctatattgtcacgactattcaaatcctggactatcattacataacctccttactgcaaaacccgcttcctcacactattttatcgc

SEQ ID NO: 316359 - DNA, 174 bp, Zea mays
cgtccgaatccaagtttctctatttctctgatcctcattagttaacatcaagcttatcacactggttagatagtctccacctccaccttcctgtctaccttcgccagtaggtctgaggcatgcgataacctgctcatcgcgtgccgtccttccagaagatcatcatgttcttgc

SEQ ID NO: 316360 - DNA, 208 bp, Zea mays
gggtccagcacgcgtccgcacacacgtccgcttttgacgatctcccacatgacctaaaatcatgcttcctctacttttgcggcattgccaatgaaaaccccggttaaggctcccaaattggaatccagttggatggaaaaggggttcctaaaaccaaagaatgggaaaacaatggaaaaagttggaagaatcaatttgaaggatttgg

SEQ ID NO: 316361 - DNA, 420 bp, Zea mays
  unsure (1)..(420): unsure at all n locations
cggacgcgtgggcccccatcaaggtgggctccttcggcgagggccgcatcaccatgcgcaagaccgtgggcaagcccaaggtggcggcgtccggcagcccctggtacggccccgaccgcgtcaagtacctcggccccttctccggcgagcccccgagctacctcaccggcgagttccccggcgactacggctgggacaccgccgggctgtccgccgaccccgagaccttcgccaagaaccgcgagctggaggtgatccactcccgctgggccatgctcggcgcgctcggctgcgtcttccccgagctgctctcncgcaacggcgtcaagttcggcgaggccgtctggttcaaggccggctcccagatcttcagcgagggcgggctggactacctcggcaaccccagcctgatccacgcgc

SEQ ID NO: 316362 - DNA, 394 bp, Zea mays
atgtcttgcaactgcggatcaagctgcggctgcggctcaagctgcaagtgcggcaagaagtaccctgacctggaggagacgagcaccgccgcgcaggccaccgtcgtcctcggcgtggccccggagaagaaggccgcgcccgagttcgtcgaggccgcggcggagtccggcgaggccgcccacggctgcagctgcggtggcaactgcaagtgcgacccctgcaactgctgatcacatcgatcgacgaccatggatatgattattatctatctagcttgtggtggtggttgaacaataataagcgaggccgagctggctgccatacataggtattgtgtggtgtgtgtgagagagagagaaacagagttcctcagtttgctatctctctctgcat

SEQ ID NO: 316363 - DNA, 435 bp, Zea mays
ggggccagcacgcgtccgaacacacgtccgctcacaccagcacgggttagaagcactctccaccgcccttagatcaaaaacaatgcccgagtcggttggtgcttactgaaattcaaaaaaacgaaaaactccgatggagctcaaaaacgaaaaattccgaccacaattttcctcgaggacataaccgcaaaaggacgaaaaatggaccaatcaggaagaagaaagaaaaaaggacatttcaggacatcaggacttctgggaacttcaaaaaatttagggaaattcaaattgagatttattaagatttcggtctcccctgcagaagaccattaataacgccttctgagggccccgcaccctcgaaaacgctttttgcctccgcccctacaagaaaattacctcccagacgtcatttattaaaagccagccggtgta

SEQ ID NO: 316364 - DNA, 397 bp, Zea mays
aaaccgcgtcgtaagcatccttctcggagatgccgttctgtttgccgtaggtgtggttctcgtcaaaggttaccatgacaagtgtgttgtgcatgcagttcttgttggtaaggaggggttccacgagcaacgcacttacggcatacatgacggcgtcttcagcatcgttcccggagatgctgttccggctgcgcgggtcggtaccacgaatgatgcctactacaaccagtacagcgagatctctaatgcacaagcgaattgcggcttgcacacatcaggccgttgggacgtaccgtgcaccatgttcatattcgtagctacgaatactgtgcatactgttgcagcatggtctgggaaggttgtcttcagcactacgtacatcactgcgtcggacact

SEQ ID NO: 316365 - DNA, 256 bp, Zea mays
acccacgcgtccgatgacagtctcctcagctgatgatgacccgagggttgttggagttgtaagctgctgattctcgcggtcgccagctatttaactgtcttgtattgagccttgagacaaagcaagctttgtgtatcatgtgtcgtcttgtttgccttgctatggaagtgtgtttgtatcgggattcgggagtcctattgttgtcatagtcgcaacttctctgcctttttacccccggaaagatgctcttgcgacc

SEQ ID NO: 316366 - DNA, 172 bp, Zea mays
gcgtccgaagacacgtgggttggcagtttagccacccgtggcagtagtgcttgttgctttcacaagaaattagcaaatacccccaccgattacaagcgttgagtaatagaaaaataaaagatatacaaagaagaacaaaaatacaaaaatcggaaagtaaaaataatataaa

SEQ ID NO: 316367 - DNA, 358 bp, Zea mays
  unsure (1)..(358): unsure at all n locations
ggtccacattacgggtccagcacgcgtccgcacacacgtccgccgaggagcccgccgcggccgaaccggccgccgaggcggaggctgctgctcctgctggtcccgaggagactcccgcggccgaacaagaagcaaccgccgaagaagaagctgctcctcctgctggtgccgaagaacccgccgccgccgagcctgtcgccgaagcagaagctgctgctctccaggagctcgccgcggacgaaccggaggctcctgctcctgctggtccccaangagccggccgccgaggcggaggctgctgctcctgaggagcccgagaaggccancgagtgaggccgtgcgcacgcagcggcggcgg

SEQ ID NO: 316368 - DNA, 380 bp, Zea mays
aacaagcaacatagaaagtggaatccagtagcaacaatagagcaacaatggagaccaagatattttccctccttatgctccttgctctttctacatgtgttgctaacgcgacaattttccctcaatgctcacaagctcctatagcttccctttttcccccataccttccatcaattatagcttcagtatgtgaaaacccagctcttcaaccatataggcttcaacaagcaatcgcagcaagcaacatacctttatcgcccttgttgtgtcaacaatcgccagccctatctttggtgcagtcattggtacaaaccatcagggcacaacagctgcagcaactcgtgctacctgtgatcaaccaagtagctctggcaaacctt

SEQ ID NO: 316369 - DNA, 59 bp, Zea mays
gggtccagcacgcgtccgcagacacgtgggcggacgcgtgggctagttctagatcgcga

SEQ ID NO: 316370 - DNA, 437 bp, Zea mays
cgtccgaacacgcgtccgcagacgcgtggggattcttgaagagatcgagcttcttttgcaccacaaggtccaggatgtcttgcaactgcggatcaagctgcggctgcggctcaagctgcaagtgcggcaagaagtaccctgacctgaaggagacgagcaccgccgcgcaggccaccgtcgtcctcggcgtggccccggagaagaaggccgcgcccgagttcgtcgaggccgcggcggagtccggcgaggccgcccacggctgcagctgcagtggcaactgcaagtgcgacccctgcaactgctgatcacatcgatcgacgaccatggatatgattattagctatctagcttgtggtggtggttgaacaataataagcgatgccgagctggctgccatacatatgtactgtgtggtgtgtgtgacagagagagacaca

SEQ ID NO: 316371 - DNA, 278 bp, Zea mays
acaattcctccttcggatctcgcattcagcgcagcgcaggtgtgaaggaagggggacgcggaggaagatggggctcgcgttcgggaagctcttcagccggctcttcgccaagaaggagatgcggatcctcatggtcggcctcgacgccgccggtaaaaccaccatcctctacaagctcaagctcggcgagatcgtcaccaccatccccaccatcggtttcaatgttgaaactgttgagtacaagaacattagcttcactgtctgggatgtcgggggtc

SEQ ID NO: 316372 - DNA, 385 bp, Zea mays
gcgtccggacgtagccgtcgccgctcggcaaaccaagcagccaagagcagagtacggcttcgtcacgcttgcatccctacgggttcggggacgcgccgtgcttcagccgcacggcgttctcacaatgatggcgatgatgaataaataaatttatacatggatcgagcttttatccttctggcagcaatgggggttttctcgctcgtggaggtggagggagagtaagaacccgtgaaagccatcgtccgccacggtcagactctgattggcagttgcaattgctttggactgcggctgcagggatgaaagaaggtgacgtgggaagatagaccacaaggggcacgtattcgcctaaaatctccacccacaaggggtgtttgtttga

SEQ ID NO: 316373 - DNA, 390 bp, Zea mays
acaaaattaatggtgtctttaagaaatgcatacgtatacaaggacaacgcatgaatagcagctgcacaaaaatatagtaaggctgcactgacatttaacacttaccatgaaagaaagcaaaatcatgtaatccttcttcagctcaaagagaagcaatattgaagtcaatgggaatgaatagactgaagctagtgtagcagccattctgacctacagaaaaatagagatagtgcacatcattacttatcgcatcaggaaaagtgagttgcaaagcaacttaccagagcctaggcttgtggcagtgcaacgacaacattaccctcagtaaagttgaaattattaaataagctaccgacgccctccaaaacagttccagcagcagctccaatc

SEQ ID NO: 316374 - DNA, 65 bp, Zea mays
acgcgtcacgaaaaaaaaaaaaaaaaaaagaacaagaggaaagaacaaagggagggttcataaaa

SEQ ID NO: 316375 - DNA, 110 bp, Zea mays
ccacgcgataagcggacgcgtgggcagacgcgttggctgaagtgtgggttgaggcgtggtcggtgaaggggtacatgatttggatagatttagccatgtaatcatcgatt

SEQ ID NO: 316376 - DNA, 379 bp, Zea mays
accagcacattcacgctcagctccagcaatggctgcctccaccatggcgatctcctccacggcgatggccggcacccccatcaaggtgggctccttcggcgagggccgcatcaccatgcgcaagaccgtgggcaagcccaaggtggcggcgtccggcagcccctggtacggccccgaccgcgtcaagtacctcggccccttctccggcgagcccccgagctacctcaccggcgagttccccggcgactacggctgggacaccgccgggctgtccgccgaccccgagaccttcgccaagaaccgcgagctggaggtgatccactcccgctgggccatgctcggcgcgctcggctgcgtcttccccgagctgctctcccgc

SEQ ID NO: 316377 - DNA, 365 bp, Zea mays
agatcagtaaaaagttggaaaccgagctttctgcctcttaacgttcttctgcgcaccaaaatgattcgccctgggtaccgatctggtttcttcaatcttttacatacttatatcgagtttagagaggaatattaacatgaataatgtggtaactgactgggaaattcaaaccgtgttcaccaactatttgccgctactgttcttcaggaaagtccaatacattgtacataaccatgcatcaaccatcagctcaagactaaaggctctcctgcagtattgtggtgcactgactattggtctatttctttcgaaagagagagagaggaaagctattagctagtgctagaaatataatggtgccccac

SEQ ID NO: 316378 - DNA, 77 bp, Zea mays
aaaaaaaaaaaaaaaaaaaaaaaaaaaaaaaaaaaaaaaaaaaaaaaaaaaaaaaaaaaaagggaggccgcacaaaa

SEQ ID NO: 316379 - DNA, 65 bp, Zea mays
agaaaaaaaaaaaaaaaaaaaaaaaaaaaaaaaaaaaaaaaaaaaaaaaaaaaagaaaaataaaa

SEQ ID NO: 316380 - DNA, 54 bp, Zea mays
aaaaaaaaaaaaaaaaaaaaaaaaaaaaaaaaaaaaaaaaaaaaagaaaaaaaa

SEQ ID NO: 316381 - DNA, 283 bp, Zea mays
attcaaaggccgaccgacgcgtccacagctcacaaagtgatcacgcgggcgaatgggctactcatcagctctctatctgagcttcgttagcaaataagttcagacttctctttactgccatgctcaagtctgtatatggccaaaacccaaaacgattgatcaactgcgctactgcagtgcaatagcaggatacgtatagttttcttttcaagggaaacaggaggggagtgcagtgcacccccgcccatactgcatgttattaataaaagaaagttatttacag

SEQ ID NO: 316382 - DNA, 341 bp, Zea mays
tcttttccttctccgccctcgccgccggccaacatgatgcacatgaccttctactggggcaagtccgccacgatcctattccacggctggcgcacctccacctggctcggctaacttctctcccccggtgggccgcgtccctccccgcccccttttaacaataccccgaggccttgcgggtccgcgtaaagcacatcgcgaaaagatcccccaagccagcctcctaaatccctccacccgccatctccgacccgcggacgccgctcctcgcgcccgccttcgccgggcgctggccgccgcttgtggccgtggccgcaatgttcggggtcaactccggcctc

SEQ ID NO: 316383 - DNA, 356 bp, Zea mays
tcagccaagccttccgaggataccagcagcgacgaagaccccgctagcttcgtcccgccgattccagtggccagcagcatctccagcgagactactgcggtgttagggcagggacgaccgctaccggtcgccgtggtgatcgatgtcatcacccagcaggaggaagaggcgcggaggcaggaggcactggagctgcagcagatagggacccagcggcgagccatgcggcggtcgcggtcggggcgcaagccggttccgacgcagctcgcccggtcgcactctacgggccactccctcgccgtccggctggaccgcgacctggagcgcttcacgctgcggctgccggagcacgtgcg

SEQ ID NO: 316384 - DNA, 442 bp, Zea mays
  unsure (1)..(442): unsure at all n locations
ttcccggcccgacccacgcngtcaaagcggacgcgtgggcggacgccgttgggcggttggtaaggaagccaagcacgaaaggaacccctttccttcgtttgggttctaaacgttgacgaaggaagatccngctgttgccgcaagggcacaagggcgggggcggtagcttaactgggtgcccgatgtctagcgttgtcccnnctgaagatccnacgacatcctcaatctcgccttcacatgattcacctgtacacatatcacggatanacatggataatgttgaagtctctaagtttgtaggggttcaatgttcatcctttgtactaatctgctttgtctccgnaaaacgagaaaaaaaagggcaattggacggtgtaacataatgaaatgctatcttggttgataactaaaattttctaattttgtgaatgttgtcaacaat

SEQ ID NO: 316385 - DNA, 383 bp, Zea mays
gaccgacccgtccagcaaagaggcagtgcgtagagaggatcgtcgaacagaacagcatgaagatggtcatcgttctcgtcgtgtgcctggctctgtcagctgccagcgcctctgcaatgcagatgccctgcccctgcgcggggctgcagggcttgtacggcgctggcgccggcctgacgacgatgatgggcgccggcgggctgtacccctacgcggagtacctgaggcagccgcagtgcagcccgctggcggcggcgccctactacgccgggtgtgggcagccgagcgccatgttccagccgctccggcaacagtgctgccagcagcagatgaggatgatggacgtgcagtccgtcgcgcagcagctgcagatgatgatgcag

SEQ ID NO: 316386 - DNA, 325 bp, Zea mays
gaccgacgcgtccacccacgcagtccgaaaaaaaaaaaaaaaaaaaaaaaaaaaaaaaaagaaaaaaaaacaaaaaagaaaaataaaaaaatataaataaaaaaaaaaatagggaggctgctctagaggttggttacttcatttctcaggcatgcaaggttataacgtgttccttcttttaagttttcttattttaattggctgtcgttttacattcatatctcttgttaaggtcctgccgttttaaacctaaggccctttgttttaaacctttttttcggtaacacccttgttttttccaaaggttagcccctttgtttcttcc

SEQ ID NO: 316387 - DNA, 377 bp, Zea mays
acctgcaggtggcggagcccaaggcagcggcagatgatcaggagagcacgcgagacaggctgaagcggcacaggcgggagatggcggggagggtgtgggtcccggagacgtgggggcaggagaagctgctcaaggactgggtggactgcgccgtcttcgaccgccccatggtgccgatggggctgctgacggcgcgccgagcgctcatcgccgagtgctgcacacgccgcccggaccgagcggcgtcgtcgtcgtcttccaccagcagctccaacccgctccgggtgcggaacggctgctcctgatcgggtgctctcctctccttcagacctccgcctcccatcagcgagctaggctgaatcagcaagccttctttt

SEQ ID NO: 316388 - DNA, 436 bp, Zea mays
aagaaagcacaatagtgtaccaacaatggcagccaaaatattttgcctccttatgctccttggtctttctgcaagtgctgctacggcgaccattttcccgcaatgctcgcaagctcctatagcttcccttcttcccccgtacctctcaccagcggtgtcttcggtatgtgaaaacccaattcttcaaccctacaggatccaacaggcaatcgcagctggcatcttacctttatcacccttgttcctccaacaatcatcagccctattacaacagttacctttggtgcatttattggcacaaaacatcagggcacaacaactacaacaacttgtgctagcaaaccttgctgcctactctcagcaacagcagtttcttccattcaaacacactaaggtcaattgaactcggcttcttatttgcaacaacaacaactac

SEQ ID NO: 316389 - DNA, 429 bp, Zea mays
acccacgcgtccgccccgcttctcggaagctcatcagccatggacgacgccgcgggagaggaagaagcttcgatgttcgagaccagccatgtccttggcgccctgctggcctcctcgccgctgctggcgtccgcctgggaccgctgtacgaccgccacagccgcggcgcccgggttcgtgcacggagaggacggcggcaaggtgtacgtggggttctccggggtgcaggccgcgctgtctgcggcaggcgcggcggtggccggtggtggcgccgacgtcttcgcgccggtggggctcggcggggacgcggcggggcggatgttcgcgccgctgctcgcggccgagcccgactcgtccgctgctggggagccggttgccgttcagggccctggccctgcattgcttcttgaaactctgcggtaaccctga

SEQ ID NO: 316390 - DNA, 401 bp, Zea mays
acggacgcatgggcggacgcgtggggaagaccggcaacaagcagcatttctgaaagcatgagggctccaaacatatttcggctccaaatcaaaaggtttctcagccacaaaatgaattaggtcttcagatattaagatatcaatgaataattttgaatcagacttcactattgttccgatgggtctcactgctgtaccttttaactgaaatcttctgctgtttctcagacatgatatggcagcatgaggagttgttttatcagttagcatatatgcatgtggttcaaaaattgaaatatgtccttttgttctcaggatgaacacttttactgattgtttaagttggaactattagtagccaaaaaaaaaaaaaaaaaaaaaaaaaaaaaaaaccccaaaaa

SEQ ID NO: 316391 - DNA, 420 bp, Zea mays
gaccgacccgtccacggacgagtgggaaaaaaaaaaaaaaaaaaaaaaaaaaaaaaaaaaaaaaaaaaaaaaaaaaaaaaaaaaaaaaaaaaaaaaaaaaaaaaaaaaaaaaaaaaaaaaaaaaaaaaaaaaaaaaaagggaaaaaaaaaaaaaagttaaaaaaagggggggcccctcaaggggttttaatttttcttcccctttcttgcaattttttatttcttttaaattttccccaaatttcatttcaggggccttctttttaaaacttcttgccgggaaaacccttgggtttccccaatttaacccctttgcataaattccccttttccccattgggtttattttcaaaaaggccccccctttttgcccttcccaaaattttccccccttaattgggattttggaccccccttttt

SEQ ID NO: 316392 - DNA, 397 bp, Zea mays
acccacgcgtccgggaggttggcaggttacagcaggacagaatggtcattgggtcagccaggtctttcaggatttcagccacctcactgccagttctaagtgtgtatggacaacgaagggagaacaactctgacgatgacagtgcatcatcctaggacagcaaggctgagggacaaatcaccaagtcacaaaactgaattttggatggagcacagcacatcagctatgccatttttagctgctgaagcggatgtcgcattggcatttgccccgaggcacatgtttaaggttgggaggacgaaggtcgggagggggtggtatacttttggatcctgtggaaattctttttgtacaaaaggaaaataatcgtaacaggttctctctcttgttgggtgac

SEQ ID NO: 316393 - DNA, 345 bp, Zea mays
gatccaggcctccagatccttgcagacttggcttttgtcttttcttttctttttcttaccttgccgtaccctagctatagaggaattgtgtattgtctgggggcatatagtttgagattttgttttgtgccacacctgtgttactagtataagctttggtacaaaggaataccgaggcctaagctcacatctactacatgaatggtgtaatattgttgaagatagaaagcatctaatgttcggtggttttggctatggtttcggttattacgacacaagattattgtgacaaaaagtgtgttttgagagataatagagctcatatctagtacattttgaaataaa

SEQ ID NO: 316394 - DNA, 364 bp, Zea mays
ttccagggccgacacatgcgtccgcgacagaacataggatgatagaacatgtcacaggcagactactattgctctcttaataagtattatatattatagtttaggatttaacggtggtaactagtggttcattatggattttccaaataccaaactgtttttttaatgtcacgctaaagtactagcacacttataatcctaagaaacaatatataaatacaattgaattttattactctgatccacattatgtcgctttagaatcagtgacttagaggtggaacgcatatgattcagtttagcttttatgagatgaggatatacgtgacaactcacttttgagtcgtttgggatgacccgttct

SEQ ID NO: 316395 - DNA, 362 bp, Zea mays
acccacgcgtccgataaggaaaccggatctgttgttcgcctatcaaaagctgcgcagcctactgttcttcaatcaactaaacgacttgccctctatcaagcagcaggagatcaggacatcttcctcaaaagaacagccctgcttctctggtaggaacgcagaagctgttcaactgcaggatactaatcactccctgtcagatatgatcaacatccgcaaagcttagaaaaagcatacgaagttcacagatcagtttgtaacctgtaatccggtaatgatacataatgaaggttcagatattggtgatgaatacaggctgttcaacagtaaaacgaactccaatgctatcatggttcatagca

SEQ ID NO: 316396 - DNA, 396 bp, Zea mays
attcaagggccgaccgacccgtccaagctgaagttgaagctgaagctatgagctctttcaggattgatgatgacctcggggttaaccctgatttgaaccaaatctcttcaaatttgcatgggttgggatcttcaagtacccgtgttgagattggtggacatgaccgcaccccggcatcttcagaacagcgagcggagagtcatggaaggaagcgtaagcaaagtcagattgctggggttcttgaggaatatttggattacaaaaggcaacataatgataagttgcttgatgtggtaaatcagattgatcaacaagctgagggatgtaacaagaaggaagaatattgtattggaaagtgtgttcgtgtgttagagtcgatggaagatataactgaag

SEQ ID NO: 316397 - DNA, 367 bp, Zea mays
ccttccccgcccacggcctcggggaagggagctccggcacggaccactggtggaactccgggagctcccttccccgcccacggcctcggggctccactggcagggcggcccgcgccacggcgcggccaccaccaccgacgtggccgccgtgttcgtgccggacatctcgtccccggagaaccccttctggtgctacgccaccgccgctggccagccgccgacgaagcgccgcaggagatgttgaagtagggaagatcgagattgtcttgttcagtactggagtggcgtaggcttgcaagaaacaaacacagttgctgtactgtgtactcccatggtgacgtactatctatatactccatgtcgcagc

SEQ ID NO: 316398 - DNA, 404 bp, Zea mays
acggacgcatgggtccgactatggaggttgaccctaggcgtttggttagaaaaactcacaaaggagagttccaagttgaagttgaagagccagatggtttctcagtggaggttgaacttgggagtaatgttactaacattccatcaaaagctgttgaagatcagacaaagtctaatggaacagatggtaaagtagatgttgaagaaaaggacaaagcatctgatagcgcttcacacaatgaggatggcagaacaggcaacaatggtataccaggtgatgtagaatgtatcgataatgagaaagctgatctcatgcaggaacttatcttggatgatgtgaaggacactgtaaatctcccaccaattccttcgttagatgaattcatgcagggcttagattctgag

SEQ ID NO: 316399 - DNA, 125 bp, Zea mays
ttcccggtctgaaacacgcgtccgaaaaaaaaaaaaaaaaaaaaaaaaaaaaaaaaaaaaaaaaaaaaaaaagggaggacgcacaaaaggataaaaagcttacataaacatgaaagcaaaagtca

SEQ ID NO: 316400 - DNA, 385 bp, Zea mays
aaatgacatctggtgcacataccaacttcattttgccttggacactattataatggaggatgactgtacaatctttactggatccacagtatcgtgaacagctgcaatcatctacttttgttattttgactggtatttctagtttatgtatcatcacatgtcagcattgccatgtagccacattggaatttattcatatatgaaaatttgaacataggctttcatcacttcttatatcacatggttgattcacttgtaccatcttttgctggttattttctgtactaaccccaatcaagtttacaaggtactgttctttctcataattttttaatttaaatgcagcctgttcaagaagaaacaaagaaggatattacagataaag

SEQ ID NO: 316401 - DNA, 384 bp, Zea mays
acatagaaagtggaatacagtagcaacaatagagcaacaatggcggccaagatattttccatccttatgctccttgctctttctgcatgtgttgctaacgcgaccatttttcctcaatactcacaagctcctatagctgcccttcttcccccataccttccatcaatgaccgcttcagtatgtgaaaacccagcccttcaaccctacaggctccaacaagcaatcgcaacaagcaacttacctttatcacccctgttctttcaacaatcgccagccctatctttggtgcagtcattggtacaaaccatcagggcacaacagctgcagcaactcgtgctaccagtgatcagccaagtagctctggcaaacctttctccctactct

SEQ ID NO: 316402 - DNA, 320 bp, Zea mays
tacccacgcgtctgataaaaaaaaaaaaaaaaaaaaaaaaaaaaaaaaaaaaaaaaaaaaaaaaaaaaaaaaaaaaaaaaaaaaaaaaaaaaaaaaaaaaaaaaaaaaaaaaaaaaaaaaaaaaaaaaaaaaaaaaaaaaaaaaaaggatggggggccgcttcaatgggttcaaactttattttcccttaaaggtaatttattttcttttttattttttaacttaatttcatttcatgggctttcttttaaaaattttgggaagggaaaacccttgttttaaccaaatttattccctttgaaacaattttccttttccca

SEQ ID NO: 316403 - DNA, 426 bp, Zea mays
agggtggagcagcatctgctccagctccggcgccaccccgaccggcaccgtcctccggcgctcgccgccgccgtcgctgtccaggaaccgcacggtccgcttcggctggccccgcgtggacggcgtctcgctgaggcaggagcgcgagcaggaggacgccgacggcggcgcgcgcctgccgctgaagatggcgttgaggaaccccgccagccgcgcgccggggccgggggacgccggcttgcggcggaggtccctcagcctggcgcggatgctgacgccggccttcttcttctccggcgcgagtgcgggcgcggccacggccaccgcggtggtggcgaggctcgtgcgtatgggccgcaggcgccggtgctgcgacgactccgcctccgacgacgagaacccgccgtagctggagcactgatcggg

SEQ ID NO: 316404 - DNA, 326 bp, Zea mays
acccacgcgtcaagtccttgagtcagtcagacagtccgccagaagagctggtacaatggacgaccttggccacaaggatagttcatctgaagtgtcctacgagtactgtgtaggggtgggcacgtggctggagtgcgacggctagatcgagacatacttcagggtgatagtttctcacatggtttagcctgcgtgccaccccgcaggagacaaacatagtccctgtctatctggatacccttagtgcccgaccctgtcaggctttctggccagctcgttcacagcttctcggacgtcgtctataccataaacaggcacgccttctg

SEQ ID NO: 316405 - DNA, 373 bp, Zea mays
gacccgacccgtccgaaaaaaaaaaaaaaaaaaaaaaaaaaaaaaaaaaaaaaaaaaaaaaaaaaaaaaaaaaaaaaaataaaaaaaataaataaaaaaaaaaaaaaaaataaaaaaaataaaaaagaaaaaaatttaattaaattaaaaaaaaaataattttaaaaatttaaaaaatggaaaaaaaaaaaaattaaaaaaaaagggggggccctccaaagggtttccctttttttttccggttttatgaattttaaggcccttttaaattgccccccaaattaatttcctgggcgctttttttaaaaggttttctcggggaaaccccttgtttttccccatttttatcctttttaaaaaaacccttttttcc

SEQ ID NO: 316406 - DNA, 427 bp, Zea mays
aacccacgcgtccgcccacgcgtccgggagaggctccgctcccgtctcgccgcgcctcgctagtctcggggcagcggcgctggcgctgctagtggcggcggcgctgccttccccagcagctggggtcaacgcgacggcggtgctctcggcgttccccaacttcgccgacttcgcgcggctgctggcatccactcccgtggccagcgagctggccgggaggtcgtccctgacgctcctggccgtgccgaacgccaacctgccgcagtcaccttcggctttcgtagccggcgccgccgccggcgccgacatcgccgacgtgctgaggtaccacgtcctgctggagtacctctccccgtccgacctcgcccgccttcccccctcccgggaagctcgtgacgacgctgttccagaccacgggccgtgcgcc

SEQ ID NO: 316407 - DNA, 246 bp, Zea mays
agaaaaaaaaaaaaaaaaaaaaaaaaaaaaaaaaaaaaaaaaaaaaaaaaaaaaaaaaaaaaaaaaaaaaaaaaatgggaggcccatcaaagggaatacaaccttccttaagcgtgaaagcaacgatctttaattcttcgtcagtggcacttaattttcagttgactggccgtggttttaccctgtccttgccggggtaaaccctgttgttacccaccttacttgccttgcatcagatcccccttt

SEQ ID NO: 316408 - DNA, 102 bp, Zea mays
gaccgacccgtccacccacgcatccgcccacgcgtccgcccacgcgtccgcccacgcgtccgaaacaaagccatataaatcaaataccaataaaaatacaaa

SEQ ID NO: 316409 - DNA, 309 bp, Zea mays
acccacgcgtccgccctcttttagattgcttattagttgtaattcaataataaagttttttggatgatgtatgtggccaaccagaaataagaagttacatttccaaaaaaaaaaaaaaaaaaaaaaaaaaaaaaaaaaaaaaaaaaaaaaaaaaaaaaaaaaaaaaaaaaaaaaaaaaaaaaaaaaaaaaaaaaaaaaaaaaaaaaaaaaaaaaaaaaaaaaaaaaaaaaaaaaaggggggggcccccaaaaggattcaacccaaatttcccgttaaaggaaatttaaacccctccaaaagggccccca

SEQ ID NO: 316410 - DNA, 415 bp, Zea mays
accaagatacaggacaaggagggcatccctccggaccagcagcggctcatttttgccggcaagcagctcgaggacgggcgcacgctggccgactacaacattcagaaggagagcaccctccacttggtgctgcgtctcagaggtggcatgcagatcttcgtgaagacacttactggcaagacgatcacccttgaggtggagtcctcagacaccattgacaacgtcaaggccaagatccaggacaaggagggcattccaccggaccagcagcggctgatcttcgccggcaagcagctggaggatggtcgcaccttggctgactacaacatccagaaggagagcaccctccacctggtgctccgcctcaggggtggtatgcagatttttgtgaagacattgactggcaagaccatca

SEQ ID NO: 316411 - DNA, 392 bp, Zea mays
acccacgcgtccggtggcggcgcactgccggacgtgcccgggcggcgcgtacctgtgcggggggtgcgacgcggggcacgcgcgggcggggcacgagcgggtgtgggtctgcgaggtgtgcgagtgcgcgccggccgccgtgacgtgccgcgccgacgccgccgcgctctgcgccgcgtgcgacgccgacatccacgacgccaacccgctggcgcgccgccacgagcgcgtccccgtgcagcccatcggcgccgccgctgatcccgccgcggagaaggcggcgctgctgttcggccttgccgcggaagggaaggacggcggcgacgcggccaaggtcgtcgtcgacgccagtaagctggacctcctgttcccggacgacgtggtcgaaccgt

SEQ ID NO: 316412 - DNA, 399 bp, Zea mays
acgggccgatccacgcgtcaacccacgcgtccgtgatacttatattcttgatttgttacaattatatgacatgcttccagattcaggttgcctactttttggaatcattgctgcttaaaggtactctgaataaggcatgctcattttaagttagcctagcgtgtcactatggagtttcttcatgatgtcaccaatgccatgatgttgtcatcagtaacaacatgtgtcaaatgtcttacaaacttgttcagactgaagttcaagttcaccaaccatgagaccattatggtgaaggtgttgccactaacttgcagtaggtactatacgagtttttaaaggtagacctacagatgattgttttcagcattgacacattttgtatagttaaaacatgcattc

SEQ ID NO: 316413 - DNA, 349 bp, Zea mays
ctcggcaggcattttgtccacgtacctatctacctacaactatatcaagagaggaggacgcctcacattcagtcgccttgggcaacttctactgtcctgaacacgaggttccggatttaccatccatcatcagtcaaacatattgtcgcattcaatgcaacctgggttagttgtctgtgtttgtactgataagcgctgatatcatgggaaaacatctggtatagatgattccttcactcgtctctaagactctatatgtgagccgtatgatccatcctagcgtagcacctgtacgtctgattgcgttcaattcaactgctatagggtgatttcgacagaatttcgtact

SEQ ID NO: 316414 - DNA, 173 bp, Zea mays
ttactatcagaaggtggatgagagctcagatgaggtgaggtcagtcgcgaaggcatgcttcatccgtcatcgatgcggcctcaagtagcaggtcttcattggagaagtacaaggatgtcgagatgtgtttcacacggggattcaatgaacatcatgacgatcatggtcacgat

SEQ ID NO: 316415 - DNA, 317 bp, Zea mays
cgtccacggacgcatgggtgcagcaaatatccttctaaatcccttactggagctggtcgaggacatagttggttatgcaaaacctggtggaataattgctgtttctggaatattggaggagcaggtgccaaaaatcaaagaagtttactcgaggtatttggacagaatattggtatccgaaatggatgggtgggcctgtcttcagggaaccaggagagtgtagaggaattaagtatttcaccacgttgaagaagggttttgaccttacatgttttgacgattaagagaggattaggtatatacccgtgcgttgcaac

SEQ ID NO: 316416 - DNA, 324 bp, Zea mays
gctgcaacgatgcaggtcactttcaccatccgccgctgcggcatcttcatgaaggtttaagagctctccgtgctgtgctataccgacgtcgcgctcatcctcgtctcctccacggggaatcgctcgtaattatccaactgcaatatggatgagataattgacaactacttcacacattgctattttcgtgcgggacaacagagcagacttcgctggactttaacttatagcatagcatatatgtaaatttgaatgaccagcttgcggtaccaagccttcgactcatgcagattaaaggtgtagaacttgatggatttaatgttg

SEQ ID NO: 316417 - DNA, 419 bp, Zea mays
gggccgacccacgcgtcagcaaaacatcagggcacaacaactacaacaactcgtgctagcaaaccttgctgcctactctcagcaacagcagtttctgccattcaaccaactagctgcattgaactctgctgcttatttgcaacaacaacaactactaccattcagccagctagctgctgcctaccaccagcaatttcttccattcaaccaactggcagcattgaactctcctgcttatgtacaacaacaactactaccattcagccagctagctgctgtgagccctgctgccttcttgacacagcaacagttgttgccgttctacctgcacgctgcgcctaacgttggcaccctcttacaactgcaacaattgctgccattcaaccaacatgctttgacaaacccaacaacgttctacc

SEQ ID NO: 316418 - DNA, 428 bp, Zea mays
gtccaaaccttgctgcatactctcagcaacatcagtttcttccattcaaccaactggctgcattgaactctgctgcttatttgcaacaacaattaccattcagccagctagttgctgcctacccccagcaatttcttccattcaaccaactagcagcattgaactctgctgcttatttacagcagcaacaactactaccattcagccagctagctgatgtgagccctgctgccttcttgacacaacaacagttgttgccgttctacctgcacgctatgcctaacgctggcaccctcttacaactgcaacaattgctgccattcaaccaacttgctttgacaaactcaacagtgttctaccaacaacccatcattggtggtgccctcttttagattgcttatgagttatagttcaataatgaagttttt

SEQ ID NO: 316419 - DNA, 290 bp, Zea mays
acggccgcccttttttttctttgcgtgtcctttttgttcagaacatccaccctccaagtacgagtttcttggtaagggcttcaatacacggccacttttttttaattagcagggcaccagcttcgcgagttaaaaaaatgagcagcctacaagtcacgcacgtgtcactggtactggtagtagaacacacccggcacagatggggaaataaacctgtggcagcaaccacgagtttcactggaaatctctcctaggcctgctgagcctggctcggttttcgaactaccttt

SEQ ID NO: 316420 - DNA, 406 bp, Zea mays
acccacgcgtccgacgacaccgcgttcagccgctctagaaccctagctccccgccccgcgagatggccactgccgacggcgagccccagcccgtggccaccgaccccgcccaggtccaggctccggctccggcaccggcaccctacccctccccggccaagcgcaagcccgaggcggatgcggaagccgacgccaacctcgcgccccctaaagccgcgcgtcccgacgtcgacgaggaggccgccgctatggccgaggctgccaaggccagtgctcgcgcggctgacaagggtaagggcaagatggtagtcgaggaggaggaggaggaggaggaagacgacagcgaggagagcagcgacgacgacgagggcggcggccgcggcagcagcagcgatgacgacgagct

SEQ ID NO: 316421 - DNA, 305 bp, Zea mays
acatagaaagtggaatcagtagcaacaataaaagaacaaatggcgaccaaagatattttccctcctttaggcccttgctcttttcaaatgtgttgctaacgcgacaattttccctcaatgctcacaagctcctatagcttcccttcttcccccataccttccatcaattatagcttcaatatgtgaaaacccagctcttcaaccatataggcttcaacaagcaatcgcagcaagcaacatacctttatcgcccttgttgtttcaacaatcgccagccctatctttggtgcagtcattggtacaaa

SEQ ID NO: 316422 - DNA, 360 bp, Zea mays
aacgtcagaaaaaaaaaaaaaaaaaaaaaaaaaaaaaaaaaaaaaagaaagacgaacaaataagataaaaacttaagtaaacataaaaagtaaaaaaataaatcttcaaaaaaaaaacaaaaaattcaattcggggggcgtcccataaagattctacattaatgtgaccgtcatggagttatcaaacttattcaacttgcacaccaaattccatttcactaggtggtctttttaaacattctgaacggaaaaatcctggttctaaccaattttaacccctttgtagcaaatcccactttcccaatatcggtttatatgacaaaggcgttgtcgtttgtcctttcaaaatatttgctaaac

SEQ ID NO: 316423 - DNA, 407 bp, Zea mays
cccacgcgtccggcttcagcgtttttcgcgttattatttacataatgtgacgatcaactggtgcccagccaaaagagcgattgaagacttgatcatcaattcttcggattagcctgcttctcgtcctccagcatccttcttggcatctctttctggagcagcgcccacgagttcaacgaaaaacaacattgaatgaagatattagcgacattgatgacattctttccattaaaacaattatcatttctgattttccagattgtccataaaactgcactacagccagatgtcaaacatctctttagcatttcttggaaaggatggagagttcttcggattaactgattttttttgaggccacacaatcagtttaattcttcggattaactgattttccagattaactg

SEQ ID NO: 316424 - DNA, 301 bp, Zea mays
gtccgactagttctctatcgccagcggtgcccttttttttttttattagcttaattgcatgcatgcagcatgagatatactagcagtgatggatcgtcacacgctgcagaccctgtcaccgattcttaaactgcagacgatagaacttacatccatgcactagtggtagagatcctcatacctgacgatgtatgctctgatgtacttctacaaactcgcgtgtttagcgctacgggccatcctgttgtcaacgtttcagcgatgttggacatttttggtatgttaccacgctatactgtca

SEQ ID NO: 316425 - DNA, 99 bp, Zea mays
agaaaaaaaaaaaaaaaaaaaaaaaaaaaaaaaaaaaaaaaaaaaaaaaaaaaaaaaaaaaaaaaaaaaaaagggcggccgctcaaataggtctaaagt

SEQ ID NO: 316426 - DNA, 414 bp, Zea mays
aaggcaaagggagtggcagtggcagtggcaatgacacatatgtcagactgcttgctgcaaacatgacaccgcgacaagcacagctaaagaaatatagagagaaaaagaaagaccggaactttgggaagaaggtgcggtaccagagcataaagaggctagccgaccagcggccacgggttcatggacagttcgtcaagcaagctgtgcaaaatcaggacggagctacagagagatgaccgacatcccccctcccctgtggctgtgctgctcactggcttcaactccctactgactccgactccacctctgctggcatgcatggttgccgctttggactcaaaacacttgacagttagacatgcggttgataattcttccgtctctcgtggtgtggactgatatggtcgacaacac

SEQ ID NO: 316427 - DNA, 422 bp, Zea mays
  unsure (1)..(422): unsure at all n locations
gggccgagccacgcgtccacgacatgtttcattgattcttgaagagatcaagctccttttgccacaacaaggtcaaggatttcttgcaactgcggttcaacctgcggctgcggctcaagctgcaagtgcggcaagaagtaccctgacctgaaggagacgagcaccgccgcgcaggccaccgtcgtcctcggcgtggccccggagaagaaggccgcgcccgagttcgtcgaggccgcggcggagtccggcgaggccgcncacggctgcagctgcggtggcaactgcaagtgcgacccctgcaactgctgatcacatcgatcgacgaccatggatatgattattatctatctagcttgtggtggtggttgaacaataataagcgaggccgagctggctgccatacatagggtatgtgtggtgtg

SEQ ID NO: 316428 - DNA, 310 bp, Zea mays
agcaaacattgaaaccttaagtttgtcttccagtccatatcagctcaccagccaatcgtgctggtcaacatatctgccgtgttgcaatgcatgaatggtccgagcgcagcgaaggctgacgattgaccggaaggtacattacctaaaagcgatgtcacgggtagagatcgtttgattattatcatctgtatatccccatgcatggggtttcgttttgtgcgcgtaattctggcttgccagcgtatggttcactgtgggaacatatgtactaggatgacagtacgtgaaaattcagatcacgattcaacaa

SEQ ID NO: 316429 - DNA, 420 bp, Zea mays
gacccacgcgtcagcgttaaatcaaaaatcaaaaaacagaaaaagaaaagaaaacatcataaaaaaaaaaaatgaatccaatcggaatcattgaaagctttgttcctatgcatcgaaccaattggtttctgtcgatccagtctttggcattaatgccactccacagactttccctcatatttgtgcgggctttgctcgggggttgcagtgcgactgtaaccacaatacgtccaggtcattcaccaggtgcgtcttcatccttctcgagcattcttttttccacgttgttgttttcctctgccatctgtggaaccgcctggctctcatcatcttactggccatcaggtgaatgtcccactcctattgatccgtatcactatacctgtgcacatggtttccaccgaacgattataagctctc

SEQ ID NO: 316430 - DNA, 393 bp, Zea mays
gggccgagccacgcgtccacccacacgtccgcccacgcgtccggccacatcccaggccgccgagatgcagctcaaggtcggttgggccccctggttgaaggaacaggccaactacctaagacacaatcggatcctctgctcaaatctagattcccttacttcgagcaaccacccgctgctccaggatgcctcagccaccaacaactcgcccaccaagtactcgacagaatgcttcagccatgacatcgtcctgttgaggactatcagtgctgcacccacaagcgaagaccgcgcgctgcagcagaggcgccacgagtgcctcgtcacgcggcccgagttggcgaggattggcggacggaactacatcatgctcgagcatcaccccaacaggat

SEQ ID NO: 316431 - DNA, 210 bp, Zea mays
ggtcgagggacgagtcagccgacgcgtcagccgtcgcctgaggcgatcgggtgacccctcgggatgattcagcggtaaaggattaggctgatactgtcgatgaagatgtatctagagcagatctcgtgataaatgtggtgagactgatgtctgccacaacaccaacactttcttacgggacatagtcgcgtttcatgagatgcagtggat

SEQ ID NO: 316432 - DNA, 348 bp, Zea mays
acccaagcgtccgggatgtgcatacagctgtgcatccaagttggagtcgacaccccaatggacccgcagcaagatctcctgctagatctcttgtactccatgctccagtcgcagcgacatgttcactgacatggcatgactcatgcgcccaatgattcgctgaaggttactcgcgacatgctttgccgcaagtttgggcctagcagatggtgatgcaacctcagactcaacatcatcttcatcagatcatactactgatactgatggaactactactggtgatctacctgcacatctgccttctccagagccgtgctctgatcatttagatgctcctttggcagattc

SEQ ID NO: 316433 - DNA, 423 bp, Zea mays
acccacgcgtccggctttatctactccagagcgcagaagaacccgatcgacaccatgagggtgttgctcgttgccctcgctctcctggctctcgctgcgagcgccacctccacgcatacaagcggcagctgcggctgccagccaccgccgccggttcatctaccgccgccggtgcatctgccacctccggttcacctgccacctcctgtgcatctcccaccgccggtccacctgccgccgccggtccacctgccaccgccggtccatgtgccgccgccggttcatctgccgccgccaccatgccactaccctactcaaccgccccggcctcagcctcatccccagccacacccatgcccgtgccaacagccgcatccaagcccgtgccagctgcagggaacctgcggcgttggcagcaccccg

SEQ ID NO: 316434 - DNA, 405 bp, Zea mays
aaaagcacaatagtgtaccaacaatggcagccaaaatattttgcttccttatgctccttggtctttctgcaagtgttgctaccgcaaccattttcccacaatgctcacaagctcctatagcttcccttcttcccccatacctctcaccagcggtgtcttcaatgtgtgaaaacccaattgttcaaccctacaggatccaacaggcaatcgcaacaggcatcttaccattatcacccttgttcctccaacaaccgtcagccctattacagcagttacctttggtccatttggtggcacaaaacatcagggcacaacaactacaacaacttgtgctagcaaaccttgctgcatactctcagcaacatcagtttcttccattcaaccaactggctgcattgaactccg

SEQ ID NO: 316435 - DNA, 382 bp, Zea mays
acccacgcgtccgggacaaaacgagcaagcagtcacatcaataggccaaaggtgacaaggcaatgcacaagagcagcgctgtcgattggtagaggcccgggaacagcgaagcacgagaaagaagggcagcacagaagccagctcatgaaaaatagaggttcagaaacagcaatccatgaggaggtagcagagcaacacagctcagtagaaacgagccgtgaggaagcaggattattccaagaacagacctcagatacaagtcacaaagaagaagaagaagaagaaggagaaggagaagaagaagaagaagaagaagaagaagaagaagaagaagaatgtactagtgaagtaggagcgggtaaacacagctcagtaggaacga

SEQ ID NO: 316436 - DNA, 209 bp, Zea mays
ctcccgctgctggccgcgggccccgccgtcgtccgtggccgccgacagcgcgcccagctcctccagcttggacagtaggcccagccgctccatcgccgacagcgacagccccgcgcgctccgccgccgacagcaggcccgcgcgctccgccttggtcaccagccgcagcatcaccaggggcgtcagcaacgtaaagggagctatggaga

SEQ ID NO: 316437 - DNA, 308 bp, Zea mays
agaaaaaaaaaaaaaaaaaaaaaaaaaaaaaaaggggaaaaaacaaaaaagataaaaaattaaatatacataaaaaaaaaaataaaagggctcctatacaagtagatggggggctgatctcagggttcctgttttaacaaagcttttctgtgatgtcactgaccttcaattcattaacctccttttaatacattgccctttgtttaaaaccggcgttatcgaaaaaaccccgacttttatcactttcccctttttgcacaaattctccctttcaaaaggtgcgctctgtttcactgcgccaaaagttt

SEQ ID NO: 316438 - DNA, 168 bp, Zea mays
agaaaaaaaaaaaaaaaaaaaaaaaaaaaaaaaaaaaaaaaaaaaaaaaaaaaaaaaagaaaaaaaggaatgaagaacaaataagttataatgttgtatagtcttgaaggtgttcgttataggccttctaggttgtttccattggttcgtttttttggtttgtctttt

SEQ ID NO: 316439 - DNA, 372 bp, Zea mays
acatagaaagtggaatccagtagcaacaatagagcaacaatggcgaccaagatattttccctccttatgctccttgctctttctacatgtgttgctaacgcgacaattttccctcaatgctcacaagctcctatagcttcccttcttcccccataccttccatcaattatagcttcaatatgtgaaaacccagctcttcaaccatataggcttcaacaagcaatcgcagcaagcaacatacctttatcgcccttgttgtttcaacaatcgccagccctatctttggtgcagtcattggtacaaaccatcagggcacaacagctgcagcaactcgtgctacctctgattaaccaagtagctctgggaaacctt

SEQ ID NO: 316440 - DNA, 141 bp, Zea mays
acggacgcgtgggaaaaaaaaaaaaaaaaaaaaaaaaaaaaaaaaaaaaaaaaaaaaaaaaaaaattaaaaatataacaaactaatataaacgttcattaaaaatgttaaaatctttaaaattgacttcaaaaaagggggt

SEQ ID NO: 316441 - DNA, 427 bp, Zea mays
agcccacgcgtccgcacaggttttctatagttgtccgcattttggcagtaaacttgcagacatgccatggcgtatgggtttagtgtttcgtcctgctccttcgattggggagttaagaagtgggtctccaagactagttgaactgaacgattttgtgcgtcaacgacacaacaaaggatttcttgatgttcttagttttagtgaggtagtaacattcgtactgccaagttccactgccacaatgctaagttatagtatatgctaattggttcctgacagacccaggtcacaccgattgttgaaggatatggcggttgggcacttcgtatggagatagtgccaattgaatctgcatacccaggctttggggagcttgtcgtaagtatttttcacaactcattgtaccattgggtagtgcacatggaat

SEQ ID NO: 316442 - DNA, 292 bp, Zea mays
aggccacgcatccggtcaagcatagggaagggtcttgtgtagtacgtctttgggttcctcctcctcgtcttgatgctcctggctaatgtctgtgcggatgtttccctgattctaacgtatatgcaccagtgtgttgaggattggaagtcatggtggaaatcaggcttcgcagcaggataggtggcaatctacactatcatgtaccccagcaacgatcttgtattcgacctcaagagcttgactgggcaactgtatgctagcctctacatcggtaacgcaatcgtcatggtga

SEQ ID NO: 316443 - DNA, 223 bp, Zea mays
gacgcacgcgtccacccacgacgtccgcccacgcgtccgcccacgcgtccgcggacgcgtgggaaaaaaaattaaaaaaaataaaagaaaaaagttataaatataaaatgaattaaaggttaacccgcaaaaaggattaaagcttagttatacttgcaggcgaagtcaaaaatcataaaggggggtcccccaaaaggttcaaactttactttccctttaaagc

SEQ ID NO: 316444 - DNA, 407 bp, Zea mays
acccaagcgtccgcccacgcgtccgcccacgcgtccgtcattactaggataatatcatgaatgattttggcgagtcacaaatatatattgagaacctatacttaccccatttgtgtacaacttcaatttgaactcaattattcatatgttgtattatgttttatcacaactaatgtttagttatatgcaacattactcttataaaaatagtctgtgtctatacaattataattatttatatttgacactaattgtgtaagataaatcactgaagggaacaaaaggccagagccacgtattcaagctgctaagtttgcatgagagggtggtattcacgttttgtaagttcttattccctgttttttctctgcaatttcttttttgtaagcctgcaactggtctttaaa

SEQ ID NO: 316445 - DNA, 406 bp, Zea mays
agctcgactccaaggtcatcaccgaccgggagacggggaggtctcgcggcttcggcttcgttaccttctcctccgagaactccatgctcgacgctatcgagaacatgaacggcaaggagctcgacggccgtaacatcaccgttaaccaggcccagtcccgtggcggtggcggtggcggcggtggctacggcggcggtcgcggcggcggcggctatggtggcgggcgccgtgacggcggttatggcggcggtggcggctacggcggtcggcgcgagggtggtggcggcggctacggaggccgtggcggctacggcggtcggcgcgagggtggtggtggcggctacggcggcggcggcggcggctggagggactgatgtgtgggcccatcctggcttcggccgagtta

SEQ ID NO: 316446 - DNA, 133 bp, Zea mays
gacgcacgcgtccatttttatttttttttttttttttttttttttttatattgtgttattttcatatgaatacttttgggatcttatttttatttggaatttttttaataacattccaatttcgagaggaggt

SEQ ID NO: 316447 - DNA, 403 bp, Zea mays
cgggccggcccacgcgtccacccaagcgtccgattttttttccagggcagcgtcatgaagattaaggggaacttgcatgtttgatgtacccctgtagcaaaaaattcttgtgataaaatttgttgaattagtcactgtcagggagggatctagttgtcagttgtttgtattaaagctgctggcactttccttgcagggtttctgtagaataaatgggagaaggtaacaattttcaactttatattgtttcttgtggatcaattgactgttgcacctttgcaacatcagagtccgtcattgtagaattgtgcttttctgttaccttcagaattagatgttattatacctgccatgtgtaaacatcagcatggctgcgtgttcctcctggggcctctttgtcatg

SEQ ID NO: 316448 - DNA, 410 bp, Zea mays
aggaaccttatgtgttcttctggcagacatcgcctctattggtggacatctctaaattagcttaaggcgatacatgttatgtccactagagaaacaacatcctgagacactcacctttatttggaaatgtctcgcgattatcgctgatgtggacatgtgttacatgcttctctactcttaaaagtcttttgctccgaatctcgagacgagattattttaaggggggagggctgtaacaccccaggtgtttatattctgctcgacaacgagtatggaattaagcacgttatatcagtgaatgaaacagatactaaaatttaatcattttcgctatcgcgatttttatatcgtatctgttccatctgtcgtgagtgtgacatcatttttattcgtccgggctcttcctgaat

SEQ ID NO: 316449 - DNA, 307 bp, Zea mays
aacgcgactggtgaccggattgaggtgaacccaatcggtcatgcactgggggtgccagtctatcaaatacagaagtttggggtgccccccaagcggggtactgcggcatcccatatggatatggtggcatgccccacatttgattttggacatatggtggtggcgggtatgcataatgatacggcatataatggatatggtggtggaggtgtccatgatgttggtggtggtggtgtgaccagtgatctttgatgtcataatgtgatatactctacttccagctgcacctgtgattttttttcaggac

SEQ ID NO: 316450 - DNA, 252 bp, Zea mays
gacccacacgtcaggttacaccgctggcgacttgaaactgcaaatgatgtggtatttttatttgcatcaaagctcaagatttcagagtaggaaagagtggtgtttcagaaacaacagaatacgttgctgttaaaagtgacgctggaacggtttgctgcacttactgtttgtgtgtaaaaatagtgaagttagtggaatgaatgatcctggccagtttctcttaatgaatgattctggccggtttatgttaag

SEQ ID NO: 316451 - DNA, 148 bp, Zea mays
gggaaaaagaatgccaacaataacgtgaagaactatacatcaaaaaaaacaaaacaataaaggacaccataaaaaatgaatgtgaaaaaaaaaattcatcaatttctcaatacaaaaataaacaaaaaataggggggggcccccctag

SEQ ID NO: 316452 - DNA, 225 bp, Zea mays
cgcgtccacggaagcgtgggcggacacgtgggcggacacgtgggcggacgcgtggggttctagatcgcgagcgtgagccctttttttttttttttattgttcatatgttttcttatatggtgtttttgatatatattattttctacttgcctctatattatattttttacaaagaatcaaaatttaacgggaaaatgtttgtcaatacttcactagaaaatttta

SEQ ID NO: 316453 - DNA, 285 bp, Zea mays
cgtccacccacgcgtccgacaaacaaaaaaaaacaaaaaaaaaaaaaaataaaaagaaagttctcagttcattacatagaatgcaaaaagttagtttctgataagggggatccgttcgtgcgggttctaagtattaggtcggtgtgtacgcgtcttcctcgtgctcctacacgtcaccatgtctcaattccagtggcggccgtttattagggtggcccctggaacacccctgggcgctgccaatttactgccctagcagcacagcacccttgctccagttgcggt

SEQ ID NO: 316454 - DNA, 443 bp, Zea mays
gggccgacgcacgcgtccatgcaaaccaaaacaatgtgtggtatcacccatatctttccaaattgtgggaaatggattgcatcaattaatctatgagttttactatattgtgctctaactaaccgagcatctttgttaaacttatattatgtagtacctcacctactcaaattatgtggtgacttgttgcacttgcagctcaattaagaacgttactgatttctagggctacacttatgtttcgttaactgctaaaaatgttgctgatttcataagcaacattgggaagaactatgttgccattatttcaagtctagattctgggaagaggacggtaattgatgcatccagcggggaaagaggggcctttccagccagattcttctttgacgtgccgctgggcatcaccgcgacctccgtcgcatcgccactctcgctagctc

SEQ ID NO: 316455 - DNA, 365 bp, Zea mays
gcgtcaaccggcaaccgccgcgcgcgccttttcctttcaacctaaaatcaatcggcaacctcccccgatcttttacaaaagcagtattcttttgaccaaatacaatttaattatccgggcatgaaaaatgcaattgcaaggtctgagtaattaattaattaattgtaacggtcaaccttgggcgttagtaattgtcagtcgtcctgtctgacgcagacagatagtaactccttaccactagctagcagatcgtttggacacagctgcttgttgtacgtgctacttgttgattctttgaatgacaaacgaatgaatcgatgacagtaactgattctgtctgaaagaaaaaagggccttcccaacca

SEQ ID NO: 316456 - DNA, 346 bp, Zea mays
accacacctccggctgggcaagggaaatatcaaacatgccaaaaataccgtacgggctgggaagcctaatttcaacctttccagtggctcaaatcctggtgttaatccgaccattgaacacaatggcctaaaactggttaaaaaaagggaaaattctggtaggaaatggtcaacaaggggcaagaatccttgggtccaaaaattggatggaccaacaatggtaaaaaaaccccagtttaaccaggaccatataaccattggatttaattggaaccaaaaccggcaaaatttgggccccaaatccaaaaaatgaaccattcaaccctaaaggttaatgggagcaaat

SEQ ID NO: 316457 - DNA, 66 bp, Zea mays
  unsure (1)..(66): unsure at all n locations
tgggcggacgcgtgggaaaaaaanaanaannnnnnnacacaaaantttgttcaaaatcaatctcag

SEQ ID NO: 316458 - DNA, 238 bp, Zea mays
atgatcggacgaccacgaactcgctactgaccgtcggggattctcgggctcttggctcacgcagttctgctccacacgcgcaacccaatgggatatgcatgcacctggcagtttactcactgctgtctactctgtagccaagaacttccgacacaggcgcccagctgtatctgtcgaccgttcacctggtcgatgagcggaagatctaccattcccaatctcaagatgcatgcagtct

SEQ ID NO: 316459 - DNA, 378 bp, Zea mays
aacgtaactttcatcaactcacacatcaaacattatgcctcgcaacggagatggttcgggcaacaagggccccaattgagggtcacaacctacttcagggggcttcaggcgataaaacgctgcaacacaccaagcatgtagcacctatgcccgagcaggaagcacgagatgcccttcccggcatgggcgccggcggtgccgcagcacccatcgccgacgacgcggaacaattcggcgtcaacgagcccaagaaagaccccactgaagaagaggacgaagaacccatcccagaccatctgaagaccgacacctcgtccaagatctccaagaagcgggaccaaccggaccactcagctacctcccccgagcgctctcacc

SEQ ID NO: 316460 - DNA, 414 bp, Zea mays
acccacgcgtccgcccacgcgtccgcggagaccaacggccgtgcgtcctcgctccttgtgcgctgcgttcgcctccatagcttctgcaggttcatccaacaccttatgaccattttttcttcctcagtagcgcaaaccagtatctacgattttccagtctatcgatcttcgcggccgtcaatgtcgccctcgtcctcgctcttctccctaacccagatgatagggagtcagcccgtgcctgaagctggttcatccaacaccttattattgccttttcttcttcctcagtagtgtgtaccggtatctatggttttccaaagtctcgaatatttgccgccgtgaatgtcgccttcgccctcgctcttctccttaacccggacgagaagaagtcagtccatgtcggatctgaatgat

SEQ ID NO: 316461 - DNA, 455 bp, Zea mays
gggccgagccacgcgtccgaccaaacgtccgcaaatggtatggtatgttctgaacaattgtagtcaggttgacaaatatatgaaaaggttcaaaaatgatttacaaagaaatggaatgcctaacattgaaaaaacattgcaaaaaggattccagacttggttcaaaaccaatatcctaagaatgaagaatataaatcaagaagacgctgatgatgatctattttccttggcttgtggtcctgatttcagagttcgaaaatactcctcacgcatagtgaatggtgtgcggtttaacactagtgaccgtgacaagcatcgaaagacacaaaatagtggagtaatgacacaaggtactcataacggtcaagaaattgatttttttttggaaccttaagagagatcattcagttagagcataaccttgatgagagatcagtagttttgtttaaatgtga

SEQ ID NO: 316462 - DNA, 392 bp, Zea mays
accaagcgtccgcccacgcgtcggcacacgcgtcggccacgcgtcagccacgcgtccgatgaggatgcactggagccaccaaggaagcggcggcaaggggttcgggtcgattcccggcggactacgtctcgctcggcgtcagggaacccgtctacgaagtgatagaagtgagatcaaatgggaggatgtccaccatgaaaataaccatgcggcagctactgaaatctagtggtctccgcctacgagatactagaagtgttgacccatcactatggttaatgaattcaatgccttccctgctggtacgtgagcaagctattttactcaatcgtggttcgttgcgagcaattgctatgtatgcgcgtgttcttatattcagctataacagccca

SEQ ID NO: 316463 - DNA, 449 bp, Zea mays
actcatctaaccccattgaaaaatgaaattggattttcgggagaattttggaataaaagataaataaagaattgaatttgaaaaaaaaaaaaaaaaaaaaaaaaaaaaaaaaaaaaaaaaaaaaaaaaaaaaaaaaaaaaaaaaaaaaaaaaaaaaaaaaaaaaaaaaaaaaaaaaaaaaaaaaaaaaaaaaaaaaaaaaaaaaaaaaaaaaaaaaaaaaaaatttcttcaaaatgggggggggaaaaattttttttaaaaagggggggttccccccccttttggggaaaaattttacccccggggtcccccaggggaaaaagggggaaaaaaaaatttcccaaaccccccggggggccccccaaaaaggggaaaacccccaaaaaaaaaatttttttaaaaaattttaaaacttttttttccccccaaaaaaggggggccaaaatttt

SEQ ID NO: 316464 - DNA, 404 bp, Zea mays
aaaaatatccccaaaccctagctcccgatctcgatggcgaaccctcgcgtctccttcaacatgaccgtcggcggcgccccggcgggccggatcgtgatggagctgtacgccaacgaggtgcccaagaccgcggagaacttccgcgcgctgtgcacgggcgagaagggcgtgggcaagtccgggaagccgctccactacaagggctccaccttccaccgcgtcatccccgagttcatgtgccagggcggcgacttcacccgcggcaacggcaccggcggcgagtccatctacggcgagaagttccccgacgagaagttcgtgcgcaagcacaccgcccccggtgtgctctccatggccaacgccgggcccaacaccaacggctcccagttcttcatctgcaccgt

SEQ ID NO: 316465 - DNA, 165 bp, Zea mays
cgcgtccgaccaagcgtccgcggacgcgtgggcgggacgcgttgggctggacccttgggcaggcgcagaataataactggttcagcaatttaaatggccctttaatttcaattaccaactccttcaactgtattaaagaaatatcattcagggcacataccaacg

SEQ ID NO: 316466 - DNA, 369 bp, Zea mays
  unsure (1)..(369): unsure at all n locations
agttactggttcacaattactgaagtattatgcacttagtgtgaaccatctggttcggtaacgttggttggtttcagtgctggttaacatttgcttggtaacattctctagtaaccaaactttgctatttggacagtggaagtttgcatacatttcactcggtcgtcctgactattttgaagattcagatactgtagccctaaaattccagagaaacatgtatggagcttgggagcagtatcttggactggaacatccggacacggctcctaagaaggcacacacggctaatcagaaccggcattcattcgagagacctgtaaaaatttataactaggcatgttaganattgagcgatgagctgccgct

SEQ ID NO: 316467 - DNA, 305 bp, Zea mays
agtttctggagtttgcgcacggcgggtccgaccgcagcgagccggtgccggtcgatcaggcctgcgagcggatcgcgcgcagctatcgcgcggtcgcgccgaacgcgccgacggtccagacgcggctcgatgccgatccgggcttccggctgccgacggcgacgctcgaccggatcctgtcgaacctgctggacaatgcgcatgcgtacggtgcgccgccggtgttcatcgagacggcgcgcacgccggccggctacgtgctgtcggtcagcgacagcggcggcgggattgcgccgcgcgacctc

SEQ ID NO: 316468 - DNA, 395 bp, Zea mays
  unsure (1)..(395): unsure at all n locations
ttggcggcggctgatggcgccaagcgcagccgccgggccgccgtccctggcccggccatcgagcagcagccacctgcggcgcgccggcagcgccctccagcccgtctccgtcccgcgcgccttggtgcaggggcggaggcgcctcacgggcgccgtccgagccgcgccggacgcgccgccggtggtcatggcggccgtcagcgccgtcaccgagctcctcagagccctctcnccgaacaaggcgctcaggggcgctgctacccagcagcagcaggtcgaggagccggagccggatccggacccgacctgcggcagcgtcgaggacgtggtcgccgtgctccgagacgatttacggcgcgcctacttcgtcaccggggatttcactccgggaatat

SEQ ID NO: 316469 - DNA, 271 bp, Zea mays
gggccgagcacgcgtccacccacacgtccgcccacgcgtccgcccaagcgtccgcccaagcgtccgattgggactaaattaacaatattaagggtaatttgggaaacccattttcccctgggattcctaatttccaaaggaaaatgaactaattttcttgggaaaatgaaattcccttgggaaaaatgtggtttccaaactaacctaacccttagagttaatttgtcaactctatttttctaaggaaattcctctcataaggcttggtttc

SEQ ID NO: 316470 - DNA, 447 bp, Zea mays
aggagaccaacaagcaacatagaaagtggaatccagtagcaacaatagagcaacaatggcgaccaagatattttccctccttatgctccttgctctttctgcatgtgttgctaacgcgacaattttccctcaatgctcacaagctcctatagcttcccttcttcccccataccttccatcaatgatagcttcagtatgtgaaaacccagctcttcaaccctataggctccaacaagcaatcgcagcaagcaacatacctttatcacccttgtttcaacaatcgccagccctatctttggtgcagtcattggtacaaaccatcagggcacagcagctgcagcaactcgtgctacctgtgatcaaccaagtagctctggcaaacctttctccctactctcagcaacaacaatttcttccattcaaccaactgtctacattgaaccgtgc

SEQ ID NO: 316471 - DNA, 270 bp, Zea mays
ctttcgtggcataggccacaactgggagccaatcgtattacacgacctgttggaactcacatcacaaagctttgatttgtttacattaaatgtcgactccggcgatcaatagaggtgcttgaaatggcgccggccttgttctgtgatggctccgaaattctatgcgatgtctgagaacaaccttcatgttgtgttcctggagctctcatgcacacagcccaacacgctgcttgtcacggacctgggcataaatggtgtgccaacgttcaa

SEQ ID NO: 316472 - DNA, 406 bp, Zea mays
atgctcatccactcgtgggactgggcgtgccaagcgaccaggaggctcggctgcctcaagaagggcggaggcggcgccgacactaatggcggcgtggcagagcagagcgtggaagagcagagaaaggatatggaatcggcataacatttctttcgcctttttgtcctctctgcctttcaaatttcttccttttttttagggaatttaggtacttcggtcaatctcaatggccattgtttcattttacagtttttaacagtgctacgtcaggtccataagatagttttatcctgcggtttcatagcccatactgaacctttgacagggcgtaaattaatagaggaactagggtagatgattacatgacagtcaactgaactactgcaagaagaaagatatatctccc

SEQ ID NO: 316473 - DNA, 416 bp, Zea mays
gttgtatcgtgtgggttgagttgtgtgttgtgttgtgctgtaccttcttctatctattaatggaaagatacgcagatctcctaaaaaaaaaaaaaaaaaaaaaaaaaagaaaaaaacaaaaaaaagataaaaaaaaaaaaaaaaaaaaaaaaaaaaaaaaaagacaaacgaaaaaataaaaaaaaagacaaaaaaaaaaaggggggctgcccaaaaggatcaaagctaaatacccggtcaattcaaattaaaaccgcttcaaaagagaccccaaagtcgaaataaggggccgccctttaaaaaacacttgacaggaaaaaccctgagatatcccaactaaaccgcgttgaaaaaaatcccccttttaaaagctgaggaaacacaaaaaaggcccgaaccaatcgccattccaaaaa

SEQ ID NO: 316474 - DNA, 437 bp, Zea mays
cccacgcgtccgcggacgcgtgggcttcttttgatcttttgattgtctttgcaagagttgaatgaagtgaaggaaccggtgcatttttattttcgcaaggaaatcgatactctcttaatgggaattgtaagcttaaagctgtggctgtatcaagagatgaagggttcacggatgccagattacatacctaactgactttttttgtggtcggtcctccaaaggtctcatctgtaattgtgaatccaagtgagttgagctcagctcttttgaatactttggtaatccctgccctcttcatcttcccactccagttctgtttcatcagctcatcatgatttatttatcattcctgtgattcattgcacgatcattatcaatttgtttctttatttgcatggacattaactgttacaaaatgccgccttcgccctcctgtg

SEQ ID NO: 316475 - DNA, 405 bp, Zea mays
aatatccccaaaccctagctcccgatctcgatggcgaaccctcgcgtcttcttcgacatgaccgtcggcggcgccccggcgggccggatcgtgatggagctgtacgccaacgaggtgcccaagaccgcggagaacttccgcgcgctgtgcacgggcgagaagggcgtgggcaagtccgggaagccgctccactacaagggctccaccttccaccgcgtcatccccgagttcatgtgccagggcggcgacttcacccgcggcaacggcaccggcggcgagtccatctacggcgagaagttccccgacgagaagttcgtgcgcaagcacaccgcccccggtgtgctctccatggccaacgccgggcccaacaccaacggctcccagttcttcatctgcaccgtcgcg

SEQ ID NO: 316476 - DNA, 246 bp, Zea mays
agcccttcggtgacatcatacgttccggtcaaggaagggcacactaataatggtgacggaacccccggtttccggctccccggccacccaaggtgcccctagtatcgcccgcgtgccaaaggggaattcattcacgggctgccctctactacccgtcagtgctcaagtcccgcggttacaacccaatctgcgttgggatcctccagtccatcccccaagttcctcactacttggctggatgaaccc

SEQ ID NO: 316477 - DNA, 425 bp, Zea mays
acccacgcgtccgcccacgcgtccggtcttgccctgaggtggaagcgaagggattctggcaagctgatggctgcagatcgatctcggtatccattggtgccgagagcatctcgccaagagccagagcagggctgggttcagcaacaccagcggcgtacaacatgccttgagcagcagacgtatgggctgttgccctctgcaagaagctctccagcgacaccagggccagctccatcttctcaaacggctcggcgctcagaaggcggatcggagacatgactggcgtctccgcgcccaccgtctgcaggaacggcacctgctgttcttcgaccttgggttcgtcgacgaagaagtccatcttcggaaccctcctcttcttgctgaagtggtccgcccccgtcgccgacccccccgaaacgaccccg

SEQ ID NO: 316478 - DNA, 428 bp, Zea mays
aattggaacaaaccatcagggcacaacagctgcagcaactcgtgctaccagtgatcagccaagtagctctggcaaacctttctccctactctcagcaacaacaatttcttccattcaaccaactgtctacactgaaccctgctgcttatttgcagcaacaacaactactaccattcagccagctagctactgcctactctcagcagcaacaatttcttccatttaaccaattcgccgcactgaacccctctgcttatttccagcagcaaatactactaccatttggccagctagctacaacaagccccgcttccttcttgacacaacaacaattgcttccgttctaccagcagtttgtggctaaccccgcaacccttttacaactgcaacagttgctgccctttgtccaacttgctttgacaaaccca

SEQ ID NO: 316479 - DNA, 397 bp, Zea mays
ccacgccgtcgagtttaatgcgtgaatgtgtaaatttcatttcatgccatctgtatgtatgaaacggattcaacagcgcattcggtttctttaaaacagctgaaaatagcatggatgaaaaaaaatcaagctgatgctaaaaggatggaaaacaatatttcattttatgatcgcatctttgaagtctgggcgatcttctgttctactggacactattattaggcttgtgtacccaattctctcactacaggaaacatcaaataaagatttatcaatgcttgctaagtcagctttcgagttgctgaaatggaggattcgacatcggccttttcttgaaactgctattacgtctattcttcctttagtcagtgatcctaactggcgtaccagatctgca

SEQ ID NO: 316480 - DNA, 404 bp, Zea mays
cgtccagccacgcgtccggtccaatatcatcctcgatcgggagccggacatgtcccgcgtcatcggctgcgtcaccttcgccactgcggatgcgatgcagttcaccatcgacggcacttatacgtcaaggagctgttcagtcgcacaatcatcgtcttcgaagtcgattctcgtggcagctgtagtcgcgtcggcgctaggtacgatagtagcctttgtggcggctgcaatagccgtaagatttccagtggagatgtgctgagcattatattcccaggtggaccatggctatcagtatctcaggttctgtaacgaggagtatatagtcgtcgaacattagagcgtgggttcgtgactacgctagtctacgttgtacctcatttaagtagaccttgctactgtgt

SEQ ID NO: 316481 - DNA, 299 bp, Zea mays
aacgccgacacgccgccgcgccgcgccgcgccgccattctcccatccgcccccgtgcccccgccgcccttccctaacctcgccgcggcagacgtcgcgccgtgcgtagctagcagttccccggcgcacgcgcgtcggataagaattggttttggctcgtcggctcaccccagccatgggtccttcgacgcccattcccgcggcagtaggctcaagcttaggaactcgcaaccgaggatgaattggacgcttcgtgatggcgggcgcgaaggcagatgtatacgcacaaacgggaaatgt

SEQ ID NO: 316482 - DNA, 403 bp, Zea mays
  unsure (1)..(403): unsure at all n locations
aaatctgatttcgcgtaaatggactcatcatgttgacactctaatggtccttggaattgggaattgggcaatgttggaaaggctcaaaggaaaatgggaatcaagaaaaatgggtggaattgtagcaaaactggtgaagtcttaagaattataaaggggaatctaaaattaaaactaaggcaaacgatgatacgaagaaacagcaaagacaatttctcatgcaaatcttctcaacaaattttcattaaagcattttcaattacattctttggtgantggggtgacaagagccagattgctactattggcttggctgctgatgaaaaccatttggtgttgtcctgngtggaatcatagcgcaagcactctgcactactgctgctgttcttggtggaaagagcct

SEQ ID NO: 316483 - DNA, 425 bp, Zea mays
ctcggcccgaaggaacaggcagtacccctgcggctctaacatcgacacgcgctttctgtagggctatcttgaaaatcatgcacggcagcaactggcttatatcaagcattctcgcctcgccatgatacttacttgcctctagtcttttgttgcatcgagtagacatggtaaacggatttattctaaggtatctgaaccacgtaagcgtcttcactacactatcatctccaacactcacgcaagtacccctcacgatgctgattgctatgctacattcaatgaccttaatgcggccgtgtttgatgcaacaaggctcacgttcatcctattgatcactgatgttttcgtgtgtggttcagaatcatgataagttggattaatcagatgtgcagatcgatctgttgttaattcagatctcgttaatt

SEQ ID NO: 316484 - DNA, 379 bp, Zea mays
acccacgcgtccgcggacgcatggggagagacgacacagcagcttttttggtttccccttccctttcccctgcgcagtgatcactgggttctccgcgagcgaagcagaacactgcacgtcctacgtgaccgcgcggtgatctctgggggttccggacgttgtggtttcaataggtaggctaggggatgggaacaaccctggcgagttcaatccgatactgcaggagacagtcatggaagtatcgttcccggtactggtagagatgctagatttagtgcccttattgctgccgcatttggtgcagcagggcacgcgtgaattccattgaccactgttctttttgttagcggttcacaatcatgcgacgatgaattagtca

SEQ ID NO: 316485 - DNA, 332 bp, Zea mays
gggaaaaaaaaaaaaaaaaaaaaaaaaaaacaaaaaaaaaaaaaaaaaaaaaacaaaaaaaaaaaaaaaaaaaaaaaaaaaaacaaaaaaagggggggccccccaaaaggttcaagcttaagtaccccttcaatgaaaattaaaacccctccaaaatggcccccaaattcaattccaaggccctctgtttaaaaactcctaaacgggaaaacccttgggttaaccaacttaaacccctttgaaaaaaaccccctttccccaaccgggctaaataccaaaaaggccctaaccattcccctttccaaaaatttgcgcaaccctaaatgccaaag

SEQ ID NO: 316486 - DNA, 363 bp, Zea mays
agattttcagcattcaaaaacacaccaagcgaagcgcactagcaacgacctaacaccaatggctaccaagatattagccctccttgcgcttcttgcccttttagtgagcgcaacaaatgcgttcattattccacagtgctcacttgctcctagtgccagtattccacagttcctcccaccagttacttcaatgggcttcgaacatccagccgtgcaagcctacaggctacaactagcgcttgcggcgagcgccttacaacaaccaattgcccaattgcaacaacaatccttggcacatctaaccctacaaaccattgcaacgcaacaacaacaacaacagtttctgccatcactgagccacct

SEQ ID NO: 316487 - DNA, 371 bp, Zea mays
aggaaaccgatcgacaccatgacggtgttgctcgttgccctcgctctcttggctctcgctgcgagcgccacctccacgcatataaccggtggctgcagctgccagccaccgccgccggttcatctaccgctgccggtgcatctgccacctccggttcacctgccacctccggtgcatctcccaccgccggtctatctgccgccgccggtctacctgccaccgccggtccatgtgccgccgccggttcatctgccgccgctaccatgccactaccctactcatccgccccggcctcagcctcatccccagccacacccattcccgtgccaacagccgcatccaagcccatgcctgctgcagggaacctgcgg

SEQ ID NO: 316488 - DNA, 78 bp, Zea mays
acccacaagtcaaggcatgtcaacgctactgtgacggtaattcctttgacacatattgtatgtgactggattgtctag

SEQ ID NO: 316489 - DNA, 409 bp, Zea mays
aaaaaatatccccaaaccctagctcccgatctcgatggcgaaccctcgcgtcttcttcaaaatgaccgtcgggggcgccccggcgggccggatcgtgatggagctgtacgccaacgaggtgcccaagaccgcggagaacttccgcgcgctgtgcacgggcgagaagggcgtgggcaagtccgggaagccgctccactacaagggctccaccttccaccgcgtcatccccgagttcatgtgccagggcggcgacttcacccgcggcaacggcaccggcggcgagtccatctacggcgagaagttccccgacgagaagttcgtgcgcaagcacaccgcccccggtttgctctccatggccaacgccgggcccaacaccaacggctcccagttcttcatctgcaccgtcgcg

SEQ ID NO: 316490 - DNA, 135 bp, Zea mays
ccacgcgtccacccaagcgtccgcggacgcgtgggaaaaaaaaaaagataaacatcaaaatcatcaactaaatcaaaaatcaaaaacaccccaccaataaaatataaaaaaaaaatcccatttcaaaatagctaa

SEQ ID NO: 316491 - DNA, 71 bp, Zea mays
acggacgcgtgggcgtgtataaatgtaattcctctgctttgcacatggatggattgggatgtaacctgttc

SEQ ID NO: 316492 - DNA, 78 bp, Zea mays
acgtcaaaaaaaaatagaagactgtaacatcaaatgctgactttgaaaaaaaaaaaagggggggcgccccaaagggtt

SEQ ID NO: 316493 - DNA, 362 bp, Zea mays
acccacgcgtccggtacaaatcatgaattgtccacaatagaataaccaattgtgaccatagcaaaaatcttctgtttctgaataaaaatagcaaaatcggtgtcgtgttcgtaaaagcaagggcaagggtagaaagagaaatatgaaaatatactggtgggtgggtctgtttgagactaaatcgtagacaatggtctatttcagacttaattaaaagtttaatggcacttttgcaaccttaagaagtttagtggcatatatcaaaacatagaaaattataatggcacagacacaattaacctaatcataaaacagcatgtcatctctcaaatcaccaggagaaagggataaagggaacctgc

SEQ ID NO: 316494 - DNA, 416 bp, Zea mays
  unsure (1)..(416): unsure at all n locations
gacccacgcgtcaaaatccagatcagcaaagcggcagtgcgtanagaggatcgtcgaacagaacagcatgaagatggtcatcgttctcgtcgtgtgcctggctctgtcagctgccagcgcctctgcaatgcagatgccctgcccctgcgcggggctgcagggcttgtacggcgctggcgccggcctgacgacgatgatgggcgccggcgggctgtacccctacgcggagtacctgaggcagccgcagtgcagcccgctggcggcggcgccctactacgccgggtgtgggcagccgagcgccatgttccagccgctccggcaacagtgctgccagcagcagatgaggatgatggacgtgcagtccgtcgcgcagcagctgcagatgatgatgcaccttgagcgtgccgctgccgcca

SEQ ID NO: 316495 - DNA, 219 bp, Zea mays
cacgcgtccaatcaatctaaacatcaatcgtaggatcgctaaggaccctcaagccagagagaatggagtccctaaccgccaacgccgtggtcgctgccacgcgagtcgctttccacgacggcagggccctggatagggaagagagcgtggttcgatccagacggtcgagcagccaaagagcaactagacgggtcaattgctctgctgccgtaaaacctc

SEQ ID NO: 316496 - DNA, 376 bp, Zea mays
acgtcaacgcagaggcacaagatcgaggccggcgtggcaacggcggcggcgctgggcgccggcggctacgcgtaccacgagcaccgcgagcagaaggacgcccactacgatagcaagcaacaagagcaaaaggttgcccacgggcaatggcaagggcaacggtactcctaataatggcactgaaaccactggttatcccatccattcaaatatgcattccaaaccccataaatataccggccctaaccccgttcacgttcgttcctttaagttaataagagcaaacgtcctcacctgtgtgttgctccattacaaatccaaccatttacctattaacgtctgcaaataacgactaagcgcaagcttctgcaacgtg

SEQ ID NO: 316497 - DNA, 416 bp, Zea mays
acccacgcgtccgcccacgcgtccgcgatctctttgatcgcctgagccatgcatgccatggtccagttcttgatctttgtgtgtctgtgcgtgtgcatcgacgtgtggctgcagcacgagaagcacaaggccaagaaggacccagagaacgagcacgggcaccgggtcaaggaggaggtggccgccgtcgccgccgtgggctccgccggcttcgcttttcaagaacaacaacaaaaaaaaggaccccaagaaccacgccaacaactgatccgtcccggttgcggttcaaccggtccttcaagcctcgtcttcgtcaacggtgtgccggcaaggccttgatttgggctaccgatatttgcatggacgtaggaactgtgttggtcggtcctcggcgttcttgtatcaagatcaaatca

SEQ ID NO: 316498 - DNA, 290 bp, Zea mays
gacccaagcgtcaacccacgcgtccggtgatagcttatgtacctgacatattctttcattctaattttcctcattcatctaccaaaaaaaaaaaaaaaaaaaaaaaaaaaaaaaaaaaaaaaaaaaaaaaaaaaaaaaaaaaaaaaaaaaaaaaaaaggggaggaaaagaaaaaggaaaaaagaaagaaaaaagagagaaggaaagggcagaaaataaaaaaaagggaaacagaaaataaaagggggggggggtcgaaaaggaaaaaggttaaaggggaaaaccgggggg

SEQ ID NO: 316499 - DNA, 159 bp, Zea mays
cacgcgtccagaaaaaaaaaaaaaaaaaaaaaaaaaaaaaaaaaaaagaaaaaagatcaaggggatgaggacctaaagtcttcaggttaaggtgttcgttaatcttaaatgataagatcattcgatcttgtaaatgggcattaaattttaagttcaggg

SEQ ID NO: 316500 - DNA, 367 bp, Zea mays
gaatatacttgggatctttgatctgcgaggctttcgggttgaaaatggtgatctccagttcctaaagtttttgatggacgttttttactattactacccgaagcggcttggccaagttctttttgtcgatgctccatttgtttttcaaccaatgtggcaggttgttaaacctctattgaaatcatatgcctccctggtaagattttgtgatgccgagactgtgaggaaggaatacttcaaagaagaaaccgtgcctcctgatttccgcgattaggtgacatgattatttcttcagtaattgcaagtcagttctacctctgcctttgtgtaacgattgaaattctaaattgtgcagattatttttagt

SEQ ID NO: 316501 - DNA, 366 bp, Zea mays
acaagagtgggcaaccctgggaaaaatgaacatcagaatatttttcaatcatatccaattgacttggggcagaaataaccgaactagagtctacagtgaggtgagacctgttcgcctcttgagtgactgaaacaaataagagattgttagagctcggacaataccattgagtgtacaggtttgttcaggacccactggctataagctactctattcgttcacaaagactgtattgtagaggtacatgatagaatttattcttatatgctataaaagaaaatgtcttggctacgatgctggtcgattgcaaatgtatcttctctgatcgacttccatatcaaacgagacaaacccgagggggcgtcc

SEQ ID NO: 316502 - DNA, 387 bp, Zea mays
cccacgcgtccgcccacgcgtccgcccacgcgtccgcccacgcgtccgattcagaaacacaccaagcgaagcacattagcaacaacctaacaacaatggctaccaagatattatccctccttgcgcttcttgcgctttttgcgagcgcaacaaatgcgttcattattccacaatgctcacttgctccaagttccattattacacagttcctcccaccagttacttcaatgggcttcgaacacccagctgtgcaagcctataggctacaacaagcaattgcggcgagcgtcttacaacaaccaatttcccagttgcaacaacaatccttggcacatctaacaatacaaaccatcgcaacgcaacagcaacaacaattcctaccagcac

SEQ ID NO: 316503 - DNA, 330 bp, Zea mays
aagaaaacaatgctaaccgtatagagtctaatacaaaatcattataagttagtttgcggagataataaaaaaggtttgcacacctgaaggatataaagtaaatgatattgatagcatcgatgtcattgatactcttcaatgtttccaacttccaagtgaaaggattacattttgaatttttgtattcgctatagctcagatcaaatttcacacatatctcctcttcctcagttaccgctgaaccaaatacctataatcttctatgtccaacttggtttacagatgtacattttgtccatcataaaagctaaatggagccaggttctttaa

SEQ ID NO: 316504 - DNA, 409 bp, Zea mays
  unsure (1)..(409): unsure at all n locations
aaccaangctccggaattaactaaaaagtgctgttgtcaacaatgaaagtaacaatgttgttggtgtttaaaggggaaaaaagtccatccaaagattttattagctcaaggcaaaacctttaaaactggcctgctgctgtttggtggtgatgaaaacacaaaaatggaagctgacaagccagtgaatagctgtgtattggtctggcaaggtagtgtggcaaagcccaccttccacagaccacaggttcactgtacataattgccggagtgaggctgcagctaagaaggttttcgttgatgcttctgttcctcactactgggaccttgctgtcaatttctcagaagattcttcctgagcaaagtgttcagaaccttggtagcgtctgctgacctttgctggctacatgct

SEQ ID NO: 316505 - DNA, 96 bp, Zea mays
ggaggtagctgcggtaaacctaaaaacattcataaggtcgaaaatggtaaaatttcgtcggcaaatataaatacaaatgctaaaacctgctgagac

SEQ ID NO: 316506 - DNA, 394 bp, Zea mays
gagctttgaactggaaccgattcaaccgccatgggtcgcatatgctgttattgctatgtctatactcattctacgcaacagagttgccacaactgcggacatggaatctgcgataactgcgagcatgacggtcaagacagtcttcgtgtttcctctgctaggggaaacaatgaattggagactcgactgattgcgtacggcaaggacgacaaaacagccatgcctccaagtgctctgtttctgcaagaggagaaagcctacaccctgccaattccagctggcataacggaggaggataatatactgcagaaaagctatatccatccatttgtttgatcggaagaaacggccgcatttagtatgctgcccatgtgaggagagcctggcctaaact

SEQ ID NO: 316507 - DNA, 254 bp, Zea mays
accgactcttccgcccacgcgtcctcggacgcgtgggcgcaaccaaacgcgcacgatatgagtccaaatcgacgaactcgatatgtcaccaatactggtcagcatgaagtcgagcgtcctcaggctcaagcactccgcagaagttccgcatgccaccgcctcctcatggacggagaatcgtgtgcatctgggaggtcgtgaaggttgcccctccgctctgctcagcatgccggccgtcttcgacttcacggcca

SEQ ID NO: 316508 - DNA, 388 bp, Zea mays
aggacacgtgggctatagcaaccggtccagcactttcacgctcagctccagcaatggctgcctccaccatggcgatctcctccacggcgatggccggcacccccatcaaggtgggctccttcggcgaaggccgcatcaccatgcgcaagaccgtgggcaagcccaaggtggcggcgtccggcagcccctggtacggccccgaccgcgtcaagtacctcggccccttctccggcgagcccccgagctacctcaccggcgagttccccggcgactacggctgggacaccgccgggctgtccgccgaccccgagaccttcgccaagaaccgcgagctggaggtgatccactcccgctgggccatgctcggcgcgctcggctgcctcttccc

SEQ ID NO: 316509 - DNA, 348 bp, Zea mays
tggtcaccgtcctcgtcgtgtgcctggctctgtcagctgcaaccgcctctgcaatgcagatgccctgcccctgcgcggggctgcagggcttgtacggcgctggcgccggcctgacgacgatgatgggcgccggcgggctgtacccctacgcggagtacctgaggcagccgcagtgcagcccgctggcggcggcgccctactacgccgggtgtgggcagccgagcgccatgttccagccgctccggcaacagtgctgccagcagcagatgaggatgatggacgtgcagtccgtcgcgcagcagctgcagatgatgatgcagcttgagcgtgccgctgccgccagcagca

SEQ ID NO: 316510 - DNA, 248 bp, Zea mays
cggtatcaactattccctagaggtggtcgtggctaccgctatgctactggacgtgaaatgcctgatactgctatgcataatgttggtgctgtaatgccatctccatatgagatggtagggatggtcatcacagattctggcgtcgcacaacactgttccaattggggcactaaccactgcgcttgctaatacctcaccagattatcacagattgatgcatggtgacaatctgtatcctcttgttgaac

SEQ ID NO: 316511 - DNA, 405 bp, Zea mays
acggacgcgtgggctatagcaaccggtccagcactttcacgctcagctccagcaatggctgcctccaacatggcgatctcctccacggcgatggccggcacccccatcaaggtgggctccttcggcgagggccgcatcaccatgcgcaagaccgtgggcaagcccaaggtggcggcgtccggcagcccctggtacggccccgaccgcgtcaagtacctcggccccttctccggcgagcccccgagctacctcaccggcgagttccccggcgactacggctgggacaccgccgggctgtccgccgaccccgagaccttcgccaagaaccgcgagctggaggtgatccactcccgctgggccatgctcggcgcgctcggctgcgttctccccgagctgctctcccgc

SEQ ID NO: 316512 - DNA, 447 bp, Zea mays
ggtccaagatacccggggccaaccaagccttcgacggacccttgggcggtcaactaaaacctaacaaaaagggaaccaacccggaaaatcaattcccctcccaaccgttagaactcccaaattaaaaaaaacgaagggcccgccggtccggcttccctccctggcccgttcaacaaaaaaatttccgggagtcctccaactccaagcaagggttccgatggcgctgcaatggatgatcctggcgtgcgtggtggcggtggaagctgcggtggctgcgctggtcacgctcccggtgccccgcgctgtgcggggccagatcgtcgcgctcacgtccttgttcctgcagcccctgtccagtgtgatacccttcgccgccttccagatcctcgatctctactggaagaaggagcacagactgatgtgcacctcggagattttgcacgccga

SEQ ID NO: 316513 - DNA, 87 bp, Zea mays
agcggacgcgtgggtttttttttttttttttttttttttttttttttttttttttttttttttttttttactatttctaaatcgcga

SEQ ID NO: 316514 - DNA, 318 bp, Zea mays
taataatttcccgggtccaaaaggaattaattttccagccctttaaatctcttaaccaaagccccaaaaaaggggccatcccaaattcaataactttactttaaaaaaaagtggaaaaaaccaagggcgcgaaaatgaaaaaacccctttattttttaaataaaaaaggcaccacaaggaatctaccccaaatacaatttcccggttttaaattaaaattctaattaacaaggataaaattaacaagttattcaagttggtcaataaactgcaaaattcaggcatatcaccccagacattactctacaatacagtact

SEQ ID NO: 316515 - DNA, 65 bp, Zea mays
tttttccacgaggccctcttggttcccccttcttttcaccttgcccatcctgaaattgtccctgg

SEQ ID NO: 316516 - DNA, 387 bp, Zea mays
acagaaggagagcaccctccacctggtgctccgtctcaagggtggtatgcagatctttgtgaagacactcactggcaagacaatcacccttgaggtggagtcttcggataccattgacaatgtcaaggccaagatccaggacaaggagggcatcccacccgaccagcagcgcctcatcttcgccggcaagcagctggaggatggccgcaccctggcggattacaacatccagaaggagagcactctccacctggtgctccgcctcaagggtggcatgcacatttttgtgaagacattgactggcaagaccatcaccttggaggtggagagctctgacaccattgacaatgtgaaggccaagatccaggacaaggaaggcattccccc

SEQ ID NO: 316517 - DNA, 361 bp, Zea mays
cttccctaccccaacgggtcctggtcaaggtccgggtccttggccaaaaggaaaaaaatggcggcttcggactttgagtaccgttgcttcgttggcggcctcgcctgggccaccgacgaccactccctcaacaacgccttcagcacctacggcgaggtcctcgagtcgaagatcatcctggatcgggagacgcagaggtcccgcggcttcggcttcgtcaccttctccacggaggacgcgatgcgcagcgccatcgagggcatgaacggcaaggagctcgacggccgcaacatcaccgttaacgaggcccagtcccgcggcggccgtggaggcggcggtggcggatacggtggcgggcgcc

SEQ ID NO: 316518 - DNA, 287 bp, Zea mays
acggacacgtgggtcgcgagcggccgcccttttttttttgtttttttgttttttatttttttgtgtattattttttttttgaaaattaaagtgatttggcatttttttaaagtcgaagaaccggcgaatgctgtaacccagcagcctgaatccctgtcaatttgtacacacgcccaacatttggagatcatgtttcccctggaattgccgtcacaccctatccaagtcaaacgtaaagacagaccatccactgaactcccggaaacaaggggcccacatcaacatgt

SEQ ID NO: 316519 - DNA, 407 bp, Zea mays
tcagccaacccttcggccaagccttcgttaaagccccccccgggtaatcaatttgggtatgggttaacttcaatgccggaaataaattgggatttggaaccaccggttggggataggaagataagcagcagttacatcacctcgcttatcggcaacaggatcaaggcttcggttcgtcagatcttggtgatgcccaactgtgaaagctttcctatttcctggatgatagcagatacggatgactgggtgccccgcagaattgcaccttttatatggctgaaccgtgagcccgctgagaggcgtgctgcagacacaactagagagatgatgccaggggaagcttccacatccaaggccattgcaaagaacaagtcgagtccgctgccgtcttcaaaaagaatcaccaa

SEQ ID NO: 316520 - DNA, 256 bp, Zea mays
tggaaaacgctgcctctgcaattccaaacccgtcattgtctaagaatccctcgcattctttccgcgtccggaacggcagcctcaattcaatgcgcctgcgccgcgtgttcgacatcttcgactgcattggctacggcgagatcaccctcgacgatatggcctccgcgctctacgcgctctgcctcggcgccgtatgctccggtctggaggcctctgttggcgggtacatcccggccggctccgccgggctccactt

SEQ ID NO: 316521 - DNA, 346 bp, Zea mays
taaaaaaaaaaaaaaaaaaaaatcaataaaaaaaaaagacaaaaaaataagttcatccccagtaaattggtcacctgaaatgtaagggggattactctaaagactgaactctaaattacattggtcgggtcgcctcattcgtctgtcacattgtcatcatcttcggtgtcgggatgtctgttatccaggttgagaatagggaatccgctgccgtgagtaaactatatgctgattctggaaaataccgcttacatcagctggcgaatgcacaatacgatcttcaacggtatcagtttccacttattcgccacctgggttgagggcgtgaatggcagctttatgggcc

SEQ ID NO: 316522 - DNA, 117 bp, Zea mays
tggtccctggccggccaatcctccaagggattttggccaaaccaaatggccttggcttccaataaaaaaatccagttccggttttcaacaaggcggccttgccggattcaatccccg

SEQ ID NO: 316523 - DNA, 444 bp, Zea mays
  unsure (1)..(444): unsure at all n locations
cgaaaacactggtacccaaaacaaccgtcaaccaagggcaaattcaacaacctccaaagaataatccgggtgccttccaagaatcctccaaccacccttggtgcccaagcaagccacaaaaagtgggcaaaccaaagaggacagcaatgctaggaaaatgacgatgacaaagacgagggcatcgggcaacatacttgttagccgtaatgacgacgggccatgctatctagattccggtcttaatgagtacgtctgcagaaagactaataagtgctataagagcttggtgctctgcgtggcgagttgtcaaccatcatcatgaattcaagatactgcggagacatcatgatactgcggagacagacggccagagatgangctagctagatgccgtttcaccannatattatgtaacacccaaatctcccattttaagaaataaat

SEQ ID NO: 316524 - DNA, 264 bp, Zea mays
ccccaatttaaaatccgtttgacaagacctgcagttgaatttttaaattttaaattcctggggcctactttaattgaacggggaactgttgccactaatttaaaccgttttgcaattccaatcctttaattaactaagggcgttgggaattaataattaaaattgtttaattaatgttattaatttttttaaatgggtctatttacctactatgtattattatcgaattaagaggataaaaaatataaggattatgaatatatg

SEQ ID NO: 316525 - DNA, 257 bp, Zea mays
gaggaatcgcaaagagggccgtctcatccgagttaaggaagccatggagcacaaggaggctgggtgccaggcccccgagggacccatcctctgcatcaataactgtggcttcttcggcagcgcggcgaccatgaacatgtgctccaagtgccacaaggagatgataacgaagcaggatcaggccaagctggctgcctcctctatcgacagcatcgtgaacggcagcgacgccgtcatggagccggttgttgctggca

SEQ ID NO: 316526 - DNA, 79 bp, Zea mays
cggcattctcaccttccgaaaccagcgccacaggttgggaactccggaattcctggtcccaatccggtaaatccgaacc

SEQ ID NO: 316527 - DNA, 202 bp, Zea mays
tacggtcatgcattccgggtccgaccacgcgtccgaggacgcgtgggcgcgcacgccgcctgcctgtccattgagatctctttcacgcccctttctgccatcgcacaactgagccgcaggtactactatccacttggcaggtcagtatctcctgcgaggacaaccattgattatttgaaggtggaggtggtacactcatcat

SEQ ID NO: 316528 - DNA, 376 bp, Zea mays
  unsure (1)..(376): unsure at all n locations
cagacgcgtgggcaggtggtacaatacctggaggcagcagcggtatggtttcaaacctgatgaatcaggcgagcggccttagaccgccgctgatgatgccaggctcagtgacccagtccagcatgccggcaatgtatgcaaataacatgcaggggcatccccagatggctctgctgcaacagcggcaacagatgctctcgttcggtcctcgtttgcctctctcggccatcaaccccggctcatcctcgtcggcacccaacatgatgttcaaccatggcatgcccaactcggcagctcctaatcatcaccctttgctgagataccctcaggggaacattcanatgtaggttagtgagatgagttttttcattttttg

SEQ ID NO: 316529 - DNA, 268 bp, Zea mays
cccacgcgtccgcggacgcgtggggcaaccggtccagcactttcacgctcagctccagcaatggctgcctccaccatggcgatctcctccacggcgatggccggcacccccatcaaggtgggctccttcggcaagggccgcatcatcatgcgcaagaccgtgggcaagaccaaggtggccgccttcggcagcccctggtacggccccgaccgcgtcaagtacctcggccccttctccggcgagcccccgagctacctcaccggcgagt

SEQ ID NO: 316530 - DNA, 64 bp, Zea mays
accacgcgtccgatatttttggtgcgcaaaattagaactttgtttgaatttgaaataggagttg

SEQ ID NO: 316531 - DNA, 263 bp, Zea mays
ataaagcgtacgcacgcactcgcctccgacagcgaacgcgcaacgtccttctcccgcgccgcccggccggccggtccctgttccctctcctcccctcggagcagcaggaccaggagcaatcgcgttcgtcctctgcgctgcgcggcccgccggcctgaccaagcatagcttatcggccggagctggatgaccgaacgatgcatcatgacctcagaaactcagatagaataaacccggaacaagcccatccagtgatgtccgcg

SEQ ID NO: 316532 - DNA, 111 bp, Zea mays
gatgccccccggcggcgccggtagcgcttcttcatggactcgaccttgttcttgcactggttggaggtcttggcgctgctacagatgcctccagaggccttcccttcggga

SEQ ID NO: 316533 - DNA, 128 bp, Zea mays
ccacgcgtccgcccacgcgtccgaaggaatcgggcgctcttgctgttaagcccgagcttgcaataatggattcttgctggatcacacatttatacttagaataatcgaatgcttgcttccttggttac

SEQ ID NO: 316534 - DNA, 351 bp, Zea mays
cacgcgtccagggtaagaccgcgtccttcgggtaaatgaagtcttggcttgaaccgcacccgtcagttggtctgagggtgttaaccagccatgattaggagcgttgggggtacccctaattatggtactcgacaagaatcatcataccactgttaactgactagttgcattccattgtacttgctttcaaatagattcatgcattgatatcctttctttgggtactatgttattacactcaaataccattgtctgtgatctttggtgcatcttggcattttaatttgattcaatccatgtctctaggttgtttattaatcccttacaaactctctcctatctgtggactaa

SEQ ID NO: 316535 - DNA, 398 bp, Zea mays
gttgattctgtagataaaccccccatatctgtattgttaactttttaaaatttgtatcgtggtagattgatagtgaccctaaagcttgcggtctcatccttcaaattgtggtcataaggacatcatcgattttttaaacttatcaagaacatatgaattcaaaatggggcagttctcagtgtgcagaaggcgagctcgtcctcttccttaatgaggttcttaagagtgtttcctcagctgtattggttacccttactactttggattttggaaacagtccgagacccttattagttaacaatatcatagttgttgcaaagatactctactttttttcatcatctcttctttaacattcatatctcccagttgttgcaaggggaaaataaccccagtaa

SEQ ID NO: 316536 - DNA, 260 bp, Zea mays
acgcgtggaccgctcacctacaacctactagaaggcgaacacaaccgtacattcacttctcatcgcatccgtacgacacgcgcaggatcagtacagaccgaggcgcccgcggttcagcattccttccatgcaccgtacaagagacaatttgctggagtcttcgacacgatcagggttccgatggcccagcaatggatgatcctgccgttcctcgggccggtagaacctgcggtggctgctctggtcacgctcccggtgcc

SEQ ID NO: 316537 - DNA, 431 bp, Zea mays
  unsure (1)..(431): unsure at all n locations
ttccgggaccacccacgcgtccggcacagtccaatattgccgtctcccttttgcgtgagcaaagaaagagagcgagaagagcagtcgccatgtctggcatcatccacaagatcgaggagaagctccacatggggggcgaccacaagaaggaggatgagcaccacaagaaggccgaggagcaccacaagaaggaggagggggagcaccacaagaaggacggcggggagcataaggaaggcatcgtggagaagatcaaggacaagatcaccggcgagcacggcgacaagtccggcgaccacaaggaaaagaaggacaggaaaaagaagaaggagaagaagaagcacggcgagggccacgaccacgacggcggccacagtagcagcagcagcgacagcgactgagatctggtgtcgcagcaaangtgcaacaca

SEQ ID NO: 316538 - DNA, 365 bp, Zea mays
gaatcatcatcagtgcctcatgcatcatatgctactgagagactgaaaaaatatctttgttcccctgtgctagagaacatgtattggcaggctttcacttcctatcacgaaccattgttgagtaggtcggactgataactagagtttcttcttcagggctccgttgtattgttttgctcttatcttatcttgggtggtgtggcaaagaatttgttgttgtaacggttgatgcagctagagttggcagcgacattttctgtaagagcacacggcagggacgttaattaaatatattcctctgtagcggttgatggaaaaaaaacaagatacaggacagaataacataagcggcggcagccacaaaa

SEQ ID NO: 316539 - DNA, 66 bp, Zea mays
aacacgcgtccgctgacgcatccgcggtactctggtctaacacaggattgtaaactaggtttcacg

SEQ ID NO: 316540 - DNA, 377 bp, Zea mays
acatcaaggccatcgacaagcttcctcttctgcctggtgtccttgagattgttggaattgggtatacagggaggctctgatcggcaaaatcaagagcacttacaaagaaatcaccgggagcagcaactgatcgaacatcatttacaagatgggttcttaagcatatggtagaattgcatccgtaagcactgaagctgccatgcaagtgaaagtgcttctggtcccgacctcagtcagagaaaaaaaactctgcagttgagcaagccgttttactttgtttcagtgtaatatttatgacgtattcccagttctttttcaaaaaaaaaaaaaaaaaaaaaaaaaacaaaaaaaataaaaaaaaggggggacacactaaa

SEQ ID NO: 316541 - DNA, 392 bp, Zea mays
agcagttggcagctgcaagtgctgctgcagctgttacgccaagagctgtccctcaagctcggaaagcgtcgctcgcccggttcttggagaagcgaaaggaaaggtatggactgtgccttggtatactttctatggtgtatatgctctgctcaagcttgttgtcgtcgacatctgaccgatccctgcgtcaggacactagtcttcatcctccttgtttctctccgcagagtggctagcgtcgagccatacctgacgtccaactccaagagcccgctagagagcagtgacgccgtcggcagcgctagcgctccaacgaaatcgtcatccacagacgtcgccccggcgagcagccaaaacggcggcggcgcaaagcttgtgcgccatggcggata

SEQ ID NO: 316542 - DNA, 221 bp, Zea mays
acaagcgtgctctgggggcacccactgaggcgtctacgaaaggacgcgcatgcaaccgtgcttgccatgaagtatttcgtagtactcttctgcgctagcttcgtttactttcgagtaaagaataaggtgtcccttgtttcaataatgattctgcatgtaattacattccatggcacggccattccggcaacaggctcagtaaaaatatcttttttagtgcc

SEQ ID NO: 316543 - DNA, 69 bp, Zea mays
ccacgcgcccggacacgcggcaatgaagccattcactaacgagttcgagaactagtacgagatcctgca

SEQ ID NO: 316544 - DNA, 142 bp, Zea mays
atccaggggtcaggacagcttgcaaaatataatggatgagatagctaaagaggacaaggaaaaggagaagaggcacaaacgtcgaactgtggttaaagaggagagacgtaaatcaggcccacctcgtctgggcagacacaaa

SEQ ID NO: 316545 - DNA, 118 bp, Zea mays
ccacgcgtccgaaaaacatgcaaaataaaaaataaaaaaataaataaaaaaaaaaatgaaaataaaaaaaaggcaaaacaattaaattaaaaaataaaaaagagggaaatgaatcaag

SEQ ID NO: 316546 - DNA, 186 bp, Zea mays
aaatatatatatatatatatagcagtagtataacatagcgtatgtttttagcggggggatcagtagtacacgtttgatgtgaatgatgtactcaactgaaagagagattgcacggcgaacctttgcgtctgttcttggccggacaggataattttcgattttctcgacccaaaaaaaaaacaaaaa

SEQ ID NO: 316547 - DNA, 114 bp, Zea mays
accacgcgtccgatactctgctatctcgccgtgatcgtgagtgatgattccgtctggttgctactgatacactattgttccatatcggttccatttgaaatatgcgttgttctt

SEQ ID NO: 316548 - DNA, 356 bp, Zea mays
  unsure (1)..(356): unsure at all n locations
acccgtccgcgtgcacatcggcgccgacctcgagatgccctccgccaacgctaagctcggcggcatgcagtacccatggccgtccctcgctgctcatgttgttgggcaataatctacccatacagtattattcttgggggcttaccgggaaatttgagaatcatcatcaatgtattataatcgtctcattaggtangatgactggatgatgacgaatagtcaactagtcttcgtctcctgtcttttttttttattctgtgcgggatactgaatgtggagtataattatgtttgcaacagattaaaccacatatgaatatcaattgcaagttgcactgcaaaaaacaaaacacaaac

SEQ ID NO: 316549 - DNA, 65 bp, Zea mays
ctccgccaacgataatctccgctgcatgctctatccatggttgttcctcgctgctcatgattgtt

SEQ ID NO: 316550 - DNA, 137 bp, Zea mays
gaaaaaaaaaaaaaaaaaaaaaaaaaaaaaaaaaaaaaaaaaaaaaaaaaaaaaaaaaaaaaaaaaataaaaaataaaaaaaaaaaaaaaaaaaaataaaaaaaaggggggcccccccaaaagtttcaaactttttt

SEQ ID NO: 316551 - DNA, 331 bp, Zea mays
aaaaatgctaatgtacttgttgtgaagtaattgatttgatgtaatcacactcttggccactgtgggctgactacctctaatgtgctgaaaactaactgcatcctgtggctcagtatagtgttcgtcacaatactgtgtacaccacaactgaacatgttatcatgtggtctccgaacccaacggtgtcagtcgatctcctgcatcagctggaaggattctgtgcacgtaacgctagtccttactagttcaatggctagggaatgttgccattcacaaccttgcagatggtacagttagctgtcatacgacgttcacatgaaccatcatttgt

SEQ ID NO: 316552 - DNA, 333 bp, Zea mays
  unsure (1)..(333): unsure at all n locations
gacccacacttccgacaacacacacccgacaacattaacacacacttaaaaaatcaatttcgttcattcttaaccttaacccaggaacctataacctacccaaaacaggattaataatggcggcttcaacggtggcaaccctctctttcccgttaacaacggcaactttcgcggcggcggcggcggcgggcggcgccgacgtgctgatcgtcgtcncgangaaggcgggcgcncggcgcgtcgtctggttccccgcggcggcgcgccgcggccgccggcggttggtcgccgtgcggtccagcgggccggccacgccgtcggagatctccgaca

SEQ ID NO: 316553 - DNA, 380 bp, Zea mays
agccagggtccggcgtggtgagccagcccatcgtgctggtgggagggctgtggattccgcaggagcaaagcagctcgcagtccgggtctccccacggcccgctccacttctccacctcaggcatcgcagtctcgtcggcggccaccgtcagctgcgaggaggaagacggacggtccgagagctatggctggaaatgatggagaggctgctgctgctgctgctgctgagaggggagctgcagcctcaggaacgggaatcatcaggagggaaactgagagtagtgtagctgtctgtacacatacatagttacattacattacatacagggagtgagggagatcgggccttgagcgctcgagaccaaactgatgcttcgggtt

SEQ ID NO: 316554 - DNA, 372 bp, Zea mays
agcaaccggtccagcactttcacgctcagctccagcaatggctgcctccaccatggcgatctcctccacggcgatggccggcacccccatcaaggtgggctccttcggcgagggccgcatcaccatgcgcaagaccgtgggcaagcccaaggtggcggcgtccggcagcccctggtacggccccgaccgcgtcaagtacctcggccccttctccggcgagcccccgagctacctcaccggcgagttccccggcgactacggctgggacaccgccgggctgtccgccgaccccgagaccttcgccaagaaccgcgagctggaggtgatccactcccgctgggccatgctcggcgcgctcggctgcgtcttccc

SEQ ID NO: 316555 - DNA, 267 bp, Zea mays
gacccacacgtcaagtgctgctctagggcgatagcagctcagtgaggcacggtgatagaggctgcatatcatgattggagcaagatcatcaacgtgccatcggaagatcctgtcaacgcaatgcttgtttaatttcaagatcgataggatcactaggtatctacctagataaacgagattgaacaaatatcatccttgagcccggatttacatcatacaacatcatatcagtgctgtgtactcgatccacaattaatgtcgctacat

SEQ ID NO: 316556 - DNA, 122 bp, Zea mays
aaaaaaaaaaaaaaggaaaaaaaaaaaaaaaaaaaaaaaagaaaaaaaaaagaaataaaaaggttaaaaaagggatgatcatcgttgcatcggaaaggtcgtttcaacggtatgctggtttg

SEQ ID NO: 316557 - DNA, 395 bp, Zea mays
aaaaaaaaaaaaaaaaaaaaaaaaaaaaaaaaaaaaaaaaaaaaaaaaaaaaaaaaaaaaaaaaaaaaaaaaaaaaaaaaaaaaaaaaaaaaaaaaaaaaaaaaaaaaatggaaataaaaaaaataaaaaaaaaaaaataaaaatttaaaaaaagggggggcccttaaaaagttttcctttttattttttgttttctggaattttaatttttttcttttttttcatctactttttttttataggctctttttttttaaaatttttgtttttaaaaacctttgtttttttaaaatttttcccttttttaaaatttcctttttttaaaatgtggctttttttcaaagggtttctatttttttcccttttcaaaatttttccgggtctttatcttttt

SEQ ID NO: 316558 - DNA, 383 bp, Zea mays
cccacgcgtccgaataattcagcggtcgtcgaatactgcaggacgtcaatggctgcgctttctgggagcaccgctggacttctcggcctcaccggtttcttcggtttcggcttttatgtattcgctgttgttggcctttggggacttttgatgctaaaagcaggttcgcaatggaaaaaatattttgttaatagacgggtcatactgaccaatggtttcttcggtggattattcacatacatcttgttttggacatttatctacggaatggttcacgtttattgagggaggatcaaatgtgccttttcattctgcatttttaatttaattatataccatttttatgtttgttgttctatttattacaataaaaagtccttttt

SEQ ID NO: 316559 - DNA, 72 bp, Zea mays
gtccgcagaccagtgcgactctgctcggcctggcggctgtcttccccgtgacggctaccaccgggtatgcta

SEQ ID NO: 316560 - DNA, 420 bp, Zea mays
cccacgcgtccggatcttgcttggatttgatctgacatcatcatctgatccgcgtgtcccattcttctccctcccaacggctgcagggtggtgatcagttcgctggacctctgaagcccaaggccaactgcatgcgcgcccaagccaagacgagaactgcacaaggaaaccctccaccaccatcaacacagctagcgaactgagctgcagaggggccataaaatgtaatgtaaccaacctctttcagagcttctgctgacgtgtccagttactatatacatacatacatacgttaacggtgtactgtgtgtcttgttgtaaatgtcccccctgcgaggtgttgccgattttgtaagctacgtacgtaactactacgctcggcatcagctcgtgcatgtcaccttgtgcaagtgcaacaca

SEQ ID NO: 316561 - DNA, 257 bp, Zea mays
aaaaaaaataaataaaaaataaaaaaaaaaattaaaaaaaaaaaaaagattttaataaaactaaataaatatttaacggatgatataatgtaaagctagaaagtcttcatgtgagcttcgatggaatcgattcgggggtcggtcaccggagggcttagcttgagattccttcgagtttaaatgttacttattttcaatgggccctatatttaaattctctggccggggtttttgcaaattttcccttggaaatcccc

SEQ ID NO: 316562 - DNA, 112 bp, Zea mays
acgttccgttccttccgtccatccatccgccatggcgaccgctacgctactgagctcctccttcgccatgcccgccgccgcccgtagggcctcctccccttcctccgcctca

SEQ ID NO: 316563 - DNA, 367 bp, Zea mays
cccacgcgtccgcctcggaagactatagacaaatattttagtccatattttaatctcgtcatttgacaatttaggaactaaacgagactaaaataaaaagaataatatttagtccctcaaaaccaaactggccttaggaggtcctaggggtagtgcacagtcattagattcagattgagagtagaatcatataaagccagcaacccacaaccatgcttattttattctactatgttctggaggcaagggaatagaccacgcgcttgcactggttttattccatgggtttgtttgtgtctggcctgtgagtgacctgagaatgacagcatttggttggtttgtttgtcctagattcaaatcagctgtt

SEQ ID NO: 316564 - DNA, 373 bp, Zea mays
acggacgcgtgggtattattaagaccaactagcaacatagaaagcacaatagtgtaccaacaatggcagccaaaatattttgcttccttatgctccttggtctttctgcaagtgctgctaccgcaaccattttcccacaatgctcacaagctcctatagcttcctttcttcccccatacctctcaccagcggtgtcttcagtatgtgaaaacccaattcttcaaccctacaggatccaacaggcaatcgcagcaggcatcttacctttatcacccttgttcctccaacaaccgtcagccctattacagcagttacctttggtgcatttgttggcacaaaacatcaaggcacaacaactacaacaacttgtgct

SEQ ID NO: 316565 - DNA, 423 bp, Zea mays
  unsure (1)..(423): unsure at all n locations
gagaccaacaagcaacatagaaagtggaatccagtagcaacaatagagcaacaatggcgaccaagatattttccctccttatgctccttgctctttcggcatgtgttgctaacgcgacaattttccctcaatgctcacaagctcctatagcttcccttcttcccccataccttccatcaatgatagcttcagtatgtgaaaacccagctcttcaaccctataggctccaacaagcaatcgcagcaagcaacatacctttatcacccttgtttcaacaatcgccagccctatctttggtgcagtcattggtacaaaccatcagggcacagcagctgcagcaactcgtgctacctgtgattcaacaagtagctcctggcaaactttctcnctactctcagcaacaacaatttcttccattcaaac

SEQ ID NO: 316566 - DNA, 353 bp, Zea mays
aaaaaaaaaaaaaaaaaaaaaaaaaaaaaataaaaaaaaaaaaaaaaaaaaaaaaaaaaaaaaaaaaaaaattaaaaacaataaaaataaataatctatcaaaaaaatattactaaaaaaaaaaaatttaaaaaaatacaaaaggggggcccccccaatggtttcatcctttatttcttctttcatggaattttaaactttttttaatttttcactatttttcattacagggtctttttttttaaaacttcttgcagggaaactttttgatttttctaactttaatccctttgaataaattcccttttttcattggtgccttttttcaagacagaccaccagctttacctttt

SEQ ID NO: 316567 - DNA, 407 bp, Zea mays
  unsure (1)..(407): unsure at all n locations
attattatgataacaaacaaaaggttagcagctggcaacttccgccagaggtgtgtgagatcctcaagaatgcggaatctggttccttaaaagaaggttcaacttcactgcaggatgctgcaactatagagaataagggagtaataagcattgatgcaagtactcctgccatacagacaggtggccgtgattcgttgccacttcggcaaacagttgcccctgcatcgccatctccattggatttaataaagaagaaattgcaggatgctggtgcttccagtgcgccttcagctctggctacttcatctgctacctctgaattgaatggatccaaaccagctgatgctgcacttaaggggcaactagtggcgaataatggtgagaaattannnagatacaatggtgat

SEQ ID NO: 316568 - DNA, 373 bp, Zea mays
accaacgacgatccgaccacacgaccttctcgcgactactgcctagcacaaccctgtacaacgcaatataccctgctaccatcggtcctgacgaaacaggaaaaccaccagtcacagacgcgctagcacgagaagatggagaactcagcggaccgatcgcagttgacgcctacgaagatcaaggtgttctaccagacgttcggcgtgtagaacaaggacatccacgagttcagccacaactgcaccagcaccctcgaccgcaggaactcctccgacgacgtcatgctccactacgagctgctcaaggacgacgtcagccacatagtctccggcaaggtgatcttcagcaccaactgcaactgatccagctaca

SEQ ID NO: 316569 - DNA, 351 bp, Zea mays
actacgcttcctctttaattcagtgtgtattgcaatgttctcaacaaggtgggcaccacagtgggccctattgctacgatgatttccgggatgactaacctggataacgatgcagttaatgcactatcaattctgcttacagctgtgcttaccacttatatctgcatttacatcatttagataactcgttggttaaatcctaatttgcatcctacttttcattgcgcactgtattgccaccttaccctgcactgttcctgccaatggcatatcctgctacttctctgtgtagtggtagagtttgtattagggcatacaactgcagattcatctccagcgtgcaacgaatgg

SEQ ID NO: 316570 - DNA, 398 bp, Zea mays
accacgcgtccgcacacaccattcctgggcctgggcgacaaggccacacacgatcgccggcagtttccgaaacgagaaaaggaagaaacaggaggcgagagatcgagatcgatgagcagcggtcagtcgtcgccatgcccacatggcggcgcccggccgggagcgagcccctccaagaagctgtggcgcggggtgcaagccgtctacctcgtcctcgtcaagaagcaccagccgaagctcgccgcgttcggcgtccacatgcaccgcctcctctccagcagcaagcgccgccgccgccgccacctcgccgcgcgggggcgggagcagaacccggcgctgacgtacatgtcgtgccggtccatggaccccgctgccgcggtgggtgcaccgtaaccgca

SEQ ID NO: 316571 - DNA, 269 bp, Zea mays
cctgcacctcttcatgacactccacaaatgacgaaacttgcacctgaacatatgggcaataaggtgaaccgaaaagcgatgccattatttaagcttggggataaatgtgacgtaacattggacgtactctatctagcttccgatccaggatcatatgtaagtggggctataattagtgttaacagtagtctttggttgagtcgctcgctccatattccccacgatgatctcaaggcagtctttaaagttgtctctaaaattgttaaggc

SEQ ID NO: 316572 - DNA, 68 bp, Zea mays
gcatctctgcctcgccatctgcaaccgcccaacaccgctcggcgccgccatgacgcagcgccgcaaca

SEQ ID NO: 316573 - DNA, 86 bp, Zea mays
acccacgcgtccgacagcacatcgatcgacgacgatatcgggaagcaatatggggttggccttgtcgcggctggaggagattagga

SEQ ID NO: 316574 - DNA, 394 bp, Zea mays
acacctggagacatgcattccacatcctgcgaagcaacatcatcaatgcttgccatgtcaccagaacaggctgcgcttttccacattaccgagagcttccgctatgccgcgcttctttacactgagcgcctagcgcagccgactcttcccgcttcagctctgaacttccaaaacttggtatcacagggactttaccacatttctcagattggtatgacgagctgcgttaacaagttcctactatggccattattcattattggcacggaatgcgttgaccctgaacaccgcgctgtggtgcgacaacgatgtgtggagattcaacgtgagagcgggttcttcaacaatctcagtggtctagaagtgctcgaacgagtatggcgcgaagatgacg

SEQ ID NO: 316575 - DNA, 348 bp, Zea mays
aaaaaaaaaaaaaaaaaaaaaaaaaaaaaaaaaaaaaaaaaaaaaaaaaaaaaaaaaaaaaaaaaaaaaaataaataaattaaataaaaaaaaaaaaataaataataataataaataaattttaaatatttttttaattgaatgtgtttctttttagttttttattttttgggaatattttcttttttttagccttattttttttgtttttgttttgtgtttctttggctgtctttatattttgtagttctggtataattgtctctttatattattttgtcatattttttgttttatgggatgtgttttttttctgtatgttttgcttgttggatttgtttttttatt

SEQ ID NO: 316576 - DNA, 389 bp, Zea mays
acccacgcgtccgcctacgcctcggctgacgtgtgggaggacgagtgggtgatctttccggatacctcacgatgctcgcagtaggacgtagatgataagttgaagttgactatgaagcaaatagccatgcgtatgtgcgggatatttacaaggagatgagccttgtgaagccctctatgagaaacaacacatgttatgaactgaactgtagaggtgatactgcatattgtgttacaaactgctatcacatgtttcactgatcagttgagatgttaataatatatacatctgcgttaatcatgtacagattgacgcgatgcatatgttggtcctgcgaagtgtgatcaattatggtattgacgtacgtacctactgagtgtcaaatgagc

SEQ ID NO: 316577 - DNA, 398 bp, Zea mays
acggacgcgtgggtttagcataacacggggtgcatgcacatgtatccgattccctgcatcactcacacctcactttttctgctaaattgtggcagtggtgataattgatatgcatagactgtacttatttaatgactatgaaataccatttaacatagctattgtgcctgacagggtaaatctaccaaggacacacatagttaagccttgctcagctgacgactgctaaggaatttctgttaagtgcagtttggggggtcttctcaaccattgcttgacttaaggcaacacattagaggatattcatcagcatcagaggcaattcttcccaatctgatttgagaaaaaaatttgttggcaacgaaaaattagtgttttcttgctgaatcttggggggc

SEQ ID NO: 316578 - DNA, 299 bp, Zea mays
acccacacgtccacggacgcgtccgtttagcataccacggggtgcatgcacatgtatccgattccctgcatcactcacacctcactttttctgctaaattgtggcaatggtgataagtgatatgcatagactgtcgttatttattgactaggcgataccatttagaatagccattgtgcatgacatggttaatctactacagacacacatagttaagccttgctcagctgatcactgctatggaatttctgtggagtccagtttggggggtcatctcaagcagtgcttgacatttaggc

SEQ ID NO: 316579 - DNA, 427 bp, Zea mays
accacgcgtccgcaaagcaactgactcctttgacaggtttgttttgtaccttcctgaaatctgctctggttctctacatatacagatgggttcttagttggtacccatttcttacatccttcaacttcacgcttaccatatagtatacagaagggccattgggtcccctttcagttgtctttagcatttcagcgacatctgctccacaaaatcacggcgtgtggcgtctcaacgaacgctatattaaattaattgttttctgattgcgactcatttcagctctgcattcatgatctgctctggaacccatatggttgattacagccaacttttactttctatgccctctttgttaggttttaggttggaaacatttgcgtcatatcatttatgcctttcatttctgtatctgaaaaaagtgtgaaat

SEQ ID NO: 316580 - DNA, 206 bp, Zea mays
ccctctccctcaggtcgggttcgggtacgtgatgtctccggggttcgggttctgggtgagcggatcacatgcggcctcggatgttgactacagcagctgcatctgttgactcgcctgggccagggacgaggaatcccaccacatccccattgatcaactactagccacgtcctcgagtcgacgatgatcctcaatgggtagaccca

SEQ ID NO: 316581 - DNA, 392 bp, Zea mays
aacacgcgtccgaaaaaacacccgggaaatccaagcagctgttgcaaccggttccttcgaggagaacgtgagaaagaagcatgaggccccaggtgctgctcgtcgcactggccgtcttcgccgtcctcgtagctctgccactgggcaaaggtgaggcttggacctttcgtttaatttctccatcgccagaaccacttgaaacgacgggggtcggtcggttcggcggcctggtctttggttaccgcagcgcacgaggaggaggatgaggaagggcttgaactcgaagccagcaggatgcggtggccgtgctgcgaccagtgcggcatttgcaccaggtcgcagccgccgatatgcgagtgcagggacacgtcgacgaccggctgccacccggc

SEQ ID NO: 316582 - DNA, 421 bp, Zea mays
acggacgcgtgggcggacgcgtgggctgttaaccgatggatttggtcgtcgaaagcgtcgttcatgggcgcttccccgtcaggccatcaaggtttcctcttctgcccggctcgttgccctccactaccgtggcactgagtgctgccttttccggatgtccatgcccacccattgttcgtcggaatgccccagcggtggtgccatttgccaagaagaagaggaatgaatatatcgaagatccgccagatgaggaggtcgcagatgatttcaccgacgagttggaggaggacttcgacgacgccaaagaagacgaaggcgatgtaatggatgatgacgaagagtatgaggacgactatgactttgaagatgattttgagagtgatgatgaacaggatctttatgctggagatggaagtgctgg

SEQ ID NO: 316583 - DNA, 395 bp, Zea mays
aaatactgttttttatttggtttccatttttcacctaagatgtggtttccattgcatattttcctgtgcacataagtgtaaatgttagttgaatctcgcatggtttttgaggcgtcgcctaagcgttgaggcataccctagatgctgcaggacgccacagggttttagttatccaggcatacccccagcgcctcaggatgccgcaacgcctaaaaaaccaaggaatcgcagcagcttgggctgaaaatttatatttgtgcttaggatgatgcatctcggataattggtgctactgacagtgactcaagaaaccgaactggtcctactcaaaaggccatgtcattgccttcttcgcctcatgaatataggggtcaagatacccaaaaaggtgatga

SEQ ID NO: 316584 - DNA, 299 bp, Zea mays
acccacgcgtccgaaaaaaaaaaaaaaaaaaaaaaaaaaaaaaaaaaaaaaaaaaaaaaaaaaaaaaaaaaaaaaaaaaaaaaaaataaaaaaaaaaaaaaaaaaataaaaaaaaaataaaaaaaaaaaaaaaagaaaaagggtaaaaaaatttaattttttaggtaggtgggtttacaaaatagtttttggttttattttggttttaattaaattttaaatcctttggattgtacttcggatttgctagtaagtggtaattatttttaaaaattttgcgtattgggaattaatcattt

SEQ ID NO: 316585 - DNA, 134 bp, Zea mays
caaccaaccctggaataccgccgccgcccttcgccgatatcttcaccggcaaaaaccgccaacaaattcccgcccttgcaatgaattcggggggaaacccaaaggcattaccacatgctaaaggcgaagcaaaa

SEQ ID NO: 316586 - DNA, 88 bp, Zea mays
agcggacgcgtgggcggacgcgtgggttttttttgtaaggtacctacaggtttggtcatatgataatttctccggaacggcatacctt

SEQ ID NO: 316587 - DNA, 377 bp, Zea mays
acccacgcgtccggagaggagctaccaggctcacatcgcgggttcgcaccacttcccaaccggaaccttcaaggcccgaatcccgaacctgttccgggccccaaccggaaaggaaacctcgttttccaatgggcccctaaccaagtacgaggtccaacttgtgctcggatgttctcagactatctatcggagaccaaggaggattcagggataaagaacatcatggtactggagcgcgggtttaacggatgggaggtttcagggcagcctgtctgcagctgcaccgacgctcattgcaaagggacttgttcttaagcacacgagtttatatctctcttaagccttgaacaaccaaggatcggcatggtctccgtttc

SEQ ID NO: 316588 - DNA, 359 bp, Zea mays
aggaggtgggttggcttctcctccccctccggttcgggttcgggttcgtgaggttctccggggttcggtttcgtgggtgagcggatcgagatggcggcgtcggatgttgagtaccgctgcttcgtcggcggcctcgcctgggccacggacgaccactccctccacaacgccttcagcacctacggcgaggtcctcgagtccaagatcatcctcgatcgggagacgcagaggtcccgcggcttcggcttcgtcaccttctccacggaggaggcgatgcggaacgccatcgagggcatgaacggcaaggagctggacggccgcaacatcaccgtcaacgaggcccagtcgcgcggcggccg

SEQ ID NO: 316589 - DNA, 364 bp, Zea mays
acccacgcgtccgagcgagcagtcgcgagtacgctccccaaaaacctgatcgcctgcatgtaaagccctaaaatatgtataagaaaaaatgataaaataaataaatagaatatataaaagtgttttgggatcatggaacccttagagattatctagtttttttttctctatgtgcatatttaactaaatgaaaatctagtaaaactctctacaagctctaaattggagtacccttcaataataattttcttacatttgaaagtatttaaaattttaaaaaaaaataaatcttaaaatcatcaaataaataatatgaatgtaaattatttgtttgagggagttatccatttatgaattatgcatg

SEQ ID NO: 316590 - DNA, 385 bp, Zea mays
cccacgcgtccgtgaaaactattatttctcgtcacctcctgtcgtagtaagtgtttcccgtcacctctctgtcgtaggaagaatttactgccctattactcatcttattaactctaacaaaaaatctcactttaagataggtacatatttcaatcttaattctagatttatgtttcgttctgtacatagtggttccattttttctccccttgctctcgtcatatgaatatttttactccattggttgttttatttactttaaaagcgtgccataaaatatgtgtgtttcactattaaaaaatatatcccttcacttatgtattagtgttagaattacaattattttttcttttcccaaaagtttagaaatgttttaagcgaacta

SEQ ID NO: 316591 - DNA, 373 bp, Zea mays
agcgatctgcaagtctcgctacgtagcagtgcaataaaaaaagcagccgcaatggcgagcagcaccatggccctctcctccacggccttcgccggcaaggccgtgaacgtgccgtcgtcgtccgccttcggcgaggcccgcgtgacgatgcgcaagacggcggcgaaggccaagccagcggcggcgtccgggagcccgtggtacggccccgaccgcgtgctgtacctgggcccactgtccggcgagccgccgagctacctgacgggcgagttcccgggcgactacggctgggacaccgcggggctgtcggcggacccggagacgttcgccaagaaccgggagctggaggtgatccactcccgctgggccatgc

SEQ ID NO: 316592 - DNA, 243 bp, Zea mays
atttgtccgttcattgaacggacaaatcgactgcttggcatgtagtgatttccttatgttctcttgatagccacttggaaattaaaatacggtctttatatagccacgctggagatcacaaccggtcattgcacgacgatgctcggcaacataacggttcatcgcaggtcgatccgctggcaattgatgattagtcgcaattccgtcagctacagcctccatcaacatcgtagtcactgctgt

SEQ ID NO: 316593 - DNA, 370 bp, Zea mays
aggccacaaagcttgctaccttttacaaagttgtaccatcataatataaagggggaacacattgggtgggttcagtttccgaaaaaaaatccccaagccaagccacaagtttttgattccaagttaaaaagaagaagaaaggtacctttggatttgaccaaccaagtcaagcatataatacaaactgaacttgttctatggaactctgaataaaaatccaagtctctactaacaagatctgtaaagcttatgaattaagaaacatgaaaaggcctctagctgagttggttaggtagtttgaatagcacttcccaagtcccccatgtgagcgaattttaggttggggttaaaaaatccccttgtctgtccc

SEQ ID NO: 316594 - DNA, 222 bp, Zea mays
agatcgcctatcgacttcacgtctctccgccagaccaccactaccccgtctatctctggtctggtcccaagtcccaattagtcggagcctcctgccctcctcgaccgctcaagccaagaaccagaagccatggagacggcggcgccggcgccggcgccgtgggcggaaatggagatggactgcatggtgcaagtgttcgtgcgcctcgacctcgaggacctg

SEQ ID NO: 316595 - DNA, 367 bp, Zea mays
  unsure (1)..(367): unsure at all n locations
cacccatcagacgaattttaagaaaaagaattttacattgaggacatnttatagaaaaagggtccaaattttttaatactgtgaaggaatatataataaatatttataagaactaatttaataagtaacttttgtatcacggttaaataatttttccttaattaaaaattaatttccccaaatgaaaagatttaaaaataaaatttttaatttaagtccaaaaaatatataataaaaataaaattggtaaaagccaatcaattttcctaaaaccgggtttttaaaaaattaaattaaattaaaaataaaaatttaattaattaaatttaatactaatatttattttaattaaattacctgaaggata

SEQ ID NO: 316596 - DNA, 376 bp, Zea mays
  unsure (1)..(376): unsure at all n locations
cccgggcccgaccaacccttcagccaacccgtccgacctctgcggcaaacaattccggcgggccccggcggcggcaacaacggcgttcctccgccgttgcccggcgccttccttcccggacaacaacggcacaacttcccccccttcggcttcccgttccggcccaacccggccggccgggtccccaacgggcccttccccctggtccccgcgcccgtctccggtgccggtccccccaggatccggggtcctgacttcgggggcttcccggtgccacggctgccgctgctcgctgtgtctctgtntcttggggttttgcagtgactcgctcgcggttgctgccctggtggactggatgtatatctacccgtagctg

SEQ ID NO: 316597 - DNA, 216 bp, Zea mays
tcggggtgaaggacgttcgcttccccggttcgtcgtccgggccacggtttaacccctcgcccttggaatccttcggcggaacccctttctccattcggccttcggcgcgcccgggtttttccctttccgaaaaggcaagcttcaatcccggccggggtggctcccccggcgattgggcgggaacgccggccaaccaaaaccttcttggccggcggc

SEQ ID NO: 316598 - DNA, 198 bp, Zea mays
aagagtctcgaatctgaaatcgatcgtgttgtatatgttccacgatcgcaacgacgtaaaatggttcaaggcaaagtattatgcgtgccattgacatagccaatttaaccaatttcgaagcaacgacaatgttatttttgcagcctaatgagcggtggaaaaaacatggtcctcgtggccgcatcatggaaaacgttg

SEQ ID NO: 316599 - DNA, 434 bp, Zea mays
accacgcgtccgaatattttgagcattcagaaacacaccaagcgaagcacattagcaacaacctaacaacaatggctaccaagatattatccctccttgcgcttcttgcgctttttgcgagcgcaacaaatgcgttcagtattccacaatgctcacttgctccaagttccattattacacagttcctcccaccagttacttcaatgggcttcgaacacccagctgtgcaagcctataggctacaacaagcaattgcggcgagcgtcttacaacaaccaatttcccagttgcaacaacaatccttggcacatctaacaatacaaaccatcgcaacgcaacagcaacaacaattcctaccagcactgagccacctagccatggtgaaccctgccgcctacttgcaacagcagttgcttgcatcaaacccacttgct

SEQ ID NO: 316600 - DNA, 280 bp, Zea mays
aacacaacgagaaatgatagcgtcctgatcgtcgccctcatcggcacccaacaccgcctcgggcacatgattcggcaccttgacgatcggaagggagctgcactcgccatgtacgtccctcttctgcgcaactcccgcgtcgacactcttcatcaggcccaagcctgaacgctgtagccatagccgcgatcgcacatacagcgtcacctcccaccttgcggtgtcgcacgatctcccccaaggtcagaggcctcaacatctggaaagacttaacccagct

SEQ ID NO: 316601 - DNA, 402 bp, Zea mays
acccacgagtccgaaaaaaaaaaaaaaaaaaaaaaaaaaaaaaaaaaaaaaaaaaaaaaaaaaaaaaaaaaaaaaaaaaaataaaaaaaataaataaaaataaaaaaaaaaaaaaaaaaaaataaaaaaaaaaaaaaaaaaacaaaaaaggcgcggcccctcaaaagtttccaactttatttaccctttattccaatttcaaactccttcaaaattttccctaaatttcattccatggcccttctttttaaaacttcttacttggaaaacccctgcctttcccctttttaacccctttgcaaaaaatccccttttcccaatctggctttttaccaaaaagccctcccccttttccccttccaaaaatttccccaccttaaatgcaaattggaaccccccctt

SEQ ID NO: 316602 - DNA, 364 bp, Zea mays
aatgcaagcaacaggaaacggatttcggagtcgccgcttcactgtagactggccactagttgttcacagcccgagcgtggctggattctagaaattggaaaccccactaccttgttgtcatgctgtgtgacacacgtagtacaaaggtcgtcttgaacaacatgactgcacatgcagcagagaggatatttcgtgacctgaaaatgtcagcatctgctgttctgtactgtgcctcattggcgttaacagtgcataggtatttgacatgcataaatgaccgtgcaagtatttgacttagactgacgaagacttgtacgacggcatttcatttaggaaaataagaaactccaaacagagttgaagg

SEQ ID NO: 316603 - DNA, 314 bp, Zea mays
agaataatatataaggaaaaaaaaaaaaaaaaaaaaaaaaaaagaaaaaaaaaaaaaaataaatacaaaaaaaaaaaataatttatgataaaaaaaaaattacataagttcactctactatgtgaatcacacactgacgccttctgaaaattcccgtcatgtttgtagttcatatcagtgacatcccaatgctggcacacatcatactacttcctgtactactattcttatcgtcattgcactcaattgttactcagatacatgattaacgctccatccattatctatagctgatccacgatttctgcaaactt

SEQ ID NO: 316604 - DNA, 417 bp, Zea mays
cgacgacgatctccacgccgacagcgggcagcggtggctcgcggcgtccaagcatcgtgacgtttttagtgcagcggacacggttgcagtgtcacagcagtcgccggcaagtggtcatcgtctggttgtcattcatgacgaaacgaccatcatggctccacctgttcaggtcgtggttgtgcaggtggaggacaagtgcagtgttgttcgtcacggggagacgagcggttcttcttcttcttctatttcgtcatcggcgagcgaggaagaggacgtgtcctttttggagtcgaaccgagaaatgctggaagatgatgctgatcgtagtacgtcctctgatgggagctggagagtggagaaagtgaagagactgatcaacatggtcaccctggtgtctctgctcattcttttgtacac

SEQ ID NO: 316605 - DNA, 441 bp, Zea mays
accacgcgtccgcagaatctgagatatctggacacaaacctggagatcatgtgtggacagcagggagcactgcctatggttgagaagttgacatgccgtgccagcatggggaagtatgttgccttcgccaggagcagcatgcctttcgacgatggcagcgtggtgaatcctgctgctgttgctgaggcagaattgccagtaattctacctttggacattggctggcccgtgaacatgccttgcctccggggcatcacctatttgctggactaccaggactgcagtgccaaggagtgggctcatgtggagacattgctcatgcacgtgagaaaaatccaccccaactgtccacccttccgaatcaaaaagaaccgcagagacaaggagattactatgatcgacgcaatcatctaccttgaagatgtcaaggatgtgttcaag

SEQ ID NO: 316606 - DNA, 315 bp, Zea mays
tctgctttaggccgtttgaaaaaaaagacaagtacatggatatgtacttgctttgccattttggatcctagatgatgttgttcaggttgagaattgagataatcagaaggaatgtatagcttctgctagtagttttccaagtcaggaggttgtctataactttgatttctgcaactgaatcccaagtgtggaactgcaaattgctgaaaagtttagactgtttaaggtggttatataaattgctgccctgcaagtttctgcaaagcaattaaggctttgttcatccttcgaaatatgggaattttatgttttgtg

SEQ ID NO: 316607 - DNA, 413 bp, Zea mays
accacgcgtccgcaactagcaacatagaaagcacaagagtgtaccaacaatggcagccaaaatattttgcctccttatgctccttggtctttctgcaagtgctgctacggcgaccattttcccacaatgctcagaagctcctatagcttcccttcttcccccgtacctctcaccagcggtgtcttcggtatgtgaaaacccaattcttcaaccctataggatccaacaggcaatcgcagctggcatcttacctttatcacccttgttcctccaacaatcatcagccctattacagcagttacctttggtgcatttattggcacaaaacatcagggcacaacaactacaacaacttgtgctagcataccttgctgcctactctcagcaacaacagtttcttccattcaaccaac

SEQ ID NO: 316608 - DNA, 278 bp, Zea mays
ggtcgagcacgcgtccgacgggtgcaggaccaggctcgcggaagaccgcctgtcccgcttcgagaagcagtagcagctctagataaagctattagttagcacaggatcgaccatatgtatgcttctgtatgtcagttgtcttcgcatgcatatgggcgtttataacgtgctagctcgtgtcgtacgtacacgtgtatgcacgcatggtgcaccacacatgaatggtgtcgtcatccaatatcatcccacgtttctttaaaaaaaaaaagaataaaata

SEQ ID NO: 316609 - DNA, 256 bp, Zea mays
gcgtccgacactacaccacaccacacacacccgacgactatgacacacatgtagaagatctagttcgtccaatcgtgaccgtgacgcaggacgctatcaactatccatgacatgaataatattggcggcctctacggtggcaacgcgctctgtcacggtgacgacagctatcttcgctgcagctgtagccacagacggcaccgacgtgctgatcatcgtccccaagacggctggcgccgggcgcatcatctggttc

SEQ ID NO: 316610 - DNA, 96 bp, Zea mays
accacacgtccgcccacgcgtccgcccacgcatccgcccacgcatccaagggccgcccttttatttttttttatatttcttttattttttttattt

SEQ ID NO: 316611 - DNA, 231 bp, Zea mays
aaaaaaaaaaaaaaaaaaaaaaaaaaaaaaaaaaaaaaagaaaaggaaaaaaaaaaaaaaaaataaaaagattacatacacatcaataaaaagataaaaattcttcgagatggtcacaaaactttaaattcattgtcgtgagttattaaaactttgtgactggaaataccctgtcgttagccatcttaatctccttgcattacttacccctttcgctatccagcgtaatat

SEQ ID NO: 316612 - DNA, 238 bp, Zea mays
tggactggctaggactggtatgattagatggcctatcaataaagcaacaccgcttactgctgacaatcctctattgacaaatgccaatttatgtcgcgcaaccaatagcgatataagcgaaaaataagccctgaaaccggaccaggctaaatgtgaattctgccgaacgatagggacgaaacagaaatttaagaagtaatatacgcctcagttcgttagcctgtgccaaagatcacag

SEQ ID NO: 316613 - DNA, 174 bp, Zea mays
atgagaggctaacctgagcccgacagaaccggcttggtcgatttggaacctggtaaggcccggtattttttttattgaaagtgtaactttctaaattaggtcctgttggtttgcgttggattgcgtccggaatcgtttcaaggtttatataaattagagaagcaatccggttag

SEQ ID NO: 316614 - DNA, 90 bp, Zea mays
gcgtccgaggacacgtgggcggacgcgtgggcggacgcgtgggaaaaaagaagaagaaaaaaaaaaaaaaaaagggcggcgccaaaagat

SEQ ID NO: 316615 - DNA, 400 bp, Zea mays
accacgcgtccgcccacgcgtccgggcggctttcaatcgtttccacctggcgcctttggccccggctgcgcgcgtttcccgctggccgctgctatccgatttcttgattcggtcgctctgtctcgtcaaggcgtgcaccgccttccatgttgtttgttcaaaatttctgcttctgcaactctctttgcttgttctgtgaaaacataggttccatttcaacttccgtcggacaggacctgtattcgtcgagaaaaagtccctttttcatagacgaactttgcacgactgtttcttatatagagatttaagtcgatagatggtaaaaggccatgggagacatacagtttactgggaaaaccagtttccattcagctgtttttctctccctaattttgatttg

SEQ ID NO: 316616 - DNA, 87 bp, Zea mays
aggacacgtgggcgcgtcatccccgaggacgagctgctcaacgtccagctcgccactgccgactactgattgacacgtctcctgatg

SEQ ID NO: 316617 - DNA, 365 bp, Zea mays
acgtacgtatgacggtaaagacctttaccgacggaccacgaacgttgttgcaagctgtgtcggtaaaacttttaccgaccgaccgttgttttaccgacttatcttctgtcgctaaaagaaaagttttaccgacgcttcatcatttggtaataatagtattaccgactctctaagagttgcagctgccacgatgtaccgacccatcttctgtcgctaaaagagacattttatcaacgcttcatcagttggtaataatagtattaccgactctctaagagtcactaattgtgtagattaccgaccaacaattcgttgccgcagatattaccaaccaacaatccattgcattcatacaaatagataat

SEQ ID NO: 316618 - DNA, 176 bp, Zea mays
gaactccccaacaatcctgaactaactgggtctgcctcaacgttgacatcaacaattataatacaacaattgttggcaacaactgaaaaatatggaatggtcccttcgcctaacctgtgttaaacaaaactctgttaagaactgaatcctgaaactggtgcaacaactttaaccct

SEQ ID NO: 316619 - DNA, 387 bp, Zea mays
ggttctagtcgcttctcgtcgtttcgttcgtaggtgcgccccctctcatctgcactaaacctgagtcctgattagggttctacataatcgcttctctttgcctgattgatttgataccctacatccgtggtcgccggttgttccggattagccggatctgttggtctccggttcgtgtgtgctgtaccggatttggggtatgttcgagttgcttggtagatttacgttggtacatacggttgcacagaagatctggatttactgagtagtaggctagtagctgcctacggcgtacacatgacttgtgtatgaatcgtgtatctggcgtgtcgatgcttagtacgcgtagtgctgcaccatactgaaactgaatggacattggctgtg

SEQ ID NO: 316620 - DNA, 280 bp, Zea mays
cccacgcgtccgcccacgcgtccgagccctgctaccttcttgatacaaccacagttgttgccgttctaccagcacgctgcgcctaacgctggcaccctcttacaactgcaacaattgctgccattcaaccaacttgctttgacaaacccagcagcgttctaccaacaacccatcattggtggtgccctcttttagatttcttatgagttatagttcaataataaagttttttgtctgatgtttgtggcttcccagaaataagaaagtacatttctagatt

SEQ ID NO: 316621 - DNA, 90 bp, Zea mays
cccacgcgtccgcccacgcgtccgcccacgcgtccgcccacgcgtccgcccacgcgtccgcccacgcgtccgactagttctagatcgcga

SEQ ID NO: 316622 - DNA, 143 bp, Zea mays
gcgtccacccacaacgtccgttttttttttttttttttttttttttttttttttttttcttttttttttttttttttttttttattatttttttatctttggctgcatctcaagacgagataacgggaggccgccccaaaggg

SEQ ID NO: 316623 - DNA, 379 bp, Zea mays
cggacacgtgggcggacgcgtgggcccacgcgtccgcggacgcgtgggcgaggacgaggccaagaggtacgagcaggagatgatggagttcgggacggcgtcgccggagtacgtgatcgtcgcggccgtcgcgctgctcaacctcgtgtgcctggcagggatggcggcggcactggatgtgttcttcgtccaggtcgctctctgcggggtgctggtgctcctcaacgtcccggtctatgaagccatgttcgtcaggaaggacagggggaggatgccgttcccgatcacgctagcctccgttggctttgtgacgctggccctcattgtgccattcttttgactttgaggtgccaataatacgtgtacgggcacacgcacg

SEQ ID NO: 316624 - DNA, 351 bp, Zea mays
gcgtccactgtaacctgggcggtagcgtgggcgcatgcgtatgcggacccatggccgaagaccaggctgagatgtacgaccacgatattattgagttctggactgcttggcaggagtacgtgattgtggcggccgtcttgctttcaattctcgcgttcctttcaaggattgctgcatcactgcatgtgtacttcttctaagtctcactctgccggttacgggtgctcctctacgtcgcggtctatgaacccatgtgcctcacgtatgacatggggaggatgcttttccctatcaggctaacctttgttggcgttgtgatgctagaccgcattggttcattcttttgacttt

SEQ ID NO: 316625 - DNA, 319 bp, Zea mays
actagttctagatcgcgagggccgccctttttttttttttttttttttttttttttttttttttttaaaggctctgttaataatgccatcttactagtttaattggtattaactcaaagtctcaaacgtgcctcttgttgcattgacacacatgtacaatacaatcgtacatatagtacgttttattcgacaagcagcctctgcatgcaataatagtacaacccccgatttaattaattggactaatgcatgctgaggatggatcagatggaaatgctgctggggatgcccctcccggtgactcccggcttggaaaaag

SEQ ID NO: 316626 - DNA, 374 bp, Zea mays
  unsure (1)..(374): unsure at all n locations
cggacgcgtgggataaaatatttcatgtaggttttgatatcgaagtccagtagtctgatttaattaggagaaccattgatgtacttgtactccagatcggagtttatagcccgcacaaggtagcttgctgtaactggcactgcctcactctttagagccttcggttccatgtcagtatgtcaccaactcacgatgacaaactggaatttggaatgacatctgcttgtgtggaaatttcaaagccgaataaactatctcttcaggcttcatttgtcanagattccaaagtatattaacatagccacccttcgttttccattggaatcttaacctgtaaaattacgcccgtgcaactgatgatggcatcaacacag

SEQ ID NO: 316627 - DNA, 381 bp, Zea mays
  unsure (1)..(381): unsure at all n locations
cccacgcgtccgcggacgcgtggggatttatcttgcaaatggtatgtggatccgttccagaggcaatgagccttgcagccagtttgcagtataaaaaacccaattatgtccactgttggttcgacgcagcgtgtgccgaggatttctactgccaagcataagtgaattgcagataaatggtctgttcgcaactggtgctctcgggcgactccatcactgagcaacccttcgccccggtggctgcggtgtcgcactggctgacacctgctcgcagttgcattacaagttttactgactatgtantttcaggtttattcaatttcagttgtaatgcttctgacagcagttgtatcagtcctcttgttcagcttccataataat

SEQ ID NO: 316628 - DNA, 165 bp, Zea mays
agaaaaaaaaaaaaaaaaagaaaaaataaaaaaaaaaaaaaaaaaaaaaaaaaaaaaaaaaaaaaaaaaaaaaaaaaaacaaaataaaaaaaagggcggccgctcaaaaggattaaaaaagggggttcccctcaaagggatcaaagtttcctttccctggtatcc

SEQ ID NO: 316629 - DNA, 62 bp, Zea mays
gagaaaaaaaaaaaaaaaaaaaaaaaaaaaaaaaaaaagggaggacgctcaaaaggataagg

SEQ ID NO: 316630 - DNA, 422 bp, Zea mays
atgcgattgtttggtttacataattgtaatgtgacgggtaatcgataaaaaaaaaaaaaaaaaaaaaaaaaaaaaaaaaaaaaaaaaaaaaaaaaaaaaaaaaaaaaaaaaaaaaaaaaaaaaaaaaaaaaaaaaaaaaaaaaaaaaaaaaaaaaaaaaaaaaaaaaaaaaaaaaaaaaaaataaaaaaaaaaaaaaaaaataaaaaaaaaagaaaaaaaaattaaaaaggggggccccccaaaaaaacaaaacctttacccaacttaaacggcattcaaaaaacccccaaattggctacccaaaaataaaaccaaaggggccccttaaaaaaccccttccaagaaaaaacccaggcttaaaacaaatatgccaccgtcaaaaaaaaccccctttccacaaggggggtataaacgaaaaagc

SEQ ID NO: 316631 - DNA, 362 bp, Zea mays
ggcttctcctcccccaccggttcgtgttcaggttctggttcgtgggcgagagggaagagatggcggcgtcggacgttgagtaccgttgcttcgttggcggcctcgcctgggccaccgacgaccactccctcaacaacgccttcagcacctacggcgaggtcctcgagtcgaagatcatcctggatcgggagacgcagaggtcccgcggcttcggcttcgtcaccttctccacggaggacgcgatgcgcagcgccatcgagggcatgaacggcaaggagctcgacggccgcaacatcaccgttaacgaggcccagtcccgcggcggccgtggaggcggcggtggcggatacggtggcgggcgc

SEQ ID NO: 316632 - DNA, 363 bp, Zea mays
accttaaaggctttgcaacctaacttttcaacggtaacaaaaaaattcacttcaaaattcatggaaaacccccaccaaaatattctcacaaaacccttgcacaatcaaggaaggacacaattaaaatttcaataccatgataacagtgatttaaagactactcacgatcttaccgtgtggtcttcaagaactgagcaacagagaaacaatattgctgcccagacaaagctatgtctggagggttggacgccaactagaagtcctgaaggctacaatcagatattctcggcatttaaaccactgaaagatatacataacccacttggtccttttcctagtcaaatatctgggactcactcaaat

SEQ ID NO: 316633 - DNA, 360 bp, Zea mays
acccacgcgtccgcggacgcgtggggtcttttcagttatcactagatgtaaacaccctattttacagcccctcacatacactacttggacacccacaaaaacagatcaaattttgcaacttaatattttagtaatttgtttttcttttatttatatggaccaccagatagtggatctgagggactataaaagagattctttgtatgccgtatgcaaagaattttttccgtttgatttaaaaaaaaaaaaaaaaaaaaaaaagaaaaaaaaaaaaaaaaaaaaaaaaaaaaaaaaaaaaaaaaaaaaggcaaaaagtaacagttgcacaaagacgaaagagaagtcccgaatttcaatgcg

SEQ ID NO: 316634 - DNA, 371 bp, Zea mays
ggtacgcgtcggcagacacgtggtccacaagcgcaacgcagtccagtgtacctctgttgcagaaccaggtccaggatatcctgcaactgtcgatgaagcttcggctatggctcacgtcgtaagtgccgcatgaagtaccctgatctgcatgatagcaccaacggcgcacatgccagcgtagtactcgggctggcacacgaaaagcaagcagcacacgtcttactcatcgccgctgaggacttcgtgaacgcgcgcagtgccgtcactgaggtcggcatcgcaagtgcgagctctgcatctgatgatgacatccattaacgatcatcgctctaactacaaccaagcgaccttgtcctgctgcatgagcaaca

SEQ ID NO: 316635 - DNA, 362 bp, Zea mays
aggtgaacctctggtgcagcaggggcagggacgccgtgggcaagatttgcctcgcactggagccgctgcgcctccgggtcgtcacggccaccatcaccgcgcgcggcgacactgtcttccacacactgttcgtggagacaggagaaacaggtggcgctcggctaaaggaggcgatactggctgctctcgctcggctcaacgtcctcgctaacgctgaccaagtcgtccatgagttactgggatgattgatgcggtggcatcttggacagcaacacctggtgttgttgtcgttgtcagcactctcgactgtccgattcaataatgatgtacctcaggaatgtttgaatatgatatcattgcca

SEQ ID NO: 316636 - DNA, 164 bp, Zea mays
acaagcaacatagaaagtggaatccagtagcaacaatagagcaaaaatgagaaaaaaaaaaaaataaaaaaaaaaaaaaaaaaaaaaaaaaaaaaaaaaccaaagcttccccggacgcgtgggctagttcaaatcccaatcggaagcgctagaaggattaagat

SEQ ID NO: 316637 - DNA, 373 bp, Zea mays
gacccacgacgtccagcctgcccgagccgccgctcaccttgctaaagtttgccctgtaactcagtaccggattatcgcatagggatgtaacactggcattttggtatccatgaacgattatgaatgagggaatatttcagagaatgttccggtgatgcaaactaactagaggaaaatttgacacggaaagttccttagtctgtacaatgtgcctttgtggtgagtatagatgtccatttcatatggcctttgtgatgagtatgtctgcattgaaaagttaatgctttcattcttgataatggacacttcgatttgattcaaagacgatattctgttgcataattctgaaataaagttcttttttttagtatta

SEQ ID NO: 316638 - DNA, 382 bp, Zea mays
acgcgtccgaaaaaaaaaaaaaaaaaaaaaaaaaaaaaaaaaaaaaaaaaaaaaaaaaaaaaaaaaaaaaaggatggacgtccgccttgagaccttgcctcaccgagtgctctcggtgagctactttgtttcgatttatcacgaaatccgtttgcttcatgttgtgcatgctcatatctgattgctggattcggtaaaccctcattggatcctgtatcggttagtccttgccatgcaaggttcttgtatgttatgttttggtggtcgagcatcgcatgttctgcttctggatccagatctggagaaatcgcgaagtcatcgtcgttcggttcggagcggatctaaagcgactatatatggaggctgcgggatctctcggtct

SEQ ID NO: 316639 - DNA, 396 bp, Zea mays
acaacaagcaacatagaaagtggaatccagtagcaacaatagagcaacaatggagaccaagatattttccctccttatgctccttgctctttctacatgtgttgctaacgcgacaattttccctcaatgctcacaagctcctatagcttccctttttcccccataccttccatcaattatagcttcagtatgtgaaaacccagctcttcaaccatataggcttcaacaagcaatcgcagcaagcaacatacctttatcgcccttgttgtgtcaacaatcgccatccctatctttggtgcagtcattggtacaaaccatcagggcacaacagctgcagcaactcgtgctacctgtgatcaaccaagtagctctggcaaacctttctccctactctcc

SEQ ID NO: 316640 - DNA, 84 bp, Zea mays
gacccaagcgtccagggggagcgatgtctgtaaggaaaatggactatgatttatttgattattgagttctggtgtttaatgatc

SEQ ID NO: 316641 - DNA, 175 bp, Zea mays
acccacgagtccgcatgcgtaaaatcacgagctaaatctagcagctataggtgcgcacccgtcctgtacttaatgtttccgagtatatggttagcacacattttgacacacttcgtagttataccagcattcttggtagtaattcaaaaatgatcactttgattacttattagtt

SEQ ID NO: 316642 - DNA, 265 bp, Zea mays
aggactagttctagatcgcgagcgcccgtcgcctccctttccccttccctccctccctctccccgcgggccgccagaggcaatttcgccctcgattcgaccccgattcgtccgcccgcgaccgggattccctccgccaagcgcggatctgaacgctgcgctccgtgtcgccgctcgaatccgccatgaagggggccaaatccaagggcgccgccaaggccgatgccaagctggcggtgaagagcaagggggcggagaagcccgcc

SEQ ID NO: 316643 - DNA, 347 bp, Zea mays
acccacgcgtccgcgcgtcatcgtcttcgacaacccacaacctctgctctaacctcatcgcactcgcggaatcgtcgtgaagccgctagccgtctgcctcgtcctcacacccgacaagctgtcgtgctcggtgtgttttcaccgtgcggccttacgtgttcctctcgcttcatcggcttgtcgcgtgttagagcaaagctccatgatgaagtggacatcatcgagagattgctccagtacttgaagacccattggtgtggttccacctaactggttatctagtagaaggattttggatcatctctgcaacaaaggaaaagttttgatgtccttggcttcatcagatg

SEQ ID NO: 316644 - DNA, 368 bp, Zea mays
acaatttcttccattcaaccaactgtctacactgaaccctgctgcttatttgcagcaacaactattaccatttagccagctagctactgcctactctcagcaacaacaacttcttccatttaaccaattggccgcactgaaccccgctgcttatttgcagcagcaaatactactaccatttagccagctagctgcagcaaaccgtgcttccttcttgacacagcaacagttgctgcctttctaccagcagtttgcggctaaccccgcaaccctcttacaactacaacaattgttgccctttgtccaacttgctttgacagacccagcggcctcctaccaacaacacatcattggtggtgccctctttt

SEQ ID NO: 316645 - DNA, 293 bp, Zea mays
  unsure (1)..(293): unsure at all n locations
ggacgcgtgggtggtgcagtcattggtacaaaccatcagggcacaacagctgcagcaactcgtgctacctgtgatcaaccaagtagctctggcaaacctttctccctactctccgcaacaacaatttcttccattcaaccaactgtctacactgaaccctgctgcttatttgcagcaacaactattaccatttagccagctagctactgcctactctcaacaacaacaacttcttccatttaaccaattggccgcactgaaccccgctgcttatttgcagcagcanatactac

SEQ ID NO: 316646 - DNA, 93 bp, Zea mays
aacggacgcgtgggcggacgcgtgggcggacgcgtggggcacgcagtacgccggcaaaatgaaaaagggctcctccgcgtcatgcactaactc

SEQ ID NO: 316647 - DNA, 131 bp, Zea mays
agaaaaaaaaaaaaaaaaaaaaaaaaaaaaaaaaaaaaaaaaaaaaaaaaaaaaaaaagggggggcgccccaaaaggttcaagcctaacttacccttcaaggcaagtccaaacccctccaaaatggccccc

SEQ ID NO: 316648 - DNA, 341 bp, Zea mays
acccaagcgtccgcccacgcgtccgcccacgcgtccgcccacgcgtccgcccacgcgtccgcccacgcgtccgcccacgcgtccgcccacgcgtccggcccccttcccattccttgcagtaccttcaacagtgatggttccatatttgcctatgcggtttgctatgactggagccgtggggcctaaaatcacaaccctgcagctgcaaagacatccatctatctccacagtccacaggaaaccgaggtcaaaggaaagccgcgcattgcaacaggcatgaagtgattgcattgaaggtgttgcaaggaaccatgatgtcatccagcagttttgtcatgcct

SEQ ID NO: 316649 - DNA, 360 bp, Zea mays
agccacatctccactcccacaacaacccgcaataccaacgacacaatgctcggcctccgcaccgccgcccgcgcctcgtctgcgctccccgttttccgcaacgccgctgcgcgccgcttcaactccagcgccgcgaagggccttgagggccctgccgacaacgccttcaatcgcgagagggccgctgtcaagcagcacgctgctgacacttctggcacctggcgcaagctttccatctacgttgtgatcccctccatcatcctcgccagtgtcaacgcctacaggctctggaccgagcactgggagcacgtcgcccagggaccagctcttgaggacaagcccgagtaccccttccagaac

SEQ ID NO: 316650 - DNA, 369 bp, Zea mays
agcgtgttcgtccgcgacacagcgaatgaattgacacgccgcgcgcgagctcgctcggctggcttgctgacgcgcagtttctctctgtcctctcgcgccgccgcaggatctctccaacaaggtcctgctcaatgccgtcagagccttctcgccgccgctgctgctccgcctgggagggtcgctgcaggacaaggtggtgtacgggtacggcagcgcgggcgccgggcggccgtgcgcgccgttcgccaggaacgcgtcggagatgcacggcttctcgcatggctgcctgcccctgcgcaggtgggacgacctcaacgccttcttccggagatccgggtgagctccgtccgtccggccggccggcggttt

SEQ ID NO: 316651 - DNA, 396 bp, Zea mays
agaaaaaaaaaaaaaaaaaaaaaaaaaaaaaaaaaaaaaaaaaaaagaaaaaaaaaaaaaaaaaaaaaaaaaaaaaaaagaaaaaacaaaaaagaaaaaaaaaaagaaaacaagaaaaaaaaaaaaaaaaaaataaaaagaaaaaggggggggcccccctgggggttcaatcttttgatcgccgattttcgcagggaaaggccctccaaaagggcccccaaatttacttgcaggggcgatctttttaaaccatcttacagggaaaacccctggatttcccaatcttcccccctttacaaaaatccccctttacctgtaggggagttacacaaacagggccactgcaattcaccttgccaaaaatttacccgccacatggggcaactgggtcccccc

SEQ ID NO: 316652 - DNA, 118 bp, Zea mays
aaaaaaaaaaaaaaaaaaaaaaaaaaaaaaaaaaaaaaaaaaaaaaaaaaaaaaaaaaaaaaaaaaaaaaaaaaaaaaaaaaaaaaaaaaaaaaaaaaaaaaaaaaaaaaaaaaaaaa

SEQ ID NO: 316653 - DNA, 351 bp, Zea mays
agcccacgcgtccgcggacgcgtgggcgggcgcgtggcgctaggtggaatactcaggtgaggttggatcagcgctggggcctactcgacagttttacacccgcttaacccatggtttacaaagtgctcaactgggactagggtgagctatctcttcatatgattcacgattgcacacagacaggaaggatgtgatccgttgacatcctgaatatgggtcgtcaggaaagtcacttagtacagatctaccaagtgatggcatgtatttgcaatatcctccacgtggattgttgtcacgatcttggccatctacagttgatacatcagaatgtatcagaatcttcagagtttt

SEQ ID NO: 316654 - DNA, 291 bp, Zea mays
aggtgggttggcttctcctccccctccggttcgggttcgggttcgtgaggttctccggggttcggtttcgtgggtgagcggatcgagatggcggcgtcggatgttgagtaccgctgcttcgtcggcggcctcgcctgggccacggacgaccactccctccacaacgccttcagcacctacggcgaggtcctcgagtccaagatcatcctcgatcgggagacgcagaggtcccgctgcttcggcttcgtcaccttctccacggaggacgcgatgcggaacgccatccagggc

SEQ ID NO: 316655 - DNA, 69 bp, Zea mays
gcctcatgctagctgtagtattgcccgatttctcagatttagaaaaaggagcctttcttatcggtgccc

SEQ ID NO: 316656 - DNA, 394 bp, Zea mays
cgacccacgcgtcagatcgcaatcggacgaccttttttttgtttttgtttattattctttttttctgttcttatctttttctttcttatctatttctatattttttctcttataggatatattttgaacaaggtgagataatggagtaagtatcaatcaaattgatcaactcaagcaaacaccgcatcctacagaaaacattgaggagatctacgtaactttggttttgaaaatcctgcaaccgattcaataattcctaatccaggtcgactagcagctgacagagtttagacatccaacatcaagaattgtcaggacggacataagtcatgacaagcagaaaggaatccaaagggacgactcaaaaattgggtcaacgattaggggctgaagt

SEQ ID NO: 316657 - DNA, 275 bp, Zea mays
aagccaagcgtcagggcgcgctccgtctgatctctcaccgcaggaatctcgaacctctctcacccatcaacatctacccccaaacctcaaccggcctagctccagcacttgtgcactaactatctccgtgcggttagccacgagcatcgatcctcattaatccatacatccgacgtctcacatctccaacttgcccacttatgatgtaatgtctgtccatgatgatgccatataggaatcgccattgggaacctctcagcgaatttacacgacat

SEQ ID NO: 316658 - DNA, 281 bp, Zea mays
acttcattacagaacttcggttctagattcatgccgtgatggagcttcatttggaccataaggtctaagatgtcatgcaattgctggttaatcagcggatgccgatcaaacttcaactgcttcaacgattttcctgagatagatgagactaccaacttcgcgcatgcaaccatcgtcatgtacttgtcattggcgtatactgagttcagcttattatacctgtgaaagttctattactatcagtctgcattaaactcttcatttcattgaatccaaccgtg

SEQ ID NO: 316659 - DNA, 395 bp, Zea mays
agcccacgcgtccgagattctcaaaatgggtctcaagagtgatatgatgttcgataagtccggttttttgtcctgtcctgtcgtgaaaagttctgaactgctagtctggcgcaatgccttggctgctactgttgcgtcaaagtgatattctggctgaccgcattctcttgtgctaattggcacaggtccgattgcatcattgagtccctcaagcatcggatgtgtatattcccaaagatgtaattatgccctagtcgtagttttccccccttcaataaatcagttccatagtaaaaaaaaaaaaaaaaaaaaaaaaaaaaaaaaaaaaaaaaaaaaaagggaggaagcacaagaagaatcaagctttaagtatccgtgcaagcaaagtcaaaacc

SEQ ID NO: 316660 - DNA, 304 bp, Zea mays
agcccacgcgtccgcggacgcgtgggtgagagtattttgaatatttgttctgtagacattctgttcctggcttgatgttggcgctgcacaatgacaatggtatatgcagtaggtttgatttttctttttcttttaaaaaaaaaaaaaaaaaaaaaaaaaaaaaaaaaaaaaaaaaaaaaaaaaaaaaaaaaaaaaaaaaataaaaaacaacaaaaacataaaaataaacacagcaaaaaaaaaaatcacaagaagacacaaaaaaaaaacaaataagataaaaaataaaaagggggggctccac

SEQ ID NO: 316661 - DNA, 255 bp, Zea mays
cggtcgcctgggcttcctccccctacctagctagccttccggttcctgcttcgagtcggagatgaggcgcctcgatgagctagctggccattgaggagttattgcttccgaagctgctctcgcagctcacaacagcagcgcgacacttgtcgatgttctcacactgatagaggacttaggctgacgcacagatgatttaacactattagttcatcgcacacggatgaacctaatgataagtatttcaagaggagt

SEQ ID NO: 316662 - DNA, 414 bp, Zea mays
gggccgagggtcgacccaagcgtcagcccacgcgtccgcggacgcgtgggcggccgcgtgggggctgccagcgcttcattcgagatgttcgcagtaccaaagtagacagtgccgttcgtgatgctcgtatacacgaagacgatcccttgcgcggtattgtctaactgcctctggaaagagtatttcacaagcgcagccagatcaaccagatgtttccccttgctggaagtgtacgatatggccgcataagaatctccatggtcttccgaagtgtgcatgtacaactaccaagagatatgctgggctgggactacgggactgtggatatcaaaccctctgtaaaggctattgacgtgccggaggacctaaagccccttcgactcaaggtccgcacgccattggaacgcgcaaagc

SEQ ID NO: 316663 - DNA, 406 bp, Zea mays
agcccacgcgtccgaataaattaactggtgataaatattctgtaacagagatagtaacacgttattgcctagcaatatctaagattacttttttcacaataaaaaaaaaaaaaaaaaaaaaaaaaaaaaaaaaaaaaaaaaaaaaaaaaaaaaaaaaaaaaaaaaaaaaaaaaaaaaaaaaaaaaaaaaaaaaaaaaaaaaaaaaaaaaaaaaaaaaaaaaaaaaaaaaaaaaaaagggggggccccccaaagggttcaaacttaaattccgggggaaggcaatttaaaaccccttcaaaagggccccaaaattcaatttcaggggggtccttttaaaaacttcgggatgggaaaaacccgggggttaccaaatttaaaccccttgaaaaaaaacccccttttccc

SEQ ID NO: 316664 - DNA, 386 bp, Zea mays
gacccacgcgtcagcggacgcgtgggtccgtggccgatctactcgatctggatcacaaagagtgagcctgaaatccttagttgttacagttcccatttctagctgcttatctacaagcgggcatcctctgcaaagttgcaatggtctaagggatggcatttggcgaagcagggaacaactttatcacacgtttcttagatgcactgaaacgaagttgcttagtgttgacactactaaagccactcgaatttaaccccaaattgtatcctttgcagcgaacttcttcagttgtgtccttgtatgccaccgtggtagagtcctggctaatttaacacaccaaattgtcttgacattttaactcttaagatatcacctgtagccactga

SEQ ID NO: 316665 - DNA, 193 bp, Zea mays
ccacgcgtccagcggaatcgacggcatccggcgtggctgggccaatcggcctgaaccacctctgcccggcccagattcaacacaatccaggcccagctcatgttccagcaccagcatcagatgggcctgcaccccgcgttcctgcgcccgcgggcgcagccgattaagcaatccgggtcgccaccggcacaat

SEQ ID NO: 316666 - DNA, 205 bp, Zea mays
cggacgcgtgggccgggctcacactcgtaggcacggagtgccgttccgtggtgggtggaatcaccaaaaatgccctccgtccaccaccacctcctcctcctgacgctcgccgccttggccgtggcggcagccaccgctagcgccggcggggacccgctggcaatctatgcgcatttcgacgcctgatgcgcgggccaggggaagg

SEQ ID NO: 316667 - DNA, 343 bp, Zea mays
aggtatctgctgtgggctatgcaatcgcaccaaaataaattctagccgatgataattatgcaacttaatgaatcgatccctacatccagagttacaatttggctccatataagcggtagactttttatatctcatacggttccgatagaacaccagctaacatgtcccaacctattcgggccatatgtgaggtattctaacacaaacggtcccaaataggaaccctttgtggtgctcgattcgtttcacaaacgggcgaaaatataaaaaccgtctgtgatgcgcgattcgtatcaaatgccattcgtaattagacccgaatgggaattgattaccatagatt

SEQ ID NO: 316668 - DNA, 70 bp, Zea mays
acccacgcgtccgcggacgcgtgggttatatacaaaatgtgtcttatattgttataagaaaatatttcat

SEQ ID NO: 316669 - DNA, 99 bp, Zea mays
aaaaaaaaaaaaaaaaaaaaaaaaaaaaaaaaaaaaaaaaaaaaaaaaaaaaaaaaaaaaaaaaaaaaaaaaaaaaaaaaaaaaaaaaaaaaaaaaaag

SEQ ID NO: 316670 - DNA, 103 bp, Zea mays
acaaaaagaaaaacaaaaaaaaaaaaaacataacaaaaccatccacaccacaacgatcacctccgcagcaccgaatccatatacagtcacaacacgtcgcttt

SEQ ID NO: 316671 - DNA, 407 bp, Zea mays
gcgacatgcacccggcgacgtggggcgcggcctacggcaacagctggaggaccaccaacgacatcgccgacacctgggacaggtcagtctgtttgttccttgcgttgcggcctcgccgctgtcctgtccagactccagaccgtttgctagcttcactgagacggtacctgccgccgttccagcatgatcgccacggcggaccagaacgaggtgtggtcggagtacgcgcgtcccggcggatggaacggtctgtactgtactgtacacatgatcagttgaacggcctgtacatatgatcagatggattcgcgccttaacgctccggtccggtggtctggcgtgtgcagatccggacatgctggaggtgggcaacgggggcatgaccaacagcgagtacgtcgtgcact

SEQ ID NO: 316672 - DNA, 404 bp, Zea mays
acggacgcgtgggcgatctcgtttcaaatccatccatcctcgtttcctccgtcccgcagcatctcaaccccatggccaagatcaagatcgggatcaatgggttcggcaggatcggaaggctggtggccagggtggccctgcagagtgacgatgtcgagctcgtcgccgtgaacgaccccttcatcagcaccgactacatgacctacatgttcaagtacgacactgtgcacggacagtggaagcaccatgaagtcaaggtgaaggactccaaaacccttctctttggtgagaaggaggttgctgtgtttggctgcaggaaccctgaggagatcccgtggggttcggttggtgctgaatatgttgttgagtcaactggtgttttcactgaccaggagaaggctgca

SEQ ID NO: 316673 - DNA, 258 bp, Zea mays
accacgcgtccgcaattaaggttcagatacatccttggactcttcgatcgtctcgcttaaggtaatgttgggagcagttgttcgtgatgagcgtgaatagattggacgagagttcaaaggtggtatctgtcattgtcctgtgaaatagttatgataattgttttcctcttcaagaaactatcaacatcaacggactactgaccgtgatccttcaagtcttatgctggaggccgtgctgagggttttctctctgtccag

SEQ ID NO: 316674 - DNA, 402 bp, Zea mays
agcccacgcgtccggggacgtggacctgggcaaggtgtcgccatacatcagacgctgcgtcgacgttaagtacggcataaatcttgtcaatgaaagcagcggacagtggtaacatttgtctaacaaaaatggctacatcatagcgcttagttgcaaaaagattctcaaaatttaagcactggtattttccaaaacaggagtcgacaggtgattcaaatgtcaggaatccaaagttctttgagacattgcttgtgatggattaggcaagaatttaatagctacatcattccaatttctaacaaaccagcatctgttgatgcagtgaaatctcagaagcaaacatatgacagtatcgtgcctggaaaattgttacagaatggctaaaaataagccagttaacag

SEQ ID NO: 316675 - DNA, 438 bp, Zea mays
attctagatcgcgagcggcaccctttttttttttttttttattttttatttttatttttttttttttttttttttttttttttttttttttctttttttttttttttttttttttttggcacaaaaacaataaccccagaagaaaacaaaatgtctgcttgaatttcaacaaaaacaacaacagcgtgacctcttaactacacacaaaaatgtttctcaagactcaggattcccatgcactggacggggggttgaatcttcaattttcggggggccccttttaaataattgcggccgaaggggtatcaccgcatataggccatcggtttggacacgggtggcccaaataaatttaggtaacaagggaatccataaacgttggccccccccaaatttgggattaatggccacgatccaaaattcccccgtttaacccta

SEQ ID NO: 316676 - DNA, 445 bp, Zea mays
  unsure (1)..(445): unsure at all n locations
accacgcgtccgggctgtcagcaatggaggaggcggctggtgagcagcaaccggctgctgaggtttgggaagaaagggagggagggaggagtggtgtggcttcataccatattggaaaccccaaaccctaatttgggttgggctgctatattaatagatggactagtatatgggctgggcctaagtccattacaactgtaacacacacatgtctaacagatatgacggttacctgatatacaagcgcattctattctaacatatgatacaaagagaagaggtagtttatgttggatcatgtcacagccttgcgactcatttggttttgtttcccagacctagcagatcttttacaaatcgtggaagcatgcatactgaaggaataactgaaactaaaaataaacaacacaggttttcattatctagctttgtanatggataatgt

SEQ ID NO: 316677 - DNA, 84 bp, Zea mays
tcaaaggcggctcccaaattttcaacgaaggcgggctggactaactccggaaacccaacctgattctagcccaaaacaacctcg

SEQ ID NO: 316678 - DNA, 93 bp, Zea mays
acgacgcgtccgaggacatacacggtctgagataacgcactatacaaggagtcctacatggagatgcactacataggcgtcacgatggggttt

SEQ ID NO: 316679 - DNA, 136 bp, Zea mays
agcccacgcgtccgcccacgcgtccgcccacgcgtccggtttctcttgatgtcatagcaatgagaacacctgggttcagcggagcagacttggcaaaccttctgaatgaaccaccattctggtgggaaaacgggaa

SEQ ID NO: 316680 - DNA, 390 bp, Zea mays
agattcttttgtttaaaaaaatctgactagatatatagaaaatactatcaatattttcattgctgagcaattttattatggaagtatattccatgatcaatctagtgatacctaatatacgctataaatattagtacttctttgtatatatttagtcattttagaagaagagacttaattccttaaaatgagttgtaaacgaaatatcaagtttcatatggaaataatggccaccctttttttaaagggtatggccacctaaagtgctggcctggattacatttgccacgtccggattcattcagtttgtatggcatacagtcatagaacgcggctaaccatcttcttacattacactgcagaactttggaattgatgggaagctagtgg

SEQ ID NO: 316681 - DNA, 254 bp, Zea mays
  unsure (1)..(254): unsure at all n locations
accacgcgtcagagtctagatcgcggacggccgctcgcnatctacagataacactttctatatttccattggcagccagtttcatcacgcaggtatattcgatgatcagtctaattagagccggaatctgctagggatacaactaactccatgaatatctttagtcaattttgacgattctacttacatccttaaaactagttgtaaactaactatcatgtttcataggaaaataatgactatccttttttaaa

SEQ ID NO: 316682 - DNA, 221 bp, Zea mays
  unsure (1)..(221): unsure at all n locations
accacacgtccgcggacgcgtgggcgacgacgcggcgcccaagtcaccggcgccggaggcgcccaaggagccggcggcggtgcctgcgccggccgcggaggaaggcagcaagtcgtcggaggggttcggcctcggcgacgtcatgaagggcgccgagcagctggtgggagggaataagcanggcngccgggaagagagcgccggcggcggtgggctgttta

SEQ ID NO: 316683 - DNA, 363 bp, Zea mays
acctcaagaagccctcgctccagcttacccctacacgttccttggtgcaagtcgctgcatcagaagcccgccgctctccggttaccacgctgaaaacgccgattctcttcttcacgcctacaactttcagactcggcaggcgaagtacgccaaccgtctcaaacatacgtgatcgcctcctcgcaaatatgcccgagactagcgttcaacgcgtagaccctcagaagttggggaggatcacgttccagaagtcggaagacttgatcgatgaatgggacatacaatacgacgacgcagagggtgatgctgatgctggaacgctgaaacaggcagcccatgagcttatgagcacgaatacccccg

SEQ ID NO: 316684 - DNA, 442 bp, Zea mays
agggttggcttctcctccccctccggttcgggttcgggttcgtgaggttctccggggttcggtttcgtgggtgagcggatcgagatggcggcgtcggatgttgagtaccgctgcttcgtcggcggcctcgcctgggccacggacgaccactccctccacaacgccttcagcacctacggcgaggtcctcgagtccaagatcatcctcgatcgggagacgcagaggtcccgcggcttcggcttcgtcaccttctccacggaggaggcgatgcggaacgccatcgagggcatgaacggcaaggagctggacggccgcaacatcaccgtcaacgaggcccagtcccgcggcggccgtggaggcggcggcggtgggtacggtggtggccgtggaggcggcggctacggcggtggcgggcgccgtgatggcggcggcggctacggcg

SEQ ID NO: 316685 - DNA, 84 bp, Zea mays
aaaaaaaaaaaaaaaaaaaaaaaaaaaaaaaaaaaaaaaaaaaaaaaaaaaaaacaaaaaaaaaaaactagttctaaatcccaa

SEQ ID NO: 316686 - DNA, 414 bp, Zea mays
aggacgcgtgggtttcctgtagctattagttagtccagaacatttttccctatcaaatcttcacctttaaaagcttttgatttgattaaccacattccggtgcaacaaaccttttggggttgccagtaaaaaaattcaaaatgaatcaatgaacttaaatccccgggttaattacctttaaattcttacaccaacaattgctccaaaacggtggttacatcgggctgtgagtaatcaacacccttttttgttgaatgttatcacaacacatggggacgtggtataaagtgaagaaagaatgaggggtccattccttttattccgtaaggaactcagaagctttcgagcatactagttcaagttgggaattttactctgtagatgtagataaacaattcagattcatggggtgta

SEQ ID NO: 316687 - DNA, 204 bp, Zea mays
aatttcaaagaaggcatcaagcagaccggatttcatgatcatagattcatttccggtgcaatgatttgcaacgtaaaaataaaccaccgagagcttctgtacgacaacgcagacaatgaaataatgcacatagccaacatcaatagaaaaagacaaattaaagttaaaagaggacatgttgtctgtagccgcatcatacatcta

SEQ ID NO: 316688 - DNA, 126 bp, Zea mays
acaaaaaatcaggtccaattaaaaaatcaaaacacagaaaataaaccatcaacctcacagttgcggttgggggttccatcccggtggatgtatggtacgttggctgggcaataagagggggcgccc

SEQ ID NO: 316689 - DNA, 52 bp, Zea mays
cccacgcgtccgcccacgcgtccggtcatcgtgtgtggaaccatgacactat

SEQ ID NO: 316690 - DNA, 374 bp, Zea mays
atggttacgttggcggtacacatacagggccattggcccaaataatcgtttttcgcccttctaaccttgaactccatttccatactgcttcattcttgtaccaaactggccgtcaacacggcctcacctcggttcatccgtttcaattacacaggatttggctgatatccatggactgattcaaatcttacccgggttggcacatgtttatcgagacgttcaacaacggatgcagccctaggactgacgtcgggtcttacgctgaaatgtccgcggaaccccgatttgggaatcttcctacgcatattcatataagtatccccgcacgagagcatgggactgaatgatgcgtcacaagtctagacggcggtaga

SEQ ID NO: 316691 - DNA, 377 bp, Zea mays
cggcccaacgcgtcagcagacccttgggcaaagatgacatggactttccgcggcggctggcaaaagaaaaaataatgggtggtcctgcaagatgtgccgtccggtacaaaggatgggctcccaacaaccttggcaatggttcaacctccccgggaaaaggggcttaaaaggtccaagtcctccggctggcgatacagaaagccaacaaattgataagataaagtcaccagttctatgcaacagagacaaaaattgttatgaacttctgcacagatatatgatattgtatcatcttcactcgaagatgacatgtttgatgctctttgtctatagtaaataaatgatgtctcttcaaaaaaaaaaaaaaaaaataaaaa

SEQ ID NO: 316692 - DNA, 91 bp, Zea mays
cctagcttcgctcgttgcggcggctagccggcgatggcgaagtctctgcgatccaaacgcgagaagcggcttcggacgttgcgccgggaga

SEQ ID NO: 316693 - DNA, 84 bp, Zea mays
acagatggtatcccgaaggggttctgcattgatgtatttgaggaagttatcagtcatccgacttcccacgttcccaacccctat

SEQ ID NO: 316694 - DNA, 402 bp, Zea mays
cccacacatccaaaaaaaaaaaaaaaaaaaaaaaaaaaaaaaaaaaaaaaaaaaaaaaaaaaaaaaaaaaaaacaaaaaaaaaaaagaaacaaaaaaaaaagataaaagataaaaaaaacaatgcaagaaaaaacctagttcaaaattcccggggggcggccctaaagtttcaggccttcgttccccgtcttggaaatctggaccccctcaaaatgtgcccccaaaatcaattttgggggcggtgctttaaaacctcgtggcgggaaaacccctggggttaaccagcttaacccccctagaaaaaacccccttttcaccagcaggggtaaatcccaaggggcccgcacattatgcccttcccaaaaggtggccacccctaaggggacaggggaaccccccat

SEQ ID NO: 316695 - DNA, 353 bp, Zea mays
agaatgaatgatccttaaaattatccttctgcataagcgtaaaccggagtttttgggaataaagcttctaaagacgcatgcctatacaaatacagcatcactcatttgttgtgtatgctgtgtatacactataactagctttgcacgttattgattaataacacacacatattaaactaattctatttagctcaatgccttcacatgcccattcctcaagttcgcatcttttaaaggaagcaacgcatgttttaatattctgaatcaatctgggcgaatgtgctgaactcctaaccaatatgcataatccaaacctttattaactttgcgatccactcgccgataaaatctga

SEQ ID NO: 316696 - DNA, 150 bp, Zea mays
ttggtgatcgcacatcggatatcctcaagggaaattcatctcctcacacttctgtgaaagtggtgtcacgacgcacgaaggcgaatctctctcctgccagtgggtaccgggctatctccactctataggagtggcaggaagctgatttta

SEQ ID NO: 316697 - DNA, 156 bp, Zea mays
tcctcaggggacattcatctctttaaacttctgtgagtctgctgtcaccaagtttctatacgagtgtctctcctgcgagtggggtacggtctaggtctagtctgtaggactggcacgcagctcagtttatcgtccattcgttgtttcccttccctt

SEQ ID NO: 316698 - DNA, 107 bp, Zea mays
agaaaaaaaataaaaaaaaaaaaaaaaaaaaaaaaaaaaaacacaaaaaaaaaaaaaaaaaaaaaataaaaaagaaaaaaaaaaagcaaggaaaaatagtcaacaac

SEQ ID NO: 316699 - DNA, 56 bp, Zea mays
ggtcaggacaccccggctcgaccacgcgtcagcccacgcgtccgcggacgcgtggg

SEQ ID NO: 316700 - DNA, 388 bp, Zea mays
agcggacgcgtgggggaaaacatgccgccgccgccgccggtgaatccacagcggctttcgccggcagagtcccgagagcggacgctgtacttcttccatggtctgggcgtggacgtgcccctcccggtctcggccgagcggcccgacgcctacacctcgctcgtccgcgccatcgtctcctccgccgcagtcacctcctcgcgcgtctcctgcaccctcaccgtctctcccgccgtcgcgaaccagtacaacacgctccacggcggcgcggtggcggccgtggctgaggccgtcgggatggcgtgcgcgcgcgccgcggctggggacaaggagatgttcctcggcgagctcagcaccgcgtacctcgctgctgcgcgactcaactctg

SEQ ID NO: 316701 - DNA, 127 bp, Zea mays
cgacccacgagtcagcgcagctccgctcgtcgatcagctctcggctgatcactcatctccagtgggtccctgcccaccacgtcccgccgctgccaccgccgcggtacacagggcagggagaggggga

SEQ ID NO: 316702 - DNA, 393 bp, Zea mays
cacagaatggttcaaaattccactctattgattgctttgcctgctaatgttactgttttatgatttgggagcaactttgccatattatcagacccatggatagtagcaagggggtttgcaaagccatgaaatttactaacttacccaagtaaataaacctgctttcctatgagtaccaacaatgggtttgtctggtttttttctttagttgtttggtctattatttttgttcacgcttcaggttagcttcactgttcatgctgactgattgtccaatataggttttatctaacctcacattaaccgggtttgccccaaaataaaagaacttggttcctgaagatgcaatcaatgaaaataagcctggctcattccttctggcaaatatcctta

SEQ ID NO: 316703 - DNA, 297 bp, Zea mays
cgacccacgcgtcagccaatgcgtactgaactcggtatagggcctcacaaagttccaggccctattcgagcatctcgttctgtgaacgatctactgatagtcatcggactatgccttttatgcggcccatcaggtcaggtatccccacggccacttcgatgagacctgcgatggcaactgctgaaccatcaacatccagtcttgttcacgctgcctgaacatcagtgacatgagattcggcagcgtcaccagtgtcaacaatagcaagggcgccggtatccgatgctgacacgaaag

SEQ ID NO: 316704 - DNA, 223 bp, Zea mays
agcggacgcgtgggcagtagtcgtcgcgtttgcagctaggcagatctgagttaacccgggggttcgattcgttgaccttgaatgtgggtcatgtgtgtctccgtggaaatagcaaaagttacacccccaatgggaaacacgtgataaaacaaaaactcgtttttgactccagggccatgggggcgtctagggcttctgtgctcacaaaaggggtccggggggt

SEQ ID NO: 316705 - DNA, 301 bp, Zea mays
gacccacgacgtacggctaagccttcctgcgagatgcaactgtttagcacacaacgcgtgctgtctcagacctagagaatccacaggagctgtgtacacaatgtgatgatgccccacgtcgggacaatgattcaatcgttgaccgcaagatctgctataaagggacacaagaacatttgaaggatagtatgaatcactcatggcgttgaaagttttgaggacttactactggtttgaggatacccacattcccgcgacaagtcgtggccaggcctagcctgagttatctacacgacctgaa

SEQ ID NO: 316706 - DNA, 126 bp, Zea mays
cacgcgtcagctaacgcgtccggtcacatgtaagctgatctgcgaacatgcttgaaatacttcagaaagacctcaggggcttgcactttgtttatgttcaggcctgtgtcaaatggcgctgctggg

SEQ ID NO: 316707 - DNA, 226 bp, Zea mays
cacgcgtcagcagcaatccacacaagcacttcgacgtcgcacgggcgctgcacacagacacaccatgcgtcggcaccaatggcttactaccaggaggtggactactgctcggaggaggtgaggtctgtggccccggccggcttcggccgccttggacgcggcgtccagcctcctgtcctctcggtcacgttcctggatgtctctgcggtctttctttcggtgttct

SEQ ID NO: 316708 - DNA, 221 bp, Zea mays
ccacgcgtaaagcaacgcgtgggccgacgcgtgggccagattgggggttccttggttcctcgtcgagttgctgcttctgataagaggcaacggaaactgaacaatggacaccagtggggccggtttcaggacagctcctacatggatgcagctcaccctctttgccttggaccactattcaagataccagcaacacatggcctagacacgggcaccaagat

SEQ ID NO: 316709 - DNA, 116 bp, Zea mays
acgcgtcagccaggttctcgccatgggcgccggcgccaacaaccacgaggagtcgagccccctcatcccagctgcggttgccgcccccgcggatcgagaagcccccgcaggctccg

SEQ ID NO: 316710 - DNA, 393 bp, Zea mays
acgagtacggctagtgaagtcagccacctgcagaacacacataaggcccgtgttaaaaaaaaaaaaaaaaaaaaaaaaaagctcggcagacctgactcagcgcctccattactcctttcagccggcgggtcgccgcgtccgcctcgtctctgaccaacgcgagggcagtcacctcgcctccagcgccaagggtctctacccccgccttcggcgctggcgcagccgtcgcaaccgccgcgccaggcacaactagagcgagcgggccctcgtccaatcctgcaacgcatcaacagattaaaaaaaaaaaaaaaaaagaaaaagaaaaaaagaaaaatcctagttagaaaacaaggttgaaatgaaagaaaaaaaaaaaagggggggccccccaaa

SEQ ID NO: 316711 - DNA, 329 bp, Zea mays
aggcgatcagacaaggtaggcaggcactcctcacgagccggcggacgcgaacacgcagctgtttcctctcttcctcttcgccctctgcggctcctcctccgcaacagcgcgcgcgtatacctgtacgcattcagcagcgcacggcatgacgaagcaaaagatagtgatcaagctcagcatgccatctgagaagagccggtccaaggccatggtgctggtcgccagaacggacggcgtcagctcgatggagatcgccggcgacggcaaggaccatctggtggtggtcggcgtggacgtcgacaccgtctgcctggtcatgtgcctgcgca

SEQ ID NO: 316712 - DNA, 340 bp, Zea mays
aaatcagcaaagcggcagtgcgtagagaggatcgtcgaacagaacagcatgaagatggtcatcgttctcgtcgtgtgcctggctctgtcagctgccagcgcctctgcaatgcagatgccctgcccctgcgcggggctgcagggcttgtacggcgctggcgccggcctgacgacgatgatgggcgccggcgggctgtacccctacgcggagtacctgaggcagccgcagtgcagcccgctggcggcggcgccctactacgccgggtgtgggcagacgagcgccatgtaccagccgctccggcaacagtgcctgcagcagcagatgaggatgatggacgtgc

SEQ ID NO: 316713 - DNA, 343 bp, Zea mays
  unsure (1)..(343): unsure at all n locations
accttgattgcggccctgcctccctcctctccggctctcccaccggccgccaccgtcgccgccatgcctttccgattccagttcccatggctcaagaacccaactacaaacggcggcacctccaacatagacactaaccctagcccccgcttccccaaccccttcctccctatccaagcccatgtcacctccttcctctcctccttcncccgggcgctcncgccgccgccgccctgggcgcgcacaactccgcaagcttcaacttcgggggcctaactaactccgaaaatgaagacccggtcccccgggtgcccgttgttcgcgctcgccaacgccgcccaag

SEQ ID NO: 316714 - DNA, 380 bp, Zea mays
  unsure (1)..(380): unsure at all n locations
aaataatcgccaccgctctccgcaccgaatcgaagaaagcggcgatggcggcggagaagccggctccggtgcgcgtgctgtactgcggcgtctgcggcctcccggccgagtactgcgagttcggccccgacttccagcgctgcaagccctggctgcgggcgcacgcgcccggcgtctacnccgacgacctcgtcgccggtccctcctcgtcgggcggtgcgggtggcacaaggaacttgacagggtcgggaacccctccaaggcctccggaatcccgaacggtccagcagccccccaggggaagcttccgcctccaagcccgaagaggtcaaacgcctgcctggtggtaagctcaagaaaaaggaaaagcaagaggttgt

SEQ ID NO: 316715 - DNA, 408 bp, Zea mays
atcggtgtcgtgcgcatgtgagatctagggagaggaagaggaggaagggttgtggggaccgggggtgcaagatggcggattcacctgcaactacaagaaaagaaagagcgagagatttacagaaaccttcagagccgcggaggaggagaaggagattaggaggatctctacggcgctgacggattagttaaggaacgaaatatcacatcgtgtccggtaaccagattcagatgtgggcaccatgcgtgggtgcagggccaggccgaggtgaaagagatgaagagcgtgaccaagaatttcccgattttccatcatttattccattcttacctcctctgagtgcagctaacctaaaggtctactatgccacacgtttcaccatcatagttgggataatggtgttcggtg

SEQ ID NO: 316716 - DNA, 368 bp, Zea mays
ccacccacgcgaccggatacacgaccggcatcaagatgtgtactgcccagtatcctgatcatttccctaaggactaacttagtggccatttatggagcagtttactcagcggtagacacattgggcgaccgctacgacgaacgcaaaggtaagggatcacgcagggcatctcactggcccgttcggtagggcttacatgagagaggaaatgcgactggcatgcctatgcgcctgcatgtggcgctgcaggcggatcgtaaagagccaggtgaacactcaccgcatccctcgctcctgctgctgggcatgctgccagggagacgctgctggacagactacctaactgcacagctgagcagagagacgag

SEQ ID NO: 316717 - DNA, 347 bp, Zea mays
atggctactccgccccctcttaccaagtcctcctcgggttagggttccttacggttttgtggaggggcgatggcggcggctgatgtggagtaccgttgcttcgtcggcgggcttgcctgcgccaccagcaacgagtcgctggagaatgccttcgcctcctacggcgagatcctcgactccaaggtcatcaccgaccgggagactgggaggtcacgcggcttcggcttcgttaccttctcctccgagaactccatgctcgacgctatcgagaacatgaacggcaaggagctcgacggccgtaacatcaccgtttaccaggcccagtcccgtggcggtggcggtggcgg

SEQ ID NO: 316718 - DNA, 86 bp, Zea mays
cacgcgtacgcacacgcgtccgcccacgcgtctcggatcctccccatcttttgtttgatcttcacccttttgttcatggtcctagg

SEQ ID NO: 316719 - DNA, 160 bp, Zea mays
actagtactagatcgcgagcggccggggcatttcttcaaaaagaattcatgcacataagaactggataacttgtcgtcgtcacaaatggcatgagctgctcctgagacatcgcgtaggctctcgactcgcaatataccttctgatgttcgacgacgtcta

SEQ ID NO: 316720 - DNA, 369 bp, Zea mays
  unsure (1)..(369): unsure at all n locations
atttgagcaatgcttagcagttcatgataaactggaggcctcattgcgggatttgtctaggacaggagacattcagtcttgcaaggcagctcgtaaagctgctgacacgcagtttaaggagctatcgaaagatctgaagccactgttggcgactctacagtcatctccccagtcttatcagatattgccaaaggtanaggacttgatcgtaaaggaaaaaaaaatgcaggaaaacccaagaacagggaatccaaccttggccaaaactttgaaaaaaaactgccccggcaagatgttnagaacaagattgctttgcaacagcaaaaaattgccgccctgaaggaagaaggtgaatcccctttaaagtac

SEQ ID NO: 316721 - DNA, 83 bp, Zea mays
cgacccacgagtccgaccacgcgtccgcccacgcgtccgcccacgcgtccgcccacgcttcagcggacgcgttcacggtcgtg

SEQ ID NO: 316722 - DNA, 282 bp, Zea mays
ataaaaaaacaacaaaaacaaaaaaaaatcatcatcaggttaaaggttccttaaggttttgtaaaaagggcaatggcagaagactgatatgaaatagggttgccgtcctagaaggtcttaccttagttaccattaaatagtcgctgaagaatcttctagcctcctaccgaaatttacttcattggaaggtcattaaaaacctggagactgggaagactcgggggttacgcatcttaaccgtcttgcccaaaaaccccatttcccaagctggcgaaaaaatga

SEQ ID NO: 316723 - DNA, 134 bp, Zea mays
aaaaaaaaaaaaaaaaaaaaaaaagaaaaaagaaaaaagaaagggaggcagcgtcgatagcgatcatagcttactttatcgtcaaaacgaaggtctctgctcgacaatgtcgtcactgtatttcacttcactgg

SEQ ID NO: 316724 - DNA, 301 bp, Zea mays
cgcgtccgcccacgcatccgctagttctaaatcgctagtgggacctttttttatgtttttctgcccatttttattgctgtgcaacaactccatgttattcgtggctgtggtaataatgctctcttcttgggcttcataagcataattcttggtctccgaaaataattcccaccatgtgtaagagcgccggatcatgggcatcctccgcgaagtaaatgttctacacctccacaaatcattacttcaacctcacattcatttcctctacggtaggaataaccttggcttaggtttcaaacct

SEQ ID NO: 316725 - DNA, 422 bp, Zea mays
  unsure (1)..(422): unsure at all n locations
aactgaatgccccaaaagacgttgctgctaatagtttgcactaaactgacatcccattttgaggtgagactgatgaggatttctctgagactgttaacctcgtaaagcaatatcaactccctcaatacacaacgttccgtaaatctacaagttttggttgttgacattcttttcctacatgtacatcgacaacgtggtttttctaaggacgccctgctgctaagatgaagaaggtatcgagcaatgaagtgaaaaaagcggagtcgtgaactgacttcagttttcgaatcattgtcaccgtaccaaggaatggtaggcaaagtagagaggatctggatcactgagatcgcgaccggtggtgttcgcttggttgggcaatacaagggatacatccangtgctggtaattgccctgatagcatg

SEQ ID NO: 316726 - DNA, 342 bp, Zea mays
agccgccctttttttttttttttttttttttttttttttttttcaaaaatagttcatcttttatttaattatccattactcactgagcagaggtggtctctacaccctcaaggccaagcccttacaacacaccagcatatttctcagttaacccgttgaattaggcctctttaagcttcttgacggacattgctgtcagaagcgaatcagacccagcctgatggcaaattccaatccttgaaacatcaatgcagtaggcaccatccgtgggtcagcatcagcagcagcagaagttcttcatccgcgacgataagccattcatgagccacatggggtacatca

SEQ ID NO: 316727 - DNA, 273 bp, Zea mays
aacgcgcacgcgcacgcgcacggcgccgtgctcagccggccctgcctctgctgcgagatggaggcccgggcgcaccagaagatggaggaggtggccgtcgagcagctgccgtcctaggcaggcgcacaccggcgtcctcgctttcttgtccgtccggccgcccatttgattttcggagttgcatctatctcatctaatatggatccatccatccatccatctaaagcagtattatgtatgcatccacatgggtataaatctggctgaccgcat

SEQ ID NO: 316728 - DNA, 361 bp, Zea mays
gtaccggtacgtacattcgcggcgtcacccacgcgtacggaccttgtcatgcagataatgatttgttttgagaccagagtagtctagagtagagattaggctctgtaaaattagatagctaggattagaataactgggcaaacgaatatatggtatatgtcgatatgtaaagatgcaatatagagcagcatatatggtaccgtcgttattagcattttttcagaaaatgtaataatattcaaaacacaaactacggggcatccttgttggcaaacagcttgaggacgggccagacgcatgccgactacaagattccaatacagataggaagctgcaccttgctgctccgtcgcatggaaag

SEQ ID NO: 316729 - DNA, 344 bp, Zea mays
acgcacaagtttgattgattgctatttgctaccaacaaaaaatagctacacacaggttctgcgttgccttgcattcaaagcattttttattttattgtaaagaatttgttgttatttaaacttgataagtcttgacaagaaagttccaatggacttcaaaattgtaaaaaagattaacaaccccaagttcaattagcctggaaataaccttaaaggtgaattaccaaggttggaaaaagttaattcaattttaaatttttttcccggacaaaaaatggttggatccgaaattaatttaaaatggaattaaaaggaaaagttgcccttgggcaatttcaaattat

SEQ ID NO: 316730 - DNA, 398 bp, Zea mays
aggacgcgtgggcggacgcgtgggctggcaggaaccagaaaaattttggaattcatggactggggtgactatggggcgaagggcaccttcattaatattggagcagtaggtgcgcagggcgtgcagatcgtgacgacggggagcgcaggggcgccagcgttgcttgggaagatgggtctgccgtgggggagtccaggcatgctacagatgagcacaggcgcgccgtggggtagagcaaaccaccgtcgtcgttgctgaatgggaaggccgttggccccaataacgcaaggcccgttctggggaaggcaagggcaaaacggggcctgttggtccgaccaaaaaaggctactggggaacttggtaccggtgaatccccccgttccccaagccaagccaca

SEQ ID NO: 316731 - DNA, 283 bp, Zea mays
ccacccacgcgaccgcaaacgcgtccgcggacgcgtgggcgacgtgcggcatgggtgggaggcgcagcaacgggcagttgaagttctggggcttcgacgcgcacaacgaagccgtcgagcaacgacgcaagcgatctgctcgtctgcaccggtatcgacgtcgaggtctttacggcggaggtggtcgattccagcagcatcgctgagctgaggatctactgcagacttctcgggaacgacgactttgattgcgtgagcctccactctggccccgaaatccggc

SEQ ID NO: 316732 - DNA, 342 bp, Zea mays
aggacgcgtgggcggacgcgtgggcgatggccggcacccccatcaaggtgggctccttcggcgagggccgcatcaccatgcgcaagaccgtgggcaagcccaaggtggcggcgtccggcagcccctggtacggccccgaccgcgtcaagtacctcggccccttctccggcgagcccccgagctacctcaccggcgagttccccggcgactacggctgggacaccgccgggctgtccgccgaccccgagaccttcgccaagaaccgcgagctggaggtgatccactcccgctgggccatgctcggcgcgctcggctgcgtcttccccgagctgctctcccgca

SEQ ID NO: 316733 - DNA, 423 bp, Zea mays
ggggccagccacgcgtccgaaaaaacacactagtgtaccaacaatggcagccaaaatattttgcctccttatgctccttggtctttctgcaagtgctgctacggcgaccattttcccacaatgctcacaagctcctagagcttcccttcttccctcgtacctctcaccagcggtgtcttcggtatgtgaaaacccaattcttcaaccctacaggatccaacaggcaattgcagctggcatcttacctttatcacccttgttcctccaacaatcatcagccctattacagcagttacctttggtgcatttattggcacaaaacatcaggggacaacaactacaacaacttgtgccagcataccttgctggctactctcagcaacatcagtttcttccattcaaccaactagctgcagtgaactc

SEQ ID NO: 316734 - DNA, 340 bp, Zea mays
cccacgcgtccgcggacgcgtgggtttttttttttttttttttttttttcaatctgaaaacacatgcactgatgcacacttgtgtttgtgtagaggcgcttatatatcatccaaaagacaagtcactcacacgcaaattcgcattggctaacagaagctatttggaatgcagttcagtcgactaacaacgtaggtacccccgtctccttgttttgccgatgttggcgatgccatcatatgtcagcagcaaggaagttgccagacaaggaaacctgccaatcggagaagcagcagcagtgaacgttcaagatccagagtacaatcgacagacatattttga

SEQ ID NO: 316735 - DNA, 209 bp, Zea mays
acgcggacgcgtgggcggacgcgtgggatcagcatacctgctgctgccgccgccgccgccagttgtttgctgtggaaagctagatgcatgcgtgttgtaaaggaacctgaagcgttgcatcggtcatgattcatgcatggccagcctgctgcctgtaacaacaaactagtattgatcttattgagaccggaaactgtattgcacatggt

SEQ ID NO: 316736 - DNA, 381 bp, Zea mays
acgcccacgcgtccgcccacgcgtccggtataaaaatgattgtacagagagtttacctgtggaccatctgagaggagatgtggccttgtttacaaatgtatgtttttccttcatatcttgttgatgtattgcattttgtgcatccttgatagaaccagggctcattgtcagcaattcttgttacaatcatggtgcattcgaaacgtttgctctgtaaatgtaatgattattaagtaattatataagttctgtaacaataattttaaatatacattttattggtgtagtatgtcttaccatttcatcaaatgggtcgactaatttcatttctaaaaatgtcttttgctcaatcttgttctgcatctcgttcaatgtccgaat

SEQ ID NO: 316737 - DNA, 339 bp, Zea mays
acgcaaagaaagctacaaggatatttgttccttgtgatttcatttcttcctttggagtagctatcttcacttctaatgtacggctcccaaggaagaaatgaaatcacaaggaacaaagaaagctacaaggatatttgttgctcgaattccacagtcagtggacgagtcgatgtttcgtaggcattttgaagcttttggagaaattcttgatctttacatgccaaagagtctgtggacagcatcatgcaagagtcacatgagcttgatggcacaacagtagttgttgatcgcgcgactccgaatgaggaagatgtaagataccccccgagtagaccatct

SEQ ID NO: 316738 - DNA, 348 bp, Zea mays
  unsure (1)..(348): unsure at all n locations
cgaaagacacgatactcgnctggcggcctcgtacggcagcgatgcccaaggctcgtcattacggtcccgttcgtgcgttcgaagatgcactaccacagaacgttgctcttatatatacacacttcactatgttcactgcgtcagacaacatttctatagctcttgtaaccccatcgccagcgatggagctggctaatattcaatatcatgcaaatcaggcgcctgcgtctgtatgacaacagcggatatcgagcctgaaggcaccaatgctgctacgtacacgtcaccagactgcgatctacggcatgtgattcaatcctgcgggaactgtgatagcatcaggttccc

SEQ ID NO: 316739 - DNA, 399 bp, Zea mays
  unsure (1)..(399): unsure at all n locations
ggcttatcctccccctcttaccaagtcctcctcgggttagggttccttagggttttgtggaggggcgatggcggcggctgatgtggagtaccgttgcttcgtcggcgggcttgcctgggccaccagcaacgagtcgctggagaatgccttcgcctcctacggcgagatcctcgactccaaggtcatcaccgaccgggagacggggaggtctcgcggcttcggcttcgttaccttctcctccgagaactccatgctcgacgctatcgagaacatgaacggcaaggagctcgacggccgtaacatcaccgttaaccaggcccagtcncgtggcggtggcggtggcggcggtggctacggcggcggtcgcggcggcggcggctatggtggcgggcgccgtga

SEQ ID NO: 316740 - DNA, 376 bp, Zea mays
cccgggcggccccacgcgtcagcacacgcgtccgcatcgacctactccagtgaaaaagcgtccttctgtgtccaactctatggccaactccgctgttgccaagaacacgtcagcaccatgctcaagatcatcaactccaacctctcggtctcgaaccttgtccagttcatcttcaagcagtacaagtgcagtgagccgtcccagctcatcctctggtaaagttcctgcaataacttatagcagttcttcatcaagtacagtttcttcagtgagccgtcctagctctcggtcatccacacccactcgtcaacctgccatgcgttcgtcaacaccatctgctaggcggatttctggtagcaataacatgacatccaat

SEQ ID NO: 316741 - DNA, 352 bp, Zea mays
  unsure (1)..(352): unsure at all n locations
ggctggccccacgcgtcagcacacgcgtccgcccacgcgtccgcagcttcaacacggccacggcaccggcgcctgctgccccggccgagaactgcaaccttgagctgacactcgcaacgggaccgagcagcagcggcagctgcgacgccggaaggtggcaggggaagcggctcaaggcgtcgcccaactcgggctccgccgccaccgcggtgtcttccacgtcgacggattcggagctggcgcggttcggggacatcgacgtcgtggcgacgccggtggccaggtttcacggcgaggttactangaggatggacgaggtggcgcagggcccgtggatgtaccgctgcctgag

SEQ ID NO: 316742 - DNA, 355 bp, Zea mays
acgaagacgacttgtttcattgattcttgaagagatcgagcttcttttgcaccacaaggtcgaggatgtcttgcaactgcggatcaagctgcggctgcggctcaagctgcaagtgcggcaagaagtaccctgacctggaggagacgagcaccgccgcgcaggccaccgtcgtcctcggcgtggccccggagaagaaggccgcgcccgagttcgtcgaggccgcggcggagtccggcgaggccgcccacggctgcagctgcggtggcaactgcaagtgcgacccctgcaactgctgatcacatcgatcgacgaccatggatatgattattatctatctagcttgtggtggtggttg

SEQ ID NO: 316743 - DNA, 336 bp, Zea mays
acgtacgctagcaacatagaaagcacaatagtgtaccaacaatggcagccaaaatattttgcctccttatgctccttggtctttctgcaagtgctgctaccgcgaccattttcccgcaatgctcacaagctcctatagcttcccttcttcccccgtacctctcaccagcggtgtcttcggtatgtgaaaacccaattcttcaaccctataggatccaacaggcaatcgcagctggcatcttacctttatcacccttgttcctccaacaatcatcagccctattacagcagttacctttggtgcatttattggcacaaaacatcagggcacaacaac

SEQ ID NO: 316744 - DNA, 429 bp, Zea mays
acgtacgctcctccccctcttaccaagtcctcctcgggttagggttccttagggttttgtggaggggcgatggcggcggctgatgtggagtaccgttgcttcgtcggcgggcttgcctgggccaccagcaacgagtcgctggagaatgccttcgcctcctacggcgagatcctcgactccaaggtcatcaccgaccgggagacggggaggtctcgcggcttcggcttcgttaccttctcctccgagaactccatgctcgacgctatcgagaacatgaacggcaaggagctcgacggccgtaacatcaccgttaaccaggcccagtcccgtggcggtggcggtggccgccgtggctaacgggggcgtccccggcgccggcggttatggtggcggttgccgtgacggcggttatggcggcggtggcggcta

SEQ ID NO: 316745 - DNA, 100 bp, Zea mays
acgcgtcaccaacgcgtccgctgacgcttgggcggacgcgtcggccgtcgcgtgttctgatgcttggtatctcccttggtcggtgcttgtcttttcatcc

SEQ ID NO: 316746 - DNA, 73 bp, Zea mays
aagccaatgcaaccataatacatgattcaaaacaactggaaaaaacaagtccagcaattttcaccttgtaatg

SEQ ID NO: 316747 - DNA, 317 bp, Zea mays
gacccacgacgtacgcccacgcgtccgaaaaaaaaaaaaaaaaaaaaaaaaaaaaaaaaaaaaaaaaaaaaaaaaaaaaaaaagaaaaaaaaaaaaaaaggaaaaaaaaaaaaataaaaaaaaaaaaaaaaaaaaaaaaaagggggggcggccccaaaggttcaatccttagttccgtttgcttgcaatttcatacctcttcaaaggttgcccttaatttaatttcacgggctgtcgtttaacacccttttgccgggaaaacccctggctttccccaccttaacgtttttccaacaaatccccttttcacaaggtgg

SEQ ID NO: 316748 - DNA, 363 bp, Zea mays
acgaaaaatcactacgtccattttgagaatggtgggtcaggagccctgcaatgtggttcctccaacgtatttgatcccccacttgaaggccaagctaccaataactatggtggtgtgaaagccgggagcaactcaggcagcaacaaggggcagaacaatgggagtacggctgctgcaaatgctggactggcagaaacggagatacaggccatggacaaaagtggagttggaggtggcaatggcaatgggagtggcagtggcagtggcaatgacacatatgtcagacggcttgctgcgaacatgacaccgcgacaagcacagctaaagaaatatagagagaaaaagaaagaccggaactttggg

SEQ ID NO: 316749 - DNA, 403 bp, Zea mays
acggtggttgcttcagggcagcgggcaacatggtggaattgctgtggcctttttgatgcttttactggttcagggagatagatgaagcgttagaacttgaagtcaagaagacagaaaatgcggtgacgttcagttcaaagctgatgagcagctgtaactagactttgtcacatgaatgatgaagcagaaggattccggataacatcgagctgatgttttcacttccttcctccctgtgtctctgcatctgtgcaaagttacatcccctggtcgcggttaatattcttaatttccttagcacccccaacgcctagtcgtgtcgtctaggtactggtcttgtagcatagtaagtgttgaagtgggttcaccgttaaagatgttttgggggttccggctttttttt

SEQ ID NO: 316750 - DNA, 332 bp, Zea mays
acgtacgccatgcgctccgccgggacggccacggcgatctcctcgctgatgctgccggacactatcgtcgtgctaggctgctgctacgtactgtaagactgttatgtttgtgctcactgcacgatcactatcacgacctacttactatatacatgtggctgctcggttggaccggagcttggtgacgtggaaatcttggtccactagatcacgtggtttgaccgcgagaaaatttcacagaattcgttcggacaggtacaggatagtacaggtgctgaccagaaatagacacagtagttgtcttcccacataaatgctggcaaaattgtact

SEQ ID NO: 316751 - DNA, 412 bp, Zea mays
  unsure (1)..(412): unsure at all n locations
aagtccgggctcgacccacacgtacgcccacgcgtccgcccacgcgtccgatctttgataggcatagtttgataattgggtgtgtgcaagagtcaaatttaggttcatattgtttacgccccctgccatttagctaaacgcacattggtatgcggtgaatttcagaccagaaggtagatttcttcaaggggaacaatgtggtgtaacttgatcagcacaaccactttactgaaggtgtccggatcatgatgcagacaacaacaactggtgtactcattaccactttgatggtaatcgaaatggggacaaacacaattggagggaaaatatccaaagacaaaaggagtgagttttcacttcttcagattccaacantcagaataagaactagacatcatagagaccaactttt

SEQ ID NO: 316752 - DNA, 263 bp, Zea mays
gcgtccgcacagaaatccgcagacgcttgggaggtcacatcgccgtgaccgtcggttgtgcatttcctcaatttactgctatcatgtgcgccagatagcatttttgtttaagtcgtggatcggggtggaaacattccatataatttttcgtttcgtattgacaccaatgtcgtcatatcataaaatcatcccggggaatctttctaatatctgtcacactatccgaaagaacacgcccctttaatcagtatcatccttatatt

SEQ ID NO: 316753 - DNA, 416 bp, Zea mays
ggggccagccacgcgtccgcaaacgcgtccgcccacgcgtccgcccacgcgtccgagcgcacacacacacaaccagatctcccccaaatccacccgtcggcacctccgcttcaagatgcagatctttgtgaaaaccctgactggcaagactatcaccctcgaggtggagtcgtctgacaccattgacaacgttaaggccaagatccaggacaaggagggcatccccccagaccagcagcggctcatctttgctggcaaacagcttgaggacgggcgcacgcttgctgactacaacatccagaaggagagcaccctccaccttgtgctccgtcccaggggaggcatgcagattcttgttgaaaaccctgacgggaagactatcaccctccaagtggagtcctctgaacacattgaca

SEQ ID NO: 316754 - DNA, 369 bp, Zea mays
cacgcgtacgcagacgcgtgggtgcggactcaacctgtttttcattgtcttcacgttgattcttgtttttgcgtttgctattgttgccctgcacccaaaggtaccatcatgtagcctgtttttctccgttttactgattttgcatttgtttatattacttgatttgaccagaaaccgttgcttgataagttatactggatgggtttggggtttggggcagtattatacttgcaactctagattattgggttggtttgattgttttagattccatcttggccatcgtatgaccatgctttccaaaaactatgtctatacatttcccttgaatgtaactatcttttttgtgctaaataatgctgaactttg

SEQ ID NO: 316755 - DNA, 343 bp, Zea mays
acgcccacgcgtccggcgagccatcgacacgatcgcgagcgcaagcacgtacgttgtcggaagctcaagttagaagaagcaccagtgcctgatcgatggcggcccaggctctcctctccggccggcagctgctgggccgccccgtgcagtcggccgtctctaggtcgtcggcgaggaaggcgcccttcgtcgtcagggccagctccagccctccagccaagcaaggtgccgacaggcagctgtggttcgcgtccaagcagtccctctcctacctcgatggcacgctgcccggcgactatggcttcgacccgctgggcctctcggacccggagggcaccggggg

SEQ ID NO: 316756 - DNA, 364 bp, Zea mays
gcggatcaagctgcggctgcggctcaagctgcaagtgcggcaagaagtaccctgacctggaggagacgagcaccgccgcgcaggccaccgtcgtcctcggcgtggccccggagaagaaggccgcgcccgagttcgtcgaggccgcggcggagtccggcgaggccgcccacggctgcagctgcggtggcaactgcaagtgcgacccctgcaactgctgatcacatcgatcgacgaccatggatatgattattatctatctagcttgtggtggtggttgaacaataataagcgaggccgagctggctgccatacataggtattgtgtggtgtgtgtgagagagagagaaacagagttcttcagttt

SEQ ID NO: 316757 - DNA, 418 bp, Zea mays
agcccacgcgtccgaatattttgagcattcagaaacacacctagcgaagcgcactagcaacgacctaacaacaatggcttccaagacattatccctccttgcgcttcttgccctttttgtgagtgcaacaaatgcgttcattattccacaatgctcacttgctccgagtgccattattccactgttcctccctccagttacttcaatgggcttcgaacacccagctgtgcaagcctataggctacaacaagcgcttgcggcgagcgtcttagaacaaccaattgcccaattacaacaacaatccttggcacatctaaccatacaaaccatcgcaacgcagcagcaacaagcactgagccacctagccgtggtgaaccctatcgcctacttgcaacaacagctgcttgcatccaaccca

SEQ ID NO: 316758 - DNA, 427 bp, Zea mays
acccacgcgtcaggcaaaacgagcatccgcgtccctggctctattgatttatttttaagtagaaatcggtgctgtttgtgtacaagtgttgtcgcagcctccaagtgggattttgagcacgtgtataaagttatagggctcgtgttcttacaaaaaaaaaaaaaaaaaaaaatcaaaaaaacaaaaaaaaaacaaaaaaaaaaaaaaaaaaataacaaatcaaaaaaaattaaaacatacaaaaaaaaaaaaaaacaaaaaaaaaaaaaaaaaaaccaacaaaagaaaaaaaaaaaaaaaagggggggccccccaaaaggttccaactttatttaccctgaaaggcaggtttaaacccctccaaaagggcccccaaatttcaattcaggggccgtcttttaaaaaagtccgcctgggaaaaacccgg

SEQ ID NO: 316759 - DNA, 261 bp, Zea mays
gaccacgcagtcaccgatgcgtccgcctaggcgtcggaccaggcttccgattttgaacactcaggttcacatcaggtcaatctccctatgaagagtttatcgatttgggtacctggaaatgaactcttcatgcgcttcatgactctattgtgaagtcacgttatcggtgaactaatttaaaaagtacacgtggattaaggaccatgactggattattcccccgaacatttaattcgttggggcccccgggcataggcgggg

SEQ ID NO: 316760 - DNA, 260 bp, Zea mays
cgtatggcccaaagaatagcacctccacgttgaatttctgcaggatttagatcaaccggaataccaagtgcgcgagcaacacttctgtcgactttccagagatgggcggtcggagcttgtgtactctcggggacaaggcgcgtatctagcgcacacgtccgttgcctctcggtgggctgcattgagccatttcgccggcaacgatgcacgcttcaccgtcaagtaaatgctcgttcatgaatgtcgctgctgctgccgct

SEQ ID NO: 316761 - DNA, 287 bp, Zea mays
acggcacgccatggcctccctcgcctctgccgccgtcactgccccttccttcgccgaaccattcccagcccgcgccgtggtcataaggatgtcattcaacgtgagcgcctcacttggcatcgccattggtaccatcaccgttccaacgcgcgacacatcactattagccagcagtgacacggcctacgacgttctgcttgtctcacattatagacgtctcgtcgtcaaacacagcatgacaatttccaggtttgttacactatcacattcagtcccatggctcgcat

SEQ ID NO: 316762 - DNA, 357 bp, Zea mays
cgtaccggaccggcagttcgcgcgggcgcacccacgcgtacgcagacgcgtgggcggacgcgtgggcggacgcgtgggcggacgcgtgggcggacgcgtgggctcagaagccgcaagactgttcagctagaacatccgggagtacaaccgcagtgtccgcgagattgtggagctcagcgggacagccgactagtgcacgaggatgcccatcgtgcccgcgagggcacaatatggaaccatgaacgaacatccttgtgtctgtggttcgccagacctgtcgaaccattgagtaagtccacttctagtctgtcgtcgtcacgcgctcggtctgatccgagagatcggttgcccaaggtg

SEQ ID NO: 316763 - DNA, 446 bp, Zea mays
agcgagacgcgtgggcggacgcgtgggaaaaaaaaaaaaaaaaaaaaaaaaaaaaaaaaaaaaaaaaaaaaaaaaaaaaaaaaaaaaaaaaaaaaaaaaaaaaaaaaaaaaaaaaaaaaaaaaaaaaaaaaaaaaaaaaaaaaaaaaagggggggccccccaaaaggttcaaaccttatttacccttgaatgcaacttcaaacctcttcaaaattttccccaaatttcatttcatgggccttcttttaaaaacttcttaattggaaaacccctgggtttacccaatttaacccctttgaaaaaaacccccttttcccaatctggcttaataccaaaaaggcccccacctttcccctttccaaaaatttccccaccctaaatggcaaatggaaccccccctttaccggcccattaacccccggggtttttgtggttaaccccaactt

SEQ ID NO: 316764 - DNA, 144 bp, Zea mays
cccacgcgtccgaaaaaaaaaaaaaaaaaaaaaaaaaaaaaaaaaaaaaaaaaaaaaaaaaaaaaggaaaaaaaacaaaaagataaaaaaataaattaaacataaaaacaaaagtaaaaaatcttcaaaaatgtaaccaaaggg

SEQ ID NO: 316765 - DNA, 411 bp, Zea mays
acccacgcgtcaaaaaaagacgagtgtcaagtgaacctgaaacttgcggtgtcactggctggtagcctgagtgtgagtgagtgatcgagctaactgatctccgatcctcgctagccaggataccgccataccacaagtcttcttcacaagtttatgagtgatagcaacatcatatcgatggcctctgccattgtgctcaagtcctcgttccatcccaccaactccgcatggggcgccaagacacatgtcgttgcgctcaagccactcactctcctaattcgattgcacgcttccccgtaactatggcttcgacctactgggcctctcagactcggatggcaccgggggcttcatctagcccaagtggatggcctacggagatgtgatcaacggccgccatgccatgctagg

SEQ ID NO: 316766 - DNA, 414 bp, Zea mays
caactagcaacatagaaagcacaatagtgtaccaacaatggcagctaaaatattttgcctccttatgctccttggtctttctgcaagtgctgctacggcgaccattttcccacaatgctcacaagctcctatagcttcccttcttcccccgtacctctcaccaacggtgtcttcggtatgtgaaaacccaattcttcaaccctacaggatccaacaggcaatcgcagctggcatcttacctttatcacccttgttcctccaacaatcatcagccctattacagcagttacctttggtgcatttattggcacaaaacatcagggcacaacaactacaacaacttgtgctagcaaaccttgctgcctactctcagcaacagcagtttcttccattcaaccaactagctgcattgaa

SEQ ID NO: 316767 - DNA, 67 bp, Zea mays
gacccacgcagtcacccacgcgtcagcggacacgtgggcggatgggtagggtgatttgatgggtttg

SEQ ID NO: 316768 - DNA, 133 bp, Zea mays
cacgcctatataatcagtcgtagtaacggcgtcacgctctgccgccgcgtcaagtcacaacgagatcaatattaccgaccacaatagactctgcgttcctgccgccacggctgtctggcccccggtacggcaa

SEQ ID NO: 316769 - DNA, 344 bp, Zea mays
acgcggacgcgtgggaaaactcagtggctgcccgatacacaaaaggtgcatcagggaatgtgacaacagaagatgatggggtgcatccccaacggattgagccttaagacggccttcatgctacgtcatgtctcttccacagggtcaattcatcttcaggtaactggcactgcattcagagtctaatgcatggaaaaccctgagcattatcaacgttaacccctttacactctaaccccttttcaccatcagctgttgcagataattgcgctacacttatcgcatttcaaaaaatttgctgacgctaatctggtagatagaccctccctgtacctggtcattaa

SEQ ID NO: 316770 - DNA, 344 bp, Zea mays
atcagcatttatccagcctgatctctacagatctgattgataccatgagcgacgaattctcgaaaaggttttttgactatgttgatgagaggaagaacctagacatcgatcgtctcgctgaggctgtcgcgattccatccgtttcctcggatttggaaaatcatctggtcgacatcaacacattgatcgcttggactaagggtcatatagagcgcctcggtggattgacggagctcgtcaccatccccgcatgcaccgaatatcgccctttgcctccaattctgtgcggttctttcgtttcgaacccccatacaaagactgtatgtgtgtatggtcacttggac

SEQ ID NO: 316771 - DNA, 238 bp, Zea mays
cggacgcgtgggcgaacgcatgggcgggatcgtgctcagtcactagttcgtcaatctcgtctcacggttagacaacgacttgggcaacagcaaccgcattgtgaaggtgatcctcaatatgctcatgacccactgtacgggatttttctacctgcttgtaagggatggatgcagctagtgttcgcctaaaattaaagttcatagtactagccactgagtcgccagcttcatgcagagt

SEQ ID NO: 316772 - DNA, 283 bp, Zea mays
aaaaaaaataaaaaagaaaaaagaaaaaaaaaaaaaaaaaagaagaaaaaaaaaaggggggaaaatcaaaacggataaaagcttaaatgggcggggattcaaatgtgatagttcttcgggtgggtctccatgagatcttttcactgggcgtcgttttaacatgacttgattgggatgcccttggttttactaaaccttctcgggttgaatcctgtcttcctttccctaagtggccttccagtgaaatcggccttttccgatcggccttctcaacaattgggcc

SEQ ID NO: 316773 - DNA, 301 bp, Zea mays
ccacgcgtacgctatgcgattcgctcgctcgatcctatcttctcttcacatgaagcgcaacgcccatggccatggccatgcatggctccgccgccacgcgccatctgttggtcgctgcctgggcgccggtggatattcgacggtagcatggcactcatgtcgcactaccgttttcgtaatcacgtgcggttgacgtgcaacttgcctaaaccgatgaggtggtttaagtctcggtgggttcataggatgcttacctgttgctatacaatctgtctctattcttcctacgacattgacgagg

SEQ ID NO: 316774 - DNA, 369 bp, Zea mays
cccacgcgtccggtgtgcaggtgctccgcggcggcctgccggctgagatcacctcccggggcgccacctccgacgatccactcgtcattgtggactagatccaactgcggggagagtagtacgtagtagactagtagtggtgcagtgcagtctgtagaggagacgagacgctcaggagctaggtagcatcgtcgttgtattttgttgttgcccctgctctagctagctcgctggtcctcgtggatcttgtagccagtttctttctttcagctgcagaccttcctcttcctgtggacacggttgctccatcaccaagtggtgctgatgctaccagctttctgctgtgacagttcatagtagacgctatca

SEQ ID NO: 316775 - DNA, 138 bp, Zea mays
acccacgaatccacggacgcgtgggcggacgcgtgggtcttcactatcaatccacttccgcaaaaaatcctctctattcaataccatccatcaacatggttgcattcataaatctcatcaactccgcagtggctttgg

SEQ ID NO: 316776 - DNA, 316 bp, Zea mays
agcccacgcgtccggctgctcatggaccgcgtcgtggccttcattgccggggcctgacttgctctcttgtggccttgtgggcgcgacgcagtatcaggtcgcaattgaagattgaagttgtggacttgtgggcaagtttctctcgctgaatattggtcttgtctaaacaaaaagccttacaaaaagcggaaaaagaagatgttgaagaacagataatccggagaagtatgtgaaaatttatgggctacttagcacagattagaccgctttgtgaaaggagctgccagttttaaccaaaaagggggggcggttcaaa

SEQ ID NO: 316777 - DNA, 322 bp, Zea mays
cgacccacgcagtcaggaatactatataagtgaaataaaaacaagtaaaccatgtaaaaataatcaacagaaaagtgaaatcatcttggggccaaattcaaaaaaaccctgccttcctgcccggtctgcgtcattggcagctggtcacagcactgctcagctgggtcacagctgcaggattccattcttattttcattgctgtgccgggtatgccattcatgcccatgaccgtgctggcatctgagtccattgcatctgtcacgctgcgcatccagcacttcattggctttgtggcgacgaatcacaggcttgtgctgggtt

SEQ ID NO: 316778 - DNA, 138 bp, Zea mays
cgacccacgcgtcagcccacgcgtccgcggacgcgtgggcggacgcgtggggtgttcttcagtaactcctgtatttggtgtatgaaccgaaagattgcgagggtcactggcatggtacagccggagtgagagtgagtg

SEQ ID NO: 316779 - DNA, 226 bp, Zea mays
cggacgcgtggggaaatgcttggaaacaagcatatatgcaggacctggtgaacaatctcatcaggtaagcttgtattctgcatagactgaaatactgacatatttttccattctgctacttataatgctcatttatgtcctatttagttcgatcccttgattcactcactggttagtctttgaatttactgcctaggcatggaatacctggttttgtaagtttggt

SEQ ID NO: 316780 - DNA, 365 bp, Zea mays
agacgacttgtttcattgattcttgaagagatcgagcttcttttgcaccacaaggtcgaggatgtcttgcaactgcggatcaagctgcggctgcggctcaagctgcaagtgcggcaagaagtaccctgacctggaggagacgagcaccgccgcgcaggccaccgtcgtcctcggcgtggccccggagaagaaggccgcgcccgagttcgtcgaggccgcggcggagtccggcgaggccgcccacggctgcagctgcggtggcaactgcaagtgcgacccctgcaactgctgatcacatcgatcgacgaccatggatatgattattatctatctagcttgtggtggtggttgaacaataataagcg

SEQ ID NO: 316781 - DNA, 129 bp, Zea mays
acgcgtcaacctaaacgtccggatccgccgtgactcacatgacttcctccatagtctcccaagtcatgcactctcagtgaccactatgttaaacctatctcggtcatccccaccgggatgcagttcctc

SEQ ID NO: 316782 - DNA, 402 bp, Zea mays
aaaaacactcaagggatctttgtttagaggatggagacctaaatctgaccgaccttcattggtggataaatatgcagaaaaagaggagaccttcacctaaaaaacaaagatatatgttgaaatggttctttttaaaagattgcaacgtgatccgggtgtcagagattcagaaggtcttggacatcgccgacgagcgtagcctcattgacaccatcttcttctgctacctcgggtgcaatgcaagctaaggtggtcgacaatggtgttcgcggcggcgaactcgcagcgcagccaggtgatgaagccatcgcgctcgtcgacgagccaggcgacgggctcggccacggcggtgccgggggccggcgaggcgatgacggcggcggtggaggccatcgccgtgcg

SEQ ID NO: 316783 - DNA, 296 bp, Zea mays
acgccgcggctggccgcgtgggaggaccggttccgcgccgccgacgtggccaagggcgtcgtgcccgacgacctccacaagatgcgcgcgttcctgcagaccctgcgcgctatgaactacgccaagtgagagtgtttcgtcgcatgaacgtgtgccgtgccgtgcacgacctatgatcagttcatgtcgatacgtctatcactcagttttgcttcttccgtcaataatcggtgtgctgaatacatgtacaccagctgcctataattttgcttctttcttccaatacctccgttttt

SEQ ID NO: 316784 - DNA, 383 bp, Zea mays
gactagttctaagcatttccttatgctgcatatttagtgtaactcagtgccttcattggcatatgttatccacatcatcatttcaaggtccactactctgttccctgtgctggtttagatttgtagagcacataagtcaactgtcatatgcagcagtcacgttcaataagctgttagctgtagcaggttggttcctggaccagctagtatttgcgaaaccaatgccctttgcactctgccagaaaaacggtgaaattctatatccatattctaattttactgaaaacctggtgtgccatcattgctcataaccttgtttgtcagttgtcacagtattggttcacagaaaatgtttgcaataactatttgtttgtatttttgtg

SEQ ID NO: 316785 - DNA, 448 bp, Zea mays
  unsure (1)..(448): unsure at all n locations
acgcgtcagcggaagcgtgggctggcttctcctccccctcttaccaagtcctcctcgggttagggttccttagggttttgtggaggggcgatggcggcggctgatgtggagtaccgttgcttcgtcggcgggcttgcctgggccaccagcaacgagtcgctggagaatgccttcgcctcctacggcgagatcctcgactccaaggtcatcaccgaccgggagacggggaggtcccgcggcttcggcttcgttaccttctcctccgagaactccatgctcgacgctatcgagaacatgaacggcaaggagctcgacggccgtaacatcaccgttaaccanggcccagtcccgtggcggtggcggtggccgcggtggctacggcggcggtcgcggcggcggcggcggttatggtggcgggcgccgtgacggcggttatggccgcggtggc

SEQ ID NO: 316786 - DNA, 303 bp, Zea mays
gtcagcgcacgcgtcggcaaaaagcacgctttggatttgcatgacaaatcaagcttcagatgtacactccccaatgttggggacctttcacagcacagacggtaattaaccgaatttcatgtcgcactgttcacgtcattgctctacctcacgatggcctactgcactcatcgcgttaaactgagatgcgtcagcttggcaaaggtgtacttcgcacggacttcagggagctcatgtgttaaatgcttatgcaaggtaccatgatcaggctgcccagcaaggcacaattgttagagtttcatg

SEQ ID NO: 316787 - DNA, 356 bp, Zea mays
agctcattccccgttgaatttcaatttctggccaactttgaagggtggtccaatgggcaacttgttcggcaactctggcaaagttcggtaatggaaaggaacaaacctgaacttgaaaggaaaccgggttacaagcccggttttgggccccaagttcaacaacccaaaaaggctcctccccctaaaaacaacattccctccggttccccttcaagccggcaaaggcggaaacgttaacaaaggtaatggcatcgtgaacaacaactggccctggcggcggacgtggggctgacggcggagaccaagttcacggacctcggcgccgactcgctggacacggtggagatcgtcatgac

SEQ ID NO: 316788 - DNA, 146 bp, Zea mays
cgacccacacgtcagcccacgcgtcagccaactcattatcctacattttctgggtataatttctgtatcatgactgatcggttcatggtgtcaatgccatttgttctggatacactcagtggatgcttaaagctggttcatttgtt

SEQ ID NO: 316789 - DNA, 318 bp, Zea mays
cccacgcgtccgctcgctcgcctacgtacgtctctctctctccgccgcgaccccccacaagcggcgccggcgccggcgctgcagctaaaccaaaccctaagccacgggcaccgccctacgccgcgggctctccgcgatgcgccggtgcgcggaggcgatcgcgagggccgtggtcgagttcctcgaagccgtcatcctggcctgtctccgctcgtgcttcggcgcgcgcccccgccgcggctccggccgccgagatgcgctcgtgcgcggggatcgggccgcggaggtcatctgggatgaggaaagcttggtaaggga

SEQ ID NO: 316790 - DNA, 107 bp, Zea mays
acgcgtcagtgaacgattccatctagatgttgatggcgtggctcacaaaaatggtaagttttgcttcatacatctcttactatttggaatctcaacaaatcccctct

SEQ ID NO: 316791 - DNA, 379 bp, Zea mays
aggttcgataataataaaaggccgggaacccaaccggcaaaaaacccttcaatccttggaaattaaaaaaaaacacaaattataaaacaaaaaaacaaacaagaaaaaggcatttggaaatgggctaatgaaggatggcatttactataataatatcgaagttgagattattagcatttactaataagactgcatttttttcattactgaacttgatatatacatgacttttcctctatctgaagctcgacgtaatctgctcgaccaacggagcagaagcatgggttcagaagctcaagtaagtttttttttgcgacctattcccttccctccccttctctggcaggatttcaacgatgcatctggattgctcgttttc

SEQ ID NO: 316792 - DNA, 109 bp, Zea mays
aggtaatctatgatggcaatgtttgcctggtcatgaagtattattactttcgttgaaaccgtgatgctattaagacttaattttttttatggaacatcgaatgtaaggc

SEQ ID NO: 316793 - DNA, 322 bp, Zea mays
aagcggacgcgtgggaaaaaaaaatgagcaaaaagaataagtctaggagattgacgatcaatgggaatgatggttcattccacatgaatgtaaagggcagatgccctctaggctgtgggctaatttcacttgactggtcggctggatcccttccgtgacttagaaatctgcgaagtgggggctcttgttctacgtgctacagattggtatatcactagctggcctctgtcttaactggttggcacgaattacccttctcaacagtggcgctaacccgaatgtggaatgggacgttccatctaccagttcattgatctccctg

SEQ ID NO: 316794 - DNA, 216 bp, Zea mays
agcactagtaaatttggggaaactaaggttcaacaatggcaaacccggatcaaaccaatggtagccggaccgccatggatggcaattcggtaaccaacggtcaagaacctaaacctcccggaattgtacaaaacatccataattacaatggtagaaaccaacttggaggaaacctaataaaaacttccccgtaaatggaaaaccaatcggttaatg

SEQ ID NO: 316795 - DNA, 426 bp, Zea mays
acgcccacgcgtccgcccacgcgtccggaaaacccagctcttcaaccctataggctccaacaagcaatcgcagcaagcaacatacctttatcacccttgtttcaacaatcgccagccctatctttggtgcagtcattggtacaaaccatcagggcacagcagctgcagcaactcgtgctacctgtgatcaaccaagtagctctggcaaacctttctccctactctcagcaacaacaatttcttccattcaaccaactgtctacattgaaccgtgctgcttatttgcagcaacaactattaccattcagccagctagctactgcctactctcagcaacaacaacttcttccatttaaccaattggccgcactgaaacccggctgcctaatttgcaccaccaattactactaccaatttagccagcta

SEQ ID NO: 316796 - DNA, 358 bp, Zea mays
acggtcttcagacaccatcgacaacgtcaaggccaagatccaggacaaggagggcattcccccagaccagcagcggctcatctttgctgggaagcagcttgaggacgggcgcacgcttgccgactacaacatccagaaggagagcaccctccacttggtgctgcgcctcaggggaggcatgcagatcttcgtgaagaccctgaccggcaagactatcacccttgaggtggagtcttcagacaccatcgacaacgtcaaggccaagatccaggacaaggagggcatcccaccggaccagcagcgtttgatcttcgctggcaagcagctggaggatggccgcacccttgcggattacaac

SEQ ID NO: 316797 - DNA, 130 bp, Zea mays
gtacggtctagaattcacgggctcgagcacgcgtcaggccggactcgccgcccgcgccggagctctgcaacccgccgcagccgcatcaacgttcctccaaagtctctagccggggccaccgccaccgccc

SEQ ID NO: 316798 - DNA, 99 bp, Zea mays
agggccaagctcccggaatgataacaggcacctggctagtaccagaaacctttgaatgacatacattcacatctaatgtggacacatacatcaaaggat

SEQ ID NO: 316799 - DNA, 147 bp, Zea mays
  unsure (1)..(147): unsure at all n locations
agcggacgcgtgggcgctggaagcccgggtctggggttgggttggggaaagcccttttaaaactgtgttggtcaacttgcaattttaacctttccaatcgccgtttattgtgagttggtcctatannaaanaannanannnnnanaa

SEQ ID NO: 316800 - DNA, 358 bp, Zea mays
acgtaatttctcatgcttcaaatctctatttttcttgatatatttggactcacatttttttgtgaataattttataatgctattttgtcattactgtctaaattctaaaatgttcttgtgagacttcattggttgtgcacctgattacactttatctggcttcttttgtcatgcatagttaaatttcaaactgtattgtattagtttgtatttcatataccgtacacatgaagtttgagtatgaactggcatttccatcagcattacagttgcttacttgtgctatctgtttgctggtgcaggaagctgaaactgctataactgaaatgactggaaaatggcttggaagcagacaaat

SEQ ID NO: 316801 - DNA, 235 bp, Zea mays
acgcccatgcgtccgcccacgcgtccgcccatgcgtcagcggacgcgtgggaaaaaatatttgtgaaaaaattaaaaaatgtaattttgtcattaaaagtataaattataaaaagtgaaatgatgaaaattcaatggaatgtgaaaatgaaaaaaaaataaaaaggcatcatttggggggggatatttaaatggttcaatgctaatgtagtagtttgtaaaacataaaacgtttt

SEQ ID NO: 316802 - DNA, 263 bp, Zea mays
agatcgctgtcatggaaacgacgtcatgcttcctgacctccaaagcatcgtccgccagcaggagcacggcggtgctgccgcccaccgcccccggcttcgcaaagcctaaaccttgtctgcaactccttggcaacaaccgccgccgtgcctgctgcgggagcatcagcgcgcggggggcgcccgaggacagcgccgcgccaacgcccatcggtcccgaatggggctcgtttcgcgcgcaactctaattcaaggagcaactgccg

SEQ ID NO: 316803 - DNA, 371 bp, Zea mays
  unsure (1)..(371): unsure at all n locations
agcttgtatcatatcatatanaacaagaatccccaccacgcagttgcactggcacgattaacaacccactgcatgtcaagttcctgaagaacatgttacgggtggtcctcaataacttgggccccaacctcctcctccccggcaacgcccggcttgtccccaagacaacccctgagaagtacaggccccggcgcgcgagatccggccggtccactgcctgctggccctgctccttgccgctgcagtcgccaagctgcgtcgcgtgggccggcccaaggacgtgtacctcgtggagtacggctgcttccggcccaagccctggttccgggcgcctttcgcgacgtgcctggagcacgcgcacctgatgccgt

SEQ ID NO: 316804 - DNA, 76 bp, Zea mays
tcctccggcggatcgtcgccgctgtaccagttccgcgctgagctctccgtggacgtcagctccgtccacgtcgaca

SEQ ID NO: 316805 - DNA, 155 bp, Zea mays
tcatctactttcgcctcctcgccatcctcctcctcgccgtcggcgtccacatttacctcggctagctagtcgccggcgggcggccggctgagcgaggctagctgctggcgcgcggcggcccggcccggctttatttgacatcatctgggtggctg

SEQ ID NO: 316806 - DNA, 201 bp, Zea mays
ccggccaacctcagggaaaggttcaggccaaccaatccggtcgcagaagaaaaattggtaaaaggtggtaacataagtttaaaccccccaaaaataaccaaccaacggttggatggaacaacccaaaagcaataacccaaggtaaccaaacgttacaattccaaaaaccacccaattcaactggccttaacccaaaatcct

SEQ ID NO: 316807 - DNA, 188 bp, Zea mays
accgaattccctgcgaatcctctcccctcgcctcctcgtctccccctaagggattctccgagaagaatccccaaaaaggccctctcaacccaatttaaggaaccctggagccaaaagaagcttggttccaagccccccaaggaaccaacctccggaaccaaaaacgggggctccttcggaaccccggg

SEQ ID NO: 316808 - DNA, 405 bp, Zea mays
acgaacaacttttaagtttacctttcatcagggccaactgttcatgattcatattattgtttaatctttacctccttcctataagatccacatcactaacatccataattctgagaatggaactatcgctatcgtgatctgtaagtgacatgggaagtagcatccaagagtctaatgaaattctgaatttttatcacctgagctagcagcactgtgatctgtcagaaacattaggggtaatacccagcaatggtgaccgagttatgaattttacgggtctgagtgagcagatgctgtaatctgatctagcaacatcattgcacgccaaaaaagtttttgtcgcattaacaaaatttctttgcacatcgtttaaggtggccaaggacccacctggcaaggatatca

SEQ ID NO: 316809 - DNA, 332 bp, Zea mays
gacccacgcgtacgagctctcatggacatctccctcccctgtttccctccatggtgtctgctctcctcttcccagacatggctggcgcgtctctctccctggagctctctcgactgcgccatctccagcttctcgccagggacgcgcgcaaatccctcaagcttccttccatggcgctcccaatttcaagcgctcggagctccagctcaaccgaccgcccggcaccaatgcgcgcctcaggctcctcgcggcctcgctgggcgggatctccctccagctccaatcccctctaccgcgcccctctgcttgccgcgaacgcgcgccgccgccct

SEQ ID NO: 316810 - DNA, 110 bp, Zea mays
acggacgcgtgggcgtagacttcgtagtcaccgcgttcgcatcccgagcacgcaaccatggctcgactgtcagccaccgccgcgctcctcctcctcgtcctggtcctcct

SEQ ID NO: 316811 - DNA, 183 bp, Zea mays
aaaaaaaaaaaaaaaaaaaaaaaaaaaaaaaaaaaaaaaaaaaaaaaaaaaaaaaaaaaaaaaaaaaaaaagaaaaaaacacaaaaaaataaaaaaaaaaaaaaaaaaaaaaaaaaaggggggccgctcaaaaggtttcacacttacttacccttaaatggaagttcaaacccctccaaaagg

SEQ ID NO: 316812 - DNA, 257 bp, Zea mays
  unsure (1)..(257): unsure at all n locations
agtaatttgctatttttcctcgttctttgtttttgtacttattgagaattgatgcctcggattctctgatgtatgtatgattgggctcaggctcagggcactttgccatccctattttgtcatttcggttcttccttagcgtggaacgtaatgagtgtgagaaagtaaaattggtgaaagtgaaaatgggaactgagagcaaaanaaaaaaaaaaaaaaaaaaaaaaaaaaaaaaaaaaaaaaaaaaaaaaaaaaga

SEQ ID NO: 316813 - DNA, 339 bp, Zea mays
tctgcaagtctcgctacgtagcagtgcaataaaaaaagcagccgcaatggcgagcagcaccatggccctctcctccacggccttcgccggcaaggccgtgaacgtgccgtcgtcgtccgccttcggcgaggcccgcgtgacgatgcgcaagacggcggcgaaggccaagccagcggcggcgtccgggagcccgtggtacggccccgaccgcgtgctgtacctgggcccactgtccggcgagccgccgagctacctgacgggcgagttcccgggcgactacggctgggacaccgcggggctgtcggcggacccggagacgttcgccaagaaccgggagct

SEQ ID NO: 316814 - DNA, 480 bp, Zea mays
cgctggcaggtacgggtcaagaatacccgggccaaccaacccttcgagttctcggccaacccggaatcttccaaaacaaccggtgttccccaaattccccggcgggcaaaaccaacttcgcaacccccattcaaaacaattccttttgcaaccccaacggtcctccaaaaaattaaccaaaatgttttggaaaaggatccccatagataaacttgatcaaagctgcaactattgaaaaaaatatcccccagatctactactaacaagcgcaagaagagaacatcaccaaaagttggtcgtcttagagcaaactggaatagtggactagaaaagggtttagttgaaattcttcaagatcacaacaatgattgttataagggtcaaaatgggtggtcaaccgaaacaatggataaaattgtcaagttattccatgagaaatttcctatgtcacatttacaaaatgccaaatccaagataaag

SEQ ID NO: 316815 - DNA, 396 bp, Zea mays
  unsure (1)..(396): unsure at all n locations
acacacacagagagagacaagtggtttccaaagccaagtgtgtactagcagtctagcaaccagctagctcgggcggcagcaggcagccatcatgtcggaggagaagcaccaccacttcttcaaccaccacaagaaggacgaggagcagcccgccggcgagtacgggtactccgagaccgaggtggtcaccgccaccggcgaaggcgagtacgagaggtacaagaaggaggagaaggagcacaagcacaagcagcacctcggcgaggccggcgccatcgccgccggcgccttcgcactctacgagaagcacgaggcgaagaaggaccccnagcacgcgcacaggcacaagatcacggaggaggtcgctgccgcggcggccgtcggcgccggcggcta

SEQ ID NO: 316816 - DNA, 70 bp, Zea mays
tgttattgctatcctgccctgggaggaatggtgggagtttgaagtgacaaaggatgactcaaatcctcag

SEQ ID NO: 316817 - DNA, 184 bp, Zea mays
agattgcaacaacaatccttggcacatctaaccctacaaaccattgcaacgcaacaacaacaacaacagtttctgccatcactgagccacctagccgtggtgaaccctgtcacctacttgcaacagcagctgcttgcatccaacccacttgctctggcgaacgtagctgcataccagcaacaac

SEQ ID NO: 316818 - DNA, 407 bp, Zea mays
  unsure (1)..(407): unsure at all n locations
cccacgcgtccgcccacgcgtccgcccacgcgtccgctatagcaaccggtccagcactttcacgctcagctccagcaatggctgcctccaccatggcgatctcctccacggcgatggccggcacccccatcaaggtgggctccttcggcgagggccgcatcaccatgcgcaagaccgtgggcaagcccaaggtggcggcgtccggcagcccctggtacggccccgaccgcgtcaagtacctcggccccttctccggcgagcccccgagctacctcaccggcgagttccccggcgactacggctgggacaccgccgggctgtccgccgaccccgagaccttcgccaagaaccgcgagctggaggtgatccactcccgctgggccatgctcngcgcgctcggctgcgtc

SEQ ID NO: 316819 - DNA, 304 bp, Zea mays
acccacgcgtccgcggacgcgtggggtcgtcctcggagagaatgactacaccacttcacttcacctaataatactcgatctttgccaccagacttcttctgtggtacaagcatctatcatcaatccctttcgcatacaacatacgcagccatggccggaccaggcgcatcccgaggctacatcattaccctattgacgggctcaatcctcgccggatggatatccgtctccttcttcggcggaatgccaccatggacccctcgctctcaggatcctgctctttctcaggccctacctgaaaccc

SEQ ID NO: 316820 - DNA, 225 bp, Zea mays
gcgcccaacgacaccaaaggggtgttgtggttcaaatcgctcctcgggaaatgactgcccgtcaacgcaagcgcacctgctcccgtacagtgcttgcaattgcaacaaataaaaccaagcctgaattaattaaggttgggaatttaaccttgtaataaccgtccccccaaccgtgttttgtgaaactgttgacggtctgttaacgttatacgtgcatgttatttt

SEQ ID NO: 316821 - DNA, 118 bp, Zea mays
ccttcgaatccactggccgccaaggtggtcccgcgaagccggaatgggggcttctccttgtccttgggcaacggattgccgccaaaaacaatggtgcccccaacgaaggccaaccact

SEQ ID NO: 316822 - DNA, 88 bp, Zea mays
tgccagtccatccacgcccgctccgtcttcccctgccacgacacccccgccgcgcgcatcaccttcccgctcctcctcaacgtccccg

SEQ ID NO: 316823 - DNA, 101 bp, Zea mays
aaaaaaaaaaaaaaaaaaaaaaaaaaaaaaaaaaaaaaaaaaaaaaaaaaaaaaaaaaaaaaaaaaaaaaaaaaaaaaaaaaaaaaaaaaaaaaaaaaaaa

SEQ ID NO: 316824 - DNA, 103 bp, Zea mays
agatcgtccaaccccaacgcgtccgccgcgaccggttctcgatcgatgatcatgtccggttcgtccgccatgaccaccggtgcctcgtccgccgcctcgtcgg

SEQ ID NO: 316825 - DNA, 61 bp, Zea mays
atttccgcgttcgcgtttccctcccttttctccggtccttgggttttggctgttcccgtcc

SEQ ID NO: 316826 - DNA, 302 bp, Zea mays
aaaccttccccggccccttggaaaaaaaaaacacaaaaaaaaaaacaaaaaaaaataatctaaataaaaacaacaatcaataaaacaccaatcaaaactaattaacacattactcaaacatcaaaaaataaaaaaaagggccgcccctccaaaagtttcaaacttttcttccccttccttcaaatttaaaccctcttcaaaatttcccccaaatttcatttcccggcccttttttttaaaacttcttaatggaaaaaccctcttctttcccaactttaccccctttaaaaaaaatccccttt

SEQ ID NO: 316827 - DNA, 153 bp, Zea mays
gacccacgagtccacccacgcgtccgcgttgacatctgtttccgtgccgttactgttcactgcgcacatgagaacctccaggcaggtcccatatcggctgtcgaggactctgttgggctggcacgcttcatcattgaggaaaatgtcagcatc

SEQ ID NO: 316828 - DNA, 266 bp, Zea mays
agcaagcccaagccagcggcgtccggcagcccctggtacggggccgaccgcgtcctgtacctgggcccgctgtccggccagcccccaagctacctgaccggcgagttccccggcgactacggctgggacaccgcggggctgtccgccgacccggagactttcgccaagaaccgcgagctggaggtgatccactgccgctgggccatgctgggcgcgctcgggtgcgtgttcccggagctgctcgcccgcaacggcgtcaagttcgg

SEQ ID NO: 316829 - DNA, 378 bp, Zea mays
ctatagcaaccggtccagcactttcacgctcagctccagcaatggctgcctccaccatggcgatctcctccacggcgatggccggcacccccatcaaggtgggctccttcggcgagggccgcatcaccatgcgcaagaccgtgggcaagcccaaggtggcggcgtccggcagcccctggtacggccccgaccgcgtcaagtacctcggccccttctccggcgagcccccgagctacctcaccggcgagttccccggcgactacggctgggacaccgccgggctgtccgccgaccccgagaccttcgccaagaaccgcgagctggaggtgatccactcccgctgggccatgctcggcgcgctcggctgcgtcttccccg

SEQ ID NO: 316830 - DNA, 318 bp, Zea mays
  unsure (1)..(318): unsure at all n locations
ggccaagccagccttcgaggaacctccagccttaataaaatggaccggttaaaaaagaaggcccaaaaagaatcccaattggaaaacctggaaaggttaaaccgaatttggtcaaacccggaaaaagcaccgggccaaaggcggaaaaaaaaaaacctccggcgggaaaaatttgaaattgcaaaccgggataatgtttaacaagaagcggatgcatctgagcgtgatgacagcataaatgatggggaaatgaaaccagatgcatcctctgacagttcagaaatggcgtanaggtggtangagggttgggaggcactg

SEQ ID NO: 316831 - DNA, 212 bp, Zea mays
acggacgcgtgggaaaaatcacacaaccacaaaatcaaaattaaaaatcttccacaacagaggaaacaagtcaattgaaccatggaaagaaatcaaagggcagctcctctataagattcagccttagctactccatcatgaaacgtcacatgtcttccaaacagttcgtaatttaagttatcaggccgtccttttaaacgttcctaacgggg

SEQ ID NO: 316832 - DNA, 261 bp, Zea mays
aggcaacgcatcggtctcgtctccaccatgttcacgtcgggtctggtgggcgaccagttccagctcctgtacatgcagcacgaacacggcggcaggccgggcatcctcggcgacgtcttgatgttcgtcggcgtgcacctggagatgatcatcaccgtcctcgtcactatgcttgtgcagcccatcgtggtctatgatgtcgtcgacgcctagctccatcagatcaagtggagcagctcgattatgtgggcgcagatcgtc

SEQ ID NO: 316833 - DNA, 286 bp, Zea mays
gaccaacgcttccgcggaaaccattaatccatttcccgtcaaccaatttttgaattgttagaactggtttgtaaaacttgtttccccaaccttgcccccaaatcgggcaattttttgggccccgggcaattcactttaaaaatccaaatttgaattgtttaataaaggaaattggttccggaacggaataagtcccaaatgatttaccaaagttcaataataattccgccttaaaattaaatttttccaaaagtttgttacttggaaattaatgccgggaatttta

SEQ ID NO: 316834 - DNA, 88 bp, Zea mays
aacacgcgtccgcggacgcgtgggcggacgcgtgggtagaactagtcccaagatattaggaatatatcaggttaaggagattagacat

SEQ ID NO: 316835 - DNA, 109 bp, Zea mays
agcccacgcgtccgaaaaaaaaaaaaaaaaaaaaaaaaaaaaaaaaaaaaaaaaaaaaggaagaaaatcaaaaaagataaaaacttacatatacatgacatcaaaaata

SEQ ID NO: 316836 - DNA, 409 bp, Zea mays
aaaaaaaaaaaaaaaaaaaaaaaaaaaaaaaaaaaaaaaaaaaaaaaaaaaaaaaaaaaaaaaaaaaaaaaaaaaaaaataaaaaaaaaaaaaaaaaataaaaaaaaaaaaaaaaaaaaacaaaaaaaaagggaggcctcccaaaaggttcaaactttatttaaccgtgcatgcaacttcaaaccctttcaaaattgtccccaaatttcatttcaggggccttcttttaaaaaattcttgactggaaaaaccttggggtttcccaatttaaccccctttgcagcaaatcccccttttccaaattgggctaattccaaaaaagccccaaacttttccccttcccaaaattttcccacccttaatggcaaaagggaacccccctttaaagggccattaaaccccgggggtt

SEQ ID NO: 316837 - DNA, 423 bp, Zea mays
aataagacgacttgtttcattgattcttgaagagatcgagcttcttttgcaccacaaggtcgaggatgtcttgcaactgcggatcaagctgcggctgcggctcaagctgcaagtgcggcaagaagtaccctgacctggaggagacgagcaccgccgcgcaggccaccgtcgtcctcggcgtggccccggagaagaaggccgcgcccgagttcgtcgaggccgcggcggagtccggcgaggccgcccacggctgcagctgcggtggcaactgcaagtgcgacccctgcaactgctgatcacatcgatcgacgaccatggatatgattattatctatctagcttgtggtggtggttgaacaataataagcgaggccgagctggctgccatacataggtattgtgtggtgtgtgtgagagagagag

SEQ ID NO: 316838 - DNA, 93 bp, Zea mays
tccgggccgatccacacgtccaccgactcgtcggtccgtcgacattgcgtggaatacgcgggcgtattcacatatggattgcccatcacattt

SEQ ID NO: 316839 - DNA, 312 bp, Zea mays
agcccacgcgtccgcctacgcgtcggaggacgcgtgggaaactgaataagaatgtacagttgacacatcaattagaacgttcagtgtcaaagttttttttattattccagcaggattcctgccatcggaaacagtacatttgacgtctgactaaaatctgcaatttcaccatggttttttaagagctattggattgagaatgttttaatgccgtatacgacacctgtcaagccgggtctcatacttctctggatttggcaatcacggatctgcaggtccatcacatggatgtgcatccgctaaaaattctac

SEQ ID NO: 316840 - DNA, 327 bp, Zea mays
gccgagccacgcgtcagctgggccatccgccgggctattgctctgacagcttgcccgaggacgtgcataagtacgtagatagatacatcgatcgctagctagctggctaccatggtgtcgctcacgtcggcggtcatcaacgccccatccatcacagccgcactcgctcacgcagtggtcagcacgatggccatcaccatgtctgccacgcttcgaaaagggaatgacaccgccactgtaacggttgccgttaccgtggtggttagcgtccggcgagccatgggccacgacatggtgcatggacgcaaggcagggccgactcgactg

SEQ ID NO: 316841 - DNA, 84 bp, Zea mays
gcacgcgtcaacatctcccccgcaccgtaaccctagcagcagatcggccatggaagagctgggcgacctgcgtggggacaagcg

SEQ ID NO: 316842 - DNA, 223 bp, Zea mays
cggctcgacccaagcgtcagcccacacgtccgcattcatctcctcgctcccatttcccgggaatcatggcgtccgtcaacgcccgcgccccggtagcggcccttcgcccgttgacggcatcgctgaagttcttggcggacttccttggtcactctaaccgccactggcgcaacacgtctaccatgaagggcattgtcaaggcagatgccaaaggcgaatggct

SEQ ID NO: 316843 - DNA, 346 bp, Zea mays
aggcttctcctccccctcttaccaagtcctcctcgggttagggttccttagggttttgtggaggggcgatggcggcggctgatgtggagtaccgttgcttcgtcggcgggcttgcctgggccaccagcaacgagtcgctggagaatgccttcgcctcctacggcgagatcctcgactccaaggtcatcaccgaccgggagacggggaggtctcgcggcttcggcttcgttaccttctcctccgagaactccatgctcgacgctatcgagaacatgaacggcaaggagctcgacggccgtaacatcaccgttaaccaggcccagtcccgtggcggtggcggtggcgg

SEQ ID NO: 316844 - DNA, 314 bp, Zea mays
atcatcctatcctgtcaattgttccctgccatttacgttcatctcaccggataccttcagacatattattgtcatctgcagttttggacgcatccctctggaagataagcctttgcagcttaacttggcggcagatgatcggacgttgtgacccacaatagttgacgcatgttcatgtagtttaagtgttctcagttcccacgaccaaattgacagttaccacatggggttgtcatgctgattgcaaatttctacgtgggatacgtgcattggtacccacggattcaactttattccgacctaaaacaaccttt

SEQ ID NO: 316845 - DNA, 315 bp, Zea mays
agcccacgcgtccgagctgatccgtcgtctcccgtcttcccgacccgggtcccgcctcgcccgtcgccgccagatccgacgcgctggatcgccagcggcctgctgctgtcgatccgacgtgcggcagtctgctcttcctgccgtttcactgcgcttgaggtccataatagcacgcatctgggcgggtcaagagcaaaatggattcggacggaagaaggcgccggtgccggctccccctcaacgatggccaagggtccggaaaagaccgacgacttcaaagaaggcgtccgaatcgccggaatcccccaagggtac

SEQ ID NO: 316846 - DNA, 365 bp, Zea mays
  unsure (1)..(365): unsure at all n locations
agcggacgcgtgggcggacgcgtgggcggacgcgtgggcggacgcgtgggcggtgccgtgcgccggtgctgtccagtctagggtttcggccctcgcccgccgatccgtcccccccgccggccatgtcgaagcaaggagggaaggccaagccgctgaaggcgcccaaggtcgacaagaaggagtacgacgagagtgatcttgcttatttgcagaagaaaaaagatgaggaaaaggcgctgaaggagctgaaggccaaggcacagaagggcgcaattggaggctcgggtctcaaganaagtggaaagaaatgagcattgcccacccacccatctccaaaacacctaagagaacgataagacagctgc

SEQ ID NO: 316847 - DNA, 347 bp, Zea mays
agcccacgcgtccgccgacatggcaagtggtctcatgccaaatgcaccgtgacatgagccaaacaacccatgaacgtcgctccgtaggggacggggaaagcaattccagcagacccacacacgtcgcgtcttccatgcatagaaacgagggaaagcggtttcagcagcagtggggtggagccattttactcatcctaatccgtccaccaacttggctacaaaaagtcgtaccgaggcccctcaagcgatagcggtggtggatctgctcggcgccggtggcccgacgctctccagctactccgacttacctacgtcctccaaggtacgcacgtacgtacatctgattt

SEQ ID NO: 316848 - DNA, 182 bp, Zea mays
acgcgtcaacccaagcgtccggccacgggttcgtcatcggcctccgtctccttcccgccgccgcggcattcctcgtcctcctcttaaggttggagtgctcaaattcaattgcgattaccgggaggagttgtctgatgccacatgccggggctgcgtccgggcccatggaggtccgtggcaga

SEQ ID NO: 316849 - DNA, 358 bp, Zea mays
agagagtataagcttgacctctacaataacgctggagtacattattgtatcagcagcatctcgctcgtagccatgatgacgacgagaaaagtggccgcggcgggaggcggggaggcggaggagatgaggcggagaaacgccgagctcgagagggcggcggcggaggcggcggcgagggaggaacggctgcggcgggagctggaggcggccctggcgcggctggccgtggccgaggaggccgaggagcgcctgtgcgtgcagctcggcgagctggaggccgaggccgtggagcaggccgtcgagtaccaggagcgtgtcagggcgctgtccgagcgcctcgccttccttgacggcgtgc

SEQ ID NO: 316850 - DNA, 317 bp, Zea mays
gaccacgcggtcaggcccaactcaaattttacatcaaggccattcgccggaaatgggttcggacctgacttacggcggcggaaccttgccgcaaggttcggcttcaaacggtggggaatactcccggaattcttcaaagccgctctcgtgtctcgcccgcgccgcgcgatacgccgccgccgaacagcgccctgtcttcgctctcgcgggtatgctcttcggtggcgctatcttcattttctcttcgccctccactttatcgccgtcagaccccgccgcgtcggtcggcttcaaccatcttgccatcagggggcact

SEQ ID NO: 316851 - DNA, 391 bp, Zea mays
agcccacgcgtccgaactgtagtatcttgttgattacacatttatccaattgctaaatcttggccatattatatttacggttgatataccattgtacttacaagaaattgttagaaaatgatagggaagttcccctaccatatatgtaatataaatatccaatataagaacgaaatagcatcacaagatatgtaccaactcctaaatagcagatgttcaacaagaaattgtggaaccatgtttgtatcactaacttatatgattttgccatatggaaaaccaaggaaaactctgccaaaactgtatttttccaagcatctacttgtttgagatttggctttacattttatctttttgtttgcttcccctaattcccctttgggcctaattt

SEQ ID NO: 316852 - DNA, 364 bp, Zea mays
agcccacgcgtccggcgcccgcgaactctagaggacttgcgcacaagtgacggacaggttgggcccatctgtcggtgtgcgcgtttcccagctgagccgtggggaaagagaggatgagatgggccgaaaacatggaaccttgcccgactatgttcctttactttctctttttctttttttatgtttcttttctttttccaaattcaaggattcaaactaaatttcaattcctgttttgaacttcagatttccaaatatcgcacaatcctattgtgaatataacttctactatttgcattaatattatttatttttcttcctattatttaattatggaagggataattgactttataagaacttt

SEQ ID NO: 316853 - DNA, 333 bp, Zea mays
agcccacgcgtccgcttctcctccccctccggttcgggttcgggttcgtgaggttctccggggttcggtttcgtgggtgagcggatcgagatggcggcgtcggatgttgagtaacgctgcttcgtccgccgcctcacctgagccacggacgaccactccctccacaacgccttcagcacctacggcgaggtcctcgagtccaagatcatcctcgatcgggagacgcagaggtcccgcggcttcggcttcgtcaccttctccacggaggacgcgatgctgaacgccatcgagggcatgaacggcaaggagctggacggccgcaacatcaccgtc

SEQ ID NO: 316854 - DNA, 344 bp, Zea mays
cgacccacgcgctcagcccacgcgttccgcccacgcgatccgcccagcgtcatcagctagatgcgtgaggcggacgcgtggggtagatatttcaacgttaacagtggaataccatgtgaaaacagcactggcaaatcacagtattggaacgatgtacagtggcattaaaaaaaggttacgtccacatacacgcaggaaacatagtaaagttaaacaaaaatgtttagagcattgctatagagctcacaatcttgacatttagtcgcatgaacacggctggatatccgataagctcggtgctgtgctgtacgcaaaaatatcatatgcaacaaggttcacggtca

SEQ ID NO: 316855 - DNA, 201 bp, Zea mays
agcccaagcatccgtctacaagtctggatcattaacagtggaatacagtaacacaactacagtagcaatgacggccatggtattttccaccattgtgctcgttggtcttgctgtatgtgttgcgtcggcgaccatttttcgtcaagactcagtgactcttatcactgccgttcttaccgcaaaccttgcagcagtgtccgg

SEQ ID NO: 316856 - DNA, 353 bp, Zea mays
agagccaccatcgatctgcaagtctcgctacgtagcagtgcaataaaaaaaagcagccgcaatggcgagcagcaccatggccctctcctccacggccttcgccggcaaggccgtgaacgtgccgtcgtcgtccgccttcggcgaggcccgcgtgacgatgcgcaagacggcggcgaaggccaagccggcggcggcgtccgggagcccgtggtacggccccgaccgcgtgctgtacctgggcccactgtccggcgagccgccgagctacctgacgggcgagttcccgggcgactacggctgggacaccgcggggctgtcggcggacccggagacgttcgccaagaaccgggagc

SEQ ID NO: 316857 - DNA, 338 bp, Zea mays
cacgcgtcagcgtcagcatcggcaaatcctttggctataggatcaacattggtgatgtattatgatgaatcacatcaagcgatgttcatctgcgtgtcaaatgggtgggtaggtttgaaggtcatttgtggaactctcatcacattgtccttcttccgaaaactcttttagagttcgctcagttcgctagctttaagcgctgtgatgcattaagatattcatttgcgctatcttttgcccttgcaatagtttttgtcgatatcgctgatgcaagttccagctgcatccacttctttggaaatgtttagagttccaaactttttcgacaattagatggt

SEQ ID NO: 316858 - DNA, 372 bp, Zea mays
aggaccaactagcaacatagaaagcacaatagtgtaccaacaatggcagccaaaatattttgcttccttatgctccttggtctttctgcaagtgctgctaccgcgaccattttcccgcaatgctcacaagctcctataacttcccttcttcccccatacctctcaccagcagtgtcttcagtgtgtgaaaacccaattcttcaaccctacaggatccaacaggcaatcgcagcaggcatcttacctttatcacccttgttcctccaacaaccgtcagccctattacaacagttacctttggtgcatttgttggcacaaaacattagggcacaacaactacaacaacttgtgctaggaaaccttgctgcatac

SEQ ID NO: 316859 - DNA, 388 bp, Zea mays
agcccaagcgtccgcccacgcgtccggacgacttgtttcattgattcttgaagagatcgagcttcttttgcaccacaaggtcgaggatgtcttgcaactgcggatcaagctgcggctgcggctcaagctgcaagtgcggcaagaagtaccctgacctggaggagacgagcaccgccgcgcaggccaccgtcgtcctcggcgtggccccggagaagaaggccgcgcccgagttcgtcgaggccgcggcggagtccggcgaggccgcccacggctgcagctgcggtggcaactgcaagtgcgacccctgcaactgctgatcacatcgatcgacgaccatggatatgattattatctatctagcttgtggtggtggttgaacaataataag

SEQ ID NO: 316860 - DNA, 309 bp, Zea mays
agcggacgcgtgggttttttttttttttttttttttttttttttttttttttttattttttttttttttttttttttttttttttcaacgaaccccgaacgggaggtcataaggtattaacaaagcgtactttacagaaactggaagatgtaaaaaaaactagataacagacagaaaacatccaaacctcggcgggccccttaaaaaaccccccaaaaaacccaacaagatgcccaaaaccaaaaaggggagggaaaaaaaaaaggagaaaaccccgggaaaaaaaacccaatccaccaaaaggggttt

SEQ ID NO: 316861 - DNA, 207 bp, Zea mays
ggtgtagttcgtgtccctcgataccagcgtttactccagctacaccataagcggctacttctgctgcatcgtcgacatgtgggatgtgcagtacttcaaattcaaggaatgcatgtacacggacaaggtcactaccggcttggattgtgtctgtcacttgttcgtcagcatgtgaatgtttctcggcttcaacgacgtaattttcac

SEQ ID NO: 316862 - DNA, 423 bp, Zea mays
agacttgtttcattgattcttgaagagatcgagcttcttttgcaccacaaggtcgaggatgtcttgcaactgcggatcaagctgcggctgcggctcaagctgcaagtgcggcaagaagtaccctgacctggaggagacgagcaccgccgcgcaggccaccgtcgtcctcggcgtggccccggagaagaaggccgcgcccgagttcgtcgaggccgcggcggagtccggcgaggccgcccacggctgcagctgcggtggcaactgcaagtgcgacccctgcaactgctgatcacatcgatcgacgaccatggatatgattattatctatctagcttgtggtggtggttgaacaataataagcgaggcccaactcgggggccatacataggtattgtgtggtgtgtgtgagagagagagaaacag

SEQ ID NO: 316863 - DNA, 361 bp, Zea mays
cccacgcgtccggcattcaaaaacacaccaagcgaagcgcactagcaacgacctaacaccaatggctaccaagatattagccctccttgcgcttcttgcccttttagtgagcgcaacaaatgcgttcattattccacagtgctcacttgctcctagtgccagtattccacagttcctcccaccagttacttcaatgggcttcgaacatccagccgtgcaagcctacaggctacaactagcgcttgcggcgagcgccttacaacaaccaattgcccaattgcaacaacaatccttggcacatctaaccctacaaaccattgcaacgcaacaacaacaacaacagtttctgccatcactgagc

SEQ ID NO: 316864 - DNA, 349 bp, Zea mays
agcccacgcgtccgcccacgcgtccgcccacgcgtccgagccatcgacacgatcgcgagcgcaagcacgtacgttgtcggaagctcaagttagaagaagcaccagtgcctgatcgatggcggcccaggctctcctctccggccggcagctgctgggccgccccgtgcagtcggccgtctctaggtcgtcggcgaggaaggcgcccttcgtcgtcagggccagctccagccctccagccaagcaaggtgccgacaggcagctgtggttcgcgtccaagcagtccctctcctacctcgatggcacgctgcccggcgactatggcttcgacccgctgggcctctcggacccg

SEQ ID NO: 316865 - DNA, 372 bp, Zea mays
  unsure (1)..(372): unsure at all n locations
cgctgtccccatgtcaggaggccctgctcttcttcggtcggttttaaggcctgtttggagaggagcctacggcgccgcagcccgccacacctgcggcggccgatttgggcgccacacccgcggcagccggagtgtggcgcggtgtggcgcccgagccagcccaccaaacaggcccttagatagccaaaacgcagtacacacagcgctgcttaccttgacgacgaccacttgtgttggagcagcagtcatctacagccaaaactcttcacttccttcgccattgccgtgttaccagcccagccagcgacgtgggcgtgccgcgacagggttttttccccctgggaaacgttgtgttctggcanatgccacaaa

SEQ ID NO: 316866 - DNA, 284 bp, Zea mays
aggcattcgtaagcccagtcgactcgtcggtgcactcacaggttatcgtcatacctggatacggttccaacctcaccgactcagttcatcccgttacacgcatactctcaccgatgtaatacgaccgcgcttgggacacacctccagaggtgggagtatagaattatcacttcggaccatcagcaggccgattcgtaactaagtatggcacgtccccagcatcgcaatctgcaatcgaactggacacagccgtggacgtgaaaacccacagtggctgtccaagt

SEQ ID NO: 316867 - DNA, 223 bp, Zea mays
aaaaaaaaaaaaaaaaaaaaaaaaaaaaaaaaataaaaaaaaaaaaaaaaaaagaaaatcatataaaaagaataaaaataataaatccataaaaaaaaaaaactcagagcggtggccgatgatcagggggttccggttcaggtgccggcgttttccctcatcctcctcgaccgctgtgtcgccctctccgttttcggtcgtcattttcttctccgcgcctttc

SEQ ID NO: 316868 - DNA, 146 bp, Zea mays
aaactagactagatcgcgagcgccgccccttttttttttttttttttttttttttttttttttttttttttttttttttttttttttttttttttgtttttttttttttttgcttggggttttggggtttttttttttttttttgg

SEQ ID NO: 316869 - DNA, 111 bp, Zea mays
caaacctccgccggccccttggaaaaaaaaaaaaaaaaaaaaaaaaaaaaaaaaaggcgggcgacccaaaaggattaaacttagctacccgtgcaatggaactcaaaaggc

SEQ ID NO: 316870 - DNA, 414 bp, Zea mays
aggtggagtcctcggacaccatcgacaatgtcaaggccaagatccaggacaaggagggcattccaccggaccagcagcggctcatctttgctggcaagcagctggaggatggccgtacccttgcagattacaacatccagaaggagagcaccctccacttggtgctgcgtctcaggggtggcatgcagatcttcgtgaagactcttactggcaagacgatcacccttgaggtggagtcctcagacaccattgacaacgtcaaggccaagatccaggacaaggagggcattccaccggaccagcagcggctgatcttcgccggcaagcagctggaggatggtcgcaccttggctgactacaacatccagaaggagagcaccctccacttggtgctccgcctcaagggtggcatgc

SEQ ID NO: 316871 - DNA, 438 bp, Zea mays
acccacgcgtccggccacagaaaacatatcttgctgtagcggcatggctgcacgcaactgctggaaaaaaatatatgacatcttgtgttatgctgctacggtgcttctgcagcagcatgaagttttttttcttcttgttaaaataggttttggtgcactcatgaattcatgaagtgtgatcgttttctattgccgttgccacccttgtttcccaggcgagatccatcttcagcttagggttctacagcttggtggcagtgccgtcggtggttgcggtgatgaacgtattttggttctggaagatactcaaggggatggtgaaaaccctttctaggaggaagcacagcgaaaatgggagaacagattagaaggaatgaaggaaggatgctactgaactgtacacatgttcatctcaacgcacttacggcactcgcattc

SEQ ID NO: 316872 - DNA, 443 bp, Zea mays
cccacgcgtccgccaagggtggtcgtccattgacagctcgctcttctccatcgagaccgtgtccgggggcatcacgaatctatgtgagttgttgtggcatggctcgtagcgccattcagaattcctcgccttttgcgcctgagcagcatgatgattgtagtaaatgaaatgaatagtgcataatagttacattgaaatgttgcacatcgttgacatgaggacataacttttttttatctcctgctgtaacgacaacttgtccgcttccgcttcctgctcctcattgttcccgtttactgataaaacagcagaacctaatgctttttgcaaactgtgtgcgattagattagatactctccggggtgctgcataatatttcctttggcctgtatcatttctgatgtcatttgtcacatctgcggatctgccccaccatgcttgca

SEQ ID NO: 316873 - DNA, 120 bp, Zea mays
accacgagtcagcacacgcgtccgacgaagcatcacaaagctgtgatcaccgagttcctctcaactctcaaggactagagtccaacgggatctcgaccaaatggttttacactaactcgg

SEQ ID NO: 316874 - DNA, 445 bp, Zea mays
accaaacgtccgggccctaccttcttttttgctaacacctatttgattacaattaactaaaaattcagcaccaatccctcaatggggacatggcatgttggttcaacagtcaggagacttgattcccaggcagatgcagggttcacttcactgcttcggctggagttgtcagttctacagcttcaacatggtttgtcaggtctgccatggggacgcaatgatcgtcaactgctcggcatcctttgctatgctttgtttgtggagctgctgagtggtggtgtttggagaagtcttgaccctgaatatatagctgaatcaaagagtaaggaatcttgtcgagtgggattattggcaagggacaaggtcatgaggacatggatgcagtatgtgcatacatttgatttgagagccctttctctgcttggattgagcacatcctatgcag

SEQ ID NO: 316875 - DNA, 197 bp, Zea mays
ccagaagaaaaggttgacccggttaattgaaaaaggaaacggccggcaaaacaacaatcaatccgttcaacccaatgggttacttggccaaaattgcaacaacttccggaacggcggttacttcggcgaagggccccaaaaaaacggcggcaatcgccccggggctcttcttaataaccttacccccggcttcttca

SEQ ID NO: 316876 - DNA, 388 bp, Zea mays
  unsure (1)..(388): unsure at all n locations
agcaaccggtccagcactttcacgctcagctccagcaatggctgcctccaccatggcgatctcctccacggcgatggccggcacccccatcaaggtgggctccttcggcgagggccgcatcaccatgcgcaagaccgtgggcaagcccaaggtggcggcgtccggcagcccctggtacggccccgaccgcgtcaagtacctcggccccttctccggcgagcccccgagctacctcaccggcgagttccccggcgactacggctgggacaccgccgggctgtccgccgaccccgagaccttcgccaagaaccgcgagctggaggtgatccactcccgctgggccatgctcggcgcgctcggctgcgtcttcnccgagctgctctcccgc

SEQ ID NO: 316877 - DNA, 438 bp, Zea mays
aggcggaggcgcgcgaggacccttcttcctcttcctggctcgcgctcggcagcatgtgctccatgcacggccgctgatgagggagccagcggtggttattagtagtgcagacaagagctcgggcgcccgcccggccatgggatgggatggggaggcgttgcagcagcaatttatgtgctacctacgtactagtatttattataattgttattactaacaacaacgactggtagtatcgatcagagaccgacgctattcgatcgttggttcgtttcattgtccttccttgctagctggtggtgtatcgaccatctaaatctaacaggacacgtggacctggacggcaagagatgtccagtccagcagtgtggaacgtttgttgctttgtctatcattaattgctataagtttgtttcatatatacatatatactactgt

SEQ ID NO: 316878 - DNA, 430 bp, Zea mays
cttcggccccttaaggaacgggaaccggggcaaattcccccaacaaggagggaacaaaactggtggaaaaccttcccgggaacgggttcccaattggcaaaagtcccacttggccctggtactccgttgttaccaacaaaaaaaatcagctggcgcacgaggatgctggtggtatcagactggacacgccgattcatcttcggaagagactcgagttgcatatgatcaagagggaaaagattttgctgtgacatatattcagatgaacgaggccagtacagcctcttcccacttttttttagtctgatttcacataaatgttccccttttgttgttaaggaagaatctgacttcccctgcactttgtatagtgcaccacgaagaaattcctttgtacctaccttttctttttgagagagttgcactgcac

SEQ ID NO: 316879 - DNA, 395 bp, Zea mays
  unsure (1)..(395): unsure at all n locations
ctgccctcctttttctttgttttaggtcaacggtttttctgtgatttatgtgggaggtcttacaagtacaagcagaatatgaccgctcataaaaaatacgagtgcggacgcgagcctaaatttcaatgtgtcgtctgctttaaaaaatttaaagtcaaaagcaatttaaaagcccatttagccgttcatggattagcttcttattctttttgattcctaattttttaaaaaattatgttcctgacattttgcttccgtttactccgaaataagcaaaaaaatttttcgtcccaagggtctaatttacganaaaaacaaattttatcgtccaatgtatataaaaaactgtaaattanaaacattttttaatgaatttgttttaaaaatacattttt

SEQ ID NO: 316880 - DNA, 417 bp, Zea mays
acgatttataagaataacattctagatctagaagaaagtataggttcataattgataatataatatcgatgaaagtaaaaaaaacaacatctatgaaatatatataaataaaacgaaataaaatatgcataattaataatataacataaattaaaattattaataaaatatataaaaaagcataaaaagcccgataataggtaaaaaataaaaaagaaaatcacatggatattattttgataatctaaaatatatcatggaatatctcatgggtactttataaacactcaaagctaatcgtgaaacatcatatacatactatgtgagtcgtgagtcctcttaaagtataacgtaaaacatcaaacacacatgttaaacatcaaacacacatatataagccgacgttatttgtcacct

SEQ ID NO: 316881 - DNA, 196 bp, Zea mays
aaaacagtacaacctgtgcatattgttgatgttcccggtcatgctatgctcaagcccaagcttgctgaactcctgcctaaagctgctggggttgtccttaatgttggagctcaagatttcttgtccaacatgcaagctgccggaaaataccctttatacattctcacaaaagcatctgtcactaacataaggatcc

SEQ ID NO: 316882 - DNA, 275 bp, Zea mays
cacacgtccgcgactgatatggccgctgaagacctagaccttgctttgtcggacaaccctgccaagcagccgcgtggtctgtttgcagatcaattcgaggcaatatgattccatttgggcccgaaattttagcatgctaagagtcctcgatgtctacagaatctcgccaacttcgatgcccattacaacgggactggcccggagatactgcgccagacgaatggcgagatcgacgctttcgtagcaggggctgggacatgcggtacgctacctgg

SEQ ID NO: 316883 - DNA, 252 bp, Zea mays
cgggccgacccacaagtccgacgggagtgtacgtgccaccatcagcggtatcattagtggccgccgctgcgaccatctcatcatcctcgcacttgctcctcctctcccgccatcaggcggcctccctacaatgcggcctctcctgcctcggccatcccaaagggcccggtacggttacggctcatgctcctgccgctaaggacgtgccgttcatggcggtcgtggacactactgcagcgtccactgcggctg

SEQ ID NO: 316884 - DNA, 342 bp, Zea mays
acccacgcgtccgccgggaaggagctcctgcaggccacgcgcgagggcggccggctcaggctgcagttcgccaacgctgccgcagcagccgcaggtggtgtgggtgtcgtcgacaaggcggtgcacggaggtgacgacgatggcgacccccgtggcaagaacgcatgcatatacgacgacgaccacgatgacgagcgctaggtgatcgtcggggttcgttgatgtactttggatactttaacaacattcaataatggccctaaaaaaaagggttcccgcaatgcggccaccggctaaaaaaaaaaaaagggggggccccccaaagggttcaagcttaatttc

SEQ ID NO: 316885 - DNA, 237 bp, Zea mays
aactagatctagatcgcgagcgggcccttttttttttttgttattttttatgttctttttattgtttttatttttttttttatttgttatttttttttttgaaaaaggtatatcccaatccatccatgtgtaaagcccatggattactattttccacggggccgattagcggtcggttgaatattgccaacggtggctgtccctgtcatcaagagtgtttaaaaggaggatttttct

SEQ ID NO: 316886 - DNA, 315 bp, Zea mays
agttatatatatgagttgtatgcagtcaccgaactggtacaggcttccgctttccatttcctgttgggagtcgtgtagtgtaatcctggggtgtgtatttgtttcatcaatcatgccagccgatttgaatctcgtttcaccagcatgatctgatttgggtatacaagtataaaccgcaacgagcgatcttgtaaaaaaaaaaaaaaaaaaaaaaaaaaaaaaaaaaaaaaaaaacaaaaaaaaaaaaaaaaataaaaaaaaaagaaagaaacaagaacaaaggaaaaaaaaaaaaaaaagggggggcgccccaaa

SEQ ID NO: 316887 - DNA, 435 bp, Zea mays
accacgacgtccggttttttgaatattatatcaacaaatattattaacatgggcacctactgctacaaaaaactgtatagttcttttccaccacgctattcacgtttcttgctattaagtgcttacagaaaatactgtggttttcttacctccatacatggtaaggtcatgttaactctaaatacctaaattttttaatttatacatttcgaattaatctttgttgttatttataatacggaatttagttagaatagaaatttcttaatgaagtacatctagcacgaatttgtttctacatttctactaaagcaggaaatggcactactctacttcgcagcctaagacctcaagatatgttggcaaccatcaaagtacatgtttcaagaaaatgagaattctagggaaatacagacaccaaacccatattacaca

SEQ ID NO: 316888 - DNA, 397 bp, Zea mays
  unsure (1)..(397): unsure at all n locations
acggacgcgtgggcggacgcgtgggcagctcttcaaccctataggctccaacaagcaatcgcagcaagcaacatacctttatcacccttgtttcaacaatcgccagccctatctttggtgcagtcattggtacaaaccatcagggcacagcagctgcagcaactcgtgctacctgtgatcaaccaagtagctctggcaaacctttctccctactctcagcaacaacaatttcttccattcaaccaactgtctacattgaaccgtgctgcttatttgcagcaacaactattaccattcagccagctagctactgcctactctcagcaacaacaacttcttccatttaaccaattggccgcactgaaccccgctgcttatttgcagcagcanatactac

SEQ ID NO: 316889 - DNA, 392 bp, Zea mays
acgttattacctctctcaaaaaagaattcaaaagagaaaaaaaaattaaataattttcaataaaatatgtcgaaacacgggcaaaaaaagtataaaatgtacgaagcttaagaatgatcatgaaggtcaagctattgctgactgggaaagatgcccttctggatgaagattataaaatgggggagggcccaaatggtggggtggttgcaaattgtgcccaattaaccttgatagtgccttgctgattcaccataagtcgtatgctggggtattgccttttgtacttccggatgggtggacagtagcagttttcaatatgtacgacctgcttaggggaattctgttgtgcctcgagttcaacaacttccatgtgcttttgttttaccacctgg

SEQ ID NO: 316890 - DNA, 411 bp, Zea mays
aatttgtttatactgttattttttttggttggaggatatctcatgtgcatgaaactgatataggctagtaatttactattatttgtagtgtctgattttattcttttgtgccaggagcttagattgctgataattgtcagtagcttttctagtattaattactgaaagaattgttaaagttgcttgacaaagcactttattctgagtttggtaaacaacttattttctaggcactacacgttatgacttattagaatcggatttaaaagagaattctcactattactaattggttggtgtatttgagataaggcggttgtcagacattgatctatttgatagggttctaggggctgtgtgcaaatactcaacggcttaacctagttttaagaggaaattttgaaagtgtag

SEQ ID NO: 316891 - DNA, 197 bp, Zea mays
acggacgcgtgggaagcgggcgccccccgtcgtcgcgttcccccgcgcacgtacaggtggcgaagtcgcctcgtgctatgcataacaggcagtccttgatctccatgagaattatgctaacgttagatgcactggcattagtctaggatactcacttgcacgtatttctatcggcctacacttcttcacaccattta

SEQ ID NO: 316892 - DNA, 364 bp, Zea mays
gcgtccaaccacacgtccgggcagaagcaattcatcttctccacaaccaacaggaggaccggcggcggaaggaggcacggaggggcaaggaccttcaagttcccttgctccttcaaaaacccgttggtaattggcctgccggaaaactcaggttgcggaaagagcaccttcatgcgcccggtcaacaaacttctttccgtgggccccccgagcccgcccaaagggccggaaccccggactcaaacacgctcaacagtgacaccaagacagtgatatgcctcgacgactaccatttcctggaacaggaacggcatgaacgataaaggtgtgaccgccctccaccctaaggccaacaactttgatc

SEQ ID NO: 316893 - DNA, 105 bp, Zea mays
acatgacttttgactggacacaggaggaaagagagatgctaagacataaggtaccgttgactggtctgaagacaccatttcgcgatggatatgttagagatttag

SEQ ID NO: 316894 - DNA, 392 bp, Zea mays
aaaaaaaaaaaaaaaaaaaaaaaaaaaaaaaaaaaaaaaaagaaaagggcggaagcactataggttctaagtttacgtacacgcgaagggcggcctcccaacacgtctgaaacctaaattcaacttccaggcaatgtccttcctcttccatcgtggcgactgagttcactcttccggccgtcgttttaaacgctttgaaccggaaaacccttgcggtagccgacgttatcccccttgcgccaaatcccctttccctcacctgcagttacgcagcctgggcccgcaccggtacccctcccgaacatttgcacaacccgaatggggagtggaacctaccctgaacctgaccattacacgtgccagatcccgagctcccgcccatttcgcccgct

SEQ ID NO: 316895 - DNA, 229 bp, Zea mays
actcgccagctcgcacatcaaaacacttcagtcaagcctccaagcaacagcgtcggacatggtatacagagggatacgccgagagtaggtcgtgcccgcgctcgcgcacgggcggtcacacactgcaagaaattcagagtcacacgtctcagcccgggcaacacacacacatgcacacgcgcacgctctgtgccgaacaggtcagagacacacactgacggcagtcaca

SEQ ID NO: 316896 - DNA, 355 bp, Zea mays
acccacgcgtccgcccacgcgtccgaaaaaaaaaaaaaaaaaaaaaaaaaaaaaaaaaaaaaaaaaaaaaaaaaaaaaaaaaaaaaaaaaaagggaggaagaacaaaaggttaaaaagtttaattaaacataaatgcaaggttgtaagcttttctatagtgtaactaaatttaatttcatggggggtggttttaaaatttggtgattgggaaaacctgggggttttgcattttaacccctttgcagcattatcccttttcgcaatctggggtatttttttaaaggctcgcacggttggcccttccgaaattttgaccattttgaatggtgaatgggaccctcctttttccggggt

SEQ ID NO: 316897 - DNA, 407 bp, Zea mays
acccacgcgtccgcccacgcgtccgcccacgcgtccgcccacgcgtccgcccacgcgtccgctacttgcaacagcagctgcttgcatccaacccacttgctctggcgaacgtagctgcataccagcaacaacaacagctgcaacagtttatgccagtgctcagtcaactagccatggtgaaccctgccgtctacctacaactactttcatctagcccgctcgcggtgggcaatgcacctacgtacctacaacaacagttgctgcaacaaattgtaccagctctgactcagctagctgtggcaaaccctgctgcctacttacaacagttgcttccattcaaccaactggctgtgtcaaactctgctgcgtacctacaacagcgacaacagttacttaatccattggca

SEQ ID NO: 316898 - DNA, 76 bp, Zea mays
aggacacgtgggaaaaaaaaaaaaaaaaaaaataataaaaaaacaacaaaaaaaaaaaaaaaaaagatcaaaataa

SEQ ID NO: 316899 - DNA, 131 bp, Zea mays
cggccaacgcttcggcggacccttggccggccccttggggaaccaaaaagtttaattaggccaatccgcaatccaaacccggatccaaggataacaattgcagaaatttgggaagatgaatggttcaaaaa

SEQ ID NO: 316900 - DNA, 353 bp, Zea mays
  unsure (1)..(353): unsure at all n locations
ttatgttagcactaactaaccaattttgaggaatgaagtggtgatagatcaactcagtccattacactaaccatacaaatagtgggaaattagaaatggagaaaatgagggactagcctagttctcaaaccaagcaccctgttagagaaacatctcatttggggcaaacaaatagtgttactcaagcgcacacagagtagcttaaactaaacagtttcacgcaggtcttgcatccacagcttaaagactccaaagtccaaaccttcgttctcaaatgggcctaaatgggcttgaacagtntcattgcacttgataactttgtcagttagtgttcctttttttttccaatttta

SEQ ID NO: 316901 - DNA, 115 bp, Zea mays
tccgcctactgcgaggccggatgggagcctttcgtggccgccggtatccggtcctccacgcatgacacgcacccgccgtaactcccacagcctgggccacaagtcccgccgtgac

SEQ ID NO: 316902 - DNA, 259 bp, Zea mays
acgctgcagtacggtcgaaattccgggtcgaccacgccttcggaggacccttgggcggacccttgggtgtccttcccggtccggtccccaagccttagcccaatccttgggaacaacgggttattgcccgccgcggcaacaagcaacaacaagcccttaaccgggaacaacccccaccaaaagccacaattgctccggccataaaatggccagtaccatccggccaccaatttcctttgccacaaaaagataaaacccg

SEQ ID NO: 316903 - DNA, 300 bp, Zea mays
accatagccaccaccactccctgctgcctgctgcctgtccttggaaactccttcaatggaaaaggggtgatccatttattggcctgcattacagcttgaccgctgggcactgcttgctcctacggcaactacaatgcctctgctctggaccatcatccgttgagagcaaggcatgcgtcacacatgttcaacctcgccatcagcgatgcgtgtctcgtaacagaatcagagcaagcatcatgcagcagcagcagcagccaggactagagggcgccgtcatgaagccatcagagcctgctg

SEQ ID NO: 316904 - DNA, 203 bp, Zea mays
cccacgcatccgaggacgcgtgggcggacgcgtgggtgctgcatagagtacttctggcgaggattacgagcactcttctgaactactggataattgggatgcaatggagaacacatcatcacgtgcctagtatggagctggagcattcctcgctgtctggcttcccttggttgtagtgcgatatcacgaggccgtcgagttgc

SEQ ID NO: 316905 - DNA, 384 bp, Zea mays
  unsure (1)..(384): unsure at all n locations
agcaacggtgagaggggcaagctcaagaggaaggaatcaagcaagaaggaaacaaggaaggaagcatgcacgcaatcggagcgatggagcacgggtacccctgcaacggctgcggcaaggagaagcggccgccgctcaatatgggccagctcaagctgcagatcgccaggaccctgctcagcagcctcgcggcgccggtcgccaagaaccgggaccgcggcttcgggagatagataggccgtgccgttgtancagtactacagtagtagttagctgaagacatgcgtcggccgactggtggactgtgccgtctgtgcctttgttcatcctcgtcatcctttaagaaagaacgtgttgccgtcaaaaaaaaaaaccaatccaaaa

SEQ ID NO: 316906 - DNA, 429 bp, Zea mays
cacacgagtccgcccacgcgtccgcccacgcgtccgcatcaatcatcattcatcttagtagtataggcaccaaatcaaatctgcaacatcaattatctaactccaaaaaccatgaagctggtgcttgtggttcttgctttcattgctttagtatcaagtgtttcttgtacacagacaggcggctgcagctgttggtcaacaacaaagccatgagcagcaacatcatccacaacaacatcatccacaaaaacaacaacatcaaccaccaccacaacatcaccagcagcagcaacaccaacaacaacaagttcacatgcaaccacaaaaacatcagcaacaacaagaagttcatgttcaacaacaacaacaacaaccgcagcaaacacaacaacaacatcaacaaccccaacaccgccaaaacctttacct

SEQ ID NO: 316907 - DNA, 60 bp, Zea mays
aaaaaacataaaaaaaaaaaaaaaaaaaaaaaaaaagaaagaaaaaggaagaagatcaaa

SEQ ID NO: 316908 - DNA, 106 bp, Zea mays
aggacgcgtgggcggacgcgtgggccgttcactatactccatgcatattgtcggtagttgctgactgcattttatgatgtttttattggttcatatatttgttctc

SEQ ID NO: 316909 - DNA, 363 bp, Zea mays
gcacgcgtccgagcttagattcgttaatatatagatgcacccacatgaacatgatttactgagattaaatttgttgtgaaaaaaaaaaaaaaaaaaaaaaaaaaaaaaaaaaaaaaaaaaaaaaaaaaaaaaaaaaaaaaaaaaaaaggcgggccgctcgcaatcaaaaactacaattcaaaatcgcaaaaaaccgcactataatatacaagcttaattaagattgaattaaacatcataatacttataaacaaataaccaaaattaaattaaatgaaattagtttaaaaaaaaccagaattagaaaaaccatgatcataaaaaaaaaaacactaataaaggaaaaatcattttaaaagaaaa

SEQ ID NO: 316910 - DNA, 431 bp, Zea mays
agataatgtgcacagcagtgcaagagataaagtacccggaaaaagtgattcatatatgaaagggaaacatgcaaatgggtgagtacatctgttgcattggtctgtttttttgttgatttgtaaatctggtgacgaaaatgttcacgttatttgggactttttgagtattaaccctgctattcttcattctgatagtgaaacaagcagtgctcggtcgtcagagtcattggcttatcggttgatgacacccctacccaacttgggaaccaatagtttgtcacctccacctttgagttcggcctccagttctggctctgcagcacatacaccgaacagtatgcatttttcagtcccataccatcagcctagtcctttgccaaagcctaacgggaaggaagcaataaatttggtttcgcattgaataacagcat

SEQ ID NO: 316911 - DNA, 431 bp, Zea mays
  unsure (1)..(431): unsure at all n locations
accacgcgtccgcggacgcgtgggggaatccagtagcaacaatagagcaacaatggcgaccaagatattttccctccttatgctccttgctctttctgcatgtgttgctaacgcgacaattttccctcaatgctcacaagctcctatagcttcccttcttcccccataccttccatcaatgatagcttcagtatgtgaaaacccagctcttcaaccctataggctccaacaagcaatcgcagcaagcaacatacctttatcacccttgtttcaacaatcgccagccctatctttggtgcagtcattggtacaaaccatcagggcacagcagctgcagcaactcgtgctacctgtgatcaaccaagtagctctggcanacctttctccctactctcagcancaacaatttcttccattcaaccaactgtcta

SEQ ID NO: 316912 - DNA, 336 bp, Zea mays
agcacgcgtccgagaaaaaaaaaaaaaaaaaaaaaaaaaaaaaaaaaaaaaaaaaaaaaaaaaaaaaaaaaaaaaaaaaaaaaaaaaaaaaaaaaaggaaaaaaaaaaaaaggtataaaaaatttaattgaggtaaaaggaaaataaaaaatttttttaaaaaataaaagggggttttatttaaaggtttttatttttaatttgtgttgattgggaatttaaatgtttttaaaaaatttaattaatttttatttaaagggctttttttttaaaaggtttttagggaaaaagccttggtttttttaattttacatttttttaaaaaaatttattttt

SEQ ID NO: 316913 - DNA, 371 bp, Zea mays
  unsure (1)..(371): unsure at all n locations
caaacagaagctctgctcggctatcccttcgatttcaccacggcaggtgcggaagaacaagacgagcagcagctccacgaacatcgcgacaatctctcgacttctgcacgagcagccgctatgcctttggcacaattgcctgacgccgatcaacaccgggagattgtagataacctacgtaagagcagcacggcatactacacgctccagcagattgttcgcctgttggttctcttccgtgaatggcgtgaagaggaacaaacacttattcaaattcgtgcagaacgcaaggaaagaaggcgcatctgccanacacaagcctgacactcaacgcacgaaggcgcttctagactcaatatccaatgtcttcg

SEQ ID NO: 316914 - DNA, 384 bp, Zea mays
gggttggcttctcctccccctccggttcgggttcgggttcgtgaggttctccggggttcgggttcgtgggtgagcggatcgagatggcggcgtcggatgttgagtaccgctgcttcgtcggcggcctcgcctgggccacggacgaccactccctccacaacgccttcagcacctacggcgaggtcctcgagtccaagatcatcctcgatcgggagacgcagaggtcccgcggcttcggcttcgtcaccttctccacggaggaggcgatgcggaacgccatcgagggcatgaacggcaaggagctggacggccgcaacatcaccgtcaacgaggcccagtcccgcggcggccgtggaagccgccggcggtgggtacggtggtggc

SEQ ID NO: 316915 - DNA, 93 bp, Zea mays
cgcgtccgaccacacgtccgaaaaaataaaaaaaacaaaagtagctcaacagagaagctaaactaaaacaaaaacatggcgtcagtcacagaa

SEQ ID NO: 316916 - DNA, 430 bp, Zea mays
  unsure (1)..(430): unsure at all n locations
aataagacgacttgtttcattgattcttgaagagatcgagcttcttttgcaccacaaggtcgaggatgtcttgcaactgcggatcaagctgcggctgcggctcaagctgcaagtgcggcaagaagtaccctgacctggaggagacgagcaccgccgcgcaggccaccgtcgtcctcggcgtggccccggagaagaaggccgcgcccgagttcgtcgaggccgcggcggagtccggcgaggccgcccacggctgcagctgcggtggcaactgcaagtgcgacccctgcaactgctgatcacatcgatcgacgaccatggatatgattattatctatctagcttgtggtggtggttgaacaataataagcgaggccgagctggctgccatacataggtattgtgtggtgtgtgtgagagagagaganacaga

SEQ ID NO: 316917 - DNA, 294 bp, Zea mays
ggtccacgacgcgtccggaacgcaagggagccaaagggaaagttacaagcattgtggctaagaaggacgtagctttagctacacggattgaagaggccatgaagaaaaatgagagcttggaagctctcacgactaacaatgtcagaaggccaaccagctcgcagagtgtgaacacgaaagggaggccctcaaggttggttaagacttcaaatgctcttaaagttgtcagtcagaagggtagaaggggagtatcgctatctaacaagtcaaccccgggctccaaaggatacaact

SEQ ID NO: 316918 - DNA, 244 bp, Zea mays
ccaagcgtaagcttacgcctattctggctcctagggccataactttacctaggcggattgttcaggccatgaaaaagtatgggaacttggtacctctcacgagtagcactgtcaaaacgccagccagctcttagagtgtgagcactacagggaggccctcaaggttggttatgacttcaaatgctcttaaagttgtcaatcattacggtataatgggagtatcgcgatctagcaggtcatcccg

SEQ ID NO: 316919 - DNA, 332 bp, Zea mays
  unsure (1)..(332): unsure at all n locations
acccagagcagttgctgtttgttaaaaaacccaaccaaaattttaaagggaaaggtggtaattgatgcaattcgccctaatttaacccccaaaacaattaatctttggtcaaggaccaacggcaagacgacatcaaaattttgggcacctaaataagccatcgattcaggctcttatcatgggctgaacaggcactactactcaattgcaatcaattaccggaaaaatgagctagaggagaaaatgttgttgaacttgcacannaagaaatggacagatggactaattttgaagaagtttgacactcactcanaaaacaaacgagcagactg

SEQ ID NO: 316920 - DNA, 191 bp, Zea mays
gcgtccgcacacgagtccgcggacgcgtgggcggacgcgtgggccgactcgtgaactgaggcgtggtccgtgctgtggtgcctgctttgattataaatagccgtgatgatgcatactcttgttgagcaatgaattcgaccgaccatatttgaacttcctatgtacgtgtcacgtatctcaagtttggtgtc

SEQ ID NO: 316921 - DNA, 213 bp, Zea mays
tctcctgcccccacgggatttgtttctgtaccttcctatgatgacgtgttctttgactgtgtttctgatgtctatgaccgtcccctctatggcgtctggcttcctgttttcatctggactggtctaatggtgagcccattatgctcgttcgtcgtgtccattattgaggaacactgctcatcacctccttcatctccctcgtttgtgacgccc

SEQ ID NO: 316922 - DNA, 373 bp, Zea mays
cccacgagtccgcccacgcgtccgtgatttccaaggcatttgagggaaaatctgctgtaaacaggcagagaatggtctacaaggctatatgggaggagcttcagagcactgtgcatgctgtggaccagatgactaccaaaacgcctgatgaagctgctgccaacaagtaatcgatagatgcacaatacctgtgaaagcacagattatctgtgcttcgaagatcaggccattgcttggaccaaattttttctcttgggtggtattactttgcgtgtcagctgaatggtcaataatctgcggtatggatagcgcatggcttaaaaaaaaaaaaaaaaaaaaaaaaaaaaaaaaaaaaaaaaagggcggccgctct

SEQ ID NO: 316923 - DNA, 381 bp, Zea mays
  unsure (1)..(381): unsure at all n locations
agaaaaaaaatcatcctatcctgtcaaatgttctttgaaatttagttcactcgtaggctaccttcaaagatatgattgtaatctgcagttttggaggcatcacaatggagataggactttgcagttgaacttggcggcaaatgatcggactttgtatcccacattatttgatgaatgttcatgttgtttaagtgttctcggttctcactatcaaattgatagttaccagagggggtggtcttgctgattgcagatctctangtgggatacttgcatgggcaccgaaagatccagatctattcaaacctacaacaacctttagctcattgtgtttgttcagtgtcctctacctggaagtagataatgattggggtcattgtt

SEQ ID NO: 316924 - DNA, 300 bp, Zea mays
agcccacgcgtccgcccacgcgtccgattgattcttgaagagatcgagcttcttttgcaccacaaggtccaggatgtcttgcaactgcggatcaagctgcggctgcggctcaagctgcaagtgcggcaagaagtaccctgacctggaggagacgagcaccgccgcgcaggccaccgtcgtcctcggcgtggccccggagaagaaggccgcgcccgaattcgtccaagccgcggcggagtccggcgaagccgcccacggctgcaactgccgtggcaactgcaagttcgacccctgcaactg

SEQ ID NO: 316925 - DNA, 356 bp, Zea mays
agcggacgcgtgggcaccaagcgaagcgcactagcaacgacctaacaccaatggctaccaagatattagccctccttgcgcttcttgcccttttagtgagcgcaacaaatgcgttcattattccacagtgctcacttgctcctagtgccattattccacagttcctcccaccagttacttcaatgggcttcgaacatccagccgtgcaagcctacaggctacaactagcgcttgcggcgagcgccttacaacaaccaattgcccaattgcaacaacaatccttggcacatctaaccctacaaaccattgcaacgcaacaacaacaacaacagtttctgccatcactgagccaccta

SEQ ID NO: 316926 - DNA, 401 bp, Zea mays
aggaaaaaaaacgcgcgcaaagcaatcgttggagcccaacagctagggttggtggcagtcggcgggccttcgttcttgggttggtgacttggtgttggttccaactgatctctctggccgtaaatggctcggaagttgcaagaacagagccaccaaaaccgcgccacacagcaggcacatgtgatcgatcgagagcgacgactgaggacaagccgcgcggcgctgcgacccagcggcgcgaccgacgcggacgggcgcgcggccggctctgcccgccctgcagctccacccaccggaaccgaattaaacaccgccgtcgccgcggctggggcttgcgctctcgacagacaggccatgcgcgccacaaggtcgttgaccccggccaagccggcctggcatgt

SEQ ID NO: 316927 - DNA, 161 bp, Zea mays
agaaaaaaaataaaaaaaaaaaaaaaaaaaaaaaaaaaaaaaaaaaaaaaaaaaaagaaaaaaaataataaaagtcaaaggccaatcttactcttaatcttaaattctccatatgcctgcattagaccccattgttcttttactgcgtttttctattaccc

SEQ ID NO: 316928 - DNA, 259 bp, Zea mays
agaaaaaaaaaaaaaaaaaaaaaaaaaaaaaaaaaaaaaaaaaaaaaaaaaaaaaaaaaaaaaaaaaaaaaaaaaaaaaaaaaaaaaaaaaaaaaaaataaaaaaaagaaaaaaaaaaaaaaaaaaaaaaaaaaaaaaaataaaaaaagggggggccgctcaaaaggttcaatctttttttccgtttcaatgcaagttaaaaacttttcaaaattgccccaaaattcaattccaggggcgttcttttaaaaacttggat

SEQ ID NO: 316929 - DNA, 331 bp, Zea mays
aggcggcggggtcgccgacgcccgacgacgaggacgaaacgggtgggaggaccgcgaggagcgctctacaattcgaaagccgcggcggagcgaattcaggggacgggaagttgaattctatcactgacccccaaagctccctagtccctacacaactccgtctggtacggaccatgccatttgactcctcccgatctgtaagggcgacacgcacctttgcctcgccttcaacttggctgattcagctggtttagggcggctgaaatttggtttactgcaccaacgtggtagggggaatctggatgattaatttattctgctatttcagctt

SEQ ID NO: 316930 - DNA, 369 bp, Zea mays
aggagaccaacaagcaacatagaaagtggaatacagtagcaacaatagagcaacaatggcggccaagatattttccatccttatgctccttgctctttctgcatgtgttgctaacgcgaccatttttcctcaatactcacaagctcctatagctgcccttcttcccccataccttccatcaatgaccgcttcagtatgtgaaaacccagcccttcaaccctacaggctccaacaagcaatcgcaacaagcaacttacctttatcacccctgttctttcaacaatcgccagccctatctttggtgcagtcattggtacaaaccatcagggcacaacagctgcagcaactcgtgctaccagtgatcagcca

SEQ ID NO: 316931 - DNA, 188 bp, Zea mays
aggccaagcgtacgcgcacgcttcaggtgactcatgagtttggcttcgcgtggctaaactacctccgaggaaggggtgcccatgctgccaaaaatcccgtccatgttggctccacagtgtggatccaggattattcggcttggggatagcgctcaaccagttcggttacatgatgtcccgcaaagata

SEQ ID NO: 316932 - DNA, 323 bp, Zea mays
agggaatgcgtgagggaggcactcagtatcgggattaccaatggtggcaatgtcgatagcgagctctccaaccggtggagagcacagacgatgaattagcttgatgtcttgagcaggacgctgacgttgctcctcaagtatggtacagtcgtctgagcattgatgcttagatgttgatggttttggtgatgtacctcccatcatttgcccctttgttgtgtatagtacctaggtgattgtgcgatgctttgtaatgtcttcctcagctggtcccttatccgtcctactatatttgcctatgtataccccgggtttgatagttt

SEQ ID NO: 316933 - DNA, 348 bp, Zea mays
cccacgcgtccggctcaaggaggacctcgacaagatgcttgagcgcgccaggctagccaacgagcagcgctacattgacgatgatgaatagatgcccagatttatttgccagcgacctgtattttttttgcaacatgttgtcagtacacatggccaggactgatgatcccccatcgtcttagttctctcagctttccgcatttcaactgtgatcttgtaataagatgtcggatctcatggattaccaatgtaatacaccaattatgggttcttgatctgatggttggctttctctgataaaaaaaaacaataaacaagcctaatcagaaaaataaaaaaaaacccaaa

SEQ ID NO: 316934 - DNA, 417 bp, Zea mays
agccaatcctccccctccagctggcggaacttgtcctgccagtcgcccttggtctggcggatcggatcggcaagggccggggtggaggcaaggagcagcgcgaccagcgcgatacgagatgcggcggacaagaagcgagcctttcgaacggacggacggatgatcgttgccggtgatacgatgcgcgtcaaccgctggccatgcgaatatcggatatattgtgacacggcggaccgatggttgcggtccgacgcggagtgcggcaagcaatatgtcggaatagaatgggtacgtacacaagctatgctgttgaaccggcggacgatgatcggcgcactcgcttccctgccgatcgcgtcgcgggcaacggcccggccccgttgcggatccgttgctcttcgcctatttcggaaccgg

SEQ ID NO: 316935 - DNA, 103 bp, Zea mays
agaaaaaaaaaaaaaaaaaaaaaaaaaaaaaaaaaaaaaaaaaaaaaaaaaacggacgacgctcaagatgtttcatccttacatagtcctgcaagatacatcg

SEQ ID NO: 316936 - DNA, 344 bp, Zea mays
ggtgggctggcttctcctccccctcttaccaagtcctcctcgggttagggttccttagggttttgtggaggggcgatggcggcggctgatgtggagtaccgttgcttcgtcggcgggcttgcctgggccaccagcaacgagtcgctggagaatgccttcgcctcctacggcgagatcctcgactccaaggtcatcaccgaccgggagacggggaggtctcgcggcttcggcttcgttaccttctcctccgagaactccatgctcgacgctatcgagaacatgaacggcaaggagctcgacggccgtaacatcaccgttaaccaggcccagtcccgtggcggtgg

SEQ ID NO: 316937 - DNA, 257 bp, Zea mays
ccaggtggcccaattgacggaacaattgattgttacaaccccccaaaagcgggctttcattgaggttccaaaggaattaaggatgttcccaaaatggaaggttccttgggttccggttgtaaaaaacaggtgcaattttgaggctgatggaaaccgtaattacccatttggccaaggtccgggacaccaggttttgaacaattttggaaaactccacctctttgatttgccaaaacggcaaaccctttcggcttccg

SEQ ID NO: 316938 - DNA, 414 bp, Zea mays
agcttaatttttccttttgacttaggtctgcatccactattcgaattttattcttgtagtagctgccatattttgcccatctgaaatgtaatcatagattcacatttgggcccatcctaactttctctaggttccggtctttgttatgcctactgtgaaaatgcaaaactgtctttccttcaaaaaaaaaaaaaaaaaaaaaaaaaaaaaaaaaaaaaaaaaaaaaaaaaaaaaaaaaaaaaaaaaaaaaaaaaaaaaaaaaaaaaaaaaaaaaaaaaaaaaaaaaataaaaaaaaaaaaaatacaaaaaaaaaaatactgctacaaaaaaaaaaaggggggcccccccaaaaatttccaactttaactgccggtaacgagaactttaagcccctttaaaagggtccccaaaat

SEQ ID NO: 316939 - DNA, 106 bp, Zea mays
cgacccacgcgtcagcccacgcgtccgcccacgcgtccgaaaaaaaaaaaaaaaaaaaaaaaaaaaaaaaataaaaaaaaaaaaaaaaataaaaatatgtaataag

SEQ ID NO: 316940 - DNA, 350 bp, Zea mays
agcggacgcgtgggtaatggtagagatagggtagattcagttgaaaatagcttcaatgctcgtgattgtgattcaaattgctctcatggacaaccttttttcaactttgatgattcacattcttatattcatccattcattcagaaaaagatatctcatcattgggacattactttcaatcagaataaggaagctctgaatcactatatacaagagtcatcatatccttcccttgagaaagtaccaactgattcctccgtagaagtagaaggtacagccgatacaactgcaacaggtcaagttttgaaagcaaggtctttaaaaattcttgagcattcacctgatgatga

SEQ ID NO: 316941 - DNA, 338 bp, Zea mays
agtgcttcgacgccgcgtggacggacgccgggcagcggctcctgcgcaagcacggcctcgacgccccgcaccccggcgcctgcatgccgagggagttcgtggagtacattgtcaggacgcaggaggacagccggagtccggcgttcgctggggtagtggcgaacacgtgccgcgcgatcgagagcgagttcatcgacgtggtggccggggaccctgagaaccgaggaaagagagtcttcgcagtcgggccgatgaatccgctgcttaacgtgaccgcgccgacagcgggacagagtgcacggcacgagtgcttggactggctcgacaagcaaccgccg

SEQ ID NO: 316942 - DNA, 295 bp, Zea mays
  unsure (1)..(295): unsure at all n locations
gaagaagcggaggaggaaggacgggcggcgcaggctcaagctgtcatggctggcgtggccgtggtcacggagaagcgacaagggggacgcgggcggcgacggggacgacagcagcaaggangggaagaagcggaggaggaagggagggcgacgcccgctgccgcctctgctgacgacgacgacgtcgctgcagctcaagaaggcgctcgcgtcggtcgtctccggggagagcgccctactgcctgcgccggccaaggtgagcagtttcggcgacgccaagaagcaaagcaaccgc

SEQ ID NO: 316943 - DNA, 386 bp, Zea mays
agcccacgcgtccggttacctatgactgggcttccgaggttttcattcaaatcaaacacattagatccggttttcctcggcttctcattcagccaattcacggttcaaaatccactccttaaaattcaacataaaaaaaaaaaaaaaaaaaaaaaaaaaaaaaaaaaaaaaaaaaaaaaaaaaaaaaaaaaaaaaaaaaaaaaaaaaaaaaaaaaaaaaaaaaaaatctaaaaaaaacagtaacctaagaaacaatgtaaaatatgaaaatgaaataaaaaaagggggggcccccaaaaaggttcaaattaaagtatcgggtaaaggaaaattaaaacctctccaaaagggcccccaaatttaaattaagggggcgttttttaaaa

SEQ ID NO: 316944 - DNA, 106 bp, Zea mays
cccacgcgtccgcggacgcgtgggcgcgagcggacgcccttttttttttctcatgttttttttttattatttttttttttttttttctttttttcttttttaaaaa

SEQ ID NO: 316945 - DNA, 371 bp, Zea mays
atgaggttctccggggttcggtttcgtgggtgagcggatcgagatggcggcgtcggatgttgagtaccgctgcttcgtcggcggcctcgcctgggccacggacgaccactccctccacaacgccttcagcacctacggcgaggtcctcgagtccaagatcatcctcgatcgggagacgcagaggtcccgcggcttcggcttcgtcaccttctccacggaggaggcgatgcggaacgccatcgagggcatgaacggcaaggagctggacggccgcaacatcaccgtcaacgaggcccagtcccgcagcggccgtggacgcagcggccgtgggtacggtggtggccgtggaggcggcggctaccgcggtggca

SEQ ID NO: 316946 - DNA, 396 bp, Zea mays
accacgcgtccggcgccatgtggtcgtggcggcgaagctgtacgcggagatggacgcgctcagcgagctggaggcgtcagagcggcggatggagcggtggaagcagcacagcgggccaatcccggcgcagacgacggggacgggcaaggggtcagcggccgatcccggagagaagctgatgagtaagctcagggagcagcggcagaaggtgcgacgggtcatggagggatcgctgtggaacgtcgccgccagcaaggcggcgaggctcatggccaagtcggtcctcgccgtgctcgcgcgcatctccctcgcctttgccgcgttcgttccaggccttcccccttggacggtaggacgcgcgtgggcgctcggtcactcatccggatcggcccgtta

SEQ ID NO: 316947 - DNA, 278 bp, Zea mays
cacacacgtccgccttgtttggattggggtgtttgttccataaacagtctcattgctaattgtttcattattactacaaatcttggtcaaggcgtgaatatccttgctcttgatataattatagtattttgaatccctattgtgttttttacttaagtgataaatgttgcaaagaaaccattagatacaaggataagcggcagaaggtgcaacaggtcataaaaaggatcactatggcacatcactcaaaggagtgaagctaagctcatcgtcaattc

SEQ ID NO: 316948 - DNA, 410 bp, Zea mays
gatggacacacatgctataacattttaccgatgatcgttcactaatctctgtctgtttggcatcagtggcaatcaaaaccagtagcgtagtgcgtgctccgtagtacttcactggcaaaatcagcatggcctacgaggactttactcacttcaagagattacgttagagttcaggcgctggctggttgcctggccacgctttattaatgagttcagttctaaacccctgctgaagcccaggcagtgtccatgtctctacgagatagttgtgcccagggcaagtggacgtgcaggtgtgcagcgcacagccttgttggcttcggcacagacccagcttcgaattcgtgctggtgctgcgcataaagatggaacttgtttgtgtccagcggtcgcagtgctggtgcctgctg

SEQ ID NO: 316949 - DNA, 383 bp, Zea mays
atccgaccacgcgtccgcggacgcgtgggaaaaaaaaaaaaaaaaaaaaaaaaaaaaaaaaaaaaaaaaaaaaaaaaaaaaaaaaaaaaaaaaaaaaaaaaaaaaaaaataaaaaataaaaagataaaaaaaaaaaaaaaaaaaaataaaaaaaaaaaaaaggggggggtcgccctaagggttcaaactttatttccccgttaattggattttaaacctcttcaaagttgtccccaaatttcatttcaggggctttctttttaaaagttcgtgctgggaaaaacgggggttttaccaaattttacccccttaaagaaaattcccttttcccaaatgggggttatatgaaataggcccgattcatttccctttccaaaattttt

SEQ ID NO: 316950 - DNA, 392 bp, Zea mays
atgagaccccacgtcgacccttcacgaactcaaatttaaattagtcgatccccacaaacttaacttattaagtttattgaaatacattatcggttatgttcgctagtgaaccgacgaggttagcttaagtttaccagcttatatggttaagttcgacgattttttttatccacgttctttcacccgtttcttgtgtgggcggcaaccaaattgtctgggtttcaaaattcgcgtcgcgttctccgtcattcctaactccggcgacccgctccggtgttggtccgaactccagttgcccaactcgatcgaggtcccggcaagcagattgaaataatccctggcccatctctcgtttccatgggttggttcaagctccgtagcctcccttgtcc

SEQ ID NO: 316951 - DNA, 387 bp, Zea mays
accacacgtccgcccacgcgtccgagacgacttgtttcattgattcttgaagagatcgagcttcttttgcaccacaaggtcgaggatgtcttgcaactgcggatcaagctgcggctgcggctcaagctgcaagtgcggcaagaagtaccctgacctggaggagacgagcaccgccgcgcaggccaccgtcgtcctcggcgtggccccggagaagaaggccgcgcccgagttcgtcgaggccgcggcggagtccggcgaggccgcccacggctgcagctgcggtggcaactgcaagtgcgacccctgcaactgctgatcacatcgatcgacgaccatggatatgattattatctatctagcttgtggtggtggttgaacaataataag

SEQ ID NO: 316952 - DNA, 413 bp, Zea mays
aacacgcgtccggtctctgccctcacagcgcccttctccccctccaacttctcccctgcgcgtgggctggaagccagccgagcttccccattcggtcgccgtttctcccagcaagctctctgcacctcccatggccgctgagctcccaaccagggtgtcccaagcccctgtgctcggcgtccttcttccacctccggctgacctccctgtgcatagtgcccccttcaccttcggccgcgccccctgcacagcgacctgctcgccctttcctcctcttccctagtgcggcagcaaggagcccctgctcggactgcagccacggcgtccaagtctctgtgcagcgatgccggtccaaaaactgcagccccggcacatcgcccggcttcctcgctgctaccgctgcgcgcatgcca

SEQ ID NO: 316953 - DNA, 403 bp, Zea mays
agaccacgtcaagcacgccctcaccctcttcacagacttcgtggccgtcctcgtccgcgtcctcgtcatcatgctcaagaacggggccgacaagtcggaggacaagaagaggaagaagaggtcgtgagcgcgtcgagaagggaagctcttccacttccacatatgcataggagtaactgctggggttccttcctggggtggaagtgtggaactgagctgagtgttcagaagtgttcctttgttcggcacctttgttctcttcctctcttgatgagtctgtaaatagctatgtcaatctggttaagcttggtttggttgcctgtgcctgtgttcgctggcctttggatagaatgcaaattaaagatgttgctaaaaaaaaaaaaaaaaaaagggcggccgctct

SEQ ID NO: 316954 - DNA, 368 bp, Zea mays
accacgcgtccgcccacgcgtccgcggacgcgtgggaaaaaaaaaaaaaaaaaaaaaaaaaaaaaaaaaaaaaaaaaaaaaaaaaaaaaaaaaaaaaaaaaaaaaaaaaaaaaaaaaaaaaaaaaaaaaaaaaaaaaaaaaaaaaaaaaaaaaaaaaaaaaaaaataaaaaaaaaaaaaaaaaaataaaaattaaaggggggggccctttaatgtttttaaatttattttattttaaatgtaatttatatgatttttttttggtttaacaaaatttaatttctgggggttttttttaaaattttatgatgggaaaaaccttgggtttatccaatttttatccctttaaaaaaaatccctttttctcaa

SEQ ID NO: 316955 - DNA, 423 bp, Zea mays
accacgcgtccggtaccgggttcatgccggaccaaactcgtgccgggttttgggccgcccgataagcccggctcgtctagacatctctagttcacgtgacttgaatggttttaactaaagtgatttttatacaagcggcctaaaaagctggaaacagtagtctgcataccttccggtggccaaaagctgagtgcccatacggcacgcacatgacaaaaatattaatatattatgttttatataaatctatagaatacaaatttattgttacgttggcctttcaatataattagttaggatagttatttaaattttttatataaccattacaaaactaatcaatcaaaaagattcaaaaccttattatatatttgaattatatcttaattgttaaataaaatttttaaaactataatatataat

SEQ ID NO: 316956 - DNA, 71 bp, Zea mays
ataaaaaaaaaaagaaaatgaaaaaacaacaacaaatggataaaagggaggccggactaacatgatcaaag

SEQ ID NO: 316957 - DNA, 373 bp, Zea mays
accacgcgtccgcccacgcgtccgaattgttgtctttatatagcgcttctgatggacctgagctagggagctccaggagttcggctctagcaacgagtgcacctttcatgtaaggattaagggcggatagtgtggccaggtctgtccgcatataatttcagttggacagacctcaggatggtgccctggcgtagcaccgatgagtgacgaaggaggcgcctgcaccttttcgcttctcgctagcttcatgactgctgattgtgtaagggtgcggccatgaaaggtgagattggtctgcggtcatgaaaggtgagattggtctgcggcctgatgtgtatataaaatttttgccacgaatgaggcgcctgcacct

SEQ ID NO: 316958 - DNA, 283 bp, Zea mays
agactcggtactcggcacggatggcgatggggacggaatggccgccgacacctgcgcagcagccgaaaccggtggtgagcgccgtgtcggtcctgaagctggtactgttcctgattctcgccggccttccactgcggctgctggtggggcccccagcctagctcctgccgtacaccgtcgcgccaaacggggccgcacatcttttcgcggttccggtcatggaaacaaccaccggcagtcgcggccgccggataccttcccttaaaacctctgatgccgtttt

SEQ ID NO: 316959 - DNA, 441 bp, Zea mays
aacacgcgtccgagcttcttcagcaacaaacaacacaatcgaaagtctcaaaagctttccgaaagccaactctcacgcaacgccaaatcaacaaacacctcccgccaataccaagcgacatcagcccgcggagcgctcttacgaaaacaactaaaccaataccactaccaactaagcaataatgggtctcatgtggactaaaggcttcggcggaaagcacgctggcggtggagtcatcatcgacaagcacggcgctcgccgcgctcctttcaggttctccttcaagggcctgaactgcttcaagtaaactacccaagttcctacgattatcagcacacgggaacagcgacggaattctactttcggttctcgactgccttcaagtgttttcacctttgttctttttttttcacgactcgacctacctgttcccaagggggg

SEQ ID NO: 316960 - DNA, 289 bp, Zea mays
ttgaacctctttgtcaacgacgtattaattttcgtttccactccacatccaattggcaacacgtactaacttggaactgcacctctgcatgatatcacaacggagattgctaaaaccaatggtcctacttgctataatacggattaaatgttctcaatagataatgcattatgcagcattagtcaacaaaatgattcgattatagacctttcaacagtggtgtcgacagtgatcaacacagcactcgagacgatgatttctggtgccaattcatcgacgaaatcagatt

SEQ ID NO: 316961 - DNA, 391 bp, Zea mays
gtcagcctagcaattagctcatcgactccagattggagaactcgacaccatgaaggtgctgatcgttgcccttgctctcctggcgctcgctgcgagcgccgcctccagtacaagcggcggctgtggctgccagacaccaccgtttcatctaccgcctccgttctatatgccgcctccgttctatctgccgccgcagcagcagccgcagccatggcaataccccactcaaccaccgcagctaagcccgtgccagcagttcggatcctgcggcgtcggcagcgtcggcagcccgttcctgggccagtgcgtcgagttcctgaggcaccagtgcagcccggcggcgacgccctacggctcgccacagtgccaggcgctgcagcagcagtgctgc

SEQ ID NO: 316962 - DNA, 373 bp, Zea mays
accacgcgtccgacccaatgcggcgccggcccctcctccctcttgcgcaaccatgccattgccatcggccgcccagagcgctctcgtcgcggcggccgtcgccatagccaccgccaccgtcctcctccccttcccaccagcggtggagaagatcctgcaggtagtgcagctgtgaggcggtggatctccagacagtgcagcagttgggtggcaggtggagcagccccagcaagttgtgttagccagcacgcatgtgattttttattgctttattttttgtctgcaagaacctgagttgacaatggttgcctggttgggtaccaagtgcaattttctgggtcatgatagttcagaaaaaaacgaagaactgaat

SEQ ID NO: 316963 - DNA, 385 bp, Zea mays
  unsure (1)..(385): unsure at all n locations
cacacgacgtccgcccacgcgtccgcggacgcgtgggcggacgcgtggggcactttcacgctcagctccagcaatggctgcctccaccatggcgatctcctccacggcgatggccggcacccccatcaaggtgggctccttcggcgagggccgcatcaccatgcgcaagaccgtgggcaagcccaaggtggcggcgtccggcagcccctggtacggccccgaccgcgtcaagtacctcggccccttctccggcgagcccccgagctacctcaccggcgagttccccggcgactacggctgggacaccgccgggctgtccgccgancccgtagaccttcgccaagaaccgcgagctggaggtgattcactcccgctgggccatgct

SEQ ID NO: 316964 - DNA, 371 bp, Zea mays
agtacgcatccgctcctcgcaacgcaagggctccacagaaaggctatgatcgatccccacaggtgacagctgagtatgctttatgctacatgcaatttaactggacggcacaaccacaatgatgcgggggtcctccgctgtactcggacacagtcgccaggagcgacacctcacgagatcaatcaggcgcagatacaaccacatattccatcgccacctgcttccccagcacttcaacattcagctattgatgtatctggacatcatagcttaccccatccactgggtcccatcagttcaggacatctcgtcatagcactagatttagttacgccagggacgatccctgctgacttcccccatggcattct

SEQ ID NO: 316965 - DNA, 109 bp, Zea mays
cccacgaatccaaccacgcgtctgcccacgcgtcagtgtaacccacactcagccgcgtctcgtcgcatcctacgatccaaagctctcactgctcgcaggtctaacccat

SEQ ID NO: 316966 - DNA, 198 bp, Zea mays
ccgcccactcctccgcccactcatacaaagacacctgcgctctaattaacacattcactcaactgtcccttccactaaacctacaacaactccttcaccatgggcaggtgtcctcatcacatccatcatcactcgtgggggcgtccccaccgcccaattctactacatcccatcttcctccctcacctgcttcacccc

SEQ ID NO: 316967 - DNA, 349 bp, Zea mays
cgtccgccttgtcggtctggccctagccaatagcgctacccttgccagcgcgcagtcatctcaaggcacccagggcggcgtgagcctgcactacggtatcggggacggggaccagcgcctgacgctgaactacgggggggggtcgatctggacgtaccacttctgcggcaactggggcctcctcgacctgacgccggaattccgcgcttcgtactggtgggctgacggcgatcgttcgccgaccagcctctggcaactgaacgccatccccatgttccgctggtagaccggcgatcttttttttttccacacccgtatccgcgccaccgtgttctcgcgcacccgcttc

SEQ ID NO: 316968 - DNA, 288 bp, Zea mays
aacacaaataatgcttggttgtggacagaaacaaacagggtcatttctggatgctgctgctcctaatggtctttttggacttggaatacatgaggtttcagttccaagggtctggagctcataaaggtttgacatctaaggggggtggctatgtgctttggtcgtgatggtattgggccaatcagctttggagaccaatatatctcacaccactaatacacacctcttgacatcaactgacaacatcccacatacgccatcactatatgcgggattactgttggaaat

SEQ ID NO: 316969 - DNA, 189 bp, Zea mays
aagacacgtgggcaactccatccaagacgaacgaatacatcccactaatcctttttcttttcttttcgtttttatttttaatttcttggttcggttcttgatcaccggttcgggcttaggaccttatccatgaatttatattggcaggtacattttgtctaaggatctacacgcaggaggatggctctc

SEQ ID NO: 316970 - DNA, 123 bp, Zea mays
accgtgggtgaattagagagactatatcaaaagatgagaggtacatgttgaggaaagttggattgaaaatgaaacattttctgctgcaaggtcgaagggaagttttgggggcaacaattaaaa

SEQ ID NO: 316971 - DNA, 301 bp, Zea mays
aataaaagagttcgaccggccccgccccgccccaacaaaccgcccccaccgcagcgcccgcaaagcctccaaacaccaccacctatccgccagaagcctcttcctccctcgcggtcgcgccatctgcgccctgccaataaccgcggtggtgaacctcaccctactgaagaagcactcaccaacacccaagccccctgttccctcgccctctccgcccgcgcaagattgacatcccggattcatacatgtgctaccattccatttgatttggcgccgagcactttcctattgccgcctccat

SEQ ID NO: 316972 - DNA, 120 bp, Zea mays
acgcgtccaatttatttttttttactggaacaaaattcaccacataaaaatcccatttacatttcacatatcaacaccacacaatccttttccatgaatcctcatcaatcctccacctta

SEQ ID NO: 316973 - DNA, 99 bp, Zea mays
ccgcccactcgtccgcccactcgaacacacaatcctccgacaattttctcgtaaccttccgggctcctcttcctctcctcacgttctcccatcaaaccc

SEQ ID NO: 316974 - DNA, 99 bp, Zea mays
tcctctcattcttttactgttactgaaaacacttctcgaacctttgtccgcttttaccagaccttccatatcgagttcgtgggagttcgccactctacc

SEQ ID NO: 316975 - DNA, 363 bp, Zea mays
cccacgaatccgaacgcgagcgatgcatgttgctgttagcgcatcactactctccgagttggttaccaagaccaagcagatcactgagtccgttgatgtcctcgcgcgacttgcccgcttcagggggcctgaaaccactcagactcataagggtggggctatcgatgtactgagctgagaagcagacgatcttcggtgggacttcactaaagatgctctgtgcctctgtatttgtatcagaagccttttgctgaatggcatacaacagcaagctagtatgaagtccaatactaactgttcatacagcaagtgactgatcctttgatttgtggaatcaattatgatgctggattgtgacggtaa

SEQ ID NO: 316976 - DNA, 312 bp, Zea mays
aggggacccgtagcgccagttctcggcggtggcagtaaccactcgttgagaaaacgacgagagcctcccgtcgtcatttcggagataaaaccaccggcactgccaccctttgggcgaggaccctaggatggcacggatgtaggggggggcccgcgcctacctcagctggaggatgcagccaccatcccgcaacgccatgcgaacccttctttcccccgtcggcgatgcaaaaagctctgtggagaaaagattggtccacaggtcccactggggggcaatccccaagtatccttcactaaccgcctctttttt

SEQ ID NO: 316977 - DNA, 430 bp, Zea mays
cccacgcatccgcacacgcttcagctatcttgttgtcatccccttaatactcaccgcttcatttaatccatcaaatcagatcacagagtctattcatgtcatctctcaaattccttccttcaggggcactccttctactcaacatattagcggtggggcaatttttgtaatgaattcatatatcatggatcttcaatatgacttcagtattcatcctctctacggttctacttcttagatacaccatttgctcagtgcattatttccactctacagtagattgtacaacacaccctgtacatttatcaagtgctttatctttttatttatagaagcagataccaacatgtatcattttaggcattatctattcggtcattcatcagaatgtatctacattgaccttttcaaccatttcaccatttcctcc

SEQ ID NO: 316978 - DNA, 249 bp, Zea mays
ccacgcatccgcacacgcgtccgcccaactaagcccgcacgacacaaaaccaggtccaggagctcgagagggcaccaataatggcctgcgtgaactccaccgtcgtcgggctcaaacccgccggggcaatgcctcaagccgccgcctcatcatcgggggcgaaactgttgaacttgggcgcacccgagggcggccttgccgatctgctcggactgtctgtccgtcttccccgtcatcggtcatcaccat

SEQ ID NO: 316979 - DNA, 110 bp, Zea mays
atccacactatctcacattaacttacaatatcaaaaaagtatacaccatcccaaatcacttcaacattcagctcatcaacacctcccttcaccataaccatctcctctct

SEQ ID NO: 316980 - DNA, 256 bp, Zea mays
ccacgcatccgaacaatcacctgtcgcctcttttcctctcccctgactaacccttccctctggccaccctcaaatcgctctctcgctcgctctctcctttcccccttatacactctcgtggtagggggtccgctcatctcactgactattatatgtgcggcttctccgacgccttcaggcttttcgaggtgggctctcattgtttcatcacatcctacgatcttgtttctgtcattcatttactgtgtcatcattc

SEQ ID NO: 316981 - DNA, 140 bp, Zea mays
cccactcatccaaaaccctctgcgcacaacacgtcctgcaaccaataatactgttacgaatttgcgtatcacacaacacaccgcaaaatatcctttaaaccctgatgtcaactcctcatggtaggatccacaaaccccct

SEQ ID NO: 316982 - DNA, 119 bp, Zea mays
acccacgcatccaaccacacttccgatcaataatccccgacagtaaaaaagccccgccgtgtccgctttcaggtcccacatgacgactccatgggtcagcaagtcaaataacaactcac

SEQ ID NO: 316983 - DNA, 137 bp, Zea mays
aaccaaacgtccgggggctgttctccctgtcgcaaccgcaccagggcatcgacggcgagtggagcgacaagagcggggtcatcgtgtaccgctggaacgacgaggggagccgggccaggacacgccgcgctaactgg

SEQ ID NO: 316984 - DNA, 236 bp, Zea mays
cccacgcatccgaactaattcttataacggctttgggcccaacactaattctcaccaactgctcactgccgttcctaagccatcttctgttcccattccttcacatattgaagtgcaacatctggggctggcatcagtcgtaacctatcacgtcaggggttagcctaagcttacagatctttgcaactgattaccgaactgtcatcgagcctcatgaaattacttatgtaccaact

SEQ ID NO: 316985 - DNA, 248 bp, Zea mays
cgcacaatcaccggtcgcctctcttccgctcccctgcaaacctaatccctccggccaccccgaaaccgctcgctcgctcgctcgctccccgcgcccatagacatccccggataccgtgtctgactatctcactgaccaccaaatgcgcgagttcaacgatgccttcagcctcttcgataacgacagccaccgtttcatcacacccccctagcttggaactgtcatacgttcattgcgtcacaacccat

SEQ ID NO: 316986 - DNA, 58 bp, Zea mays
acctgtggacatgttttctgctggaaatcaatatactttggtcactatgaagccaagc

SEQ ID NO: 316987 - DNA, 151 bp, Zea mays
cacccacgcatccaacagctccgctcgtcgatcagctctcgagatgaacaatcatcgccagtgggtgcctgccgaccagctctcgccgccgccaccgccgcggtatagatgggacggataggggaggggaactcgcccacatccacaagta

SEQ ID NO: 316988 - DNA, 407 bp, Zea mays
cacgcgtccgctatgttgcaaatagataaaaaccttcccatcttgcaaaagggttgaagcttggcctctacaatgacgcggggacacaaacctgcagccaaaaaatggcagtatcacttgatcatggggaccaaatgtgaaaattttcatcttgggctgggaaatgctagtatcacttgatcacaaagagcaagatgtggaaaaaaacatcatgggtaaatctatttatgtttatttcctgacaactgtgacaagtcaacagtgacaaaagtatctgatcgtctcttgttctaagttcctggtattgttccaactcttcttcattctatttaatatctgatcatctatttattgtacgtactgattaacaatatgatgactataataatgctggtaggagtgtgaca

SEQ ID NO: 316989 - DNA, 428 bp, Zea mays
cgaaccattagctttatctactccagagcgcagaagaacccgatcgacaccatgagggtgttgctcgttgccctcgctctcctggctctcgctgcgagcgccacctccacgcatggaggcggcagctgcggctgccagccaccgccgggggttcatctaccgccgccggtgcatctgccacctccggttcacctgccacctcctgtgcatctcccaccgccggtccacctgccgccgccggtccacctgccaccgccggtccatgtgccgccgccggttcatctgccgccgccaccatgccactaccctactcatttttttcggcctcagcctcatccccagccacacccatgcccgtgccaacagccgcatccaagcccgtgccagctgcaaggaaccctcggcgttggcagcaccccgatcctggg

SEQ ID NO: 316990 - DNA, 225 bp, Zea mays
cacgcgtccgcaaacgcgtccgcccacgcgtccggagaccaacaagcaacatagaaagtggaatccagtagcaacaatagagcaacaatggcgaccaagatattttccccccttaagctccttgcgccttccgcaagttttgccaaagccaaaaatttgcggtcaatgtcaaaaacttccaaaagcttcccttcttcccccataccttccatcaatgatagcttc

SEQ ID NO: 316991 - DNA, 392 bp, Zea mays
gcgtccgcaaaaaaagcccttgatatccaaggaccacgagcgaacaaactttgattctacagtctgggtcgatctctctatgattaacaaacacaataaaaaaactatatgtactaatcaggttggaatgtttgtatgtactaatcaatttagggggcttgtatatactaatcggttttataatgtagctgctatgaaaaaatcagaactgaaacaaaggacacaacaatttttgccacttcatcaacttcataccatgttttccaacaaggatacaactccaacaacaactatctcaacgtcctgtgattgttgtttttttttactacaaacaccaagtggagatgttatacggttttatcgagatcgacacatttacagatcgtgctttc

SEQ ID NO: 316992 - DNA, 238 bp, Zea mays
gcgtccggattgatggtgggggcgctgctggcgttcgtggcacacggggctgatgacgcgggccaggtgtacgttgtgcgtatgcttgcgcgcgctcgcttcgctttcgcggcaagtgcggcggggcggttggtggctgcttttttatgaggggggtgggtatgcttgtggctcccgtcatacgatgggacgtccatctcgtgatgagatgtcagatgtgtgtgaaagagttctccgt

SEQ ID NO: 316993 - DNA, 398 bp, Zea mays
ccacgcgtacggagccacaagggcatcaaacggctcacggttaggcaagagggcatctaagtttgtcaccaggacagactccaacacaagttcagcctttgggaaaaggaaagcaactgggggggggaggtcacagtgcagatctatcaccagcgaggagggtcctgattcgacctcatcactacaacagacatctctttcaacgtgaagcagcatcagctttttgcggtccaggaaacgcccacagctattctgggctggctctctcaaatgatgctggcccaaggctcacctggacacatgagttacatcacccactcgtcgctgttttcaatcatttaggtggagcactccaagctgctccaatcacagtcacgacgtccacgagaatcccaata

SEQ ID NO: 316994 - DNA, 116 bp, Zea mays
acgcgtccactaccgcgtccgcccactcttccgctcactcttaatataaacccgtcccttcctccaattctctctctgaattctagttctccaacaattacagctctatctccatc

SEQ ID NO: 316995 - DNA, 271 bp, Zea mays
ccacgcgtacgcagacgcgtgggcgatcggccatcatctgaatgtacaagcacgagacggggatacagcggattcataaaccgtcagagtgttaggacaagatggtggccaatggtgatgcggctgctagagggagcgcggcggcaactacaggcgggcgtacgcctatgaccacaagcggtgctgctgccggtcgaggccgtgccagctcaatgctccaattctacactgatgatgctgccggccgcacaatgtcactaaacactgttct

SEQ ID NO: 316996 - DNA, 366 bp, Zea mays
gcgtccggaacgaaaggggcggcgtgctcgccgccgacgccaacaaagacggcggcgtgcatctgggggaggacgacgtggcccgcctcttctccttcgcgcacagccacctccgcgtcaagatggcccagctcgggtactactattactgctgatgggtcgtccgccgatcgatcggccaatatggaggcatggagcatatggcatcgatcgatgggtttgtcactactccatcgtcacttgtttgtcacagctgggtgggttggatgtgttgttgctactttttttttttctctcacgtccgggtggatgtgtgttgttatttactgttacctaaaatcatcacttccacaaaaaaagggcggc

SEQ ID NO: 316997 - DNA, 298 bp, Zea mays
tcccggctggccccacgcgtccagcaacagcagctccgctcgtcgatcagctctcggctaaccactcatcgccagtgggtgcctgccgaccacgtctcgccgccgccaccgccgcggtagagaggggagggacagggggggaaacctggcccacatcgataggtacagcagggaggtgacacgcaatagagataggggaccggagggcagccggcccgggcccaacaccgaggggctcgtgcgcaggacgctgatgatgctcctgtccctcgtctccttcagctcccctgctggaccc

SEQ ID NO: 316998 - DNA, 154 bp, Zea mays
cacgcgtcaaccaacgcgtccggaaaaatatccccaaaccctaactaccaatctcgatcgcgaaccctcgcgtcttcttcgacatcaccgtcggcggcgccccggcgggccggatcctcatggaggggtaccccaaccacgtgcccaagaccgc

SEQ ID NO: 316999 - DNA, 305 bp, Zea mays
cgtccgcaacatggtcaccacggcggccacggcttcgtggtacgaaagaccacggtccaagaggacatcaacacctgcaccggctacgtccaccagcgcatggagagcttcctcgccagggcgtggtgatccgccctgcggccggcatctaggggggttcgtgcttgcctgcttgccttatgtatgtctgtggttgactggttgttcacggtcatcctacttggctatcttacctgcacgcactcatctcctgtacgaattacgaccataagctcgttacctgaataaaacttcttcgtactact

SEQ ID NO: 317000 - DNA, 354 bp, Zea mays
cacgcgtccgggagacgatgtctcttgccgtggcgtcacccctcgcatcaattccccgcggcatcgccgctcaagctccttgcgcggcattcctgtccatccgcttaggtggcgcgacggcgacggggttcgctggactggcggtggcctctcagcggagcggagcgtcgcgccgctgcgatggtcgctatggcgaacagggagcacgagctggaggagatccgggccatgaccactgaacacatgtaagatgaggtggtagacctcaagggggagcttttcctgctccgccttaaccgctctgctctccacgagttcaccattttttttttttccgcatccgcaagacgattg

SEQ ID NO: 317001 - DNA, 118 bp, Zea mays
ccacgcgtacgcaatagcctccgggccaagtcgctcagcgtcagcaacaagctccccctcgccatctccgtgcacgtcaactactgcggcaagcacgtgccctccagcttccactgcc

SEQ ID NO: 317002 - DNA, 354 bp, Zea mays
acgcgtccactactcttcagacgatatttttaaatcaggtataataaaatccgttttgtacaaatgctggactaacttctcgctttttctatggactcttttatttttttgtgtttgttttttgggtacttagttttttttttgttcttgtctcggagtttggtgtccctttgatgaacgaagactatgtccacgggcactcagatcacatgcctcatggaatacaactcccgcttttgcctcagtcggagtctacatcggagtttcagcctctggaatattaggaagttgaatattttttcgcttcggacgcttctttttttttttttttattcatattcgagtcattttctt

SEQ ID NO: 317003 - DNA, 389 bp, Zea mays
ccggcgccacccacgcgtcagcagacgcgtgggcgacttgtttcattgattcttgaaaagatcgagcttcttttgcaccacaaggtcgaggatgtcttgcaactgcggatcaagctgcggctgcggctcaagctgcgggtgcggcaagaagtaccctgacctgtaggagaggagcaccgccgcgcaggccaccgtcgtcctcggcgtggccccggagaagaaggccgcgcccgagttcgtcgaggccgcggcggagtccggcgaggccgcccacggctgcagctgcggtggcaactgcaagtgcgacccctgcaactgctgatcacatcgatttttttttatggatatgattattatctatctagcttgtggtggtggttgaacaataa

SEQ ID NO: 317004 - DNA, 372 bp, Zea mays
gtccggaggaagattgtgctgtttgatagccaagtaggaagtgataaatgtcatggcattgaagttactcctagatggaatggtggacacgaatttgtactcactttaggtgacgctaggaggggtgtgaaggttacttggtcgatgggggatggacggctttaaatgggttcgcctgttcgttgttaagcatcatcggtggaagtgtagtagtgctcttgctctggtttgttgtctgaggctgttggagtctagataagtataacagtgttcacactatcatgcccgtcctgttatttagtgaaccttaatttgtctatatgttgctactcttgttatttattgaaccttactttattctagttgcattgg

SEQ ID NO: 317005 - DNA, 388 bp, Zea mays
aaataaatcagtcccagcagcgcaagcacgcagcccccaacacacgcctcttctcttcatcgctctggccacagggcatgcctgcaggcatgcctgcgacgtcgatgagctattggcaggggcttacgagttaggactcttcattctgatgggtgacagatcgttgtccttaagaatggtgtctacggcatcaaaggcataatataggtaggcaacatttctttttttctttctgacagctgtgtatttatgatgctattgggtatgcttgataaaatagtggaaccctaaaccccaaaaaaccctaaacccttattgtctgtttttgagctaatgtcacacatttggtacaagaaattctgtaaataaaattgcgaaatatggcaac

SEQ ID NO: 317006 - DNA, 409 bp, Zea mays
ccacgcgtcagatagagaccaacaagcaacatagaaagtggaatccaatagcaacaatagagcaacaatggcgaccaagatattttccctccttatgctccttgctctttctacatgtgttgctaaggcgacaattttccctcaatgctcacaagctcggagagcttcccttcttcccccataccttccatcaattatagcttcaatatgtgaaaacccagctcttcaaccatataggcttcaacaagcaatcgcagcaagcaacatacctttatcgcccttgttgtttcaacaatcgccagccctatctttggtgcagtcattgtttattaccatcagggcacaacagctgcagcaactcgtgctacctctgattaaccaagttaactctgggaaaccttttctccct

SEQ ID NO: 317007 - DNA, 343 bp, Zea mays
ccacgcgtacgcacacgcgtccgcccacgcgtccgatcgtttcaaacaatttgagtgggaatactgtacgcaacatgctacagagagagatatatatatatcatcagaacgaaggtttttggagcggggcttaccgtctgtctgaaaccacaggcggggatacatcacaagcccacaggcgctttatttgccatcgtagaccaaactttcagtgctgcctacatcaccaccatgcacacattgactccagccttattcacagctgtcggcctcacgacccctccaagttgtacaataagatccacaacaccttattttttttttctctcacgtaccctacgta

SEQ ID NO: 317008 - DNA, 177 bp, Zea mays
  unsure (1)..(177): unsure at all n locations
ccggctccacccacgcgtccgcagtcgccagccctatctttggtgcagtcaangctacaaaccatcagggcacagcaagtacattataatgaagctaagtctgctcaatcaaggggcgtctgcaaacctttctccctactctcagcaactacaatttcttccattcaaccaactgtc

SEQ ID NO: 317009 - DNA, 157 bp, Zea mays
cccggctcgcacccacgcgtccgcggatggctcatcgcgttctccgccttcctctctcgcgtcggccgccgcggtctggacgatcgaaaacacggaggacccgcccatccagcgggggggccccggaggagatgacaacgagctggagcggaacgcg

SEQ ID NO: 317010 - DNA, 141 bp, Zea mays
tagcaatcatcatttatctaactaacttaagcattaaatcaaaactgcaacatcaatgatctagctaaatttaccatgactctagcgcttgtagttcttgctttcattgctttaatatcaagtgtttcttgtacacataca

SEQ ID NO: 317011 - DNA, 384 bp, Zea mays
ggaaccaaaaattaaaaaaaaaaaaaaaaaaaaaagaaaaaagaaaaaaaaaaaaaaaaaaaaaaaaaacaaaaaaaaaaaaaaaaaaaaaaaaaaaaaaaaaaaaaaaaaaaaaaaaaaaaaaaaaaaaaaaaaaaaaaaaaaaaaaaaaaaaagcaataaaaaaaaaaaaaacaaaaaaaaaataaaaaacaaaaaaaaactaaaaaacaaaaaaaaacaaaacaaacaaaaaaaaacaaaaacaacaaaaataacaaaaaaaaaaaaaaataaaaaataaaaacaaaacaaaaaataaaaacaaaacaacacaaacaaaaaaaaaaaacaaaacacacaacaaaaaaaaaacaaaaaaaaacaaacacaaaagacaacaac

SEQ ID NO: 317012 - DNA, 185 bp, Zea mays
ggcactcgtccgatggcatttggcactagagggatctgaaccctaccgggcgcccggccattctgaactgagaccggaccttctatactctgcggagacatgagtgcctggaaaactatagaggcgaaaaggtcacagtacattcatgtaatgctcaatttgagtactgtgccatatcaaagcaa

SEQ ID NO: 317013 - DNA, 120 bp, Zea mays
ggttgaacaatggcataaatatgaactctaaaccaaaaaaaaaaaaaagggaaaaggtaaaattaaaaaggacaaaaacccaaccaaaaaacagaaaacaaacaaggcccccccccctaa

SEQ ID NO: 317014 - DNA, 51 bp, Zea mays
  unsure (1)..(51): unsure at all n locations
gcgctcttacactatcatacttagcactcaagacactgatgctnggatatc

SEQ ID NO: 317015 - DNA, 164 bp, Zea mays
agaaccctctccgtaatctccccgccatcccccgcctccacccaatggcgtctctgccgaattgtaacagcgccgacgcctctatctcatgcggcacacgccctgtggactatgatgtggacttctccaactacatttttcacgtacacctacctttaccacca

SEQ ID NO: 317016 - DNA, 369 bp, Zea mays
gagcattcagaatcacactaagcgattcgcactatcaacaacctaacagcgaatggcgaccaatatattatccctccttgctcttcttgctctttttgcgagcgcaacaaatgcgtccattattccacaatgctcacttgctcctagttccattattccacagttcctcccaccagttacttcaatggccttcgaacacccagctgtgcaagcctataggctacaacaagcgattgcggcgagcgtcttacaacaaccaattgcccaattgcaacaacaatccttggcacatctaacaatacaaaccatcgcaacgcaacagcaacaacagttcctaccagcactgagccacctatccatggtgaaccc

SEQ ID NO: 317017 - DNA, 456 bp, Zea mays
agaagcgtgctccttggtaagctcaactcaatgccgcagctaaagtgcggatacagatggtttacaaaaaactttagacaatcctaattaacgggcgagaacatgaataacaagatgaaagaaggaataacaatgccaaaagtaaacttaaccaaataataacaaaacaaaaaaaaagtataaaaaaaaattaaataaataatgtaagaaaacttaaaaaaaaaagaaataaaaaataatataaatacaaataataatgataaatataataaaaaaaaagaaaatataaataaaaaaataaaataaaacaataataaaaataattaaaaaataatatatataaacataaaaataaataaaaaaataaaacaaaaataaaaaatataataatatatataaaataataataatataaaaaaaaaaaataaaaaaaataagaaatacaataaataataa

SEQ ID NO: 317018 - DNA, 151 bp, Zea mays
gcacgcgtgcgttttccgtctccgcttcagcattcgacggccgccggcacacaccagagcagtggtaaattctagaacgcggaagagactaggatgtgatgatgactcgctcgctgactgaagactgatgaatggtgcgtgtgacattgac

SEQ ID NO: 317019 - DNA, 63 bp, Zea mays
ggcactcaaaccgtacagctcaaagagtcgaaccccgcacagaacagacggacaacgagcaac

SEQ ID NO: 317020 - DNA, 55 bp, Zea mays
ccaacaaagaacaaaacgcgccaccaagaagcccaagcacaaaaacaaaaggaaa

SEQ ID NO: 317021 - DNA, 51 bp, Zea mays
  unsure (1)..(51): unsure at all n locations
cccacgcgtccggctaatggcacattanaatcacccatagtttgtntgatg

SEQ ID NO: 317022 - DNA, 52 bp, Zea mays
gtgcgttgcgtcgtgagtgcccggaatcaacaccgacagtctgagactgaga

SEQ ID NO: 317023 - DNA, 346 bp, Zea mays
gatcatcaaagctgcagtttgtagtttggatcgccgaacagaacagcatgaagatggtcatcgttctcgtcgtgtgcctggctctgtcagctgccagcgcctctgcaatgcagatgccctgcccctgcgcggggctgcagggcttgtacggcgctggcgccggcctgacgacgatgatgggcgccggcgggctgtacccctacgcggagtacctgaggcagccgcagtgcagcccgctggcggcggcgccctactacgcctggtgtgggcagacgagcgccatgtaccatccgctccggctacagtgctgccagcagcagatgatgatgatggacgtgcaatcctg

SEQ ID NO: 317024 - DNA, 160 bp, Zea mays
cggatctacccttcacattcaaaactcaaaacccgaacagcacaccaggccagtgtcaaacttaaaaggaccccaacctaaaccaacccgcgcataccaatgccatatcagcctacactacgacgaccaaccccacaaacaaaagaacccaccacagaaa

SEQ ID NO: 317025 - DNA, 113 bp, Zea mays
cggacgcgtggggttattcacactaactaacgacctcctgctccgatcacgagcgggcggatttcaacgatggcggctgtgcttaacatcaggaagacgccgcaggtggtggc

SEQ ID NO: 317026 - DNA, 116 bp, Zea mays
  unsure (1)..(116): unsure at all n locations
gcgggagaatccaatttgtgacacgaatgacaaacttcctatgactgcgcagacccaagangttcttaaaacgctgaacggcccacaataggggagccatgatgataaaccagccc

SEQ ID NO: 317027 - DNA, 170 bp, Zea mays
agagagccgagatgatcaccctacgattacaaatgatcagccagagccccggaagcgagctaggcaaaacccaaagggccaggagcccacagcggatacgagcaatatcaacaaagagacatagaaaaagtaaagcgatgaaccccagccaagagaggcgaaagaaggaa

SEQ ID NO: 317028 - DNA, 146 bp, Zea mays
  unsure (1)..(146): unsure at all n locations
gtccgcgcactcgtcctgtcacacgcactattcacactccacacacatacatatagagagagggnatgtanatcttaaacgtgccttgaacttactaactaactggctaactagctcgaaccgcatagcaaatctaaagctgcaat

SEQ ID NO: 317029 - DNA, 199 bp, Zea mays
ggcactcgtccgcttacgttaacggttccagatcaggagggacctcgcagcctccggcactttcgcaaggtcctctgcctctgcagtcgacgcgctccggggctggtgggatgacgtcaactgagtcgccccattgccaggacgcggccttcttatccctctccgacgtctactcatttgactcctccgtagcactgat

SEQ ID NO: 317030 - DNA, 54 bp, Zea mays
cggactcgtgcgttcaagctgaagctccaaaacctgcaccccgagccgggcaca

SEQ ID NO: 317031 - DNA, 209 bp, Zea mays
cgcacgcgttcgattagaactatattttctggggatacaaattttagccggggtatgggttcaagtaaggattctgatccttttgatggactctatgttggtgcatttggcccttatggcatggaaatagtgcatttgaggctaaaattttgacattggaatgaattggacaatgaaaacaaaacttcttatgtgggattctttgaata

SEQ ID NO: 317032 - DNA, 52 bp, Zea mays
cacctgcatcgactctaggtgggtttaaaaactaaaccaaccactgccggcg

SEQ ID NO: 317033 - DNA, 171 bp, Zea mays
cgtgctgaagatgtcatttagcctgcaaggatctggtgacccagaggtagaagataattttaaagcgacagagaccatccccaaggatgaatttcgtggatgggttaggatataagagctccagaaacccacccaacaactgccgattgcaagatatagctaaagccaacc

SEQ ID NO: 317034 - DNA, 259 bp, Zea mays
tcgatcaatcatcattcatcttagtagtctaggcaccaaatgaaatctgcaacctcaattgtgtaactgcaaaaaccatgaagctggtgcttgtggatcttgctttcattggtttaatatcaagtggtttttggacacagacaggcggctgcagctgtgggcaacaaccaaggcatgagccataacttcatccacaacagcatgattcacggaaacaacgacatttaacaccatcacaacattatctgcagtagctaca

SEQ ID NO: 317035 - DNA, 421 bp, Zea mays
gcgtcagcggacgcgtggaaaaaaaaaaaaaaaaaataaaaaaaaaaaaaaaagaaaaaagaaaaaaaaaaaaaaaaaaaaaaaaaaaaaaaaaaaaaaaaaaaaaaaaaaaaaaaaaaaaaaaaaaaaaaaaaaaaaaaaaaaaaaaaaaaaaaaaaaaaaaaaaaaaggggggccctttttaaagtttcaaagtttaattacccttaatttcaaattaaaagttttttaataggtccacttaaataaaattcattggccacgtttttaaaaatttttaattggaaaaaccttgggttaaccaaattaaatccttttgaaaaaaatccccttttcccaaattgggttaataccaaaaaggccaaaaaaaatggccttttcaaaaatttgcaaatctttaatggcaaatggaacccccctt

SEQ ID NO: 317036 - DNA, 368 bp, Zea mays
caacaagcaacatagaaagtggaatccagtagcaacaatagagcaacaatggagaccaagatggtttccctccttatgctccttgctctttctacatgtgttgctaacgcgacaattttccctcaatgctcacaagctcctatagcttccctttttcccccataccttccatcaattatagcttcagtatgtgaaaacccagctcttcaaccatataggcttcaacaagcaatcgcagcaagcaacatacctttatcgcccttgttgtgtcaacaatcgccagccctatctttggtgcagtcattggtacaaaccatcagggcacaacagctgcagcaactcgtgctacctgtgatcaaccaagtagc

SEQ ID NO: 317037 - DNA, 439 bp, Zea mays
gcaacatagaaagcacaatagtgtaccaacaatggcagccaaaatattttgcctcctgatgctcgttggtctttctgcaagtgctgctacggcgaccattttcccgcaatgctcgcaagctcctatagcttcccttcttcccccgtacctctcaccagcggtgtcttcggtatgtgaaaacccaattcttcaaccctacaggatccaacaggcaatcacagctggcatcttacctttatcacccttgttcctccaacaatcatcagccctattacatcagttacctttggtgcatttattggcacaaaacatcaaggcacaacaactacaacaacttgtgctagcaaaccttgctgcctactctcagcaacagcagtttcttccattcaaccaactagctgcattgaacctctgttcttatttgcaacaacaacaacta

SEQ ID NO: 317038 - DNA, 328 bp, Zea mays
aggacgcatggctgacgacgagcatgctgcacatgaagtagagggcattgcacaagcgggttcagaccataccgagtataggactatgacctgcgcagttgaacaagagcgatatgtccaggtcagctactgaccatatacatacggataggttgagcagatacagaatcgaattggcactactgatgatacattagcaggaacattactgcgcctaggtgacagggctgctgtgttacataatccgagcacactaatctctcacgagactagcaaaggatagaggactaaggttgacataggcacgagctcgatacatcctctggga

SEQ ID NO: 317039 - DNA, 373 bp, Zea mays
gagcattcagaaacacaccaagcgaagcgcactagcaacaacctaacaacaatggctaccaagatattatccctccttgcgcttcttgcgctttttgcgagcgcaacaaatgcgtccattattccacaatgctcacttgctcctagttccattattccacagttcctcccaccagttacttcaatggccttcgaacacccagctgtgcaagcctataggctacaacaagcgattgcggcgagcgtcttacaacaaccaattgcccaattgcaacaacaatccttggcacatctaacaatacaaaccatcgcaacgcaacaagcacaacagttactaccagcactgagcccactagccatggtgaacccctgtc

SEQ ID NO: 317040 - DNA, 417 bp, Zea mays
gcaacatataaagcacaatagtgtaccaacaatggcagccaaaatattttgcctactgatgctcggtggtctttctgcaagtgctgctacggcgaccattttgccgcaatgctcgcaagctcctatagcttcccttcttaccccgtacctctcaccagcggtgtcttcggtatgcgaaaacccaattcttcaaccctacaggatccaacaggcaatcacagctggcatcttacctgtatcacccttgttcctacaacaatcatcagacctattacatcagttacctttggtgcatttattggcacataacatcagggcacaacaactacgacaacttgtgctagcaaaccttgctgactactcttagcaacagcaagtgcttacattcaaccaactagctgcattgaactctgcttc

SEQ ID NO: 317041 - DNA, 267 bp, Zea mays
ccacccactcgtccaaaaaaacatatataaaaataataaataatatttattataaattataaaaaaaaaaaaaaaaaaaagaaaaatttgaaaaatttaaaaaataaaataaaataataatataaataaaaataaaataatataatataattatatataaaaaaataaaaaaaaaaaaaatccccccctcttataaaatcccaacataattatcctcctcattcctattttataatttttttaaatatcccccaaaataaaattaac

SEQ ID NO: 317042 - DNA, 280 bp, Zea mays
cccacgcgttcgaaaaaaaatacaagttttaattttaaaaaaaacaaaatacacaaagggaattggaaaaaatatatataacaatataaaaaaaaactaaattaaaaaaaaaaataggcccatcattctaaagatccaaattttcgtacacgttcattcaatgtcataacttttttataatttgacttaaattaaattaactggacctctatttacaacttctaaccttttaaaaccctgtcttctcccaacttaattaccttacaatatattccccttt

SEQ ID NO: 317043 - DNA, 213 bp, Zea mays
gatacgcgtaccgattgcacgtggataggaactcctatctgaacagactgacgaccgtgaacgtcttgtgaatgtgactagttatgtgatctatcatcgacggttcgatacagatgcacagcgtgtgcatattgctgcaaacattatcccactctctcgccatgctgaagacaatgatccacgacgcatgactatgccaactaccaggagtta

SEQ ID NO: 317044 - DNA, 434 bp, Zea mays
  unsure (1)..(434): unsure at all n locations
nccacgcgtncgcagcaacagcagtttcttccattcaaccaactagctgcattgaactctgctggttatttgcaacaacaacaactaccattcagccagctacctgttgcctacccccagcaatttcttccattcaaccaactggcagcattgaactctcctgcttatttacagcagcaacaactactaccattcagccagctagctggtgtgagccctgctaccttcttgacacaaccacagttgttgccgttctaccagcacgctgcgcctaacgctggcaccctcttacaactgcaacaattgctgccattcaaccaacttgctttgacaaacctagcagtgttctaccaacaacccatcattggtggtgccctcttttagatttcttatgagttatagttcaataataaaagtttttgtctgatgtttgt

SEQ ID NO: 317045 - DNA, 75 bp, Zea mays
gaatcgagaggccgaccacggagggttacaagtgcagtgcccatacagcagtcacgggatcgtatccgtcgcagc

SEQ ID NO: 317046 - DNA, 439 bp, Zea mays
cccacgcgtccgccaacaagcaacatagaaagtggaatccagtagcaacaacagagcagcaatggcgaccaagatattttccctccttatgctccttgctctttctgcatgtgttgctaacgcgacaattttccctcaatgctcacaagctcctatagcttcccttcttcccccataccttccatcaatgatagcttcagtatgtgaaaacccagctcttcagccctataggctccaacaagcaatcgcagcaagcaacatacctttatcacccttgttgtttcaacaatcgccagccctatctttggtgcagtcattggtacaaaccatcagggcacagcagctgcagcaactcgtgctacctgtgatcaaccaagtagctctggcaaacctttctccctactctcagcaacaacaatttcttccattcaaccaactg

SEQ ID NO: 317047 - DNA, 425 bp, Zea mays
gatcagcaaagcggcagtgcgtagagaggatcgtcgaacagaacagcatgaagatggtcatcgttctcgtcgtgtgcctggctctgtcagctgccagcgcctctgcaatgcagatgccctgcccctgcgcggggctgcagggcttgtacggcgctggcgccggcctgacgacgatgatgggcgccggcgggctgtacccctacgcggagtacctgaggcagccgcagtgcagcccgctggcggcggcgccctactacgccgggtgtgggcagacgagcgccatgtaccagccgctccggcaacagtgctgccagcagcagatgaggatgatggacgtgcagtccgtcgcgcagcagctgcagatgatgatgcagcttgagcgtgccgctgccgccagcagcagcctgtacgagccagctctgatg

SEQ ID NO: 317048 - DNA, 403 bp, Zea mays
cagacgcgtcgttgcactactgtgagtgattatatgattagtataggatgcttgtggggggctttctagcagttcaagctgatgcatcctgtaaatactaatgcggtatgctagagactatgggatgtctagaccctgaactgtaaggtgattccattgcttcgtacccgtttacagataatctacgtctagtatgtctctatcaactgatagtttgactggtgagagtagtgcggtagaccacctgaattgtatggtatcattattgattgacatatgtgagcctactctgcagcctgctggtccagagtgctcaattgcagcagagagtacaggccgtgcactcacacgctactaagagttagatagtttcaacaaagttagatctgcaaatcaggtacgc

SEQ ID NO: 317049 - DNA, 142 bp, Zea mays
cactaacgctacttctacttcggaaccgccgacgctaccggcgcctcatattatcaggtaccgcacgaggtcgcggcctccctatcggtggtccatcgtgcgatggcgtgcgcacctaccgcgctgtgctacggtccagcgt

SEQ ID NO: 317050 - DNA, 400 bp, Zea mays
agattcgtgagttcaaccaaattcggtttcgtatgtaaacgcatcgacattgcaatcctccaagatcgagtacgcgattcttacgtcaacaaactcgcctacaccacacacaaccactcccttcacaacgccttcaccacctacaacgaaaaccacgcttccaataccaacctcgatcacaatacacataagaacctaggctatctatcagacacctattccactctatataccatacttaacaccatcgaattcataaactgcattatcacatactaacctatcaacaacgttaaccaggcccagatctatcacaagcaaagattccacgaccttgtgtaccctctagctcctcttatcgtgaaatacgtcaagaacccacgaagtgctgtatgcaaaa

SEQ ID NO: 317051 - DNA, 83 bp, Zea mays
atttcactttgaaagatatttaatgattttcgaaccatgtctactgattactgcttgagcaagattacaatgttcttttgcct

SEQ ID NO: 317052 - DNA, 121 bp, Zea mays
accacgcgtacgccaacacattggcgtttacattttccgtaacatttatgccatccaggggttcggtaaacttttatataataacatcaagcagatcattctgcaacaactacaaatcatc

SEQ ID NO: 317053 - DNA, 324 bp, Zea mays
tccggaacaggcacgtctgccaaatctaactgccccccgactcacgaatcccaaaccgtccatggcgacgcaccgccactgcctcccactcctcctcctcgtggccgccgcccttgccgccgtccctgttagcccggtcctggccggcggccccggcccgctgttggccggttggaccccatccccgaccttaggcacttgcacattccagaacttagccggtgggcccctgggcaagccaaaccaccgaaacctggccgccaacgggctgcggttccgccgcttgttgcccggcaagcagcaggtcgtgtccgggatgaacta

SEQ ID NO: 317054 - DNA, 446 bp, Zea mays
cccacgcgtccgattcttcaaccctacaggatccaacaggcaatcgcagcaggcatcttacctgtatcacccttgttcctccaacaaccgtcagccctattacagcagttacctttggtgcatttgttggcacaaaacatcaaggcacaacaactacaacaacttgtgctaggaaaccttgctgcctactctcagcaacagcagtttcttccattcaaccaactggctgcattgaactctgctgcttatttgcaacaacaactaccattcagtcagctagctgctgcctacccccagcaatttcttccattcaaccaactggcagcattgaactctgctgcttatttacaacagcaacaactaccaccattcagccagctagctgatgtgagccctattgccttcttgacacagcaacagttgttgccgttctacctgcacgctgc

SEQ ID NO: 317055 - DNA, 321 bp, Zea mays
gctctactgtcttgaccgctctgcactaatctatcatcatcaggcggagggggtaccgtgatgattcagaactttgtacatgcgtcggtggatgatggtataacataatgtctatgcacaagtaatactactacaaaccgatcaatgtatctatgtatcatctatctcaaatgctagctagtatagcactacaaacatgtctatatatatatagcatcatgctaataaataggaatataagcatgatatctaacggctgcgtaattaattccaatcatgtgtgtaatatgtgggcaaatagcaaaactttatagattccaa

SEQ ID NO: 317056 - DNA, 320 bp, Zea mays
actacacgtccgcgcacgcgttcgagtccagatgagaagtgacctggaatcttgctggggtaccgctacatactcgtactagatagtcatacgcgctgctaaactgttaggattacgcaaacgcatcactacaacgccaacatccgagcttcttatcactagccgccgaatacgcattcgtatctgccttagtactgattcatctagataggacacagctccagctgctagagatcgaatggaccacgcagaaggactattacatcatgaacaatcttgtcaacaagatccgatctgtgatatacgtcttccatgttcac

SEQ ID NO: 317057 - DNA, 253 bp, Zea mays
cccacgcgtccgtctactcgtccgcccactcgtacgaaaaaaataaaaaaaaaaaaaaaaaaaggaaaaaaaaaaaaaaaaaaaaaataaaacacactaataaaaaaaaaaaaaaaaaataataataaaaaaaaaaagtgggctccatttaaatgatccaagtttacttaccattacttgcaacgatataaatctactatatggtgacctaaatttaatatcatgaccctccttttaaaatattacaactcta

SEQ ID NO: 317058 - DNA, 446 bp, Zea mays
  unsure (1)..(446): unsure at all n locations
cggacgcgtgggtccagatcagcaaagcggcagtgcgtagagaggatcgtcgaacagagcagcatgaagatggtcatcgttctcgtcgtgtgcctggctctgtcagctgccagcgcctctgcaatgcagatgccctgcccctgcgcggggctgcagggcttgtacggcgctggcgccggcctgacgacgatgatgggcgccggcgggctgtacccctacgcggagtacctgaggcagccgcagtgcagcccgctggcggcggcgccctactacgccgggtgtgggcagccgagcgccatgttccagccgctccggcaacagtgctgccagcagcagatgaggatgatggacgtgcagtccgtcgcgcagcagctgcagatgatgatgcagctngagcgtgccgctgccgncagcagcagcctgtacgagccagctctgatgcagca

SEQ ID NO: 317059 - DNA, 438 bp, Zea mays
gcattcagaaacacacctagcgaagcgcactagcaacgacctaacaacaatggcttccaagacattatccctccttgcgcttcttgccctttttgtgagtgcaacaaatgcgttcattattccacaatgctcacttgctccgagtgccattattccacagttcctccctccagttacttcaatgggcttcgaacacccagctgtgcaagcctataggctacaacaagcgcttgcggcgagcgtcttagaacaaccaattgcccaattacaacaacaatccttagcacatctaaccatacaaaccatcgcaacgcagcagcaacaagcactgagccacctagccgtggtgaaccctatcgcctacttgcaacaacagctgcttgcatccaacccacttgctttggcaaacgtagctgcataccaacaacaacaacagtt

SEQ ID NO: 317060 - DNA, 418 bp, Zea mays
  unsure (1)..(418): unsure at all n locations
gagaccaacaagcaacatagaaagtggaatccagtagcaacaatagagcaacaatggagaccaagatattttccctccttatgctccttgctctttctacatgtgttgctaacgcgacaattttccctcaatgctcacaagctcctatagcttccctttttcccccataccttccatcaattatagcttcagtatgtgaaaacccagctcttcaaccatataggcttcaacaagcaatcgcagcaagcaacatacctttatcgcccttgttgtgtcaacaatcgccagccctatctttggtgcagtcattggtacaaaccatcagggcacaacagctgcagcaactcgtgctacctgtgatcaaccaagtagctctggcaaacctttctccctactctncgcaacaacaatttctttc

SEQ ID NO: 317061 - DNA, 396 bp, Zea mays
cgtctgcttcgttcaccatcttctctcctactagaaagaaatttgcgcagatctcatggagtagtggcagtattgctgctctgattagtttcttgtcgagtgtgcatgaaatggctgtgagatctgctgatgtttctttccggtgtagaatggaatcgtctcccctaataataacaataataatacattctgaaaaaaaaaaaaaaaaaaaaaaaaaaaaaaaaaaaaaaaaaaaaaaaaaaaaaaaaaaaaaaaaaaaaaaaaaaaaaccaaatctaaaagacacaaaacatacaaagaaatacaataaacataatagacaccaaaaaaaaatacactgaacaaaattaaaaaaaactaaggggggcggcgttttaaggggtcacactttttaat

SEQ ID NO: 317062 - DNA, 313 bp, Zea mays
tctccacgcgttcgccacgcgttcgccacgcgttcgtcacgcgttcgcccacgcgttcggacgaactagcaacatagaaagcacaatagtgtaccaacaatggcagccaaaatattttgcttccttatgctccttggtctttctgcaagtgttgctaccgcaaccattttcccacaatgctcacaagctcctatagcttcccttcttcccccatacctctcaccagcggtgtcttcaatgtgtgaaaacccaattgttcaaccctacaggatccaacaggcaatcgcaacaggcatcttaccattatcaccct

SEQ ID NO: 317063 - DNA, 410 bp, Zea mays
  unsure (1)..(410): unsure at all n locations
nccacgcgtncgcaccatcacagatttttgagctgcttgctcaagcgtagagagggaggnggagaaagagaagaggtgtccagtccgctgactcccggtttgcttgcgatgttcaggggcggtgggtggcgccacggtgctcgagctgaggcaccacagcttcagccctgcgccggccaacagcagggaggaggaggcggacgctctcctgtccgccgacgccgcgcgcgtctcgtcgctgcaagggcgcatagagcactaccggctgacgacgaccagctcgtcggccgaagtggcggtgacggcgtccaaggcgcaggtgcccgtcagcttgggcgcgaggcttcggacgctgaactacgtggccaccgtggggcttggcggcggcgaagccaccgtgatcgtggaca

SEQ ID NO: 317064 - DNA, 237 bp, Zea mays
tcgaaaaaacaaaaacacaaaaaaaacaaaaaaaaaacaaaaaaagaacaaaaacagaaaaaaggaaagacaaaaacatataacaacaaacacaagacaactaatactaaaaggcggcgtcctgttttgcggtgcccagctgttgtcaccctcagctccgagaccttctgcctgccatggtggcccataattcaaatccacttcccgagctttcacatgctcgtgaccggaaaaacc

SEQ ID NO: 317065 - DNA, 137 bp, Zea mays
gataaatgtattaggatcataccatcatctcaagcactaatgcagattcctgtttttcgctctcagtttcatcaatcaccatatacgaaataatgtccatgctgatgttaaccattgttaaaatgcctttacctaac

SEQ ID NO: 317066 - DNA, 377 bp, Zea mays
gggagacgcagaggtcccgcggcttcggcttcgtcaccttctccacggaggaggcgatgcggaacgccatcgagggcatgaacggcaaggagctggacggccgcaacatcaccgtcaacgaggcccagtcccgcggcggccgtggaggcggcggcggtgggtacggtggtggccgtggaggcggcggctacggcggtggcgggcgccgtgatggcggcggcggctacggcggtggcggcggctacggtggcggcggcggctacggtggtggtggcggcggctacggcggtggcaaccgtggcggcggctacggcaactccgacgggaactggaggaactgagcggtggggcccgcgcggccaagttatcctgttcgc

SEQ ID NO: 317067 - DNA, 126 bp, Zea mays
actagttctagatcgcgagcagtgtgttgtgttgtgtgggtgccgcacgctagcaggctagccatgtgccctgctgtgttgtgtcaccatccatctataatcttatccataccccaccttttgtgt

SEQ ID NO: 317068 - DNA, 88 bp, Zea mays
tcgcgtactcttgagaatgctttggataatgagattcatccgaagggtcatgatctaagtccggatattcctactgataacctgattg

SEQ ID NO: 317069 - DNA, 123 bp, Zea mays
tcggtactgctcatattgtgcgaaaaaaaaaaaattcatccgactgataataaaatgactcgggataggacaaaatataaaaaaaagtgaaaccattctaaagactcatgcttacctaaatac

SEQ ID NO: 317070 - DNA, 258 bp, Zea mays
taccgacacacctacaacattttaagattccaactacactaaagcgactgaggcttatagactctctaaaaacctcaataactatctcaccattcatcaccacccatataaaaaccctcaacttattaacaactctccataatatataacttcacatcacatactacaaaacattaaaatactaccaattactattctaccaccaataataactcatagactccatcctcaaatgtatccaaatcattcaaatcacac

SEQ ID NO: 317071 - DNA, 74 bp, Zea mays
attcccttatccacccactcgtccacacacactctataactccatttctatctcattttcaatcaacctatcct

SEQ ID NO: 317072 - DNA, 303 bp, Zea mays
tcgcgcatggccgccctttttttttcgttttttcgtgttccatccgtttatgtttttgttggggatttggctttttatacagggcagtcaatcatattggtgtaagtggcaattaaacgatctagtgcgtttaatcaaaatccaatggcgaccggtatttacatttactggaacctagtactattttatgttaaagctcctccatatgaaattgctagaactagattgaatgctttgctttcaccaaatgagtgattgcacatgattcaccttccaccttaaggggcacattcatgatcaacc

SEQ ID NO: 317073 - DNA, 223 bp, Zea mays
cccactcgttcgcccactcgttcgcggacgcgtgggaccgtagtatttgcatggcatgctggtgatggtatttgtgcaattactgcaaaaaaaaaaaaaaaaaaaaaaaaaaaaaaaaaaaaaaaaaaaaaaaaaaaaaaaaaaaaaaaaaaaaaaaaaaaaaaaaaaaaaaaaaaaaataaaaaaaaaaaaaaaaataaataaaataaaaaagacgacaagg

SEQ ID NO: 317074 - DNA, 331 bp, Zea mays
cccacgcgtccgagaaagcacaatagtgtaccaacaatggcagccaaaatattgggcttccttatgctccttggtctttctgcaagtgctgctaccgcaaccattttcccacaatgctcacaagctcctatagcttcctttcttcccccatacctctcaccagcggtgtcttcagtatgtgaaaacccaattcttcaaccctacaggatccaacaggcaatcgcagcaggcatcttacctttatcacccttggtccttcaacaaccgtcagccctattacagcagttacccttggtgcatttgttggcacaaaacatcaaggcacaacaac

SEQ ID NO: 317075 - DNA, 104 bp, Zea mays
aattcacttgtttatattatgtcagaatggtcacaactacaaggtgaaattcagggagggtaccagataaaggttacaacgactgcattagctcttctcatatc

SEQ ID NO: 317076 - DNA, 163 bp, Zea mays
gcaaatgttagttacatgttgaatcgacattgggggcctggatttggggatacatcatgctgtaaattgatcagtttaattaccatactgtgctgctttgagcgaaaaaaaaaaaataaaaaaaaagaaaaaaaaaaaaaaaaaaaaaaaaaaaaaataaaaa

SEQ ID NO: 317077 - DNA, 438 bp, Zea mays
gattggagaactcgacaccatgaaggtgctgatcgttgcccttgctctcctggcgctcgctgcgagcgccgcctccagtacaagcggcggctgtggctgccagacaccaccgtttcatctaccgcctccgttctatatgccgcctccgttctatctgccgccgcagcagcagccgcagccatggcaataccccactcaaccaccgcagctaagcccgtgccagcagttcggatcctgcggcgtcggcagcgtcggcagcccgttcctgggccagtgcgtcgagttcctgaggcaccagtgcagcccggcggcgacgccctacggctcgccacagtgccaggcgctgcagcagcagtgctgccaccagatcaggcaggtggagccgctgcaccggtaccaggcgacatacggtgtggtcctgcagtccttcctgcagca

SEQ ID NO: 317078 - DNA, 123 bp, Zea mays
atcttcctggctgctgctgctgctactgctacctgtctgtttggtgttctaaaagactctgatgagtggttctgaatgtctgcatttcaaaaaaaaaaaaaaaaaaaaaaaaaaaaagggcaa

SEQ ID NO: 317079 - DNA, 369 bp, Zea mays
aaccaattgcccaattacaacaacaatccttggcacatctaaccatacaaaccatcgcagcgcagcagcaacaagcactgagccacctagccgtggtgaaccctatcgcctacttgcaacaacagctgcttgcatccaacccacttgctttggcaaacgtagctgcataccaacaacaacaacagttgcaacagtttctgccagcgctcagtcaactagccatggtgaaccctatcgcctacctacaacagcaacaacttctttcatctagcccgctcgctatgggcaatgcacctacatacctgcaacatcagttgttgcaacaacagttgctgcaacatattgtaccagctcttactcagctagctg

SEQ ID NO: 317080 - DNA, 418 bp, Zea mays
  unsure (1)..(418): unsure at all n locations
ggaatccagtagcaacaatagagcaacaatggagaccaagatattttccctccttatgctccgtgctctntctacatgtgttgctaacgcgacaattttccctcaatgctcacaagctcctatagcttccctttttcccccataccttccatcaattatagcttcagtatgtgaaaacccagctcttcaaccatataggcttcaacaagcaatcgcagcaagcaacatacctttatcgcccttgttgtgtcaacaatcgccagccctatctttggtgcagtcattggtacaaaccatcagggcacaacagctgcagcaactcgtgctacctggatcaaccaagtagctctggcaaacctttctccctactctccgcaacaccaatttcttccattcaaccaactgtctacactgaacc

SEQ ID NO: 317081 - DNA, 435 bp, Zea mays
cgttctcgtcgtgtgcctggctctgtcagctgccagcgcctctgcaatgcaggggccctgcccctgcgcggggctgcagggcttgtacggcgctggcgccggcctgacgacgatgatgggcgccggcgggctgtacccctacgcggagtacctgaggcagccgcagtgcagcccgctggcggcggcgccctactacgccgggtgtgggcagacgagcgccatgtaccagccgctccggcaacagtgctgccagcagcagatgaggatgatggacgtgcagtccgtcgcgcagcagctgcagatgatgatgcagcttgagcgtgccgctgccgccagcagcagcctgtacgagccagctctgatgcagcagcagcagcagctgttggcagctcagggtctcaaccccatggccatgatgatggcccagaacatgcc

SEQ ID NO: 317082 - DNA, 135 bp, Zea mays
tcgcggactcgtgggaaaaaaaaaaaaaaaataaactacaatgataataaaaataaaaataggaaaaaaggaaaaaacaaaataactataatcaaataaaagggcgacctttttgtgggaccctattttagttca

SEQ ID NO: 317083 - DNA, 145 bp, Zea mays
cccactcgttcggacgccttcacttccaagttctccctcgattctaagcagctgattgtaattagggtggtgaaatgtaccattttttactagatgatggcaattgttgttgaacatacatatagtggatgcactggtggggttt

SEQ ID NO: 317084 - DNA, 435 bp, Zea mays
ctttatcgcccttgttgtgtcaacaatcgccagccctatctttggtgcagtcagtggtacagggcatcagggcacaacagctgcagcaactcgtgctacctgtgatcaaccaagtagctctggcaaacctttctccctactctccgcaacaacaatttcttccattcaaccaactgtctacactgaaccctgctgcttatttgcagcaacaactattaccatttagccagctagctactgcctactctcaacaacaacaacttcttccatttaaccaattggccgcactgaaccccgctgcttatttgcagcagcaaatactactaccatttagccagctagctacagcaagccgtgcttccttcttgacacaacaacagttgctgccgttctaccagcagtttgcggctaaccccgcaaccctcttacaactac

SEQ ID NO: 317085 - DNA, 263 bp, Zea mays
aattccggtcgacccactcgttcgatcgtacagtcaatacttacactgcagttcagaataggaaatacctcgaatccatctggataagtgacacattcgatattttactgtagcatctatatcatcaccaaccgtgtctatacaatacatacagatctcatccctgatgttcaagatagctactgaatcgcattctcaaatattatgaacagattaataatatcgctacttagatatgcagtcacatgtccatgttctcatac

SEQ ID NO: 317086 - DNA, 445 bp, Zea mays
caatcgccagccctatctttggtgcagtcattggtacaaaccatcagggcacagcagctgcagcaactcgtgctacctgtgatcaaccaagtagctctggcaaacctttctccctactctcagcaacaacaatttcttccattcaaccaactgtctacattgaaccgtgctgcttatttgcagcaacaactattaccattcagccagctagctactgcctactctcagcaacaacaacttcttccatttaaccaattggccgcactgaaccccgctgcttatttgcagcagcaaatactactaccatttagccagctagctgcagcaagccgtgcttccttcttgacacagcaacagttgctgcctttctaccagcagtttgcggctaaccccgcaaccctcttacaactacaacaattgttgccctttgtccaacttgctttga

SEQ ID NO: 317087 - DNA, 136 bp, Zea mays
cccacgcgtccgcggacgcgtgggggccactgaagcgaagtcgaagagccatgagtctgattcgttggctttgagggaggagatcagattactgactgataacctggagtctattataagtgaagctctgtcacgt

SEQ ID NO: 317088 - DNA, 85 bp, Zea mays
cgttgagctgtgtgtattacacacatttatttaatttatgtagcaacgccatttgttggtgattaacgagtgatcgagcaagctt

SEQ ID NO: 317089 - DNA, 325 bp, Zea mays
ggcattttaaggccctatggatacacttactctcatcgttgctgatgcatacgctgattgcattgttggtgatgactgtggttatgactatgagtttcttgatatcaatgctattgatgatgatggtcatgatgaaggtgacgaccttaaggatccttatctatatgctgcatatctaactgttcagcagttagcactgcttatttaaaaagctgaatatgccatacactaccaacactttatgtgtgatactggagaccatgctactactggcgtatctggtgaccattggtttgaacccgagagatacgcgatgtgtagactg

SEQ ID NO: 317090 - DNA, 282 bp, Zea mays
tgtcacatgcatgcttcatgacattgctgactgcataacgaaacagatcgtcgccagatctgagatgatgagtgccgtcgacgtggatgctgctgctaacagctgcaatgtgcagaagacgtacaggacgcaggtgggtgctcatgctgatagggtggcgactgaaactatgggcacggacatgcagcacgagtacatccaggctctggctgacattgcgcacgtgacgctggatgttcgatgcaagggcatcagtgttgtacatgacactgaagctatgac

SEQ ID NO: 317091 - DNA, 181 bp, Zea mays
cggacgcgtgggcggacgcgtgggcggacgcgtggggttggacaaacccagcagcctcctaccaacaacacatcattggtggtgccctcttttagattgcttattagttgtaattcaataataaagttttttggatgatgtatgtggccaaccagaaataagaagttacatttccagattc

SEQ ID NO: 317092 - DNA, 297 bp, Zea mays
cccacgcgtccgcccacgcgtacgaggtacgattgtacgtacgactattgggcagcaggagatgatagttataagatctagaggcataagcaatatgaattgctgatggatcaagatgctaatacatatgcctgtacctagctagaataaaaggattcatcagcagataaacattcagatgtaaacgagaagactagagtgtgaaattaaccaggagcaatatatagtgattaaaccgatgcactcgagcataatacacatgagaagaccagatctatgttaacctataataagaaa

SEQ ID NO: 317093 - DNA, 130 bp, Zea mays
cgattcgtcgaccacgcgtcgcacctctacctcgcacctcgtttggacttatggcatgagaatgttgaatatcgcttacagagaggactttacgttcggcttatatcattaccagagtatgcggatattt

SEQ ID NO: 317094 - DNA, 445 bp, Zea mays
cggacgcgtgggcggacgcgtgggtagaaagtggaatccagtagcaacaatagagcaacaatggcgaccaagatattttccctccttatgctccttgctctttctgcatgtgttgctaacgcgacaattttccctcaatgctcacaagctcctatagcttcccttcttcccccataccttccatcaatgatagcttcagtatgtgaaaacccagctcttcaaccctataggctccaacaagcaatcgcagcaagcaacatacctttatcacccttgtttcaacaatcgccagccctatctttggtgcagtcattggtacaaaccatcagggcacagcagctgcagcaactcgtgctacctgtgatcaaccaagtagctctggcaaacctttctccctactctcagcaacaacaatttcttccattcaaccaactgtctacattga

SEQ ID NO: 317095 - DNA, 96 bp, Zea mays
aaaaaaaaaaaaaaaaaaaaaaaaaaataaaaaaaaaaaaaaaaaaaaaaaaaaaaaaaaaaaaaaaaaaaaaaaaaaaaaaaaaaaaaaaaaaag

SEQ ID NO: 317096 - DNA, 437 bp, Zea mays
cccacgcgtccgaccaactagcaacatagaaagcacaatagtgtaccaacaatggcagccaaaatattttgcctccttatgctccttggtctttctgcaagtgctgctacggcgaccattttcccgcaatgctcgcaagctcctatagcttcccttcttcccccgtacctctcaccagcggtgtcttcggtatgtgaaaacccaattcttcaaccctacaggatccaacaggcaatcacagctggcatcttacctttatcacccttgttcctccaacaatcatcagccctattacatcagttacctttggtgcatttattggcacaaaacatcagggcacaacaactacaacaacttgtgctagcaaaccttgctgcctactctcagcaacagcagtttcttccattcaaccaactagctgcattgaactctggttc

SEQ ID NO: 317097 - DNA, 404 bp, Zea mays
gaaaacgtacgtgcctgaaattattggatctggggaggctattgatgccgcagaagcggagacttgtgggaagaagattgacaagaatggggatgctggtgcccgtggaagagaggtatctgccaatgtgagtgccaagaggaagaggaataagaatgggcaggttgaggatgatgttgcgatgcaggaagaagttcatgtggagatagagaaagagaagaggaaaagcattgtgatttctgctaatgacagccatatggctggcgagaatggtgaacagatgggcaaacgtagtttggaaaataaggtgaacgaagccagtttggacaacgtgaacgttaagatggtgaagactgagcagaggaagatgaagagcatgaacggtgatggtgaaatcagtactg

SEQ ID NO: 317098 - DNA, 195 bp, Zea mays
cccacgcgtccgccctcttcgagagggatgtacatacctggaggtactggattacggaggactcgattgattcgttcacacatacctgcagatgtacgaacccgcatatatttagatcgaacttctataaaaacttctgtccaaacaccgaatgaaaatccatgatatagcttcttattcacataaagtgagaaa

SEQ ID NO: 317099 - DNA, 423 bp, Zea mays
ctttggtgcatttgttggcacaaaacatcagggcacaacaactacaacaactcgtgctagcaaaccttgctgcctactctcagcaacaacagtttctgccattcaaccaactagctgcattgaactctgctgcttatttgcaacaacaactagtactaccattcagccagccagctgctgcctaccctcagcaattacttccattcaaccaactagcagcattgaactctcctgactatgtacagcagcagcaactactaccattcagccagctagctgctgtgagcactactgccttcttgacacagcaacaattgttgtcgttctacctgcacgctgcgcctaacgttggcaccctcttacaactgcaacaattgctgccattcaaccaacttgctttgacaaacccagcagcgttttacc

SEQ ID NO: 317100 - DNA, 204 bp, Zea mays
gcgacagcatgggagtcaggtctcatagcttgcttcattacattgcagactgcataacggaacacatcgtttcctgatcggagacgatgtgttacgacagcattgatgctgctgctagcagcagcatcgactagaaaacgtcgtgcgcataggtggcgggcatgtgcatcatggataggacagagactatgtgttaaggacatg

SEQ ID NO: 317101 - DNA, 372 bp, Zea mays
aactctgcttcttatttgcaacaacaacaactaccattcagccagctacctgctgcctacccccagcaatttcttccattcaaccaactggcagcattgaactctcctgcttatttacagcagcaacaactactaccattcagccagctagctggtgtgagccctgctaccttcttgatacaaccacagttgttgccgttctaccagcacgctgcgcctaacgctggcaccctcttacaactgcaacaattgctgccattcaaccaacttgctttgacaaacccagcagcgttctaccaacaacccatcattggtggtgccctcttttagatttcttatgagttatagttcaataataaagttttttgtctg

SEQ ID NO: 317102 - DNA, 440 bp, Zea mays
ggcagccaaaatattttgcttccttatgctccttggtctttctgcaagtgttgctaccgcaaccattttcccacaatgctcacaagctcctatagcttcccttcttcccccatacctctcaccagcggtgtcttcaatgtgtgaaaacccaattgttcaaccctacaggatccaacaggcaatcgcaacaggcatcttaccattatcacccttgttcctccaacaaccgtcagccctattacagcagttacctttggtccatttggtggcacaaaacatcagggcacaacaactacaacaacttgtgctagcaaaccttgctgcatactctcagcaacatcagtttcttccattcaaccaactggctgcattgaactctgctgcttatttgcaacaacaattaccattcagccagctagttgctgcctacccccagcaat

SEQ ID NO: 317103 - DNA, 314 bp, Zea mays
gtccaaggtccagtatgcgcatcagtattctgctcatccttagtctgaaccatgacttgggaagggactcagctgaatgattatggcctgggacaggttacagtctttatcatctagtgtagactacagagtgtgttagttgttgtgcaagtacgtgcaggcgatgtgcttatgagtcagtgtttagagttattcatgtctgcttgccggactagccctggtcctgctggagcggagctgattgccccaatgcgccagttctgcaagctgctgagcacattaaagctgccgccgactgatgacgctatgctctc

SEQ ID NO: 317104 - DNA, 414 bp, Zea mays
ggacgaagagctggaagaggaagaagcagatgtctccaacaagaggcagtgtgttagagttgaaaacggggaagctggggatgccaccgtagcagaggtggaaccaaacaacggcggcggcggcgggggcggggaccgctgaacagtgaacagcaccaccacgtttgtcgctaactcgctattttcacaacagcatcggtattggatttttgagcgttgtctctggcatttttcatgtattttagggctagtttggcaaattcatttttccaagtgattccgattttcctaaggtaaaatgaactaatttccttggaaaaatgaataaaaaaaatcactagtaaaaatgggattgccaaactgtcctttattagacaatttctgccgtactctactcggtactgattaactgac

SEQ ID NO: 317105 - DNA, 432 bp, Zea mays
cccacgcgtccgcccacgcgtccgcggacgcgtgggggaccaactagcaacatagaaagcacaatagtgtaccaacaatggcagccaaaatattttgcctccttatgctccttggtctttctgcaagtgctgctacggcgaccattttcccgcaatgctcacaagctcctatagcttcccttcttcccccgtacctctcaccagtgttgtcttcagtatgtgaaaacccaattcttcaaccctacaggatccaacatgcaattgcatcaggcatcttacctttatcacccttgttccttcaacaatcatcagccctattacagcagttacctttggtgcatttattggcacaaaacatcagggcacaacaactcgtgctagcaaaccttgctgcctactctcagcaacaacagttacctttggtgcatttgt

SEQ ID NO: 317106 - DNA, 427 bp, Zea mays
gccatatctgacgatccactcgagcaccaagccggaggaaggcgaggaccgactgcacctctacaggctgcccaaggctgaatacattccagtgtataaagaatatgattcctttactgttaagagaatctctgatccacaggctttaaaggaaagtccagcaagggctgttgctagcgataagggtacccctataccctcaagttctaaccaggagaaggattcagtggctaagactataccgaatagggtgaaggaaaaaagtgatgacgaaggtagacacttgcccgctgaatttgatggaaaagaaaacctggtggtgaactcaaaaattgagaagtctgattctggtgttgactggagtcgagaaagagaaagagaaagagagagatcaagagggcgggaacgtgatgctaggggtagggat

SEQ ID NO: 317107 - DNA, 293 bp, Zea mays
cggacgcgtgggctgaatttcgacaaggacgcgaggaaaagacgaggaacttgccggcggcgcgagtacgaactgataaagggtggcttgccaagaacatgcagcggtcggttgaagcagggcggcgagcgtctttaggcttgtttatgtgtgtgagaaggacttcttctttttcgtgggtttaggcgtggggaaagagctccttttattaagctcctttaaccacctttttttttgggtgttcagattttctatcttttcagttcgacgctttttgtaaaaaaaaaaacaaa

SEQ ID NO: 317108 - DNA, 416 bp, Zea mays
ctgaagctgggctatgcgaagtttggatttgattttatacaacagagcaaccaaattggcccactcttccataacattgccctgcaacaatacatcctactttgttctcaggtgaggtaactttgaatacaatattattttcatatgcagagttttatcactagaatgtgaaattctgcaatgccgtcttattatagttgttaccaccctctatcccgaaattataagttgttttagcttttctaggttacataacttttgatatgcacctagatatacaatgtctacatacatagcaaaagttatgtgccgaaaaatgccgaaacaacctataaattggaacggaaggagtatttattgagaaaatgagatctcagataagttaagattacaatcgcttctgtaactcaagtact

SEQ ID NO: 317109 - DNA, 272 bp, Zea mays
gctgcgaagactatatttccgatctctgtttcgtgcatactaggctgcaggggcaagatttttctccttcaaagttcatgcttctaaggagaactcttgagaagcacttcaactcatccacttttagagtcgggagctctaatgcaacgggtcatgcttctgattcgctggttccttcaagcacgaaagttgaagatttaacctccagtcggcaggacatatttcttcttcccctgagagggcacgacgactcgacaaagtttgagtatgga

SEQ ID NO: 317110 - DNA, 431 bp, Zea mays
cggacgcgtgggcggacgcgtgggagatacaagaaactataccaacagttgttttttcagaagaaagactataccaattagatcgccaaaggtagttcttttgtgctcccgctgaaatctggatagatctcttgcccttgaactactttggaatcaaactgtaaaaatgaaaatatagtgattgagcccttgtttgtatcagagaagcaatatagctgactagctcatccattatcttactgctatggtctactgctaggcatcatgttggatttggggtatttggcagaactttgtctcatgtttgatggaagtagaccagggactaaattgattggggtcagctaaaccattctgtgaatgaaggtgcatcatctgcagctgactgtggaagtaatatgttgaccaaactgagcaacaacattcttatt

SEQ ID NO: 317111 - DNA, 437 bp, Zea mays
ccaacaagcaacatagaaagtggaatacagtagcaacaatagagcaacaatggcggccaagatattttccatccttatgctccttgctctttctgcatgtgttgctaacgcgaccatttttcctcaatactcacaagctcctatagctgcccttcttcccccataccttccatcaatgaccgcttcagtatgtgaaaacccagcccttcaaccctacaggctccaacaagcaatcgcaacaagcaacttacctttatcacccctgttctttcaacaatcgccagccctatctttggtgcaatcattggtacaaaccatcagggcacaacagctgcagcaactcgtgctaccagtgatcagccaagtagctctggcaaaacctttctcctactctcagcaacaacaatttcttccattcaaccaactgtctacactga

SEQ ID NO: 317112 - DNA, 325 bp, Zea mays
accatacttcattgcaacgacatttatcagatagcacggtggggaaaaaaaaaaaggtcagaaacacaaaacgagaagaatagaaaaaactgctatcgcccctacgaacatggattaccacttgccaaaatggggcgtccactttataagatccaatgcttagcacactctcatgcaagatggctgctttcctatagagccccctaaattaaggatactggcctgtgcatgtcaccacagagacttgggaaaccatggcctttcccaatttaacccctttgctgaaaagcctcgttttgacagctaccgttaaactgataaggcc

SEQ ID NO: 317113 - DNA, 270 bp, Zea mays
  unsure (1)..(270): unsure at all n locations
cagaaacacaccaagcgaagcgcactagcaacgacctaacaacaatggctaccaagatattagccctccttgcgcttcttgccctttttgtgagcgcaacaaatgcgttcattattccacaatgctcacttgctcctagtgccattattccacagttcctcccaccagttacttcaatgggcttcgaacacctagctgtgcaagccaacatgcaacaacaagcgcttgcngcgagcgtcttacaacaaccaattgcccaattgcaacaac

SEQ ID NO: 317114 - DNA, 435 bp, Zea mays
cccacgcgtccggaaagcacaatagtgtaccaacaatggtagccaaaatattttgcctccttatgctccttggtctttctgcaagtgctgctacgacgaccattttcccgcaatgctcacaagctcctatagcttctcttcttcccccatacctctcaccagcgttgtcttcagtatgtgaaaacccaattcttcaaccctacaggatccaacaggcaatcacagcaggcatcttacctttatcacccttgttcctccaacaatcatcagccctattacatcaattacctttggtgcatttattggcacaaaacatcagggcacaacaactacaacaactcgtgctagcaaaccttgctgcctacgctcagcaacagcagttacctttggtgcaattgttggcacaaaacatcagggcacaacaactacaacaac

SEQ ID NO: 317115 - DNA, 315 bp, Zea mays
cccacgcgtccgcccacgcgtccgcccacgcgtccgaaaaaaaaaaaaaaagatacagatgaaacaacatatacaaggaagaagaaaagacgaaaaaacatcaagggcatgagcgggacggtagctggacggccgcaacatgaccgtcaactatggcccagtccagctgtcgctcgaggaggcggcagaggcgggtacggtggcggccgtggacgcggcggctacggcggaggcgggcgccgtgatggcggtagcggctacggcggaggcggcggctacggtggcggcggctgttacggtggtggtggcggcgga

SEQ ID NO: 317116 - DNA, 438 bp, Zea mays
cccacgcgtccggcggcggctgcggctgccagccaccgccgccggttcatctaccggcgccggtgcatctgccacctccggttcacctgccacctcctgtgcatctcccaccgccggtccacctgccgccgccggtccacctgccaccgccggtccatgtgccgccgccggttcatctgccgccgccaccatgccactaccctactcaaccgccccggcctcagcctcatccccagccacacccatgcccgtgccaacagccgcatccaagcccgtgccagctgcagggaacctgcggcgttggcagcaccccgatcctgggccagtgcgtcgagttcctgaggcatcagtgcagcccgacggcgacgccctactgctcgcctcagtgccagtcgttgcggcagcagtgttgccagcagctcaggcaggtggagccgc

SEQ ID NO: 317117 - DNA, 386 bp, Zea mays
aagcacaatagtgtaccaacaatggcagccaaaatattgtgcttccttatgctccttggtctttctgcaagtgttgctaccgcaaccattttcccacaatgctcacaagctcctatagcttcccttcttcccccatacctctcaccagcggtgtcttcaatgtgtgaaaacccaattgttcaaccctacaggatccaacaggcaatcgcaacaggcatcttaccattatcacccttgttcctccaacaaccgtcagccctattacagcagttacctttggtccatttggtggcacacaacatcagggcacaacaactaccacaacttgtgctagcaaaccttgctgcatactctcagcaccatcagtttcttccattcaaccaact

SEQ ID NO: 317118 - DNA, 54 bp, Zea mays
acggactcaactagcaacattcgaaagcacaatagtgtaccaacaatggcagcc

SEQ ID NO: 317119 - DNA, 235 bp, Zea mays
ggctttcacaaagtatgctctcaaatatgaaaatgatgctggcaagaaggaaattcagctgcagcttgagaagatgaagaaatatgcttctgttatccgtgtcattgctcatacccagattaggaagatgaagggtttgaagcagaagaaggctcacctgatggagattcaggtcaatggtggtaccattgctgacaaggtggactatggctacaaattctttgagaaagaggtc

SEQ ID NO: 317120 - DNA, 60 bp, Zea mays
cggtacgcgtgggcccgaagcaaactttttttctttggcaactagggcgatggatgtatc

SEQ ID NO: 317121 - DNA, 269 bp, Zea mays
ccagctagctgcagcaaaccgtgcttccttcttgacacagcaacagttgctgcctttctaccagcagtttgcggctaaccccgcaaccctcttacaactacaacaattgttgccctttgtccaacttgctttgacagacccagcggcctcctaccaacaacacatcattggtggtgccctcttttagattgcttattagttgtaattcaataataaagttttttggatgatgtatgtggccaaccagaaataagaagttacatttccag

SEQ ID NO: 317122 - DNA, 302 bp, Zea mays
ccagctagctgcagcaaaccgtgcttccttcttgacacagcaacagttgctgcctttctaccagcagtttgcggctaaccccgcaaccctcttacaactacaacaattgttgccctttgtccaacttgctttgacagacccagcggcctcctaccaacaacacatcattggtggtgccctcttttagattgcttattagttgtaattcaataataaagttttttggatgatgtatgtggccaaccagaaataagaagttacatttccagaaaaataattctcattaatgtcattattaaaaa

SEQ ID NO: 317123 - DNA, 439 bp, Zea mays
cccacgcgtccgcccacgcgtccgcggacgcgtgggcaactagcaacatagaaagcacaatagtgtaccaacaatggcagccaaaatattttgcttccttatgctccttggtctttctgcaagtgttgctaccgcaaccattttcccacaatgctcacaagctcctatagcttcccttcttcccccatacctctcaccagcggtgtcttcaatgtgtgaaaacccaattgttcaaccctacaggatccaacaggcaatcgcaacaggcatcttaccattatcacccttgttcctccaacaaccgtcagccctattacagcagttacctttggtccatttggtggcacaaaacatcagggcacaacaactacaacaacttgtgctagcaaaccttgctgcatactctcagcaacatcagtttcttccattcaaccaactg

SEQ ID NO: 317124 - DNA, 113 bp, Zea mays
cccacgcgtccgcccacgcgtccgggcggcctgtaccgaggtctcggccctagctgcatcaagctcatgcccgccgccggcatctccttcatgtgctacgaggcgtgcaagat

SEQ ID NO: 317125 - DNA, 197 bp, Zea mays
cccacgcgtccgcggacgcgtgggaaagcggcagtgcgtagagaggatcgtcgaacagaacagcatgaagatggtcatcgttctcgtcgtgtgcctggctctgtcagctgccagcgcctctgcaatgcagatgccctgcccctgcgcggggctgcagggcttgtacggcgctggctccggcctgacgactatgatgg

SEQ ID NO: 317126 - DNA, 210 bp, Zea mays
gaagctgcactcacttgaaggtggttccaataagttgtcatatgtcttatcaggggctccaaactcatgatgtataattttacagtgtaccatctgctatttcatgatctttgctactaaaacaggatgatccatttcctcaagttcttcaactggctgtattttaaaagtataaaagctttgtggctttcgcattgaaagtgatgtgta

SEQ ID NO: 317127 - DNA, 442 bp, Zea mays
catccccatcctcttcctttcttagtatgtgctatactagctcgctgctgccttttgttacaatgtttgtacggtcgcaataaatgtatggtcgtgtattctcgagagctacttatgttttttttttcttatatttcttattcattttttatattttttgtgatttgtttttttttttatttttatttgttttttatcatatatttttttgttgttatttatcatattttatatattttatattttatttattttttttttttttattttattttttttatttttattttttgtatatttattttatttttcttttatattatttttttttattgtttttattttttttttatttgttttttgatttattttttttttaaatattttttttttttattttatttttattttatttatttttttttttattttattttttttt

SEQ ID NO: 317128 - DNA, 133 bp, Zea mays
gtcctagatcgcgagcggtcgaaagcttgtccttgattccaagttccatctatgagaacttggacataggatattggacgtcattactttgaagaaaaagccaagctctagaagtttgccaaagattcttgcc

SEQ ID NO: 317129 - DNA, 167 bp, Zea mays
gtcctagaaagcgtgctgtccaaagtcttgaagtattttccaagttacgatctaggaaaactagctcatgggatattgtacgtcattacttcgaagagaaatcctagctcaagaagttgttcatagattcttgtctgagagtgtgcctgacaacagatgctcgtact

SEQ ID NO: 317130 - DNA, 406 bp, Zea mays
attttgagcattcagaaacacaccaagcgaagcgcactagcaacgacctaacaacaatggctaccaagatattagccctccttgcgcttcttgccctttttgtgagcgcaacaaatgcgttcattattccacaatgctcacttgctcctagtgccattattccacagttcctcccaccagttacttcaatgggcttcgaacacctagctgtgcaagccaacatgcaacaacaagcgcttgcggcgagcgtcttacaacaaccaattgcccaattgcaacaacaatccttgccacatctaacaatacaagccatcacaacgcaacagcaacaacagttcctaccagcactgagccacctagccatggtgaaccctgccgtctacttgcaagagcagctgcttgcatt

SEQ ID NO: 317131 - DNA, 241 bp, Zea mays
cgccgcctccagtccagagccaccgtgagatctgcccgattccgccgcccggacccggtgactccctcccctcctcgatccgttcgggcggccagcctacctagcttctaatgcctggatggtctataatctttacgaagttctaggctttaaccggcttgctttggccatcacaacatgattgtatcaacaacttatgtttgttggtgatctcttttaaaatagttatgagctataactc

SEQ ID NO: 317132 - DNA, 178 bp, Zea mays
gtacgaggctaaatgaaaggcttagggttatattgcgcaaggagataccggggaccatggaagggattcagacagtgattacaagtagcaacgacgatacttaatcactgaaatttgcctagtgtaagagctttgataaagttgaaggcagagaatggtatgagatggttatgagaag

SEQ ID NO: 317133 - DNA, 174 bp, Zea mays
cggacgcgtgggaaaaaaaaaaaaaacattaataagacaaaaaaaaaaaaaaaaaaaaaagaaaagaaaaaaaaaaaaaaaagggcggccgcttttttagagcctggctgctttactcctccatccttcctcatcgttcctttatagtggcgcctctgttcatcaaattgccca

SEQ ID NO: 317134 - DNA, 240 bp, Zea mays
aagaaatctaaaagagggcaccaccaatgatgggttatagttcaataataaagttttttgtctgatgtttgtggcttcccagaaataataaagtccatttctaaaaaaaaaaaaaaaaaaaaaaaaaaaaaaaaaaaaaaaaaaaataaaaaaaaaaaagaaaaaaaaaaaaaaaaaaaaaaaaaaaaaaaaaaaaaaaaaaaaaaaaaaaaaaaaaaaaaaaagggccgcccgttttaa

SEQ ID NO: 317135 - DNA, 72 bp, Zea mays
ctgaggaggagctggaccgagccacaatttgtttcgcgcgtgactagatacagaagcacaggggcacagatg

SEQ ID NO: 317136 - DNA, 256 bp, Zea mays
cccacgcgtccgcccacgcgtacggattgtgcttgtgggctagctttgcttctgataatcatagctttctgcaaaaaaaaaaaaaatataaaaacaaaataacaaaataaaaaaaaaaaaacaaaaaataaaaaaaaaaaaaaaaagaaacaaaaaaagataatatgctaaaaacacaaaaacataaaaatagaagatgcaaaaaaaagggggcccaacaaaagaaacgcaggatttaaaccagttcatacccaac

SEQ ID NO: 317137 - DNA, 393 bp, Zea mays
cccacgcgtccggtgcaaatctaaagagcttgcactgactgactaaaacatgaacataatatgatccgacatctgctatacaaggctctatgctaatgctctcaaaagctgtagcagtcagatgattctcactgccaaaagggacctatatacctatcaactcaaacctaaactatggctattataacaagtctaccggttgaatatccaaagcctataaaaagctatcgttggatctactgacaactgacaccgacatagtaggtaatttctcaaactaaatgtaatacactaggtaccacattatagaacatcaatgcactgcttgttgtcatctagatctacggtcagagctgacgactgatgactgaaacctgtgatcatgcattacgt

SEQ ID NO: 317138 - DNA, 438 bp, Zea mays
  unsure (1)..(438): unsure at all n locations
ggatattcatgttgaatgcgaaattagcaccagtagagagcatggcgcccatatggggttcgagatatgcttggggttaaaataaacatgacaacttggacgctgtagactgaccctagagcatctatcaaaggaaccagacagcgatcatgagtttaggaggcaacggagggcaataacaaggactcatctgacacacaaggattctgggagttgaggagagtgcttcacaacaagagatagagaaggcgtatcacaaattggctctgcgcctccacccggatacgaatcctgngaacgagccaaagagaagtttcagtagttgcagaaggttatatccattcttggagatacagagaaaagagctttatatgatgagactgacatcagtgatgacgatacaatcttcaggagtacttncgaacaatgtacaaaaag

SEQ ID NO: 317139 - DNA, 299 bp, Zea mays
cccacgcgttcggcattgggacctacttttgagcacagagtatggggcccatatgaggcaatcgatgtccttgtacttccatggactataacggcaccggcgctggagactgggcgtagagcatctatcaaaggaaccagacagggatcatgagtgtaggaggcatcggagggcaatatcatggactcatttgactcacaaggattctggaagttgaggagagtgcttgacaacttgagatatagaaggcttatcacaatttggctctgctcttttatccttattctattcctgtgaac

SEQ ID NO: 317140 - DNA, 218 bp, Zea mays
ggaatcaacggtttcggaaggatcggcaggctcgtggccagggtcgccctgcagagcgaggatgtcgagctcgtcgccgtcaacgaccccttcatcaccacggattacatgacctacatgttcaagtactacaccttgcacggccaatgtatgcacagctacatcaccctcaaggactccaagtctcttctcttctgcgagaatctcttcactgtctt

SEQ ID NO: 317141 - DNA, 406 bp, Zea mays
cttacgctcttgccacgcacctttcaccagtgttgacttcagtatgtgaaaacccaattcttcaaccctacaggatccaacatgctattgcatcaggcatcttacctttatcacccttgttcctccaacaatcatcatccctattacagcagttacctttggtgcatttattggcacaaaacatcacggctcaacatctcgtgctagcaaaccttgctgcctactctcagctacaacagttacctttggtgcatttgttggcacaaaacatcagggcacaacatctacaacatctcgtgctagcaaaccttgctgcctactctcagcaacatcagtttctgccattcaaccaactagctgcattgaactctgctgcttatttgcaacatcaactagtactaccatt

SEQ ID NO: 317142 - DNA, 192 bp, Zea mays
tcccggtcgaccagcgttcgttctgcgttcgagagaactattctgtgtgttgagcgaatcatgtgaaatggaaagtattgaactatagaagagccagcatgcatttatgaggagtatgatgacatctataatcttgcgttgcttcaagtatcatcatgatggattactgctagtttgctattgttgcattta

SEQ ID NO: 317143 - DNA, 362 bp, Zea mays
gtggagactacctacggccatggcgaggtatattgcttctggcgctcgcctaccggctctactggaggccttacgcgacgcatccgtcgcggcgacccccgccccggtttctctcctcagctgtgtccggcaccctggatcacctgaagtcgccacctttcgcgcgtcctgctgcccggaaccctgcctactatccatggtatcgatcctgaggacggcataagaggaccctgttcatccatacacacttgaccacgcacccgctttcactcatgttctatcccggatagccagctatggagattggtagctctgatttccctaatgctcggactgcagggacatctgcttcggctaagtct

SEQ ID NO: 317144 - DNA, 414 bp, Zea mays
cccacgcgtccgcggacgcgtgggcaccaacgacaagggccgtctctccaaggaggagatcgagaagatggttcaggacgctgagaagtacaagtctgaggatgaggagcacaagaagaaggtggaggccaagaactcgctggagaactactcctacaacatgcgcaacacgatcaaggacgagaagattgcgtccaagctgccggccgatgacaagaagaagatcgaggacgccatcgacgcggccatcagctggctggacgccaaccagctcgccgaggcggacgagttcgaggacaagatgaaggagctggagagcctctgcaaccccatcatcgccaagatgtaccagggcgcgggtgaagacatgggcggcgctggcggcatggacgaggacgcccctgccggcagcgg

SEQ ID NO: 317145 - DNA, 182 bp, Zea mays
ataaaataaaaaaatatataaaaataaaaaaaaaaaagaaaaaaatatataaaagagaaagggtagataaacatatagggttgatgagttgaatattagatagttataatgagtgagatctgagatttgaaggcatattcgattacacttttttgaaggctatcaacactgggaatagggct

SEQ ID NO: 317146 - DNA, 340 bp, Zea mays
ttcctgcaagtgctgctacggccaccattttcccgcaatgctcacaagctcctatagcttcccttcttcccccgtacctctcaccagcggtgtcttcggtatgtgaaaacccaattcttcaaccctacaggatccaacaggcaatcgcagctggcatcttacctttatcacccttgttcctccaacaatcatcagccctattacagcagttacctttggtgcatttattggcacaaaacatcagggcacatcaactacaacaacttgtgctagcaaaccttgctgcctactctcagcaacagcagtttcttccattcaaccaactagctgcattgaactc

SEQ ID NO: 317147 - DNA, 442 bp, Zea mays
aacatacctttatcacccttgttgtttcaacaatcgccagccctatctttggtgcagtcattggtacaaaccatcagggcacagcagctgcagcaactcgtgctacctgtgatcaaccaagtagctctggcaaacctttctccctactctcagcaacaacaatttcttccattcaaccaactgtctacactgaaccctgctgcttatttgcagcaacaactattaccattcagccagctagctactgcctactctcagcaacaacaacttcttccatttaaccaattggccgcactgaaccccgctgcttatttgcagcagcaaatactactaccatttagccagctagctgcagcaaaccgtgcttccttcttgacacagcaacagttgctgcctttctaccagcagtttgcggctaaccccgcaaccctcttacaactac

SEQ ID NO: 317148 - DNA, 435 bp, Zea mays
  unsure (1)..(435): unsure at all n locations
atccagatcagcaaagcggcagtgcgtagagaggatcgtcgaacagaacagcatgaagatggtcatcgttctcgtcgtgtgcctggctctgtcagctgccagcgcctctgcaatgcagatgccctgcccctgcgcggggctgcagggcttgtacggcgctggcgccggcctgacgacgatgatgggcgccggcgggctgtacccctacgcggagtacctgaggcagccgcagtgcagcccgctggcggcggcgccctactacgccgggtgtgggcagccgagcgccatgttccagccgctccggcaacagtgctgccagcagcagatgaggatgatggacgtgcagtccgtcgcgcagcagctgcagatgatgatgcagctngagcgtgccgctgccgncagcagcagcctgtacgagccagctctgatgcagca

SEQ ID NO: 317149 - DNA, 63 bp, Zea mays
cccacgcgtccgcggacgcgtgggaaataaaaaaatactaatacaaaaataaaaagaatagat

SEQ ID NO: 317150 - DNA, 282 bp, Zea mays
cggacgcgtgggaaaaaaaaaaaaaaaaaaaaaaaaaaaaaaaaaaaaaaaaaaaaaaaaaaaaaaaaaaaaaaaaaaaaaaaaaaaaaaaaaaaaaaaaaaaaaaaaaaaaaaaaaaaaaaaaaaaaaaaaaaaaaaaaaaaaaaaaaaaaaaaaaaggggaaaaaataataaagtagaaaaaaaaaagaatagaaggaagaaaaataaattagtattgaattaaagatattaaaaagaaaattaagagtaaatgattaaaaaaagtgaaggaatgaaaaa

SEQ ID NO: 317151 - DNA, 276 bp, Zea mays
cccgatcgacaccatgagggtgttgctcgttgccctcgctctcctggctctcgctgcgagcgccacctacacgcatacaagcggcggctgcggctgtcagccaccgccgccggttcatataccgacgccggcgcatctgccacctgcggttcacctgccacctacggtgcatctaccaccgccggtccacctgccgccgccggtccacctgccaccgacggtcgcatgtgccgccgccggttcatatgccgacgacaccatgccactaccctactc

SEQ ID NO: 317152 - DNA, 421 bp, Zea mays
acgcgtacgcgttcggaccaacatgcaacatagaaagtggaatccagtagcaacaatagagcatcaatggcgaccaagatattttccctccttatgctccttgctctttctacatgtgttgctaacgcgacaattttccctcaatgctcacaagctcctatagcttcccttcttcccccataccttccatcaattatagcttcaatatgtgaaaacccagctcttcaaccatataggcttcaacaagcaatcgcagcaagcaacatacctttatcgcccttgttgtttcaacaatcgccagccctatctttggtgcagtcattggtacaaaccatcagggcacaacagctgcagcaactcgtgctacctctgatcaaccaagtagctctggcaaacctttcttcctactctcagcaacaac

SEQ ID NO: 317153 - DNA, 436 bp, Zea mays
gggcacaacaactacaacaacttgtgctagcaaaccttgctgcatactctcagcaacatcagtttcttccattcaaccaactggctgcattgaactctgctgcttatttgcaacaacaattaccattcagccagctagttgctgcctacccccagcaatttcttccattcaaccaactagcagcattgaactctgctgcttatttacagcagcaacaactactaccattcagccagctagctgatgtgagccctgctgccttcttgacacaacaacagttgttgccgttctacctgcacgctatgcctaacgctggcaccctcttacaactgcaacaattgctgccattcaaccaacttgctttgacaaactcaacagtgttctaccaacaacccatcattggtggtgccctcttttagattgcttatgagttata

SEQ ID NO: 317154 - DNA, 316 bp, Zea mays
cttttgtgcctgacgaatataagcgttgctggtttggagtgcggattttaaagataaaaaagaggagaaaaaaaaaaaaaaaaaaaaaaaaaaaaaaaaaaaaaaaaaaaaaaaaaaaaaaaaaaaaaaaaaaaaaaaaaaaaaaaaaaagggcggccgctaaaaaggacccaatgtaaccaacgaaacaatagcaacggcaagatgaacatatgaagcaacccaaacaaaataaagtggaccggatttaacagactcactacgagcaaaaacctggatgttacctaagaaaaaaaccctgaaaaaaaaccccttt

SEQ ID NO: 317155 - DNA, 327 bp, Zea mays
cacgtctcccagatctaactccccccgactcacgaatcccagagagcctccatggcgacgcaccgccactgcctcccactcctcctcgtggccgccgccctcgccctcgccgccggccctgctcgcgccgcgcttggccggcggcccgggccggctgtgggccggttggaaccggatccttgcctgaaccaattggaccttccagaacctagccggtgggcccctgggccagccaagcccccaaagcctggccgccaccggctggcggttccgcgggttgtgccccgctaaccacaagtcctgttccggatgaactaccggctttta

SEQ ID NO: 317156 - DNA, 63 bp, Zea mays
aaaaaaaaaaaaaaaaaaaaaaaaaaaaaaaaaaaaaaaaaaaaaaaaaaaaaaaaaaaaaaa

SEQ ID NO: 317157 - DNA, 375 bp, Zea mays
caactagcaacatagaaagcacaatagtgtaccaacaatggcagccaaaatattttgcctccttatagctccttggtctttctgcaagtgctgctacggcgaccattttcccacaatgctcacaagctcctatagcttcccttcttcccccgtacctgtcaccagcggtgtcttctgtatgtgaaaacccaattcttcaaccctataggatccaacaggcaatcgcagctgccatcttacctttatcacccttgttcctccaacaatcatcagccctattacagcagttacctttggcgcatctattggcacaaaacatcagggcacaacaactacaacaactcgtgctagcaaaccttgctgcctactctcagc

SEQ ID NO: 317158 - DNA, 51 bp, Zea mays
tcgcccacgcgttcgcccacgcgtccgcccacgcgtccgcggactcgtggg

SEQ ID NO: 317159 - DNA, 248 bp, Zea mays
aaaaaaaaaaaaaaaaaaaaaaaaaaaaaaaaaaaaaaaaaaaaaaaaaaaaaaaaaaaaaaaaaaaaaaaaaaaaaaaaaaaaaaaaaaaaaaaaaaaaaaaaaaaaaaaaaaaaaagggggggcttttaaaaggaaaaaagtttaaataggaattaatggaaagtaaaaaatttttaatggggttaaaaaaaatcaatttaagggccgttgtttaaaaaagttttaaatggaaaaaacttggggtt

SEQ ID NO: 317160 - DNA, 441 bp, Zea mays
accaattgcaacaacaatccttggcacatctaaccatacaaaccatcgcaacacaacagcaacaacagttcctaccagcactgagccaactagatgtggtgaaccctgtcgcctacttgcaacagcaggtgcttgcatccaacccacttgctctggcaaacgtagctgcataccaacaacaacaacaattgcaacagtttctgccagcgctcagtcaactagccatggtgaaccctgccgcctacctacaacagcaacaactgctttcatctagccctctcgttgtgggtaatgcacctacatacctgcaacaacaattgctgcaacagattgtaccagctctgactcagctagctgtggcaaaccctgctgcctacttgcaacagctgcttccattcaaccaactgactgtgtcgaactctgctgcgtacctacaacagc

SEQ ID NO: 317161 - DNA, 281 bp, Zea mays
aaaaaaaaagaaaaaaaaaaaaaaaaatataaaagaaagaaaaaagattgcaaaaggaacggggtgataaaaactgtgcgtgcgaattcctatgctccattatgatgccccgtttatttgatccatggggcgaagttttacatctacgcgacggggaaaaccgtggcgttgcccaacttattcgcctcgcagatcatgcccgtttcgcaagctggagtaatatctaataggcctcgtccgttggcctttgccaacagtagcgcagtctgattggcgtttgg

SEQ ID NO: 317162 - DNA, 416 bp, Zea mays
gaaaacccagctcttcaaccatataggcttcaacaagcaatcgcagcaagcaacatacctttatcgcccttgttgtgtcaacaatcgccagccctatctttggtgcagtcattggtacaaaccatcagggcacaacagctgcagcaactcgtgctacctgtgatcaaccaagtagctctggcaaacctttctccctactctccgcaacaacaatttcttccattcaaccaactgtctacactgaaccctgctgcttatttgcagcaacaactattaccatttagccagctagctactgcctactctcaacaacaacaacttcttccatttaaccaattggccgcactgaaccccgctgcttatttgcagcagcaaatactactaccatttagccagctagctacagcaagccgtgc

SEQ ID NO: 317163 - DNA, 443 bp, Zea mays
cggatcgagatggcggcgtcggatgttgagtaccgctgcttcgtcggcggcctcgcctgggccacggacgaccactccctccacaacgccttcagcacctacggcgaggtcctcgagtccaagatcatcctcgatcgggagacgcagaggtcccgcggcttcggcttcgtcaccttctccacggaggaggcgatgcggaacgccatcgagggcatgaacggcaaggagctggacggccgcaacatcaccgtcaacgaggcccagtcccgcggcggccgtggaggcggcggcggcggctacggtggtggccgtggaggcggcggctacggcggtggcgggcgccgtgatggcggcggcggctacggcggtggcggcggcggctacggtggcggcggtggctacggtggtggtggtggcggctacggcggtggcaaccgtggcgg

SEQ ID NO: 317164 - DNA, 239 bp, Zea mays
ctgttaagtaattgcaacgttcgtctatgcaaaaaaaaaaaaaacaaaaagagcaaaaaaaaacaaacaaaaaaaaagaaaaaaaagataaaacgggcggccgctattaaagtatccaggttactttccctgcttgcaaagggctgaccttttataaggggccacctaaattaactttactgcccgcgttttaacaactttattgacgggcaaaaccttgattttcccgaccttatttt

SEQ ID NO: 317165 - DNA, 438 bp, Zea mays
ggagaactcgacaccatgaaggtgctgatcgttgcccttgctctcctggcgctcgctgcgagcgccgcctccagtacaagcggcggctgtggctgccagacaccaccgtttcatctaccgcctccgttctatatgccgcctccgttctatctgccgccgcagcagcagccgcagccatggcaataccccactcaaccaccgcagctaagcccgtgccagcagttcggatcctgcggcgtcggcagcgtcggcagcccgttcctgggccagtgcgtcgagttcctgaggcaccagtgcagcccggcggcgacgccctacggctcgccacagtgccaggcgctgcagcagcagtgctgccaccagatcaggcaggtggagccgctgcaccggtaccaggcgacatacggtgtggtcctgcagtcctttctgcagcagcag

SEQ ID NO: 317166 - DNA, 297 bp, Zea mays
cggacgcgtgggacaactactaccattcagccagctagctggtgtgagccctgctaccttcttgacacaaccacagttgttgccgttctaccagcacgctgcgcctaacgctggcaccctcttacaactgcaacaattgctgccattcaaccaacttgctttgacaaacccagcagcattctaccaacaacccatcattggtggtgccctcttttagatttcttatgagttatagttcaataataaagttttttgtctgatgtttgtggcttcccagaaataagaaagtacatttct

SEQ ID NO: 317167 - DNA, 447 bp, Zea mays
atcgttctcgtcgtgtgcctggctctgtcagctgccagcgcctctgcaatgcagatgccctgcccctgcgcggggctgcagggcttgtacggcgctggcgccggcctgacgacgatgatgggcgccggcgggctgtacccctacgcggagtacctgaggcagccgcagtgcagcccgctggcggcggcgccctactacgccgggtgtgggcagccgagcgccatgttccagccgctccggcaacagtgctgccagcagcagatgaggatgatggacgtgcagtccgtcgcgcagcagctgcagatgatgatgcagcttgagcgtgccgctgccgccagcagcagcctgtacgagccagctctgatgcagcagcagcagcagctgctggcagcccaaggtctcaaccccatggccatgatgatggcgcagaacatgccggccatgggt

SEQ ID NO: 317168 - DNA, 443 bp, Zea mays
  unsure (1)..(443): unsure at all n locations
gtgctacctctgatcaaccaagtagctctggcaaacctttctccctactctcagcaacaacaatttcttccattcaaccaactgtctacactgaaccctgctgcttatttgcagcaacaactattaccatttagccagctagctactgcctactctcagcaacaacaacttcttccatttaaccaattggccgcactgaaccccgctgcttatttgcagcagcaaatactactaccatttagccagctagctgcagcaaaccgtgcttccttcttgacacagcaacagttgctgcctttctaccagcagtttgcggctaaccccgcaaccctcttacaactacaacaattgttgccctttgtccaacttgctttgacagacccagcggcctnctaccaacaacacatcattggtggtgccctcttttagattgcttattagtt

SEQ ID NO: 317169 - DNA, 270 bp, Zea mays
gttttccaccttgagcactgatgctcagtgtcaatcgtgttgcatccccgtcacttctctactctgcacattttaagaaccatgtttaccatggctgaaaaggggtgatctctcagtactgaatttgcttctgtaagtggtttctgatagcgtgctagctgttactgcgcctatgggttgttcgtatggtggcccttcgtgccagaggcgcattgaaatgcgtcacactttgtcattactctggaccttaaccagggaagtcttgattgc

SEQ ID NO: 317170 - DNA, 447 bp, Zea mays
ggtgggttggcttctcctccccctccggttcgggttcgggttcgtgaggttctccggggttcgggttcgtgggtgagcggatcgagatggcggcgtcggatgttgagtaccgctgcttcgtcggcggcctcgcctgggccacggtcgaccactcccttcacaacgccttcagcacctacggcgaggtcctcgagtccaagatcatcctcgatcgggagacgcagaggtcccgcggcttcggcttcgtcaccttctccacggaggaggcgatgcggaacgccatctagggcatgaacggcaaggagctggacggccgcaacatcaccgtcaacgaggcccagtcccgcggcggccgtggaggcggcggcggtgggtacagtggtggccgtggaggcggcggctacagcggtggcgggcgccgtgatggcggtggcggctacggcggtg

SEQ ID NO: 317171 - DNA, 374 bp, Zea mays
cgcaagtaaatctatgctagaggagctcgatgcactgctggagtggcggaccctgatcctgcatagaagcagcttatcactgatccgtaggatgatccatcgtcgaccagttggtgcacatccccgatgagaactcacggtgctgtgaccatagccatcatgatcatcgatgaaggcgacgcgaagtgatgcaccgataccgttttactggcatgatcgaatgctggcaatgctgcatatctatccgtgtatcaactgggaggaactgatctgccggtgctttgccgacacctcgggccagaaaagctgtagtcgcacattattctgccctaaatgctgtccatggcgttattgacgtgggtacagtagggctg

SEQ ID NO: 317172 - DNA, 302 bp, Zea mays
tcactcgttcgaaaaaaaaaaaaaaatgagatataaaaaaaaaagaaaaaaaaaaaaaaatgaaaatgagtatgctaaatctgttgtaagatcaccttgtattggacctcatacatattatttagcgcgatctaaatgaacattcagtggctgcatttttaagtgcatccataatgtgaaaactgctggggctaacgaaattaatctgattgcatctcatcaaggtttatcaagctggggtaatatcgaagaggccggtacagattgacgttccgaacattttgacaccctgaatggggaat

SEQ ID NO: 317173 - DNA, 231 bp, Zea mays
tcatgatatctgggaaatctcctctatccatccctctctatctatatctgtaataatgcagtaagacgacacacattatcatgtgtggtatgaccaataatatatgcatgatcataataaagttttggttttaaaaaaaaaaaaaaaaaaaaaaaaaaaaaaaaaaaaaaaaaaaaaaaaaaaaaatataaaaaaaaaaataaaataaaaattatatacaaatgtataaag

SEQ ID NO: 317174 - DNA, 451 bp, Zea mays
tcggaccaactagcaacatagaaagcacaatagtgtaccaacaatggcagccaaaatattttgcttccttatgctccttggtctttctgcaagtgctgctaccgcgaccattttcccgcaatgctcacaagctcctatagcttcccttcttcccccatacctttcatcagcggtgtcttcagtatgtgaaaacccaattcttcaaccctacaggatccaacaggcaatcgcaacaggcatcttacctttatcacccttgttcctgcaacaaccgtcatccctattacagcagttaccctttggtgcatttgttggcacaaaacatcagggcacaacatctaccacaacttgtgctagcaaaccttgctgcctactctcagcaacagcagtttcttccattcaaccaactggctgcattgaactctgctgcttatttgcaacaacaactacc

SEQ ID NO: 317175 - DNA, 441 bp, Zea mays
gcaacatagaaagcacaatagtgtaccaacaatggcagccaaaatattttgcttccttatgctccttggtctttctgcaagtgttgctaccgcaaccattttcccacaatgctcacaagctcctatagcttcccttcttcccccatacctatcaccagcggtgtcttcagtgtgtgaaaacccaattgttcaaccctacaggatccaacaggcaatcgcaacaggcatcttaccattatcacccttgttcctccaacaaccgtcagccctattacaagagttacctttggtccatttggtggcacaaaacatcagggcacaacatctacaacaacttgtgctagcaaaccttgctgcatactctcagcaacatcagtttcttccattcaaccaactggctgcattgaactctgctgcttatttgcaacaacaactaccatt

SEQ ID NO: 317176 - DNA, 450 bp, Zea mays
tcgcggacgcgtgggcggacgcgtgggttcagaaacacaccaagcgaagcgcactatcaacaacctaacaacaatggctaccaagatattatccctccttgcgcttcttgcgctttttgcgagcgcaacaaatgcgtccattattccacaatgctcacttgctcctagttccattattccacagttcctcccaccagttacttcaatggccttcgaacacccagctgtgcaagcctataggctacaacaagcgattgcggcgagcgtcttacaacaaccaattgcccaattgcaacaacaatccttggcacatctaacaatacaaaccatcgcaacgcaacagcaacaacagttcctaccagcactgagccacctagccatggtgaaccctgtcgcctacttgcaacagcagctgcttgcattcaacccacttgctctagcaaacgtagt

SEQ ID NO: 317177 - DNA, 425 bp, Zea mays
atttagaccaactagcaacatagaaagcacaatagtgtaccaacaatggcagccaaaatattttgcctccttatgctccttggtatttctgcaagtgctgctacggcgaccattttcccgcaatgctcacaagctcctatagcttcccttcttcccccgtacctctcaccagcggtgtcttcggtatgtgaaaacccaattcttcaaccctacaggatccaacaggcaatcgcagctggcatcttacctttatcacccttgttcctccaacaatcatcagccctattacagcagttacctttggtgcatttattggcacaaaacatcagggcacaacaactacaacaacttgtgctagcaaaccttgctgcctactctcagcaacagcagtttcttccattcaaccaactagctgcattgaactc

SEQ ID NO: 317178 - DNA, 446 bp, Zea mays
caacaagcaacatagaaagtggaatccagtagcaacaacagagcaacaatggcgaccaagatattttccctccttatgctccttgctctttctgcatgtgttgctaacgcgacaattttccctcaatgctcacaagctcctatagcttcccttcttcccccataccttccatcaatgatagcttcagtatgtgaaaacccagctcttcagccctataggctccaacaagcaatcgcagcaagcaacatacctttatcacccttgttgtttcaacaatcgccagccctatctttggtgcagtcattggtacaaaccatcaaggcacagcagctgcagcaactcgtgctacctgtgatcaaccaagtagctctggcaaacctttctccctactctcagcaacaacaatttcttccattcaaccaactgtctacactgaaccctgctgc

SEQ ID NO: 317179 - DNA, 406 bp, Zea mays
atactaacgaggaggaaattaaaaggaagagaaagaagcgaaagagagttgttgtattagctgtgtctattatggctataattgcaaatcggtatcaacggaggagacctagacacatcatagatgctaacgaagttcaagagagaaatgtcgagtgcagaaaacaaatgctatgtaatatgtaccagggttcaaatgtctattgctatgacagtttgcgcctaactaagagatcttttagtgacttgagtgccatcttacgggaaaagagtggcctacaggataccctaaatgtgtcggtagaagaaaagcttacaatttttctgcttatagtaggtcataacaccaaaaatgaggttgatccgtagcacttaatgggtggtcccttgaaccaatcagtcgacac

SEQ ID NO: 317180 - DNA, 445 bp, Zea mays
gaatctcgagatatgatcagactccgactacagcctggtctcagagagtaaatgagtagagccaaacatattatggatgtggatgccaactggcatatacggatgagacctagacacatcatagatgctaacgaagttcaagagagaaatgtcgagtgcagaaaacaaatgctatgtaatatgtaccagggttcaaatgtctattgctatgacagtttgcgcctaactaagagatcttttagtgacttgagtgccatcttacgggaaaagagtggcctacaggataccctaaatgtgtcggtagaagaaaagcttacaatttttctgcttatagtaggtcataacaccaaaatgaagttgatccgtagcacttatgggtggtcccttgaaccaatcaatcgacacttcatcgaagtgcttatagggattctatctttaagtcatg

SEQ ID NO: 317181 - DNA, 445 bp, Zea mays
gaaaaatatccccaaaccctagctcccgatctcgatggcgaaccctcgcgtcttcttcgacatgaccgtcggcggcgccccggcgggccggatcgtgatggagctgtacgccaacgaggtgcccaagaccgcggagaacttccgcgcgctgtgcacgggcgagaagggcgtgggcaagtccgggaagccgctccactacaagggctccaccttccaccgcgtcatccccgagttcatgtgccagggcggcgacttcacccgcggcaacggcaccggcggcgagtccatctacggcgagaagttccccgacgagaagttcgtgcgcaagcacaccgcccccggtgtgctctccatggccaacgccgggcccaacaccaacggctcccagttcttcatctgcaccgtcgcgaccccttggctcgacggcaagcacgtcgtcttcggc

SEQ ID NO: 317182 - DNA, 372 bp, Zea mays
cccacgcgtccgaaaggtcccagctttccgtgttcttctgcttctttccccgcctcgccttccttccccccgtcaccagatctcgaggcagcggagtccggggacgccgttctttccgttgtgcttcctttgcctcttgctgccggtggccggtgattttcccgaggtctgtttgggcggcaggtagaggctattttcttggcggctggtgggatggatagccacgccgacgggtcgagctccggcgggtccggggatggcggcgcgcagcccaggaggagctccaggaaacccacgtattccaagtttactcagcaggagctttcagcttgcaagccgattcttactccaaaatgggttatttcagtattc

SEQ ID NO: 317183 - DNA, 429 bp, Zea mays
gcgcggacgcgtgggcggacgcgtgggcggacgcgtgggcggacgcgtgggcgcagcaggcatcttacctttatcacccttgttcctccaacaaccgtcagccctattacagcagttacctttggtgcatttgttggcacaaaacatcaaggcacaacaactacaacaacttgtgctaggaaaccttgctgcctactctcagcaacagcagtttcttccattcaaccaactggctgcattgaactctgctgcttatttgcaacaacaactaccattcagtcagctagctgctgcctacccccagcaatttcttccattcaaccaactggcagcattgaactctgctgcttatttacaacagcaacaactaccaccattcagccagctagctgatgtgagccctattgccttgttgacacaagaacagtt

SEQ ID NO: 317184 - DNA, 565 bp, Zea mays
  unsure (1)..(565): unsure at all n locations
ccgggtcgacnccacgccgnntccgcaaggggtgctcaaccttaagaattggtggtcattttgtagtctgttgcttggctgaaggggtcganntatccgtgcatcctnntggtggtngnngtatgatnnctacacannttttatcaaggggcaccagggnnagtattcnntgttgnngaaaatcntnnctcgtcggaagagggataatnnactcgagccttcgcannnacttctctttannttgagaagggggcgaaggcataaagagggggtttcttcttttttgcgttctccacctggagtatttgtagtatgccggacccacagtttgtcagccccgatgccttgagtaagcaagaaattggtcccttgcnctacttgctatctnnnctgatgactngcgatnngggtcttgggatgttgtgcccttgattgccactcataaacccattctgacgaagccattgtgacactcaccccaagacttggtgtatttggaaccggcgcccatggggaagatgtttgagtttccaccaagttttgcagcttggcacccgaggcgaat

SEQ ID NO: 317185 - DNA, 320 bp, Zea mays
cggacgcgtgggtgggtctacgacgacgtaccatttccattctttaggctatttattgttttggggtgggagttttagagctaggatgctgctagcacatagcaacatggtatatgggtcgtctgggaaaaaaaaccatattattatgtaactgtattaaccttggttgtctcttctcgccttctgagatacaagtgtctcttggtcaaagagtgggtggcccgtttctatgcctatgcagctatgctccagtattgtcgcatttgcctaggtaaaataactaattacatggcatgcgaattatgttcaaaaaaaaataa

SEQ ID NO: 317186 - DNA, 311 bp, Zea mays
cccggtcgaccccgcgtccgcccacgcgtgcgcggacgcgtttccgttcgcgtggttggtcatcgattaatgcgagtggtttctcaaaagagatccaacgcatctaaactattggtcttggctgatccgtttgctgatgcttaccctgatatgcatgacaatgtattcatcatgattcacctacttgagttcctcatatctgattacatgcaagtttggctatgctgagaacatattaccacaatacattcttaagaatgctaccatatctattatcaatgcacgcactgatttgctaattctgaacaaca

SEQ ID NO: 317187 - DNA, 213 bp, Zea mays
acgctttatactgtaataataaagttctcattctgatatgtgcaacttctcagtgataaaagatcagagatctatactaaaaatacacaagaaataataaaaaaatagaaaaaaaaaaaaaaaaaaaaagctatagaaaaaagaaaaaaaaaaaaaaagtaaaaaaaaaaaaaaacaaaaaaaaaaaaaagggggggcatcttttaaggatcc

SEQ ID NO: 317188 - DNA, 408 bp, Zea mays
gttggcttctcctccccctccggttcgggttcgggttcgtgaggttctccggggttcgggttcgtgggtgagcggatcgagatggcggcgtcggatgttgagtaccgctgcttcgtcggcggcctcgcctgggccacggacgaccactccctccacaacgccttcagcacctacggcgaggtcctcgagtccaagatcatcctcgatcgggagacgcacaggtcccgctgcttcggcttcgtcaccttctacacggaggaggcgatgcggaacgccatcgagggcatgaacggcaaggagctggacggacgcaacatcaccgtcaacgaggcccagtcccgcggcagccgtggaggcggcggcggtgggtactgcggtggccgtggaggcggcggctacggcggtggc

SEQ ID NO: 317189 - DNA, 297 bp, Zea mays
gaaattaagagaacactgtccgttccatatcatttcgatgaagatcgggtgcttggagttgtccgtcgagcaaaagataacttctgactaacaaaaggaaatgctcgtgacgtatgacccatatcttgttaaagttcagacagagaacctaagtcacaataaacataggaggaaatgaaggtatatatgtttgagctagattttgaaaaaatgaaataataagttgctaaaacagacctgtgctaaaattataaaagataaaaaaaaaagattgaaagaatatgaaaataaaaacaa

SEQ ID NO: 317190 - DNA, 87 bp, Zea mays
agagttatagttcaataataaaggtatcagactgatgtttgaggcttaccagaaatcataaagtccatttctaaaaaaaaacaaaat

SEQ ID NO: 317191 - DNA, 416 bp, Zea mays
gggcgataaaggtatgttgcttgcccttgttgtttcaacaatcgccagccctatctttggtgcagtcattggtacaaaccatcagggcacaacagctgcagcaactcgtgctacctctgatcaaccaagtagctctggcaaacctttctccctactctcagcaacaacaatttcttccattcaaccaactgtctacactgaaccctgctgcttatttgcagcaacaactattaccatttagccagctagctactgcctactctcagcaacaacaacttcttccatttaaccaattggccgcactgaaccccgctgcttatttgcagcagcaaatactactaccatttagccagctagctgcagcataccgtgcttacttcttgacacagcaacagttgctgcctttctaccagcag

SEQ ID NO: 317192 - DNA, 418 bp, Zea mays
agcgtccggcaacatagaaagtggaatccagtagcaacaacagagctcaatggcgaccaagatattttccctccttatgctccttgctctttctgcatgtgttgctaacgcgacaattttccctcaatgctcacaagctcctatagcttcccttcttcccccataccttccatcaatgatagcttcagtatgtgaaaacccagctcttcagccctataggctccaacaagcaatcgcagcaagcaacatacctttatcacccttgttgtttcaacaatcgccagccctatctttggtgcagtcattggtacaaaccatcagggcacagcagctgcagcaactcgtgctacctgtgatcaaccaagtagctctggcaaacctttctccctactctcagcaacaacaatttctttcattc

SEQ ID NO: 317193 - DNA, 191 bp, Zea mays
acggacacaaaatgaacgtagaataagggctgggctttgctagagaaccaagcataaggccgggaagagtacaaaacattgattcatataaatgaaaaacggacgccttattaaaggatccgtgcttacgatcggctacttgcgacttaaaaccttttatatcgagtctcataaactgcaattacttgcat

SEQ ID NO: 317194 - DNA, 354 bp, Zea mays
actgatcgtacaactgataggataactaagccgtaaacgatgcaactgtggctagaactgcagctcgctacaaattgcgctaacaatcgtgctgatcatctcattgattgtcacctagaatgcaccctatgtgacaccaaaccagatactaaatgagactattgctgtaaatatgatcattcaagcgatcatgtcatccacataatgattcaaatgaagcatgactcggacaatgacttcgagatggaggacatcattgatgatatccatgatcacacttatgtactcactaatgcaaggaatggatcactgattgagcggccgcatgagcgtgctcatatggttgctattagt

SEQ ID NO: 317195 - DNA, 110 bp, Zea mays
aaaaaaaaaaaaaaaaaaaaattaaaatttaaaaaaaaaaaaaaaaaaaaaaaaaaaaaaaaaaaataaaaaaaaaaaaaaaaaaaaaataaaaaaaaaaaaaaaaaaag

SEQ ID NO: 317196 - DNA, 396 bp, Zea mays
  unsure (1)..(396): unsure at all n locations
cccacgcgtccgaccacgcgtccggatagctttatttcccttgcccttttccagagcacctccgccgtcggccatgggtcaagcctggggtaatctccaagataggctccaaggtacccgcccctcaactcaatcgtgtggattcccatcttattcgcagcgatcgtacccagtctcgcgaacagtcgaatcggtagagatgaacgacgaatcgattcggtgcaaggcggccgtggaaggagcaccaagtgaggaagatcaccgacaaggtgttcgaccgcctcacggaggacgcccagaagcgcgacaaggaggccctcagattcgaggaggtctacatcgccgtcctctgcgtctacaatgacatcaacaagtacttgccggngccgcaccacg

SEQ ID NO: 317197 - DNA, 359 bp, Zea mays
cccacgcgtccgcccacgcgtccgcctacgcgtccgcttcaaccctacaggatccaacaggcaatcgcagctggcatcttacctttatcacccttgttcctccaacaatcatcagccctattacagcagttacctttggtgcatttattggcacaaaacatcagggcacaacaactacaacaacttgtgctagcaaaccttgctgcctactctcagcaacagcagtttcttccattcaaccaactagctgcattgaactctgcttcttatttgcaacaacaacaactaccattcagccagctacctgttgcctacccccagcaatttcttccattcaaccaactggcagcattgaactc

SEQ ID NO: 317198 - DNA, 433 bp, Zea mays
cccacgcgtccgattgagaccaactagcaacatagaaagcacaatagtgtaccaacaatggcagccaaaatattttgcctccttatgctccttggtctttctgcaagtgctgctacggcgaccattttcccgcaatgctcgcaagctcctatagcttcccttcttcccccgtacctctcaccagcggtgtcttcggtatgtgaaaacccaattcttcaaccctacaggatccaacaggcaatcacagctggcatcttacctttatcacccttgttcctccaacaatcatcagccctattacatcagttacctttggtgcatttattggcacaaaacatcagggcacaacaactacaacaacttgtgctagcaaaccttgctgcctactctcagcaacagcagtttcttccattcaaccaactaactgcattga

SEQ ID NO: 317199 - DNA, 389 bp, Zea mays
acgcgcctacgacgctccttgcattagctttttacatggttctcgggctctacaccttcggcgacatcgacgccgacagagcaccccgcctctaggttgccgatggcgaagagttcgtccgtgtcgatccgcttgtcgagcttgccctcagtgcccggatgctgaaggcccctggaaccctttacctcaacaacaggagggtgattagggtcaacgatggcatgcaacggctacgctgtggacttcagtgccatctcgcttcacaccgagtcgcgtgaaccccatgcgtatacatacccctgcatttacacacagatcgagaaggaagctatttctgaccaggagtctgaagtgacagattctgaaacaaatggcgaactctagctttt

SEQ ID NO: 317200 - DNA, 157 bp, Zea mays
ggtcgaccagctccggctgttcacgggccagttgtctatgttgcgactaccaccattgctcggcaacgtgctgggggtcgcgaaatccctgacgtgccgggcctgaaaatggagcacacctctgcgaccgcagtgtctaagcaagggcaggacaaga

SEQ ID NO: 317201 - DNA, 247 bp, Zea mays
gcggtgccgtacatgcgaagcccaccgaagccggtgccatgtatgcaaaaatctctataccgagaagctgatgccggcatgtcgccgctccatttttcctgatcccggcgccggaagccttccccttcctcttcctgctgagcgccagcgccggtgctctcagcgaacttgccccaccggcccgcccttcccgggccttacctgattccccgtcctccagcgctgggcgctggctgtgctgcagcgt

SEQ ID NO: 317202 - DNA, 190 bp, Zea mays
cggacgcgtgggcggacgctttggcattaaatttgcagtgtttttgcttagctgtacgggcttcccaactctcaacttattccagggccttcaggacatgacgggcatactactgcagacattcatccagagtctccatcaaatgatggaccacgaagcgaggatgctgctgaccactggctattcgcac

SEQ ID NO: 317203 - DNA, 423 bp, Zea mays
cgagtccaagatcatcctcgatcgggagacgcagaggtcccgcggcttcggcttcgtcaccttctccacggaggaggcgatgcggaacgccatcgagggcatgaacggcaaggagctggacggccgcaacatcaccgtcaacgaggcccagtcccgcggcggccgtggaggcggcggcggtgggtacggtggtggccgtggaggcggcggctacggcggtggcgggcgccgtgatggcggcggcggctacggcggtggcggcggctacggtggcggcggcggctacggtggtggtggcggcggctacggcggtggcaaccgtggcggcggctacggcaactccgacgggaactggaggaactgagcggtggggcccgcgcggccaagttatcctgttcgctgccgtgatgtttaccctagtcc

SEQ ID NO: 317204 - DNA, 316 bp, Zea mays
ctcacgcgtccgagaggatctacgcattaagctagatgaggacctacttctacagcagggaagaacacgctggataaatcggacgagctctcggatgcgatggaatcggtggagaactagaaggcgtaaaaggacatctcaggagcgcttgaatggatgtactagaagaacgcatgctaatgggactactatgaagaaaaatgtacagcgtgaccaatcgcttcgaatggattgaactcatctgggtcatgcggaagaccaactccttcgagaagcacgtgtgagactaccagaaggcatgcgacgtgaacagact

SEQ ID NO: 317205 - DNA, 258 bp, Zea mays
ctcgccggctaggacccacccaagtccaccatgcctgtaagcggcagtcagttccttctgttttttttttgttaagcgcgtgcatactatactatcggtcgcgtcgcaccgatttgtatattttccgtttcctaccgaggaatgcttatctataatgaacaccagaggacaagtattagtgctcaaaaaaaaaaaaaatatttaaacataaaagattaaaacaaaaaaataaaaacaagaaagttaaccttattaagg

SEQ ID NO: 317206 - DNA, 384 bp, Zea mays
ggaaaaaacaactcaggcgaagaacgaggacgttcttgagctggaggagcggccagagcagatccggtcggtgctggaggctggcaccagggccaggctcagtgatgaggaacacatgccgtccgtgtctgtgcaggctgaagaccaggcctttcccaaaccgaagttggccaaagtacgcgccaccgtcccggtgtgcgtgttcagcagtgtggttggcggccggcataggattcctgtgtggattcaccctaggagagatgaggggattaaggcggacgagggtccacgaacgcacgtgatgccaatgtgcccacatgacatggacagaaaatgtcactgcggtggaccatgcatgcccaatttaaggagcatcagttagaa

SEQ ID NO: 317207 - DNA, 428 bp, Zea mays
cccacgcgtccgcccacgcgtccgacaaaacatcagggcacaacaactacaacaacttgtgctagcaaaccttgctgcctactctcagcaacagcagtttcttccattcaaccaactaggttcattgaactctgcttcttatttgcaacaacaacaactaccattcagccagctacctgctgcctacccccagcaatttcttccattcaaccaactagcagcattgaactctcctgcttatttacagcagcaacaactactaccattcagccagctagctggtgtgagccctgctaccttcttgacacaaccacagttgttgccgttctaccaacacgttgcgcctaacgctggcaccctcttacaactgcaacaattgctgccattcaaccaacttgctttgacaaacccagcagtgttctaccaac

SEQ ID NO: 317208 - DNA, 428 bp, Zea mays
caacaagctacatagaaagtggaatccactctcaacaatagagcatctatggcgaccaagatattttccctccttatgctccttgctctttctgcatgtgttgctaacgcgacaattttccctcaatgctcacaagctcctatagcttcccttcttcccccataccttccatcaatgatagcttcagtatgtgaaaacccagctcttcaaccctataggctccaacaagcaatcgcagcaagcaacatacctttatcacccttgtttcaacaatcgccagcctatctttggtgcagtcattggtacaaaccatcagggcacagcagctgcagcaactcgtgctacctgtgatcaaccaagtagctctggcaaacctttctccctactctcagcaacaacaatttcttccattcaaccaactgtctaca

SEQ ID NO: 317209 - DNA, 423 bp, Zea mays
ggtgggttggcttctcctccccctccggttcgggttcgggttcgtgaggttctccggggttcggtttcgtgggtgagcggatcgagatggcggcgtcggatgttgagtaccgctgcttcgtcggcggcctcgcctgggccacggacgaccactccctccacaacgccttcagcacctacggcgaggtcctcgagtccaagatcatcctcgatcgggagacgcagaggtcccgcggcttcggcttcgtcaccttctccacggaggaggcgatgcggaacgccatcgagggcatgaacggcaaggagctggacggccgcaacatcaccgtcaacgaggcccagtcccgcggcggccgtggaggcggcggcggtgggtacggtggtggccgtggaagccgcggctacggcgggggcgggcgccgtg

SEQ ID NO: 317210 - DNA, 413 bp, Zea mays
cccaattcttcaaccctacaggatccatcaggcaatcgcagcaggcatcttacctttatcacccttgttcctccaacaaccgtcagccctattacagcagttacctttggtgcatttgttggcacaaaacatcaaggcacaacaactacaacaacttgtgctaggaaaccttgctgcctactctcagcaacagcagtttcttccattcaaccaactggctgcattgaactctgctgcttatttgcaacaacaactaccattcagtcagctagctgctgcctacccccagcaatttcttccattcaaccaactggcagcattgaactctgctgcttatttacaacagcaacaactaccaccattcagccagctagctgatgtgagccctaatgcctttcttgacacagcaacag

SEQ ID NO: 317211 - DNA, 367 bp, Zea mays
aacaatttcttccattcaaccaactgtctacattgaaccgtgctgcttatttgcagcaacaactattaccattcagccagctagctactgcctactctcagcaacaacaacttcttccatttaaccaattggccgcactgaaccccgctgcttatttgcagcagcaaatactactaccatttagccagctagctgcagcaagccgtgcttccttcttgacacagcaacagttgctgcctttctaccagcagtttgcggctaaccccgcaacccttttacaactacaacaattgttgccctttgtccaacttgctttgacaaacccagcagcctcctaccaacaacacatcattggtggtgccctctt

SEQ ID NO: 317212 - DNA, 246 bp, Zea mays
cttctcgctgtcgcagaacaagagcgttgactgggagtgctggccgctggaggactccgtgccgccggctcctattgtcgtcccctcctcctcctcatcatcatgaaagatctatgaatccatagtacacacatacggtacagaagtgagagaaacaatgttcatggaacaaacgatgaacagcctgttttggtcgtcgtaatctataaaaaaaaaaaaaattaaaataatataaaatagaaaata

SEQ ID NO: 317213 - DNA, 144 bp, Zea mays
aaaaaaaaaaaaaaaaaaaaataaaaataaaaaaaaaaaaaaaaaaaaaaaaaagaaaaaaaaaaaaaaaaaaaaaaaaaaaaaaaaaaaaaaaaaaaaaaaaaaaaaaaaaaaaaaaaaaaaaaaattaaaatatttaaaaaa

SEQ ID NO: 317214 - DNA, 416 bp, Zea mays
cggacgcgtgggctagcaacatagaaagcacaatagtgtaccaacaatggtagccaaaatattttgcctccttatgctccttggtctttctgcaagtgctgctacgacgaccattttcccgcaatgctcacaagctcctatagcttctcttcttcccccatacctctcaccagcgttgtcttcagtatgtgaaaacccaattcttcaaccctacaggatccaacaggcaatcacagcaggcatcttacctttatcacccttgttcctccaacaatcatcagccctattacatcaattacctttggtgcatttattggcacaaaacatcagggcacaacaactacaacaactcgtgctagcaaaccttgctgcctacgctcagcaacagcagttacctttggtgcaattgttggcac

SEQ ID NO: 317215 - DNA, 454 bp, Zea mays
gcgtacgcccacgcgtacgatcacaagctagcgagtgacccggcgcggaataagagagagacgacgtattatgatatagtagttttatagctatctatcctaatcttattttatggtactctgcttatatttttagtttttttttttttatctggttttttttatttttctgttttttttttatatttctctcatttttgttttattttttttttttacttttttttttcttttttatatatttttttcttatattattttttattttttcttctatttatttttttttttattttatatttatttttttattatttttatattatttatattttatttattttctttttttatttttttttttatatttatttaatttttatttttatttttatttttattttattttattttatttttttttttattttttttttctttacttattttttat

SEQ ID NO: 317216 - DNA, 322 bp, Zea mays
cccacgcgtccggcaacatagaaagtggaatccagtagcaacaacagagcaacaatggcgaccaagatattttccctccttatgctccttgctctttctgcatgtgttgctaacgcgacaattttccctcaatgctcacaagctcctatagcttcccttcttcccccataccttccatcaatgatagcttcagtatgtgaaaacccagctcttcagccctataggctccaacaagcaatcgcagcaagcaacatacctttatcacccttgttgattcaacaatcgccagccctatctttggtgcagtcattgttacaaacca

SEQ ID NO: 317217 - DNA, 163 bp, Zea mays
cggacgcgtgggcggacgcgttgacggacgcgtgggcggacacgtgaagttcgtgaggtttttcgaactaatgtgtttatttacaacagatacaaaagttacttaatctactattaatgttttaatcatttttcattttttttctacatcattaataattgct

SEQ ID NO: 317218 - DNA, 417 bp, Zea mays
attcaaccatataggcttcaacaagcaatcgcagcaagcaacatacctttatcgcccttgttgtttcaacaatcgccagccctatctttggtgcagtcattggtacaaaccatcagggcacaacagctgcagcaactcgtgctacctctgatcaaccaagtagctctggcaaacctttctccctactctcagcaacaacaatttctttcattcaaccaactgtctacactgaaccctgctgcttatttgcagcaacaactattaccatttagccagctagctactgcctactcttagcatcaacaactttttccatttaaccaattgtccgtactgaaccccgctgcttatttgcagcagcaaattctactaccatttaaccagcttgctgcagcaaaccgtgctttctttttgaca

SEQ ID NO: 317219 - DNA, 436 bp, Zea mays
gaaagaggcaagatgaaggctctgcctgataacaaggatggattcatcagtcacatgttagtaacgggcgactgggtcatcatagtgctgaagaactctaagtgatctggtaattagtcatcttgcaacatttattgcctttctttggtttcacggaattctatcctttgttgaaaaaaactgttatttatgtatggtttgactgatatgttggttatttgtaattgattttattgattatggtattggctttgtattctattttttatgagtttgttttgttaatagtattttttattttattttatttttgtattgttttatttttatttttattttatgattttctcttttattttattttttatttttttttatatttttttttattttatattttatttttgtttattatttttatttttatttttttttt

SEQ ID NO: 317220 - DNA, 229 bp, Zea mays
aatttggtgatgagaataatacgtggtgttctgattatgtgggttattaaaaaaaaaagaaaaaaaaaaaaaaaaaaaaaaaaaaataaaaaaaaaaaaaaaaaaaataaaaaagaaataaatatacatataaaaaaatctaaaatttaaaaatttagatattattaatatatataaattatataaagatataaattatattatttattactatttaaatatattatat

SEQ ID NO: 317221 - DNA, 379 bp, Zea mays
cccacgcgtccggcaaaacccttcagaaacccatcggagaagaggcggagggcgatcggagagcgggatcatggcggggccagttgcggcggtgacggaggcgtgggacaagctcaccgtgttcctgtactcccagctctacgacgagaggaactgggccaaaaacaagaagttggcgaaggctcttggtgtgttcgctggatccatcctgttcatgcgcacctgtggtgatatggtggccatctagggagccttcaaaagttgcctaccgtgaactagagacacccccttttttgttggcattggatgtgttcttacttcggtcagggacagttgaagcgtatctagactctagagactgtttgtcttgctagaattt

SEQ ID NO: 317222 - DNA, 440 bp, Zea mays
caacaagcaacatagaaagtggaatccagtagcaacaatagagcaacaatggcgaccaagatattttccctccttatgctccttgctctttctgcatgtgttgctaacgcgacaattttccctcaatgctcacaagctcctatagcttcccttcttcccccataccttccatcaatgatagcttcagtatgtgaaaacccagctcttcaaccctataggctccaacaagcaatcgcagcaagcaacatacctttatcacccttgtttcaacaatcgccagccctatctttggtgcagtcattggtacaaaccatcagggcacagcagctgcagcaactcgtgctacctgtgatcaaccaagtagctctggcaaacctttcttcctactcttagcaacaacaatttcttccattcaaccaactgtctacattgaaccgtgc

SEQ ID NO: 317223 - DNA, 169 bp, Zea mays
cgtcgacagcacataaagtttatccttagcaacaattagcacatggcgaccaggatatttcctcttatctcttgtcttctgcatgtgtgctaacgctacaattttcttaagctcacaagctctaagcttcttttttcccatacctttcatcaatgatagcttcagtatg

SEQ ID NO: 317224 - DNA, 74 bp, Zea mays
tcggatgaattctcctaccccttcggttcagattcggatgcgagaggttctacggctttagagttcctgattaa

SEQ ID NO: 317225 - DNA, 440 bp, Zea mays
cagacccgtgggcacaagtcatatgcactaaatctcatttgagcgtgcaagctccttcgcctcgaaccctctcgcgcttggcttgctttcactctccagggccccactcccaccttgccgccgcattcatggcgatcacagctccaactttttacattctctgttagcgccttgtcggcctgtacttttttattctttacgtttttttttttttatttgttatatttatttttttttatatttttatttttctatttttatttttgttttttttaaatttaatttttattatttttatttattttttctcttttttttttttttttttttttctttattttttttttctttattttattttttttatttttcattttttattttgttatttattatatttattttttattttctttttttttttcttattttttatttta

SEQ ID NO: 317226 - DNA, 144 bp, Zea mays
aaaaaaaaaaaaacaaaaaaaaaaaaaaaaaaaaaaaaaaaaaaaaaacaaacaaacagggacattttttccaaataacacaagcgtacgcacacatacatgcaaataaatagcccttctatcacaacacaaaaaactaacaaa

SEQ ID NO: 317227 - DNA, 154 bp, Zea mays
agcatcctacgaattcaaggatacagacagcatgcagcacccatgtccaaggtcttcacccttgactcggtcaccaagcacaagtgcaagcaggatagctggctcatcatcggcagcaaggagtatgatgtgacgcagacatgggtataccact

SEQ ID NO: 317228 - DNA, 423 bp, Zea mays
cttgctccatacctctcaccagcggtgtcttcaatgtgtgaaaacccaattgttcaacgcctacaggatccaacaggcaatcgcaacaggcattttaccattatcacccttgttcctccaacaaccgtcagccctattacagcagttacctttggtccatttggtggcacaaaacatcaggtcacaacaactacaacaacttgtgctagcaaaccttgctgcatactctcagcaacatcagtttcttccattcaaccaactggctgcattgaactctgctgcttatttgcaacaacaattaccattcagccagctagttgctgcctacccacagcaatttcttccattcaaccaactagcagcattgaactctgctgcttatttacagcagcatcatcttctaccatttattcaggttgctga

SEQ ID NO: 317229 - DNA, 166 bp, Zea mays
cggcgcgtaggcagacgcgtctacggtacgcatgggttttagcatgtgagcggatcatgtagaggtatctacgaccatcaacatgtgcattacaggtgctacctgtggtgtatttatatgcacataccattacgggacaaccgctatactaacatgcgcctgtaaa

SEQ ID NO: 317230 - DNA, 273 bp, Zea mays
aacacacgtagcaacagaagatgcacggcgagatgcggaacgactagctttaatgacacatcctacggctgatcctgctaagaaacgcgatgaggagaaagctgccaaggagcaaacgcagtcgtaagcacggaattatctgcaatatcaccgacgatgcgtccactaaagcatgatcagagttagttgtatatcaatagctaatgcatcatatatcttgttataaacctggatcctaatctgtattgccatgacatatgcattgacagtatt

SEQ ID NO: 317231 - DNA, 388 bp, Zea mays
aaacccaattcttcaaccctataggatccaacaggcaatcgcagctggcatcttacctttatcacccttgttcctccaacaatcatcagccctattacagcagttacctttggtgcatttattggcacaaaacatcagggcacaacaactacaacaacttgtgctagcaaaccttgctgcctactctcagcaacagcagtttcttccattcaaccaactagctgcattgaactctgctgcttatttgcaacaacaactaccattcagccagctagctgctgcctactcccaacaatttcttccattcaaccaactggcattattgaactcttctgcttatttacagcatcaacaactacttccattcagccagctagctggtgtgagc

SEQ ID NO: 317232 - DNA, 237 bp, Zea mays
acgcggacgcgtgggcttctatcagtaccatcaatcatcattcatcttagtagtataggcaccaaatcaaatctgcatcatcaattatctaactccaaaaaccatgaagctggtgcttgtggttcttgctttcattgctttagtatcaagtgtttattgtacacagacaggccgttgtctctgtggtcaacaacaatatcttgagcagtaacattttttatatcttacatctattcc

SEQ ID NO: 317233 - DNA, 444 bp, Zea mays
cccacgcgtccgcccacgcgtccgcggacgcgtgggcaactagcaacatagaaagcacaatagtgtaccaacaatggtagccaaaatattttgcctccttatgctccttggtctttctgcaagtgctgctacgacgaccattttcccgcaatgctcacaagctcctatagcttctcttcttcccccatacctctcaccagcgttgtcttcagtatgtgaaaacccaattcttcaaccctacaggatccaacaggcaatcacagcaggcatcttacctttatcacccttgttccttcaacaatcatcagccctattacatcaattacctttggtgcatttattggcacaaaacatcaaggcacaacaactacaacaactcgtgctagcaaaccttgctgcctacgctcagcaacagcagttacctttggtgcaattgttggcaca

SEQ ID NO: 317234 - DNA, 422 bp, Zea mays
ggtgagaggtatgggggaagaagggaagctataggagcttgtgagcattgtgggaaaacccaattgttcaaccctacaggatccaacaggcaatcgcaacaggcatcttaccattatcacccttgttcctccaacaaccgtcagccctattacaagagttacctttggtccatttggtggcacaaaacatcagggcacaacaactacaacaacttgtgctagcaaaccttgctgcatactctcagcaacatcagtttcttccattcaaccaactggctgcattgaactctgctgcttatttgcaacaacaactaccattcagccagctagctgctgcctacccccagcaatttcttccatttaaccaactagcatcattgaactctgctgcttatttacagcagcaacaactactaccattc

SEQ ID NO: 317235 - DNA, 382 bp, Zea mays
ctagcaacatagaaagcacaatagtgtaccaacaatggcagccaaaatattttgcctccttatgctccttggtctttctgcaagtgctgctaccgcgaccattttcccgcaatgctcacaagctcctatagcttcccttcttcccccgtacctctcaccagcggtgtcttcggtatgtgaaaacccaattcttcaaccctataggatccaacaggcaatcgcagctggcatcttacctttatcacccttgttccttcaacaatcatcagccctattacagcagttacctttggtgcatttattggcacaaaacatcaaggcacaacaactacaacaacttgtcctagcaaaccttgctgcctactcttacaacagcagtttc

SEQ ID NO: 317236 - DNA, 471 bp, Zea mays
cggacgcgtgggttattattgaattacatgtaattagcaatctaaaagaggtcaccatgaacgatatgtcagtggaaggaggctactgagtttgtaacatcatgacgtacaatagggctacaattgaattagcattatgaaggtttcttcttttcgatcatttatctggtgttactgaataatttctttatatatctaaatttgttttttcttttttttttttttcttattttttatgagacttttttcttttttgtttatatattatttttttttttattttttttttatttttttttatttttatttattttattttatttttttatttttatattttttatttttttattattttttttaatattttttattttttatttttttatttgttatattttatttgtttatattattttatatattttatttattattagtttattttttattttattttattattttaat

SEQ ID NO: 317237 - DNA, 122 bp, Zea mays
cggacgcgttggggctaccgttttcgttttacgccaggtgccgaggcctctaggtctggtttcctgctacgatccattagccagcatctgcaggtggacactattatgcttgacgtgaatgc

SEQ ID NO: 317238 - DNA, 445 bp, Zea mays
aaagtggaatccagtagcaacaatagagcaacaatggcgaccaagatattttccctccttatgctccttgctctttctgcatgtgttgctaacgcgacaattttccctcaatgctcacaagctcctatagcttcccttcttcccccataccttccatcaatgatagcttcagtatgtgaaaacccagctcttcaaccctataggctccaacaagcaatcgcagcaagcaacatacctttatcacccttgtttcaacaatcgccagccctatctttggtgcagtcattggtacaaaccatcagggcacagcagctgcagcaactcgtgctacctgtgatcaaccaagtagctctggcaaacctttctccctactctcagcaacaacaatttcttccattcaaccaactgtctacattgaaccgtgctgcttatttgcagcaacaac

SEQ ID NO: 317239 - DNA, 56 bp, Zea mays
aacgactccagggttcatatgtagattttgcaccactggttagcttacaggtagga

SEQ ID NO: 317240 - DNA, 105 bp, Zea mays
agtcaggcatcggcgtagtcaccaaggtcggagtgtggggtggagagggagggtcggcgcatgagatctggacgacagaaccttcgaggcgtctgcagagcctga

SEQ ID NO: 317241 - DNA, 294 bp, Zea mays
acgccaccgtcgtcgtcaccaaggtcggagtgtggggtggagagggagggtcgacgcacgacatcgcgacgactgagccgtcgaggcgtctgcaaagactgaccgttcgcgccggctttaacgcagactgcatggagtacaactacagtgcctacacatgttgtcaaacccgcaaagatcaacttatcaagcagacttaccggcaacaggctgaagcttcatctaggcaacgctaaatgcatggcggtagttcttggtactgacagctacttatgaggtactgatactcttacc

SEQ ID NO: 317242 - DNA, 97 bp, Zea mays
cccacgcgttcgctgaggtggagtcgtctgactaccaccgtcagcgcctggcggaggggctggcgcgcccatgtgctcgcgctggttcatgctcatt

SEQ ID NO: 317243 - DNA, 198 bp, Zea mays
cccacgcgtccgacttggaggaagctggtctagatcctgttgccttagatctgacatgctctggcatagaccatactgatgcacacagcctagctacttatgctgattacttctcgcctttgattgattaccttgacagacttccagatgttgatatggtctttttatttgtccttttttttttatgttttcgtgttt

SEQ ID NO: 317244 - DNA, 447 bp, Zea mays
cggacgcgtgggcggacgcgtgggttcagaaacacaccaagcgaagcgcactagcaacgacctaacaacaatggctaccaagatattagccctccttgcgcttcttgccctttttgtgagcgcaacaaatgcgttcattattccacaatgctcacttgctcctagtgccattattccacagttcctcccaccagttacttcaatgggcttcgaacacctagctgtgcaagccaacatgcaacaacaagcgcttgcggcgagcgtcttacaacaaccaattgcccaattgcaacaacaatccttgccacatctaacaatacaagccatcacaacgcaacagcaacaacagttcctaccagcactgagccacctagccatggtgaaccctgccgtctacttgcaagagcagctgcttgcatccaacccacttgctctggcgaacgtagt

SEQ ID NO: 317245 - DNA, 148 bp, Zea mays
cccacgcgtccgcagtcacgtctcccagatctaactgccccccgactcacgaatcccaaagcctgcatggcgacgcaccgccactgcctcccactcctcctcctcgtggccgtcgccctcgccgccgtccctgctcgcgcggctctgg

SEQ ID NO: 317246 - DNA, 257 bp, Zea mays
tcgtggaaacatgagattgatacatagagaacacttacagtaatgacttagatatagagactaaaatttgtagagacttttgaaattgctctacaaaaaaaaaactatgctcaaaagaagccaaaattttctttcagttattttctaaaaaaatatttatttttgtatttacaaagatttttattttaacatgaacctaagagattaatataacaagttatgatgttgatataacccatctcgatctgatagaatat

SEQ ID NO: 317247 - DNA, 452 bp, Zea mays
  unsure (1)..(452): unsure at all n locations
gaccaactagcaacatagaaagcacaatagtgtaccaacaatggcagccaaaatattttgcttccttatgctccttggtctttctgcaagtgttgctaccgcaaccattttcccacaatgctcacaagctcctatagcttcccttcttcccccatacctctcaccagcggtgtcttcaatgtgtgaaaacccaattgttcaaccctacaggatccaacaggcaatcgcaacaggcatcttaccattatcacccttgttcctccaacaaccgtcagccctattacagcagttacctntggtccattttgtggcacaaaacatcagggcacaacaactacaacaacttgtgctagcaaaccttgctgcatactctcagcaacatcaggttcttccattcaaccaactggcttcattgaactctgctgcttatttgcaaccactattaccattta

SEQ ID NO: 317248 - DNA, 420 bp, Zea mays
gcgtccacgcgtccgaaggagggcatcccaccggaccagcagcgtttgatcttcgctggcaagcagctggaggatggccgcacccttgcggattacaacatccagaaggagagcaccctccacctggtgctccgtctcaggggtggtatgcagatctttgtgaagacactcactggcaagacaatcacccttgaggtggagtcttcggataccattgacaatgtcaaggccaagatccaggacaaggagggcatcccacccgaccagcagcgcctcatcttcgccggcaagcagctggaggatggccgcaccctggcggattacaacatccagaatgagagcactcttcaccttgtgcttcgtcttaaggggtggcatgcatatttttgtgaagactttgactggcaagaccattacctt

SEQ ID NO: 317249 - DNA, 303 bp, Zea mays
tcttcaactagcaacatagaaagcacaatagtgtaccaacaatggtagccaaaatattttgcctccttatgctccttggtctttctgcaagtgctgctacgacgaccattttcccgcattgctcacaagctcctatagcttctcttctttccccatacctttcaccagcgttgtcttcagtatgtgaaaacccaattcttcaaccctacaggatccaatatgcaatcacagcaggcatcttaattttatcacccttgttttttcaacaatcattagtgctaattacataattacctttggtgc

SEQ ID NO: 317250 - DNA, 452 bp, Zea mays
gccgtggtgaaccctgtcacctacttgcaacagcagctgcttgcatccaacccacttgctctggcgaacgtagctgcataccagcaacaacaacagctgcaacagtttatgccagtgctcagtcaactagccatggtgaaccctgccgtctacctacaactactttcatctagcccgctcgcggtgggcaatgcacctacgtacctacaacaacagttgctgcaacaaattgtaccagctctgactcagctagctgtggcaaaccctgctgcctacttacaacagttgcttccattcaaccaactggctgtgtcaaactctgctgcgtacctacaacagcgacaacagttacttaatccattggcagtggctaacccattggtcgctaccttcctgcagcagcaacaacaattgctgccatacaaccagttctctttgatgaaccctgcctt

SEQ ID NO: 317251 - DNA, 206 bp, Zea mays
tcgtcaacggcaacctcagtcacgcaccactgatcaactaagcagcaggtaaggcaaggcaaggtaagtgacgagacaaagattgtgcaggaggagctgccgcaggcatggtggtttgacagttgataaactcgctaggccgtctccatgtctgaacagtatgctcttagagctagatgacaagaccaagcaaatgctgaagctga

SEQ ID NO: 317252 - DNA, 62 bp, Zea mays
gcggcggccaagcgatcactgctaccgataagaccggagatggacgcacagcgaaggacagg

SEQ ID NO: 317253 - DNA, 205 bp, Zea mays
gaaaaactagaacgagagcgccaggacaaagaaaggaagaaaaagagaacaaacatagaggagaactgagagaataggacgaagacaagacaaaggagcagaaaagccagagaggaaacagaaacccaaggggaagggggacacgacataactgaacgacggtaaaggagaaaactagcaagcgaggtagctagacagacggctc

SEQ ID NO: 317254 - DNA, 428 bp, Zea mays
gtggatctcaagaacaatacacccttttgattttagatcctggtcatagaactgcagatctagaaaggtccctaagaagcaaaaatggatggcagcgtctggtgaagagaggtgtccacacgctcaggaagccacagtatcagttatgttatgtggatcctggaattgctagttcagaagagatggagcaactgaagactattgatagtatgcttgtcaggttttaggttcctgaaaacaggatgaggattatatgtgttttgcacacagggcacttccctggttgaagaaacatgaacatctaatccattgtcgaacggtgcgctgtacgaatgactcatcatggatgggcctgcagaaagatctttgacgcttgtctaactgaatctgttttcatactggatttactgttttttttaggtcctttt

SEQ ID NO: 317255 - DNA, 446 bp, Zea mays
gccgcggtccgtccggattcccggtcgcccacgcgtcgggaccgtgggtgaaactatagctggattacatggagaggcggcaatgagaccgtctggccccgccggagggagacggagacggagacgagacggatggcgcatgcatcggtgtggtggatcggcgcggcatgtgtgtgtgggctgtacatatacatctgtacatgattgtgcagtgcagggttttgtccttttttgatttgtattatctaaatgactattttttttatggcttgattgtctttttgttctgtttttgttggtttttatatatttttcttttttttttattttcttattctttatttttttttctgttttatttttgtgtatatttttataattatattttttgttattttttttcttttttttttttttattttttatttttttttattttttttttt

SEQ ID NO: 317256 - DNA, 280 bp, Zea mays
atctaatgccaataagtcatagaacgaggaccgttaaactgatgtgaagattgattggcccgaaaatgccatttaaaaagccaaaatgctcagatggaaggcgcagttcatctatgtcgatatggaaaacgtgagtactagttacgctacaggtatctaggatgtcactgaagcttatgcggcagctatgcgaagtgctttcgtcgacaagcaggactacctgctaaatcagaagtctttacaggagaaggtcaagtgcatatacatacagctcaacttc

SEQ ID NO: 317257 - DNA, 218 bp, Zea mays
gaatttctgatgatgtcttatgtctgtactctgaatcaactatgtatgagatctcatctcctttctcctactgaatgaatgaatcattattggctttgctttgcttcaaaaaaaaaaaaaaaaaaaaaaaaaaaaaaaaaaaaaaaaaaaaaaaaaaaaaaaaaaaaaaaaaaaagaaaaatacaacactaataaaatacgacataaaaacaacaaca

SEQ ID NO: 317258 - DNA, 432 bp, Zea mays
caacaagcaacatagaaagtggaatccagtagcaacaatagagcaacaatggcgaccaagatattttccctccttatgctccttgctctttctgcatgtgttgctaacgcgacaattttccctcaatgctcacaagctcctatagcttcccttcttcccccataccttccatcaatgatagcttcagtatgtgaaaacccagctcttcaaccctataggctccaacaagcaatcgcagcaagcaacatacctttatcacccttgtttcaacaatcgccagccctatctttggtgcagtcattggtacaaaccatcagggcacagcagctgcagcaactcgtgctacctgtgatcaaccaagtagctctggcaaacctttctccctactctcagcaacaacaatttcttccattcaaccaactgtctacattg

SEQ ID NO: 317259 - DNA, 249 bp, Zea mays
gaaatcgcgctgcaggacgctagcggccgtacactaccaacaacgacccctacaccaaccaaacccagcgagcgaactggaccccgcgagctattggcagcaccctatactagcaccactgagccagctagctacagcaggcccagcgaacccagggacacagcaacagcggccgcgcgagctaccagcaacaggcagcgaacctcgcagaccctctcacaactgcaacaatgggcgaccatagaccaa

SEQ ID NO: 317260 - DNA, 68 bp, Zea mays
tgatgcgatcgggcacgcatctataattagggccataaatactggagcaaggtagtagcgtgatatct

SEQ ID NO: 317261 - DNA, 324 bp, Zea mays
tctggagattttaattcaactcctggaagtacgtcacatgggcttcttgcaaggggcaaagttgatcatttgcatccagatctagcaatagatcctcttggaattttgcgcccactaagcatgctgacacaccagcttcctctggtcagtgcatactcatcattcgtgagtatggctggtgttggctatgatttggatcaccagcgaaggaggatggactcctgggacaaatgagccattgtttacaaattgcacaagggattttaccggtaccctggattacatattttacacagcggattcattgactgtagagttattatt

SEQ ID NO: 317262 - DNA, 398 bp, Zea mays
ataaacacaccaagcgaagcacattatcaacaacctaacaacaatggctaccaagatattatccctccttgcgcttcttgcgctttttgcgagcgcaacaaatgcgttcattattccacaatgctcacttgctccaagttccattattacacagttcctcccaccagttacttcaatgggcttcgaacacccagctgtgcaagcctataggctacaacaagcaattgcggcgagcgtcttacaacaaccaatgtaccagttgcaacaacaatccttggcacatctaacaatacaaaccatcgcaacgcaacagcaacaacaattcctaccagcactgaaccacctagtcatggtgaaccctgccgactattgcaacagcagttgcttgcatcaaaccc

SEQ ID NO: 317263 - DNA, 248 bp, Zea mays
  unsure (1)..(248): unsure at all n locations
caggaacagctgagaaggaggaacatggtggggtaagaacgagagtgcaaaccgagaagctgcacntgcacgaccaagcaacacatcgcagcatgactcatgaggacacctgagtaagatgacaaacgagcgtcactcggatagaaggcgacggaacacataagacaaacacgggacggatgcgtatcctaaaaaaccgattgtacgagcgaggcaggaaatgacagatgcgcagaatatgaggaaca

SEQ ID NO: 317264 - DNA, 283 bp, Zea mays
ggccggaagcggggcgaccagcagcggacggcagcacgaaaggaaaccaaagccaaacaacgaaaaaagagaggaacaaagcgggacaaaaggaacaggaaacccaaccggaaaaggggccgcaaagaaacaccaaagccaggcaaagagaagaagcgacgaaaaaagaagaagaagaaacaacacaaagaggccacggagccaaaaccaaaaagggaggaagccagaaacaacaggaccaagaaccaaaacaggcagggcaccagaaacccaaggaggaagg

SEQ ID NO: 317265 - DNA, 329 bp, Zea mays
tcgtccacgcgtccgatttataccaactagcatcatagaaagcacaatagtgtaccaacaatggcagccaaaatattttgcctccttatgctccttggtatttctgcaagtgctgctactgcgaccattttcccgcaatgctcacaagctcctatagcttcccttcttcccccgtacctctcaccagcggtgtcttcggtatgtgaaaacccaattcttttaccctacaggatccaacaggcaatctcagctggcatcttacctttatcacccttgttactccaacaatcatcatccctattacagcagttacctttgttgcatttatt

SEQ ID NO: 317266 - DNA, 310 bp, Zea mays
  unsure (1)..(310): unsure at all n locations
cacacgccgtcctagtagcctncctggacaatgatgttaagttcggcaaggttttcctttctctttttttattctactgcgtggtctatgtgtatattgccaaaggcatgcgtgagccatgcgcccggtgctggggcgcagagaccatctgatggtggaaacaccggaaataagagcgtgccgctgtgtgttttctttgaaggaataaaaatggtgttcgtgttgtgcattgcttaaaataattataaattatttatttttattttttttattaattatttcattattttttatttaattttttatcttt

SEQ ID NO: 317267 - DNA, 447 bp, Zea mays
tctatcagtaccatcaatcatcattcatcttagtagtataggcaccaaatcaagtctgcggcatcaattatctaactccaaaaaccatgaagctggtgcttgtggctcttgctttcattgctctagtatcaagtgtttcttgtacacagacaggcggctgcagctgtggtcaacaacaaagccatgagcatcaacatcatgcacaacaacatcatccacaaaaacaacaacatcaaccaccaccacatcatcaccagcagcagcaacaccaacaacaacaagttcacatgcaaccacaaaaacatcaccaacaacaagaagttcatgttcaacaacaacaacatcaaccgcaggaccaccaccaccaacaacaacaacagcaccaacaacaacttcaatgtgaaggccaacaacagcatcaccaacaatcacagggccatgtgcaac

SEQ ID NO: 317268 - DNA, 163 bp, Zea mays
ctttctgcttcgacctctagcgaatacatctgggggctagggctccagtgcgcctgtacaaccggacacgaggctaggctgggcatggagggaatcgtgacgggccgaaagaagtccctgccagagacagctaacggggctgtcgacatcgggaagcgctcca

SEQ ID NO: 317269 - DNA, 159 bp, Zea mays
tcgatccttctatcagtaccatcaatcatcattcatcttattagtaaatgcaccaaatcaaatgtacggggtcaattatctaactgcaaaaaccatgaagctggtgcatgtggttcttgcttatattgctttagaatcaagtgtatctagtacacatac

SEQ ID NO: 317270 - DNA, 425 bp, Zea mays
ccacgcgtccgttaaagtaaaagtccatttgtaggtgtttatttgtaggtgttatgtatataaaggggctaaccgctaacgtgttatagataattatcttagccatcattgtctcttttcctaaggttacagacgtctaagacagtcatcgaatcatcaaagtatgagaccctcactacagataagctttttcagcgagttcaagttcatagaaattaatcactagacttggaaaccctagtgcatccaccataagccttgtcttaagaggtgatatctctttagcttggcacttgttgtcagtcgtttttgcagcttcacaacaatgatatgaatcggcggtgtggcacgaacaaggacgcctgctttcactatacagacctcgactatttcatcgccaactatttcaagatgaagggcaagtc

SEQ ID NO: 317271 - DNA, 376 bp, Zea mays
  unsure (1)..(376): unsure at all n locations
gaagatggtcatcgttctcgtcgtgtgcctggctctgtcagctgccagcgcctctgcaatgcagatgccctgcccctgcgcggggctgcagggcttgtacggcgctggcgccggcctgacgacgatgatgggcgccggcgggctgtacccctacgcggagtacctgaggcagccgcagtgcagcccgctggcggcggcgccctactacgccgggtgtgggcagccgagcgccatgttccagccgcttccgcaacagtgctgccagcagcagatgaggatgatggacgtgcagtccgtcgcgcagcagctgcagatgatgatgcagcttgagcgtgccgctgccgncagcagcagcctgtacgagccagctctgatg

SEQ ID NO: 317272 - DNA, 447 bp, Zea mays
gaagcacattagcaacaacctaacaacaatggctaccaagatattatccctccttgcgcttcttgcgctttttgcgagcgcaacaaatgcgttcattattccacaatgctcacttgctccaagttccattattacacagttcctcccaccagttacttcaatgggcttcgaacacccagctgtgcaagcctataggctacaacaagcaattgcggcgagcgtcttacaacaaccaatttcccagttgcaacaacaatccttggcacatctaacaatacaaaccatcgcaacgcaacagcaacaacaattcctaccagcactgagccacctagccatggtgaaccctgccgcctacttgcaacagcagttgcttgcatcaaacccacttgctctggcaaacgtagttgcaaaccagccacaacaacagctgcaacagtttctgccagc

SEQ ID NO: 317273 - DNA, 193 bp, Zea mays
gtgacgcgtgaatggtggagccatcatcccggcgaaggtggcggcggcgggctggggacgaaatatcgcgctgctttctttttattggggttcgtttttaagctttgtttttggccgtgaaataaaaatagttgctgtactaagaaaaaagagcaatctcatttatggatatgaaattttacctgaagccatt

SEQ ID NO: 317274 - DNA, 423 bp, Zea mays
ctagcaacatagaaagcacaatagtgtaccaacaatggcagccaaaatattttgcttccttatgctccttggtctttctgcaagtgctgctaccgcaaccattttcccacaatgctcacaagctcctatagcttcctttcttcccccatacctctcaccagcggtgtcttcagtatgtgaaaacccaattcttcaaccctacaggatccaacaggcaatcgcagcaggcatcttacctttatcacccttgttcctccaacaaccgtcagccctattacagcagttacctttggtgcatttgttggcacaaaacatcaaggcacaacaactacaacaacttgtgctaagaaaccttgctgcctactctcagcaacagcagtttcttccattcaaccaactggctgcattgaactctgctgctta

SEQ ID NO: 317275 - DNA, 294 bp, Zea mays
cccacgcatccaaagggccatgctgggagacagattcccggcgtgcgttcaaaggccgtcaccgtatctggcgggtccctgatcagcctcatgagagccatgaacgagtaaactggagcttaaaaaactgcatggtctctggagcattctacacgctggcgcaccgcacacctgtagcgctgacacaagccatcgccgacctgaacatgagatgaaccatgatgagcttttgccatacttctagcgatacaagtgacttcgaactatatatccgaaattgctagtgcaagggcg

SEQ ID NO: 317276 - DNA, 433 bp, Zea mays
aataaataaaaatgaagaagataaaaaaaagacaaagaaaataataaaaaaagataataaagaaaatagaaaatttagaaaaaagaaaaaaaaaactaaaaaaataaaaataaaaaaataggaaataaaagaaaaaatcaaaagaagaaaaatttaaagtcaagcaaaaagaatacagaaaaagaaataaaaaaatgaaaaataaaagaaaagagattgataaaaaataaaaaaaagaaaaaaagatagataaaaagatataaagataacaaataaagtaacaattcataaggaatttaaaaaataaaaataataaagaaaaatataataaacaagtaataaaagaaaaaaaaaaaaggaaaatgtgaaatataaacaagaaaaaataagaaaaaaataaaatcaataaaaaaaaggaaaaaataataataaa

SEQ ID NO: 317277 - DNA, 245 bp, Zea mays
gtctagatcgcgagcggcgcctttttgatttttgtaatcataaagcagccctgatcgggtttgactcgatgaatcacttcttgattgaataagcgaagaacgccagtaagaattacagccaataatctgtacacatgatcttcaattcagggagaaactgaactgatcgaaaagatctgatggattctgattttgcgtgcttgtcttcctcgatcttgccagcgaagaggacccatcattattgt

SEQ ID NO: 317278 - DNA, 427 bp, Zea mays
ggttgatggaagcattgactagtatactgataggctcactctgtcacagtaaggggtgtgggggtcggatgtccatgtgtatatatggatagatgcgtgtatgtgtgtcttgggctcttggctggttctggaaggaccaaatgggctctcggctggttctggaaggaccaaatgaaaaaaagggtgtgctgttcttgaacaggggacctgcctgaaattggcttagaacaagcaatcaagtatctatcaactacactgtcattattgtgtgattttgcaaatttgctcttgcgaaacatggcaagttcatcatttcttctgcatggagttggtgttgcccacccctttgtgctagttccttggtaatatgtaatatatgatatatcaagactcaagagtgtttctgaaaaatatgcaacgacttcag

SEQ ID NO: 317279 - DNA, 98 bp, Zea mays
aaaaaaaaaaaaaaaaaaataaaaaaaaaaaaaaaaaaaataagaaaaagaaaagagaatgggtaaataaagatgtaaatagtgtatatatggatata

SEQ ID NO: 317280 - DNA, 201 bp, Zea mays
cggacgcgtgggttttttttttttttttttttttttttttttttttttttaatttttttttttttatttttttttttttatttttttatttaatttatttattttttatatttattgttttgttgagattacaattattgcatctgcaaaacgagtacttcaaacatacaagggacaaatgattacaaaagtaaactagac

SEQ ID NO: 317281 - DNA, 443 bp, Zea mays
ctcgctctcgcggctctcggcggatcggcgttcagtgaaagctaaaagcctaaaaccctagttcgaacctctactagccggcgacagcggcggtggagcgcgggatacccggagatgccagcgccgtctgcggttgcgtcggccgtagagaggctacaggcagcggcgcaggacgccgccaagtcctcgtcgcgctcggccggcgccttctccgagcaggcgcagcaggccctcgtgtccaggaccgccggggttcacactcaagaaaaggctgcgcagatgggctgctagactgctgaagagaattaaggacgacgactattgactaatgcgatcttttcctcattgtctttggagtttgttcagaaatcagaactatggctactacgtacctcagcatcttgtgtagccaactgtttttgtgccttcacatatttgctatg

SEQ ID NO: 317282 - DNA, 418 bp, Zea mays
cccacgcgtccgcaaaacatcagggcacaacaactacaacaacttgtgctagcaaaccttgctgcctactctcagcaacagcagtttcttccattcaaccaactagctgcattgaactctgcttcttatttgcaacaacaacaactaccattcagccagctacctgctgcctacccccagcaatttcttccattcaaccaactggcagcattgaactctcctgcttatttacagcagcaacaactactaccattcagccagctagctggtgtgagccctgctaccttcttgatacaaccacagttgttgccgttctaccagcacgctgcgcctaacgctggcaccctcttacaactgcaacaattgctgccattcaaccaacttgctttgacaaacccagcagcgttctaccaacaac

SEQ ID NO: 317283 - DNA, 401 bp, Zea mays
caacaacttgtgctagcaaaccttgctgcctactctcagcaacagcagtttcttccattcaaccaactagctgcattgaactctgctgcttatttgcaacaacaactaccattcagccagctagctgctgcctacccccaacaatttcttccattcaaccaactggcatcattgaactctcctgcttatttacagcagcaacaactactaccattcagccagctagctggtgtgagccctgctgccttcttgacacaacaacagttattgccgttctacctgcacgctgcgcctaacgctggcaccctcttacaactgcaacaattgctgccatttaaccaacttgctttgacaaacccagcagcgttctaccaacaacccatcattggtggtgccctctt

SEQ ID NO: 317284 - DNA, 286 bp, Zea mays
  unsure (1)..(286): unsure at all n locations
tcgattttgagcattcagaaacacaccaagccgaacgcactagcaacaacctaacaacaatggctaccaagatattattcctccttgcgcttcttgcgctttttgcgagcgcaacaaatgcgtncattattccacaatgctcacttgctcctagttccattattccacagttcctcccaccagttacttcaatggccttcgaacacccagctgtgcaagcctataggctacaacaagcgattgcagcgaacgtcttacaacaaccaattgcccaattgcaacaaca

SEQ ID NO: 317285 - DNA, 452 bp, Zea mays
ttccgggtcgaccagccgtcggggtcttaaggcacaccaaaccacactgcgacccacagaaggcgaggcgaaaggcaaggcaaagcggcgcggtgggcatgatgtttgacgatcaagacctgggcttctttgccaatttcctgggcatctacatctgagcctaggttattgcgtaccactttgagaaggcataaccgagatacgcaagtaactggtgtcctttagtgcgaagatcccattatttgcaagccgaattacggctctccagagagcttgagctagagagatggcttgaaacgttcattgcgtactatggagcctaggcatgcaactgctggcataataggcatgtccaaggctgaatacgctgaattagagaatactggagaattcaggaaccgtgttaagtactgcagatgggcggcagtatctcgtactaatgtatgcatgcc

SEQ ID NO: 317286 - DNA, 431 bp, Zea mays
gcaacatagaaagcacaatagtgtaccaacaatggcagccaaaatattttgcctccttatgctccttggtctttctgcaagtgctgctacggcgaccattttcccgcaatgctcacaagctcctatagcttcccttcttcccccgtacctctcaccagtgttgtcttcagtatgtgaaaacccaattcttcaaccctacaggatccaacatgcaattgcatcaggcatcttacctttatcacccttgttcctccaacaatcatcagccctattacagcagttacctttggtgcatttattggcacaaaacatcagggcacaacaactcgtgctagcaaaccttgctgcctactctcagcaacaacagttacctttggtgcatttgttggcacaaaacatcagggcacaacaactacaacaactcgtgctag

SEQ ID NO: 317287 - DNA, 446 bp, Zea mays
gggcgcggccggggtggcggtgcccacgtactcgccggacccgcacgccgacttcctccggtccatggaggagatggccgcggcgctgcggctggacgcgcggcgccgcggcgacagggcgcgcctccacgagctgctgctctgctacctcgcgctcaacgacaggcgcgcgcacaagtacgtcgtcagcgccttcaccgacctcctcctccgcctcaccgccgccgccgcagccgccaacctcagcgacgacgaccggcacgagtaaccgccttttttttcacggtcatggccgtgcgtacggacagaatttcgggtacggcggaggctcaaaaatcctcgacagcatgagcgagcgttccaagatcacccagagctgtacatactgcctccagctccagatcgagctccgtagctagaaatctgttcgtgtgcgcagcattttg

SEQ ID NO: 317288 - DNA, 442 bp, Zea mays
cggacgcgtgggcggacgcgtgggaccatgagggtgttgctcgttgccctcgctctcctggctctcgctgcgagcgccacctgcacgcatacaagcggcggctgcggctgccagccaccgccgccggttcatctaccgccgccggtgcatctgccacctccggttcacctgccacctccggtgcatctgccaccgccggtccacctgccggcgccggtccacctgccaccgccggtccatgtgccgccgccggttcatctgccggcgacaccatgccactaccctactcaaccgccccggcctcagcctcatccccagccacacccatgcccgtgccaacagccgcatccaagcccgtgccagctgcagggaacctgcggcgttggcagcaccccgatcctgggccagtgcgtcgagtttctgaggcatcagtgcaacccga

SEQ ID NO: 317289 - DNA, 421 bp, Zea mays
  unsure (1)..(421): unsure at all n locations
gcaacatagaaagcacaatagtgtaccaacaatggcagccaaaatattttgcttccttatgctccttggtctttctgcaagtgttgctaccgcaaccattttcccacaatgctcacaagctcctatagcttcccttcttcccccatacctctcaccagcggtgtcttcaatgtgtgaaaacccaattgttcaaccctacaggatccaacaggcaatcgcaacaggcatcttaccattatcacccttgttcctccaacaaccgtcagccctattacagcagttacctttggtccatttggtggcacanaacatcagggcacaacaactacaacaacttgtgctagcaaaccttgctgcatactctcagcaacatcagtttcttccattcaaccaactggctgcattgaactctgctgcttat

SEQ ID NO: 317290 - DNA, 238 bp, Zea mays
tatatttccaaattctaatgtgctaaaaaaaaaaaaaaaaaaaaaaaaaaaaggaaaaaaaaaaaaaaaaaaaaaaaaaaaaaaaaaaaaaaaaaaaaaaatataaaaaataaaaaaaaaaaaaaaaaaaaaaagcaaaaaaaaaaatataaaaatagtgataactaaaaaaaataaaatagggcggcgatttacaattttatgactgggaaatctttataataaccaaactaaattg

SEQ ID NO: 317291 - DNA, 421 bp, Zea mays
atgtgaacccttggagcgtaatcattgcgatatcatacttgatacattatgtaaaaaaacaatggaaaaactactacaacccttcacgacatgcagagatgtgttaaaaacaacacacaacacacttgagtccccaaagactatgaacttggagatctttggaattcattctatgaatggagcgcctgtggcgttggtacttcagtgtgcatcgctccgggtgagacagtggttcaatacttagtgccatatctattagcaattcaatttgtacaccaacacgagaaatgctcctgtttcacatagcatgatttatgatggaagattcgatcggaataaccattatagtgtttggatgtacactcatggatttcaagctctattacgcatgcacactattgtagttgaatggaatggggag

SEQ ID NO: 317292 - DNA, 359 bp, Zea mays
accacgcgtccggggtcggcttctcctccccctccggctcgggtccgggttcgtgaggtcctccggggttcgggttcgtgggtgagcggatcgagatggcggcgtcggatgttgagtaccgctgcttcgtcggcggcctcgcctgggccacggacgaccactccctacacaacgccttcagcacctacggcgaggtcctctagtccaagatcattctcgatcgggagacgcataggtcccgcggcttcggcttcgtcaccttctccacggatgaggcgattcggaacgccatcgagggcatgaacggcaaggagcttgacggtcgcaacatcaccgtcaacgaggcccattcccgtggc

SEQ ID NO: 317293 - DNA, 449 bp, Zea mays
cccacgcgtccgcagaaacacacctagcgaagcgcactagcaacgacctaacaacaatggctaccaagatattatccctctttgcgcttcttgccctttttgtgagcgcaacaaatgcgttcattattccacaatgctcacttgctcctagtgccattattccacagttcctccctccagttacttcaatgggcttcgaacacccagctgtgcaagcctacaggctacaacaagcgcttgcggcgagcgtcttacaacaaccaattgcccaattacaacaacaatccttggcacatctaaccatacaaaccatcgcaacgcaacagcaacaacaatttctaccagcactgagccaactagctgtggtgaaccctgtcgcctacttgcaacagcagttgcttgcatccaacccacttgctctggcaaacatagttgcataccaacaacaa

SEQ ID NO: 317294 - DNA, 136 bp, Zea mays
tccagcgtccgaaaaaaataaaaaattaaaaaaaaaaaaaaaaaaaaaaaaaaaaaggaaaaaaaaaaaaaaaaaaaaaaaaaaaaaaaaaaacccacgcttccgccaacgcttccgccaacgcttccgatcgcaa

SEQ ID NO: 317295 - DNA, 439 bp, Zea mays
gcaacatagaaagcacaatagtgtaccaacaatggcagccaaaatattttgcttccttatgctccttggtctttctgcaagtgctgctaccgcaaccattttcccacaatgctcacaagctcctatagcttcctttcttcccccatacctctcaccagcggtgtcttcagtatgtgaaaacccaattcttcaaccctacaggatccaacaggcaatcgcagcaggcatcttacctttatcacccttgttcctccaacaaccgtcagccctattacagcagttacctttggtgcattttgttggcactaaacatcaaggcacaacaactacaacaacttggtgctaagaaaccttgctgcctactttaagcaacagcaagtttcttccattcaaccaactggctgcattgaactctgctgcttatttgcaacaacaacta

SEQ ID NO: 317296 - DNA, 58 bp, Zea mays
gaaataagaagttacatttccagattctaaaaaaaaaaataataaaaaaaaaagaaag

SEQ ID NO: 317297 - DNA, 364 bp, Zea mays
  unsure (1)..(364): unsure at all n locations
nccacgcgtccgagaactgaaacggaactccctctctgcctcatggtctctgcggcggcggaatccgatccacgcatcttcgctcagacttggtggtgtacgagcagccatagatgtgcagacatccctattggaagaagatccgaacaagaattatcaagaagacaaaaggagtgttgaaacaggagtgcatcaactttcatgagataatgatccagtggacgtgccaatgacaaggtcatagaagaagctatgcttgaggaagctatgagtgactgaaggatttcattttccgtactatcatgtttcaactttcattggccagtcatcaaagaagtatatgatgtgtttggatttggggttc

SEQ ID NO: 317298 - DNA, 70 bp, Zea mays
acttgaacggaggatttccggtctgaataatataaatgcacgcttgcaactatatccatggaataagaat

SEQ ID NO: 317299 - DNA, 69 bp, Zea mays
ccttgttcggtggatttacggtctgtataatatttatgcacgcttgcactttatccatggtatttgtat

SEQ ID NO: 317300 - DNA, 159 bp, Zea mays
gggcaggggaggaaaaaaatctaaccctagcatccgcagcgctagggttcggcggttgcgatggcggctgcactcatgtaccctcagacgttgaagtgttccagcagccctaaatgctcagacatcctcatcgtaagaagctcctaacaagatttatta

SEQ ID NO: 317301 - DNA, 101 bp, Zea mays
acgcggacgcgtgggtggctttctcctccccctctcggttcgggttacgggattcgcgagggactagcggggattcgggatcaagagatcgagcggatcag

SEQ ID NO: 317302 - DNA, 108 bp, Zea mays
gcggcgatgattgagtaataatgtgtcacgcatcaccatgggtggcagtgtcagtgtgagcaatgacctgaatgaacaattgaaatgaaaagaaaaaagtattgttcc

SEQ ID NO: 317303 - DNA, 411 bp, Zea mays
cggacgcgtgggtagctgcattgaactctgcttcttatttgcaacaacaacaactaccattcagccagctacctgttgcctacccccagcaatttcttccattcaaccaactggcagcattgaactctcctgcttatttacagcagcaacaactactaccattcagccagctagctggtgtgagccctgctaccttcttgacacaaccacagttgttgccgttctaccagcacgctgcgcctaacgctggcaccctcttacaactgcaacaattgctgccattcaaccaacttgctttgacaaacctagcagtgttctaccaacaacccatcattggtggtgccctcttttagatttcttatgagttatagttcaataataaagttttttgtctgatgtttgtggcttccc

SEQ ID NO: 317304 - DNA, 418 bp, Zea mays
cggacgcgtggggcagcagccgcagccatggcaataccccactcaaccaccgcagctaagcccgtgccagcagttcggatcctgcggcgtcggcagcgtcggcagcccgttcctgggccagtgcgtcgagttcctgaggcaccagtgcagcccggcggcgacgccctacggctcgccacagtgccaggcgctgcagcagcagtgctgccaccagatcaggcaggtggagccgctgcaccggtaccaggcgacatacggtgtggtcctgcagtccttcctgcagcagcagccgcagggcgagctcgcggcgctgatggcggcccaggtagcgcagcagctgacggcgatgtgcggtctgcagctgcagcagccaggtccctgcccttgcaacgcagctgccggcggtgtctactactga

SEQ ID NO: 317305 - DNA, 424 bp, Zea mays
gtctgactcagctagctgtggcaaaccctgctgcctacccccagcaatttcttccattcaaccaactggcagcattgaactctgctgcttatttacaacagcaacagctaccaccattcagccagctagctgatgtgagccctgttgccttcttgacacaacaacagttgttgccgttctacctgcacgctgcgcctaacgctggcaccctcttacaactgcaacaattgctgccattcaaccaacttgctttgacaaacccaacaacgttctaccaacaacccatcattggcggtgccctcttttagattgcttatgagttatagttcaataatgaagttttttggatgatgtttgtggcttcccagaaataagaaagtacatttctagattctaaaaaaaaaaacaaaaaacaaacacaaaa

SEQ ID NO: 317306 - DNA, 435 bp, Zea mays
cccacgcgtccggcaacatagaaagtggaatccagtagcaacaacagagcaacaatggcgaccaagatattttccctccttatgctccttgctctttctgcatgtgttgctaacgcgacaattttccctcaatgctcacaagctcctatagcttcccttcttcccccataccttccatcaatgatagcttcagtatgtgaaaacccagctcttcagccctataggctccaacaagcaatcgcagcaagcaacatacctttatcacccttgttgtttcaacaatcgccagccctatctttggtgcagtcattggtacaaaccatcagggcacagcagctgcagcaactcgtgctacctgtgatcaaccaagtagctctggcaaacctttctccctactctcagcaacaacaatttcttccattcaaccaactgtct

SEQ ID NO: 317307 - DNA, 434 bp, Zea mays
ctcatcgactccagattggagaactcgacaccatgaaggtgctgatcgttgcccttgctctcctggcgctcgctgcgagcgccgcctccagtacaagcggcggctgtggctgccagacaccaccgtttcatctaccgcctccgttctatatgccgcctccgttctatctgccgccgcagcagcagccgcagccatggcaataccccactcaaccaccgcagctaagcccgtgccagcagttcggatcctgcggcgtcggcagcgtcggcagcccgttcctgggccagtgcgtcgagttcctgaggcaccagtgcagcccggcggcgacgccctacggctcgccacagtgccaggcgctgcagcagcagtgctgccaccagatcaggcaggtggagccgctgcaccggtaccaggcgacatacggtgtggtcctg

SEQ ID NO: 317308 - DNA, 428 bp, Zea mays
acaacaactcgtgctagcaaaccttgctgactactctcagcaacaacaggttctgccattcaaccaactagctgcattgaactctgctgcttatttgcaacaacaactagtactaccattcagccagccagctgctgcctacccccagcaatttcttccattcaaccaactagcagcattgaactctcctgcctatgtacagcagcaacaactactaccattcagccagctagctgctgtgagccctgctgccttcttgacacagcaacaattgttgtcgttctacctgcacgctgcgcctaacgttggcaccctcttacaactgcaacaattgctgccattcaaccaacttgctttgacaaacccagcagcgttctaccaacaacccatcattggtggtgccctcttttagattgcttatgagttat

SEQ ID NO: 317309 - DNA, 433 bp, Zea mays
ctgactgctgttcagaactgcaaacatatgccaattatgtgctgtaatataatcaagatacaatagatctgatgagtggtatacattatgctgaagataaagataacaagacttcttacagttaatgtatacaatctttagcagctataagcagactgaattacaccaatgttaacactagcaaggagcatatgcgcctgcaaatgattaagtgaaacatatcgatctatatttcaattgtgcagatatctatatttgcattactgcatagtctcgaacatactgcaactatgaatgtttgcctccaaattttccatagatttcgagtcatgagagaatcgagctccatatgtcgactctgaatttactctcttttggatgcgatgtgcattagccttttcttcataaaaatcaaaatcatccagaattgatg

SEQ ID NO: 317310 - DNA, 434 bp, Zea mays
caaggcacaacaactacaacaacttgtgctaggaaaccttgctgcctactctcagcaacagcagtttcttccattcaaccaactggctgcattgaactctgctgcttatttgcaacaacaactaccattcagtcagctagctgctgcctacccccagcaatttcttccattcaaccaactggcagcattgaactctgctgcttatttacaacagcaacagctaccaccattcagccagctagctgatgtgagccctgttgccttcttgacacaacaacagttgttgccgttctacctgcacgctgcgcctaacgctggcaccctcttacaactgcaacaattgctgccattcaaccaacttgctttgacaaacccaacaacgttctaccaacaacccatcattggcggtgccctcttttagattgcttatgagt

SEQ ID NO: 317311 - DNA, 376 bp, Zea mays
gcagtgcgtagagaggatcgtcgaacagaacagcatgaagatggtcatcgttctcgtcgtgtgcctggctctgtcagctgccagcgcctctgcaatgcagatgccctgcccctgcgcggggctgcagggcttgtacggcgctggcgccggcctgacgacgatgatgggcgccggcgggctgtacccctacgcggagtacctgaggcagccgcagtgcagcccgctggcggcggcgccctactacgccgggtgtgggcagccgagcgccatgttccagccgctccggcaacagtgctgccagcagcagatgaggatgatggacgtgcagtacgtcgcgcaacagctgcagatgatgatgcagcttgagcgtgccgct

SEQ ID NO: 317312 - DNA, 201 bp, Zea mays
cggacgcgtggggttctagatcgcgagcggacgtccgcgatctacaactagtggacgcgtgtgctaagttatttgtggacacatcaccaatagaaaggctacgagtaaatgttgatactttctaaacgaattaaactgtttttaagctattgggtgatcttggagtttcttggggaaaagagttcgagcacttttaataat

SEQ ID NO: 317313 - DNA, 280 bp, Zea mays
cccagcgtccgcccaaacgtagaacatactaggatgcacgctgcgtaaccggctgcgccattatggacttcggcttgagaacgagagctaagtgcataagaactggagccgcgcgagccgatgctcaaggctcatgaagtcgatcgtagaccaggtcatggattatgagcacaacgttggccatgctatgtagatatgatgaatgcgtcatgaccaatttgatgaagcataagattgagtatcaagatttatttggcacacagcttggcgccaaatcggg

SEQ ID NO: 317314 - DNA, 324 bp, Zea mays
cccacgcgtccggttcattattccccaatgctcacttgctcctagtgccattattccacagttgctccctccagttacttcaatgggctttgaacacccagctgtgcaagcctacaggctacaacaagcgcttgcggcgagcgtgttacaacaaccaattgcccaattacaacaacaatccttggcacatctaaccatacaaaccatcgcaacgcaacagctacaactatttgtaccagcactaaaccaactagctgaggtgaaccctgtcgcctacttgctacagcacttgcttggattcgacgcacttgctctggcaaacat

SEQ ID NO: 317315 - DNA, 88 bp, Zea mays
aaaaaaaaaaaaaaaaaaaaaaaaaaaataaaaaaaaaaaaaaaaaaaaaaaaaaaaaaaataaaaagcgaaacgaaatagatcgcga

SEQ ID NO: 317316 - DNA, 199 bp, Zea mays
acggtttcatgcttcttaaaaaaaaaaaaaatagagataaaaaaaagaaaaaaaaaaaaaaagaaaaagaaaataaacaaaatgaaaaaaaaaaaaaagaataaaaaagaaaaaaaaaaaaaaaaaaaaaggggggccatttaaaaggaaccaagttaacgaacccggccatggcaagcaaaacattttctgaagggct

SEQ ID NO: 317317 - DNA, 306 bp, Zea mays
cccacgcgtccggcttggcaagaggaggaaagccgaagaagatggaagtgaggaagaattgaagaggacaagaaatgagacagaaagctatacaagcaatggcagaggccgtgggagaggtcgtgggagaggtcgccgtggtgtacgtggagcttggcgggaggtggtcacaagtcctgagcaattcaaggaggagaatcaatctagcaaggtatatggtctagtaaataaagtcgtcgatcaaagcatgacaactgtcaaatgtatctttgattaagtaaagtatcactcaagatttccagtttc

SEQ ID NO: 317318 - DNA, 433 bp, Zea mays
aaaacatcagggcacaacaactacaacaacttgtgctagcaaaccttgctgcatactctcagcaacatcagtttcttccattcaaccaactggctgcattgaactctgctgcttatttgcaacaacaattaccattcagccagctagttgctgcctacccccagcaatttcttccattcaaccaactagcagcattgaactctgctgcttatttacagcagcaacaactactaccattcagccagctagctgatgtgagccctgctgccttcttgacacaacaacagttgttgccgttctacctgcacgctatgcctaacgctggcaccctcttacaactgcaacaattgctgccattcaaccaacttgctttgacaaactcaacagtgttctaccaacaacccatcattggtggtgccctcttttagattgc

SEQ ID NO: 317319 - DNA, 433 bp, Zea mays
cacagcagcaggcgtcccctgtcttcgtccttccgaaatcccaatcctccctccgagtcccccatcccaaaactcggagctccgaagctggcactggcatcgcggcaatgccgaggccgcccacaatggtgatccaggacgactacatcgacatggacctgaccccggcagccacaccggagccctcgccagcctcgccccgcttcgagttccagagcgccggcgccggcgccgccggcgacaggcatagggaggcggcgttcgcgtcccccgcggacgagctgttctacaagggcaacctgctgccgctccacctgccgccgcggctgcagctcgtgcagaggctcctccaggaccaggagcagccgccgccgctgcgaggggcgaagcgggatgcggagtcggatgccacggcggcggcggcggcagagcg

SEQ ID NO: 317320 - DNA, 435 bp, Zea mays
cggacgcgtgggcggacgcgtgggcggacgcgtgggcgcggcgaagaagccggcggaggaggagcccgcggccgagaagacgaccgccgggaagaagcccaaggcggagaagcgggtccccgcgggcaagtccgccggcaaggagggcggcgagggcaagcgtggcaagaagaagggcaagaagagcgtggagacgtacaagatctacatcttcaaggtgctgaagcaggtgcacccggacatcggcatctcctccaaggccatgtccatcatgaactccttcatcaacgacatcttcgagaagctggccggcgaggccgccaagctcgcgcgctacaacaagaagcccaccatcacctcccgcgagatccagacctccgtgcgcctcgtgctccccggcgagctcgccaagcacgccgtctctgagggcaccaa

SEQ ID NO: 317321 - DNA, 241 bp, Zea mays
caactatatatatacacttgcacacagcggagtgggctactcgagatgcgcttcgccaggcgctgacgccttaggagataagtttacctacccatagcacgtcaccacgaatgggcctgaggacattgctggagggcaattcgctggttgcaaatgcacaaccgatattgaacgaaaaccgtttccttggtccaaggagatggagcatgtatgaagtatcaggaaacggtcaaaccaagtc

SEQ ID NO: 317322 - DNA, 424 bp, Zea mays
agccaaaatattatgcctccttatgctccttggtctttctgcaagtgctgctacagcgaccaggttcccgcaatgctcacaagctcctatagcttcccttcttcccccgtacctctcaccagtgttgtcttcagtatgtgaaaacccaattcttcaaccctacaggatccaacatgcaattgcatcaggcatcttacctttatcacccttgttcctccaacaatcatcagccctattacagcagttacctttggtgcatttattggcacaaaacatcagggcacaacaactcgtgctagcaaaccttgctgcctactctcagcaacaacagttacctttggtgcatttgttggcacaaaacatcatggcacaacaactacaacaactcgtgctagcaaaccttgctgcctactctcagcaacaa

SEQ ID NO: 317323 - DNA, 238 bp, Zea mays
  unsure (1)..(238): unsure at all n locations
taatataacancctatacttacaccttccatantacaatctctaaattccccactttcaatatcttacaatttaaattctattcctacatcaatttttaaccttctttaccattaaaattctttataaaccattcattattttctcatcaaactctcaactcaaaaacattctcttctttccattaatctttaaatctcaaatccctgttcccaactattttcccatatcacttcttt

SEQ ID NO: 317324 - DNA, 326 bp, Zea mays
tcccactcaacccactcgtccgcagaaaaaaacaaaaaccaaaaaaaatttacataaaaaaaaaaaaaaaaaaaaaaaagaaaaagtaaaattttaaactaacaaaaaaccacaccaacaacaacattaacatcaaacacacaaaaatcctccaacaccctcaaatcatccaaccaccttaaaacaccataatttaactaccatcttccttatctacttctaaaactacatcatccttatcaccctatttcattaccaccactttaatatatctatccaaccattcttcaaacaatattactcaactaacatactaattctatttc

SEQ ID NO: 317325 - DNA, 405 bp, Zea mays
cgccgcgtccgaaacacatggaaaatcgcattcatgtaccaccattgaccgacagtgtagggcaatatcttatgcatcctgatccttctggatgtgctggtacctgaaccatacgccaacattgctcataagctcttataacttcctatatttgcccatacctctcaatacctgtgattaaagactgttaaaacctaataatacaaacctacacgatccaacaggctataacaagcagtatcataactcaattaaccttgatcatccaacaactgtcaacaatattacagcatatacctggggcacatatggtgacacaccatatcaacgcacaacatctacaacatcttgctatcagaaaccatgctagctactctgagcaacattagttcctaccattaaaac

SEQ ID NO: 317326 - DNA, 450 bp, Zea mays
ccgacgcgtccgcccacgcgtccgcattcagaaacacacctagcgaagcgcactagcggcgacctaacaacaatggcttccaagacattatccctccttgcgcttcttgccctttttgtgagtgcaacaaatgcgttcattattccacaatgctcacttgctccgagtgccattattccacagttcctccctccagttacttcaatgggcttcgaacacccagctgtgcaagcctataggctacaacaagcgcttgcggcgagcgtcttagaacaaccaattgcccaattacaacaacaatccttggcacatctaaccatacaaaccatcgcaacgcagcagcaacaagcactgagccacctagccgtggtgaaccctatcgcctacttgcaacaacagctgcttgcatccaacccacttgctttggcaaacgtagctgcataccaacaa

SEQ ID NO: 317327 - DNA, 331 bp, Zea mays
gcgacgcgtccggaactctcctgcttatttacagcagcaacaactactaccattcaggcagcgagctggtgtgagccctgctaccttcttgacacaaccacaattgttgccgttctaccagcacgctgcgcctaacgctggcaccctcttacaactgcaacaattgctgccattcaaccaacttgctttgacaaacccaacagcattctaccaacaacccatcattggtggtgccctcttttagatttcttatgagttatagttcaataataaagttttttgtctgatgtttgtggcttcccagaaataagaaagtacatttctagattct

SEQ ID NO: 317328 - DNA, 407 bp, Zea mays
cggacgcgtgggcggacgcgtgggtagcaacatagaaagcacaatagtgtaccaacggtggcggccaaaatattttgcttccttatgctccttggtctttctgcaagtgctgctaccgcaaccattttcccacaatgctcacaagctcctatagcttcctttcttcccccatacctctcaccagcggtgtcttcagtatgtgaaaacccaattcttcaaccctacaggatccaacaggcaatcgcagcaggcatcttacctttatcacccttgttcctccaacaaccgtcagccctattacagcagttacctttggtgcatttgttggcacaaaacatcaaggcacaacaactacaacaacttgtgctaggaaaccttgctgcctactctcagcaacagcagtttct

SEQ ID NO: 317329 - DNA, 443 bp, Zea mays
gcaacatagaaagtggaatccagtagcaacaatagagcaacaatggctgccaagatagtttccctccttatgctccttgctctttctgcatgtgttgctaacgcgacaattttccctcaatgctcacaagctcctatagcttcccttcttcccccataccttccatcaatgatagcttcagtatgtgaaaacccagctcttcaaccctataggctccaacaagcaatcgcagcaagcaacatacctttatcacccttgtttcaacaatcgccagccctatctttggtgcagtcattggtacaaaccatcagggcacagcagctgcagcaactcgtgctacctgtgatcaaccaagtagctctggcaaacctttctccctactctcagcaacaacaatttcttccattcaaccaactgtctacattgaaccgtgctgcttattt

SEQ ID NO: 317330 - DNA, 427 bp, Zea mays
aaaaaaaaaaaaaaaaaaaaaaaaaattaaaaataaaaaaaaaaaaaaaaaaaaaaaagaaaaagaaaaataacaatttatggaaaaccaaaataaacaatcactcttacttccatcttattaactcttttttattgccacttaatttcaatctattgccctttttttaacaacattaataacttataaaaccctgacattacccaatttaatcccttttaaaaacatccccttttcctaatttagcttactaccaataaatcccctttcgttcccctttcctaaaatttactcaccctaatttacaattggtacactccctttaccctccctttacccaccttaatctccttgctttaacatccccctttacccatactttttaaatcccattagtcccttacccttttccttttccaacaatttc

SEQ ID NO: 317331 - DNA, 394 bp, Zea mays
  unsure (1)..(394): unsure at all n locations
gaggatcccagaggccatcctgtactatagggactacatggtaccctntgctactntgatcaatttgaaattttgccaaaccacctctttcccaaatcatactaatttactgcacctcacttttccctttcagaaaccttcatactttcacaccatatctatcttcacaatacatatcttattaccatacattttatcataacattaattgaactatttccaatactcttgttcttttcacataccataattcctagtcaattgaatttaccactcttgcaatattcattctgatcataatccctcaaaaatttttataccacaatacatttaaaccttttaatacttataatcatatatttaataaatcctatcaaattattaaatattacca

SEQ ID NO: 317332 - DNA, 219 bp, Zea mays
cctactcaaatatctaacacctcctcaaacaaacttttcacaacattactcattacaatactaatacctatactctttctacccataaaaatctctattcccaccctatactacaatgacatcctccccaaattccatatacattacacaataataccaataccatcaataatatcactttaaaccaactccatcacaactccaaacactaatccctct

SEQ ID NO: 317333 - DNA, 445 bp, Zea mays
cagaaacacacctagcgaagcgcactatcaacgacctaacaacaatggcttccaagagattatcccgccttgcgcttcttgccctttttgtgagtgcaacaaatgcgttcattattccacaatgctcacttgctccgagtgccattattccacagttcctccctccagttacttcaatgggcttcgaacacccagctgtgcaagcctataggctacaacaagcgcttgcggcgagcgtcttagaacaaccaattgcccaattacaacaacaatccttggcacatctaaccatacaaaccatcgcaacgcagcagcaacaagcactgagccacctagccgtggtgaaccctatcgcctacttgcaacaacagctgcttgcatccaacccacttgctttggcaaacgtagctgcataccaacaacaacaacagttgcaacagtttct

SEQ ID NO: 317334 - DNA, 439 bp, Zea mays
agcaacatagaaagcacaatagtgtaccaacaatggcagccaaaataggttgcctccgtatgctccttggtctttctgcaagtgctgctacggcgaccattttcccgcaatgctcacaagctcctatagcttcccttcttcccccgtacctctcaccagtgttgtcttcagtatgtgaaaacccaattcttcaaccctacaggatccaacatgcaattgcatcaggcatcttacctttatcacccttgttcctccaacaatcatcagccctattacagcagttacctttggtgcatttattggcacaaaacatcagggcacaacaactcgtgctagcaaaccttgctgcctactctcagcaacaacagttacctttggtgcatttgttggcacaaaacatcagggcacaacaactacaacaactcgtgctagcaaacct

SEQ ID NO: 317335 - DNA, 444 bp, Zea mays
cggacgcgtgggcggacgcgtgggctggctctgtcagctgccagcgcgtctgcaatgcagatgccctgcccctgcgcggggctgcagggcttgtacggcgctggcgccggcctgacgacgatgatgggcgccggcgggctgtacccctacgcggagtacctgaggcagccgcagtgcagcccgctggcggcggcgccctactacgccgggtgtgggcagacgagcgccatgtaccagccgctccggcaacagtgctgccagcagcagatgaggatgatggacgtgcagtccgtcgcgcagcagctgcagatgatgatgcagcttgagcgtgccgctgccgccagcagcagcctgtacgagccagctctgatgcagcagcagcagcagctgttggcagctcagggtctcaaccccatggccatgatgatggcccagaacatgccg

SEQ ID NO: 317336 - DNA, 259 bp, Zea mays
acttatcactttcccttcttccttcttacttcaacaacaaggatttgttttatatcaacgttttcttacaaacatatctcctttctttaaacatcaactattacttacattttacctcacaatttcactcaaccattaacaccttatccctcaaactacaatttctaccattatcatccaccctatttaataaacaatataatctttatactacaacaactatttcataatatcaaaccatacttctatttactaatat

SEQ ID NO: 317337 - DNA, 422 bp, Zea mays
cccacgcgtccgcccacgcgtccgcccacgcgtccgcccacgcgtccggcacaatagggtaccgacaatggcagccaaaatattttgcctccttatgctccttggtctttctgcaagtgctgctaccgcgaccattttcccgcaatgctcacaagctcctatagcttcccttcttcccccgtacctctcaccagcggtgtcttcggtatgtgaaaacccaattcttcaaccctataggatccaacaggcaatcgcagctggcatcttacctttatcacccttgttcctccaacaatcatcagccctattacagcagttacctttggtgcatttattggcacaaaacatcagggcacaacaactacaacaacttgtgctagcaaaccttgctgcctactctcagcaacagcagtttctttcat

SEQ ID NO: 317338 - DNA, 180 bp, Zea mays
tcccactcgtccgaaaaaaaaaaaaaaataaaaaaaaaaaaaaaaaaaaagaaaaaatagaaaaattaaaaaaaataaatacattcataaaataacaaaaaatacaaaaaaatacattcatatataatatctacttaaatttaaatctcattaaacttaaatctttttcaaccttacttt

SEQ ID NO: 317339 - DNA, 191 bp, Zea mays
cccacgcgtccgcccacgcgtccgtgtactttgatgaagagaggaaagcatgttttgccacaactgatggattgtttgtttaaaaaaaaaaaaaaaaaaaaaaaaaaaaaaaaaaaaaaaaaaaaaaaaaaaaaaaaaaaaaaaaaaaaaaaaaaaaaaaaaaataaaaaagatcaaagtttaaatacaga

SEQ ID NO: 317340 - DNA, 441 bp, Zea mays
gaccgggctgatgtcggcatgtcggtctctgtcgacggcgagcgagtgctgcacgtggggcgcctgcgctggaagttccgcggcagcgagcgggtcgacctcgggggcggcgacggcgtccaggtctcttgggatctccacaactggctcttccccccacgcgagccgccccccacggaggcctcgacgcacgcccacgcggtgttcgttttccggttcgaactcgccagcggcggcgaggagagcgaggcggatttggggaagaatccctcccccagcaaggacgcaaggaggaacacgggcgtttggggaggctacctcgcgcggtgggggcaacgggactggagcgagacgggcagcaacggtgagaggaggaagggcagggggcggaggctggccaaggagagctcgtcgtcgtcggcgtccgtggcatcctccacg

SEQ ID NO: 317341 - DNA, 425 bp, Zea mays
  unsure (1)..(425): unsure at all n locations
cccacgcgtccgcggacgcgtgggtgtacgccaacgaggtgcccaagaccgcggagagcttccgcgggctgtgcacgggcgagaagggcgtgggcaagtccgggaagccgctccactacaagggctccaccttccaccgcgtcatccccgagttcatgtgccagggcggcgacttcacccgcggcaacggcaccggcggcgagtccatctacggcgagaagttccccgacgagaagttcgtgcgcaagcacaccgnccccggtgtgctctccatggccaacgccgggcccaacaccaacggctcccagttcttcatctgcaccgtcgcgaccccttggctcgacggcaagcacgtcgtcttcggccaggtcgtcgagggcatggacgtcgtcaaggccatcgagaaggtgggcacccgcaacggc

SEQ ID NO: 317342 - DNA, 234 bp, Zea mays
  unsure (1)..(234): unsure at all n locations
ccctctgcgaccacgcgtccgaaaanaaaaaggtttttaaaaaatttaaaaaaaataaaaaaaaaaaaaaaaaaaagaaaaatttcgaaaattataaaaaccaagaaaaccaaaacaaacaaaaaaaaaccacccaaacaaaaccaaacaaccacctataaaaaaaccaaaacaaaaaaaattaaaaaaaacccacataaaaaaaaaactgcccttcccaaaaccaaaaccccc

SEQ ID NO: 317343 - DNA, 391 bp, Zea mays
ggtcctccaacaatcatcagccctattacatcagttacctttggtgcatttattggggcaaagcatcagggcacaacaactacaacaacttgtgctagcaaaccttgctgcctactctcagcaacagcagtttcttccattcaaccaactagctgcattgaactctgcttcttatttgcaacaacaacaactaccattcagccagctacctgctgcctacccccagcaatttcttccattcaaccaactggcagcattgaactctcctgcttatttacagcagcaacaactactaccattcagccagctagctggtgtgagccctgctaccttcttgatacaaccacagttgttgccgttctaccagcacgctgcgcctaacgcttgcacc

SEQ ID NO: 317344 - DNA, 409 bp, Zea mays
cccattcgagccacgcgtccgcgttcaggattatacaactcaccaatccatgcgcactaccaacaacctaacaacaagtgctggtaatatattagccctgcttgcgcttcttgcccttattgtgagcgcaacacatgcgttcattattccacaatgctcacttgctcctagtgccatcattacacaggtcctctcaccagttacttcaatgggcttcgaacacctagctgtgcaagccaacatgcaacaacaagcgcttgcggcgagcgtcttacaacaaccaattgcccaattgcaacaacaatccttgccacatctaacaatacaagccatcacaacgcaacagcaacaacagttcctaccagcactgagccacctagccatggtgaaccctgccgtctacttgcaa

SEQ ID NO: 317345 - DNA, 424 bp, Zea mays
attcaaaaacacaccaagcgaagcgcactagcaacgacctaacaccaatggcgaccaggatattagccctccttgcgcttcttgcccttttagtgagcgcaacaaatgcgttcattattccacagtgctcacttgctcctagtgccagtattccacagttcctcccaccagttacttcaatgggcttcgaacatccagccgtgcaagcctacaggctacaactagcgcttgcggcgagcgccttacaacaaccaattgcccaattgcaacaacaatccttggcacatctaaccctacaaaccattgcaacgcaacaacaacaacaacagtttctgccatcactgagccacctagccgtggtgaaccctgtcacctacttgcaacagcagctgcttgcatccaacccacttgctctggcgaacgt

SEQ ID NO: 317346 - DNA, 405 bp, Zea mays
tgttcctccaacaaccgtcagccctattacagcagttacctttggtgcatttgttgggacaaaacatcaaggcacaacaactacaacaacttgtgctaggaaaccttgctgcctactctcagcaacagcagtttcttccattcaaccaactggctgcattgaactctgctgcttatttgcaacaacaactaccattcagtcagctagctgctgcctacccccagcaatttcttccattcaaccaactggcagcattgaactctgctgcttatttacaacagcaacagctaccaccattcagccagctagctgatgtgagccctgttgccttcttgacacaacaacagttgttgccgttctacctgcacgctgcgcctaacgctggcaccctcttacaactgcaac

SEQ ID NO: 317347 - DNA, 216 bp, Zea mays
acgttgtttttttatttttttaatatttttttttatttttatttttttttttattttttaagtttttttaatatttttgtaaatttttatttttttattttattttaattttattttatttttttgtttaattttttaaatttttttttcattaaaaaaaaaaatataaaaaaaattatactataaattaaaaaaaatttaaaaaaaaaatataaa

SEQ ID NO: 317348 - DNA, 170 bp, Zea mays
ccacgcgtccgctgaactgaggacgatgatccagaaccgatccagctatcatcaagtgccgcggcgactacggcccatattgtaccacgtgacgagagaactctcttcgtgactttctccaacggataccccttcaccgcggatgaactgtacgaattctttatggggaa

SEQ ID NO: 317349 - DNA, 107 bp, Zea mays
tcgcggacgcgtgggaaaaaaagatgtcattagtgggtggagaaaagcaataagactgttcgctagataaccgaataaatatggaaattgaagttatggcttatgac

SEQ ID NO: 317350 - DNA, 318 bp, Zea mays
caactagcacatagaaagcacatagtgtaccaacaatggcagccaaaatatttgcgtccttatgctccttggtctttctgcaagtgctgctaccgcgaccattttcccgcaatgctcacaagctcctatagcttcccttcttcccccgtacctctcaccagcggtgtcttcggtatgtgaaaacccaattcttcaaccctataggatccaacaggcaatcgcagctggcatcttacctttatcacccttgttcctccaacaatcatcagccctattacagcagttacctttggtgcatttattgccacaaaacatcag

SEQ ID NO: 317351 - DNA, 433 bp, Zea mays
caacaagcaacatagaaagtggaatccagtagcaacaatagagcaacaatggcgaccgagatattttccctccttatgctccttgctctttctacatgtgttgctaacgcgacaattttccctcaatgctcacaagctcctatagcttcccttcttcccccataccttccatcaattatagcttcaatatgtgaaaacccagctcttcaaccatataggcttcaacaagcaatcgcagcaagcaacatacctttatcgcccttgttgtttcaacaatcgccagccctatctttggtgcagtcattggtacaaaccatcagggcacaacagctgcagcaactcgtgctacctctgatcaaccaagtagctctggcaaacctttctccctactctcagcaacaacaatttcttccattcaaccaactgtctacac

SEQ ID NO: 317352 - DNA, 142 bp, Zea mays
gaaattttctgttgtagcttaaaagatgattgtatagtaacacggtactatgagatgtgtattatattgctatgaaaaccttgtcaaggtcctgtatttccaactaaatttatacctgtttgaaaatttttgagcagaccct

SEQ ID NO: 317353 - DNA, 425 bp, Zea mays
ctgaaccccgctgcttatttgcagcatcaaatactactaccatttagccaggtagctgcagcaagccgggcttgcttcttgacacaacaacagttgctgccgttctaccagcagtttgcggctaaccccgcaaccctcttacaactacaacaattgttgccctttgtccaacttgctttgacaaacccagcagcctcctaccaacaacacatcattggtggtgccctcttttagattgcttattagatgtaattcaataataaagttttttggatgatgtatgtggccaaccagaaataaaaagttacatttccagattctaaaaaaaaaaaaaataaaaaaaaaataaataaaaaaaaaaaaaaaaaaaatataataaaaaataaaaataaattaatataaaaattataaaatttttttttttt

SEQ ID NO: 317354 - DNA, 75 bp, Zea mays
cccactcgtccagaattattttttgagcccttaccatactctgctgttggttgagaagatgttattagtctgtcc

SEQ ID NO: 317355 - DNA, 415 bp, Zea mays
acatagaaagtggaatccagtatcaacaacagagcaacaatggcgggcaagaggttttccctccttatgctccttgctctttctgcatgtgttgctaacgcgacaattttccctcaatgctcacaagctcctatagcttcccttcttcccccataccttccatcaatgatagcttcagtatgtgaaaacccagctcttcagccctataggctccaacaagcaatcgcagcaagcaacatacctttatcacccttgttgtttcaacaatcgccagccctatctttggtgcagtcattggtacaaaccatcagggcacagcagctgcagcaactcgtgctacctgtgatcaaccaagtagctctggcaaacctttctccctactctcagcaacaacaatgtcttccattcaaccaac

SEQ ID NO: 317356 - DNA, 227 bp, Zea mays
cggacgcgtggggaagccgatgctaccgcctacgccgacgctggtggcgaccagtgcgagcctggctgttccatcggcaccgaggacgacgccgacgccgactgccagcgcgcgcagcagcagcagcatggccgccaccaccaccaacccaggcagggcggcgggccctcgtgcagtgtcatgtgaactagcatacccatgcatgcatgtttggtggtgtcgctctc

SEQ ID NO: 317357 - DNA, 191 bp, Zea mays
cggactcgtggtcggacgcttgggcaacaattgctgccattcaaccaacgtgcttttgcaaacctaacagcattctaccaacaacccatcattggtggtgccctcttttagatttcttatgagttatagttcaataataaagttttttgtctgatgtttgtggcttcccagaattaagaaagtacatttct

SEQ ID NO: 317358 - DNA, 96 bp, Zea mays
cggacgcgtgggcggacgcgtgggcgatcccacaggatccgagagacctcgcaagccgccacgtccaggtgcccatcccatcgcggcgcctgcacc

SEQ ID NO: 317359 - DNA, 214 bp, Zea mays
gaggttctccggggttcgggttcgtggtgtgagcggatcgagatggcggcgtgggatggtgagtaccgctgcttcgtcggcggcctcgcctgggccacggacgaccactccctccacaacgccttcagcacctacggcgaagtcctcgagtccaagatcatcctcgatcgggagacgcagaagtcccgcggcttccgcttcgtcaccttctcca

SEQ ID NO: 317360 - DNA, 168 bp, Zea mays
ccgacgcgttcgtggacgcgtgggcggactcgtgggggcaggtcgtcaagggggtctggaagacttaagaccgagccgtgcgggggctcgggacgggaactggacaggaccccaaaatctcagatccttcctgcccgcccgcccgtgcccgtcgactcgtcgttcttg

SEQ ID NO: 317361 - DNA, 172 bp, Zea mays
taagaaaaaaaaaaaaaaaaaaaaaaaaataaaaaaaaaaaaaaaaaaaaaagagaaaaaggaaaatttaaaaaagggccttcccctctatagcttccaatcttactttcccttacatacaacttcatacctcttctatagtatcacctaaatccaattcactgcccttcgt

SEQ ID NO: 317362 - DNA, 260 bp, Zea mays
  unsure (1)..(260): unsure at all n locations
cagtccgactcgattcctccgcaacaaccactctcnngcctgcgatcgttcgtagccctccgtcagcagtcgagcagcngatcagtgtcggctctacnntgcggaaagtaccaaggatgagccctcatcaagaatgccctgcctacattggcatcccccggcaangggtatttccttgctgctgatgaagtccaaactggcaccatnntggcaagcgccctttccaaagcatcaatgttcgagatacgnnttgaggagaa

SEQ ID NO: 317363 - DNA, 105 bp, Zea mays
cccacgcgtccgtgcttgtttttctctttgttgttcaaacactttacacccaaataaggaacttcagtgacattaattttggctgcaccaaagttacatgaactg

SEQ ID NO: 317364 - DNA, 279 bp, Zea mays
ggcggttctggcggtggtggtggcttcggcgctggcggctacggtggtggcttcgggggcgccttggggaacggaggcgccgctggtggttttgatggagaagctggcaacggcggcggtggaggaggaaacggtggcggtgacggcgctggtggtggttacggcagctccggtgctggcgatgagcttcatggcgtatctggtagtggcgacggaggcgaggctgggtataatggcaagggaccctccagcggtggactctggagcaagcgtggccat

SEQ ID NO: 317365 - DNA, 307 bp, Zea mays
caccagttacttcaatgggcttcgaacatccagccgtgcaagcctacaggcgtacaactggcgcttgcggcgagcgccttacaacaaccaattgcccaattgcaacaacaatccttggcacatctaaccctacaaaccattgcaacgcaacaacaacaacaacagtttctgccatcactgagccacctagccgtggtgaaccctgtcacctacttgcaacagcagctgcttgcatccaacccacttgctctggcgaacgtaactgcatacaatcaacaacaacatctgcaacagtttatgctagtgc

SEQ ID NO: 317366 - DNA, 426 bp, Zea mays
tctccgggaaacccattgttcaacctacagtaccacaggcaatcgcaacgggcatctgacattatcacccttgttcctccaacaaccgtcagccctattacagcagttacctttggtccatttggtggcacaaaacatcagggcacaacaactacaacaacttgtgctagcaaaccttgctgcatactctcagcaacatcagtttcttccattcaaccaactggctgcattgaactctgctgcttatttgcaacaacaattaccattcagccagctagttgctgcctacccccagcaatttcttccattcaaccaactagcagcattgaacttctgctgcttatttacagcagcaacaactactaccattcagccagctagctgatgtgagccctgctgccttcttgacacaacaacagttgttgc

SEQ ID NO: 317367 - DNA, 268 bp, Zea mays
gcgacgcgttcgacgactcgtgcgaacactcgttcggctaccgaactgaattatgttagtactaagagtgaaaagggggatgtggatgatcctgacaatgcaagcaatggataatctctgcagacgcataatctgctaccgacagtaaatggtgatatggacgagcaattagaatatgctacaggaagtgctgcaagttgtgaagcacaagtgtatgcatatatgtgtctcaaggaaagtttgaaccaatgcaattcatggaatgaat

SEQ ID NO: 317368 - DNA, 253 bp, Zea mays
gagccaactagctgtggtgaaccctgtcgcctacttgcaacagcagttgggggcatccgacccacttgctctggcaaacatagttgcataccaacaacaacaacaattgcaacagtttctaccagcgctcagtcaactagccatggtgaaccctgccgcctacctacaacagcaacaactgatttcatctagccctctcgctgtggttaatgcacctacatacctgcaacaacagttgctgcaacagattgta

SEQ ID NO: 317369 - DNA, 78 bp, Zea mays
cccacgcgtccgattttgtgtagttttttaccacaaaaaaaaaaaaaaaaagaaaacgaaaatttaaaaaaataccaa

SEQ ID NO: 317370 - DNA, 431 bp, Zea mays
cccagctcttcaaccatataggcttcaacaagcaatcgcagcaagcaacgtacctttgtcgcccttgttgtttcaacaatcgccagccctatctttggtgcagtcattggtacaaaccatcagggcacaacagctgcagcaactcgtgctacctctgatcaaccaagtagctctggcaaacctttctccctactctcagcaacaacaatttcttccattcaaccaactgtctacactgaaccctgctgcttatttgcagcaacaactattaccatttagccagctagctactgcctactctcagcaacaacaacttcttccatttaaccaattggccgcactgaaccccgctgcttatttgcagcagcaaatactactaccatttagccagctagctgcagcaaaccgtgcttccttcttgacacaacaac

SEQ ID NO: 317371 - DNA, 168 bp, Zea mays
tcccactcctcctctaactcttcatccttccccatatcacaatcattatagctactttgacaaatttcgctaatccaaaactcaatcctcactctttaaaatactacaagattcctttatcatatttacaccttattatttcaatccctacatctcattccacatcac

SEQ ID NO: 317372 - DNA, 235 bp, Zea mays
catccttgctctctttgcccgatttatacgcacatcacattctcgaattattccacaatactcaattgctgctaatgcaaatcacgtacaatttatactagcaatgacttactactgctttgaaactctatctattcaagcctaccttctaaaactggcacttacagacagcacattacgactatcgaatggccaaatgcaacaacaattcttggccaattttacaaatgaagca

SEQ ID NO: 317373 - DNA, 430 bp, Zea mays
gattggagaactcgacaccatgaaggtgctgatcgttgcccttgctctcgtggcgctggctgcgagcgccgcctccagtacaagcggcggctgtggctgccagacaccaccgtttcatctaccgcctccgttctatatgccgcctccgttctatctgccgccgcagcagcagccgcagccatggcaataccccactcaaccaccgcagctaagcccgtgccagcagttcggatcctgcggcgtcggcagcgtcggcagcccgttcctgggccagtgcgtcgagttcctgaggcaccagtgcagcccggcggcgacgccctacggctcgccacagtgccaggcgctgcagcagcagtgctgccaccagatcaggcaggtggagccgctgcaccggtaccaggcgacatacggtgtggtcctgcaatccttc

SEQ ID NO: 317374 - DNA, 244 bp, Zea mays
cttctcctccccctccggttcgggttcgggttcgtgaggttctccggggggcggtttggggggttagcggatcgagatggcggcgtcggatgttgagtaccgctgcttcgtcggcggcctcgcctgggccacggacgaccactccctccacaacgccttcagcacctacggcgaggtcctcgagtccaagatcatgctcgatcgggagacgcagaggtcccgcggcttctgcttcgtcaccttc

SEQ ID NO: 317375 - DNA, 286 bp, Zea mays
  unsure (1)..(286): unsure at all n locations
gtcttcagtatgtgaaaacccaattcttcaaccctacaggatccaacatgcaattgcagcangcatcttacctttatcacccttgttcctccaacaatcatcatccctattacagcagttacctttggtgcatttattggcacaaaacatcatggcacaacaactcgtgctagcaaaccttgctgcctactctcagcaacaacatttacctttagtgcatttgttgtcacataacatcagatctcaacaactacaacaactttttctagcaatcctttctaactac

SEQ ID NO: 317376 - DNA, 307 bp, Zea mays
  unsure (1)..(307): unsure at all n locations
attccctctgtcaaaggttcttgtttcatgtagtcattcaaacccctgacgtatctgaggtgatcactgtgaagaaagcaaccgctccatacaatgcatacttgaagggcttgttctcggatatgctctgattaaatgggtggcccatgtagtttacagcaaaggttgccacctggatcatcatgttcaccatgtacgaaaccgtattcacaagaaattattttccttggctttgttggcaactgcatcccatgttatatgataattngatattgccatacgacacttgagtatccatgtagagaca

SEQ ID NO: 317377 - DNA, 261 bp, Zea mays
tattcccactctacccactcatcctaagaaaaatatatcactatctcctaccttttttatctattttttttatttttttttatatgattttttttaaatttttgtccccctttttttttttatttttttttttctttttcatatttttattctttttattcttatttcttctttttcccttctttttatattttttctttttcttttcattattatattatatttcttcctatataatttttcatttttttatatttattt

SEQ ID NO: 317378 - DNA, 410 bp, Zea mays
cccactcgtccgcccacgcgtccgcgaactcgtgggaaaaaaaaaaaaaaaaaaagaagaaatattaaaaaaaaaaaaaaaaaaaaaaaaaaaaaaaaaaaaaaaaaaaaaaaaaaaaaaaaaaaaaaaaaaaaaaaaaaaaaaaaaaaaaaaaaaaaaggaccaccattttaaagaatccaatttaactttcccttgcttacaacataaaactttttttatatcatccccaaaattaaattaacttcccgtattttaaaaaaatactaatttgaaaaaccctgggataaccaaattaaatcactttgctaaaaatccccttttcacaaattggcgtattacaaaaaagcccccaaccaatcccctttccaaaaaattgccaaccttaaattgcaaattgaaccccccct

SEQ ID NO: 317379 - DNA, 430 bp, Zea mays
cggacgcgtgggcggacgcgtgggcaacaagcaacatagaaagtggaatccagtaggagcgaatagagcaacaatggagaccaagatattttccctccttatgctccttgctctttctacatgtgttgctaacgcgacaattttccctcaatgctcacaagctcctatatagttccctttttccccatatacttcacatcatttatagcttcagtatgtgaaaacccatctcttcaaccatataggcttcaacaagcaatcgcagcaagcaacatacctttatcgcccttgttgtgtcaacaatcgccagccctatctttggtgcagtcattggtacaaaccatcagggcacaacagctgcagcaactcgtgctacctgtgatcaaccaagtagctctggcaaacctttctccctactctccgcaacaac

SEQ ID NO: 317380 - DNA, 373 bp, Zea mays
cgcacacgcacgaccacgcgacccgccaaacacagcccgcagagacgcgactatgagggccaagtgggagacgaatctcatgaccaggctgaagaagaagcgcctgaagatgatgcagagatccaactaagctaataggcatagatcctagtagtctcatcataattgtgtatcgtggcttcgatacatgagtgcatcgatagatgtaagattctatttatgcatagacgttacgatattagttcaatggctccgtttgcaaacctgcacttgataggccatctatcctgcactctagctatatatcatatcgttgtgcttagacatatccataattctgtgctaagaacctatcatgatggagctttatgaa

SEQ ID NO: 317381 - DNA, 350 bp, Zea mays
gcgaagcggcagtgcgtagagaggatcgtcgaacagaacagcatgaagatggtcatcggtcgcgtcgtgtgcctggctctgtcagctgccagcgcctctgcaatgcagatgccctgcccctgcgcggggctgcagggcttgtacggcgctggcgccggcctgacgacgatgatgggcgccggcgggctgtacccctacgcggagtacctgaggcagccgcagtgcagcccgctggcggcggcgccctactacgccgggtgtgggcagccgagcgccatgttccagccgctccggcaacagtgctgccagcagcagatgaggatgatggacgtgcagtccgtcgcgcaaca

SEQ ID NO: 317382 - DNA, 81 bp, Zea mays
agtttcacagacagcatccattccacagtcaccagagcactagagcagagcagcaacggacaagagcagagcgagatcgtc

SEQ ID NO: 317383 - DNA, 344 bp, Zea mays
aaaaaaaaaaaaaaaaaaaaaaaaaaatataaaaaaaaaaaaaaaaaaaaaaaaaagaaagattattataaaaatccaaacttacaaaacacatacatacaacaaaataaactcttctatattttcaccctacatacaattcactcccctcctttttacaacttcattacttttaaaaccctctcattccccaacttaatctcctttcaccacattcccctttctccaaatccctaatacccaaaattcccccacctatcgccctttccaacatttccccattctaaatatccaataaaaccccccctgtatcgcctcattaacctcttccactattttaattc

SEQ ID NO: 317384 - DNA, 326 bp, Zea mays
cccacgcgtgcgcaacaactcgtcctcgtcgtgaacaaaacccatacctcacctcctatcacaatgcctttacatgcgtgcttattttgttccttctcttttgagctaccattacatagttgcaaactgcagaacggcttttcgcatgtgaaacccgtttgaaaaaaataatcggctttggataggggtttggggtcctcctttccctgaaagaacgcatcggcgtgctgctcgcggtcaagccgtgcctgtcgccttgcggttgcctctagcgtcatgtgtaacgcggctatgcccagtgaaataacgtttggtccttgtgtttg

SEQ ID NO: 317385 - DNA, 303 bp, Zea mays
gcgaatcttacttgcactcttacaaactattttatcttatgttatctctctacacttgcctgacaactacccaagctttaagaaaccaaaaatttcctatttcattaacatacaccatcttatgatcactaaacctatctttatactatatattagaacctgtcattaattttcaagcaagacgacggtctttttataaccaacattcatacttacaagtacacttaattttcttaaaaatattttgtttcacctaaacctaaattaaaagtcctcccttaacaaaaccataactgtgaaaat

SEQ ID NO: 317386 - DNA, 250 bp, Zea mays
aaaaatcttaaccacaatatcttactttccaatctaacataaacaagatcaaggagcgtctcattttccactccaacgtcacattccaatacgcgacccataacttgctcataataccggatcacatttattccataattactgctcccacctaccccaagacaatactacagttctcctacatttacaatatctatacctcgaactcttaatgcactaagacaatcactcacttaatcaatgcaacttt

SEQ ID NO: 317387 - DNA, 179 bp, Zea mays
aaaaaaaaaaaaaaaaaaaaaaaaaaaataaaaaaaaaaaaaaaaaaaaaaaaaaaaaaagtaaatctttatacatactaccaaacttactaacacatacatacaacttcataactatttatataacatcacctaacttcatttcactctccaaactctttacaacttacctaacttaa

SEQ ID NO: 317388 - DNA, 431 bp, Zea mays
gcgcttgttgtgtcaacaatcgccagccctatctttggtgcagtcattggtacaaaccgtcgggtcacaacagctgcagcaactcgtgctacctgtgatcaaccaagtagctctggcaaacctttctccctactctccgcaacaacaatttcttccattcaaccaactgtctacactgaaccctgctgcttatttgcagcaacaactattaccatttagccagctagctactgcctactctcaacaacaacaacttcttccatttaaccaattggccgcactgaaccccgctgcttatttgcagcagcaaatactactaccatttagccagctagctacagcaagccgtgcttccttcttgacacaacaacaattgctgccgttctaccagcagtttgcggctaaccccgcaaccctcttacaactacaac

SEQ ID NO: 317389 - DNA, 263 bp, Zea mays
caacaagcaacatagaaagtggaatccagtagcaacaatagagcaacaatggcgagcaggatattttccctccttatgctccttgctctttctacatgtgttgctaacgcgacaattttccctcaatgctcacaagctcctatagcttcccttcttcccccataccttccatcaattatagcttcaatatgtgaaaacccagctcttcaaccatataggcttcaacaagcaatcgcagcaagcaacatacctttatcgccctt

SEQ ID NO: 317390 - DNA, 245 bp, Zea mays
cccactcgtcccgcagccgctgcagcttacaaccaccaccaccaattcatctaccgagtccgttacatctgacacctacgtttcacctgccacctcccgttcatataccaccccctatccacctttcgccatcagtccacctatcatcatccgttcaagtgccgtccacaattcatctgccaacgtcaccatgccaataccctactcaaccaaccaagtcttaaactcatacccatacacaccca

SEQ ID NO: 317391 - DNA, 421 bp, Zea mays
  unsure (1)..(421): unsure at all n locations
ccggagcaggcgaaacggcgccgacgacaatggcagcaacaagggcttccccggtccgtctgttgctgctgctcaccgtccagctgagcttgctcttccgcctccccgactccccctccaccctcgccctcgccctcgccctcgccgcggaaccagaccaacagaacgccaagcagcatcgccagcccgcgctgctggtgcagtcgacgtgcaactccaccagcttctacgacctctgcatcgccgcgctcgccgccgaccccgccagctccaccgncgacgtcccgggcctgggcggcatcgccgtgtccgccgccgcaaacaacgcctncggcacggccgncttcctcggcaacgccagcgacgccgcggccaccccgcatgcggaccgcgcgcgttcctcgccgagcaggcctaccac

SEQ ID NO: 317392 - DNA, 227 bp, Zea mays
  unsure (1)..(227): unsure at all n locations
gtactcggtctcggaattcgccgggtgcgacgccacgccgtcgcgatgtgtactccactctnactggtggnnttttgagtgcnttggtattctcctaagnngatggccccagacgccntggagnncatgtctctccgttgcggtgtcaactttcttggaaagtgaagcnnagatgatttntngctgctgctaactaanngatggatgcccaacgacctcnnccaaat

SEQ ID NO: 317393 - DNA, 439 bp, Zea mays
ctttatcgtccttgttgtttcaacaattgccagccctatctttggtgcagtcagtgtgacaaaccatcagggcacaacagctgcagcaactcgtgctacctctgatcaaccaagtagctctggcaaacctttctccctactctcagcaacaacaatttcttccattcaaccaactgtctacactgaaccctgctgcttatttgcagcaacaactattaccatttagccagctagctactgcctactctcagcaacaacaacttcttccatttaaccaattggccgcactgaaccccgctgcttatttgcagcagcaaatactactaccatttagccagctagctgcagcaaaccgtgcttccttcttgacacagcaacagttgctgcctttctaccagcagtttgcggctaaccccgcaacccttttacaactacaaca

SEQ ID NO: 317394 - DNA, 368 bp, Zea mays
  unsure (1)..(368): unsure at all n locations
ctgccctatttcttcctcaagcccgcaggccgctccctctgctgtccagggtgcaggctgtcttctctcgcccctgctctcccctggccggaccggcccctagctcgagcagggagctcgtcgtcgcccatggctggcctcctctatacagcgaccgccaccccctgtagcttcccctctgcctcggcgcccccttcttcttgtacctccagcagcaaggatttaaccccccatggcgtgtggccttgcctgctccacggtctgcagcagccctgcgctcacctnccatggaaaaccagtccgcttcctgcctccggcaagccgcatttgttccctgcgcgagctcgctgcggggcgccctagccact

SEQ ID NO: 317395 - DNA, 413 bp, Zea mays
cagctagcaacatagaaagcacaatattgtaccaataatggcagccaaaatattttggctcgttatgctccttggtctttctgcaagtgctgctacggcgagcattttcccgcaatgctcacaagctcctatagcttcccttcttcccccatacctctcaccagcgatgtcttcagtatgtgaaaatccaattcttctaccctacaggatccaacaggcaatcgcagcaggcatcttacctttatcacccttgttcctccaacaatcatcagccctattacagcagttacctttggtgcatttattggcacaaaacatcagggcacaacaactacaacaactcgtgctagcaaaccttgctgcctactctcagcaacagcagttacctttggtgcatttgttggcacaaaaca

SEQ ID NO: 317396 - DNA, 296 bp, Zea mays
acggtgcaaagcgctcagatgcccacctatttaccaatgactctgcactctatcctgacacgttgtaatatacactcctacgtctactaatcaactattctacagacactcgccaccttctatgattccccctcacccaagatttgctatccagcaacagcttgctccaagcatgaggcctgggggtcctcatatgccaaactatcatgaaccggttgtccaacagggccaacagggtccacgcccacctattacgcgtcgagcttgagcccagggacagcaacctgcgccatcat

SEQ ID NO: 317397 - DNA, 268 bp, Zea mays
tccccgtccacccaatccttccgccaatccttccgaacaaaaaaactaaatttaaaaaaacaaaaaataatacaataaatcaagaaaattatactacactgcagacaataaaccacaaacaaaccatatacaaaagctaaaaaagatactattaaacacaaagctaacttacccatcaagaaatctctatctccatccatcaaggctcctcttcactttctcctaaaccatatcgttcgctacctcaaaaatgatcaatacgctcaac

SEQ ID NO: 317398 - DNA, 380 bp, Zea mays
aaaaacacaccaagcgaatcgcactaccaacgacctaacaccaatggctaccaagatagtaggcctccttgcgcttcttgcccttttagtgagcgcaacaaatgcgttcattattccacagtgctcacttgctcctagtgccagtattccacagttcctcccaccagttacttcaatgggcttcgaacatccatccgtgcaagcctacaggctacaactagcgcttgcggcgagcgccttacaacaaccaattgcccaattgcaacaacaatccttggcacatctaaccctacaaaccattgcaacgcaacaacaacaacaacagtttctgccatcactgagccacctagccgtggtgaaccctgtcacctacttgcaac

SEQ ID NO: 317399 - DNA, 442 bp, Zea mays
  unsure (1)..(442): unsure at all n locations
gcgaagcgcactagcaacaacctaacaacaatggctaccaagatattatccctcctgcncgtcttgcgctttttgcgagcgcaacaaatgcgtccattattccacaatgctcacttgctcctagttccattattccacagttcctcccaccagttacttcaatggccttcgaacacccagctgtgcaagcctataggctacaacaagcgattgcggcgagcgtcttacaacaaccaattgcccaattgcaacaacaatccttggcacatctaacaatacaaaccatcgcaacgcaacagcaacaacagttcctaccagcactgagccacctagccatggtgaaccctgtcgcctacttgcaacagcaactgcttgcatccaacccacttgctctagcaaacgtagtttcaaaccagcaacaacaacaactgcaacaattttt

SEQ ID NO: 317400 - DNA, 371 bp, Zea mays
gttctagatcgcgagcggcgccctttttttttttttttttttttttttttttgttttttttttttttttttttttttttttttttttttttactcaggttcaccatcaccaacgtcttttaaactttttaacccttgaattttacagaaccaaaaaaataccttggtttagcctaaaaattcatcatttcctaaaacaaggtttccaatacaaatcccctaccatcaaaaacaacaaaaggcttttacaaaacaaaatttctaccaacaccccggttccaacaagtttatctttttttttcaacaatcatttaaataaggggccgtctcaaaaccgccccatccgcggcatccctttcttttcactcccct

SEQ ID NO: 317401 - DNA, 380 bp, Zea mays
cccacgcgtccggtgcgtagagaggatcgtcgaacagaacagcatgaagatggtcatcagtctcgtcgtgtgcctggctctgtcagctgccagcgcctctgcaatgcagatgccctgcccctgcgcggggctgcagggcttgtacggcgctggcgccggcctgacgacgatgatgggcgccggcgggctgtacccctacgcggagtacctgaggcagccgcagtgcagcccgctggcggcggcgccctactacgccgggtgtgggcagacgagcgccatgtaccagccgctccggcaacagtgctgccagcagcagatgaggatgatggacgtgcaatccgtcgcgcaacagcttcagatgatgatgcagcttgagcgtg

SEQ ID NO: 317402 - DNA, 228 bp, Zea mays
cccacgcgtccgcctgtgtggtgcaaaactctgaataaaacctgaataaaacctgatggaggacaaaaaaaaaaaaaaaaaaaaaaaaaaaaaaaaaaaaaaaaaaaaaaaaaaaaaaaaaaaaaaaaaaaaaaaaaaaaaaaaaaaaaaaaaaaaaaaaaaaaaaaaaaaaaaaaaaaaaaaaaaaaaaaaaaaaaaataaaacaaattaaaaactctattaatacc

SEQ ID NO: 317403 - DNA, 428 bp, Zea mays
cggacgcgtgggtagcaacatagaaagcacaatagtgtaccaacaatggcagccaaaagatttgcctccttatgctccttggtctttctgcaagtgctgctacggcgaccattttcccgcaatgctcacaagctcctatagcttcccttcttcccccgtacctctcaccagtgttgtcttcagtatgtgaaaacccaattcttcaaaccctacaggatccaacatgcaattgcatcaggcatcttacctttatcacccttggtccttcaacaatcatcagccctattacagcagttacctttggtgcatttattggcacaaaacatcaaggcacaacaactcgtgctagcaaaccttgctgcctactctcagcaacaacagttacctttggtgcatttgttggcacaaaacatcagggcacaacaact

SEQ ID NO: 317404 - DNA, 384 bp, Zea mays
  unsure (1)..(384): unsure at all n locations
agaccattagctttatctactccagagcgcagaagaacccgatcgacaccatgagggtggggctcgttgccctcgctctcctggctctcgctgcgagcgccacctccacgcatacaagcggcggctgcggctgccagccaccgccgccggttcatctaccgccgccggtgcatctgccacctccggttcacctgccacctccggtgcatctcccaccgccggtccacctgccgccgccggtccacctgccaccgccggtccatgtgccgncgncggttcatctgccgncgncaccatgccactaccctactcaaccgncccggcctcagcctcattcccagccacacccatgcccgtgccaacagccgcattcaagcccgtgcc

SEQ ID NO: 317405 - DNA, 304 bp, Zea mays
ccactcgttcgcttgcatttcctttaaatccttccctatttaatttttcaggaaaaatcccaccttttatgttttttttcattttagttccttttaatgtctcttgtttttttacctggacgctacttttctttgtcagcataatgcatatacaagttttatcatgtaagtaatctttcaattttcctgctgcatatgttgttttccactttttcccatgatcattaatactatacattctatcctattttaaatccttcctttttaaattattgaaacttttgcctttaattaaaattctaat

SEQ ID NO: 317406 - DNA, 193 bp, Zea mays
gcagcttctgcttgctttgtgggggaaggagagagagagagagagagatctagtagagagggtagtaagtggtcctcgaacgaagatgttggcggtgttcagcgggcaggtggtggaggtgccggcggagctggtggcggcgggcagccggacgccgtcgcccaagacgaaggcgtcgcagcttgtggggcgc

SEQ ID NO: 317407 - DNA, 239 bp, Zea mays
cgtgtttttttttttttttttgtttttttttttttttttttttttttccaaatcaacaaaccttcattccggaaagagtacttaaaacataaccgcataaaaattctcatctctctcaactactcccatactttctcacctcccaccccctatacaatacacatcccctcccctttcacgacatctccataacttttactccattatctcattacaaacccccttattagtcccctaat

SEQ ID NO: 317408 - DNA, 378 bp, Zea mays
gttggcttctcctccccctccggttctggttcgggttcgtgaggttctccggggtgggggttcgtgggtgagcggatcgagatggcggcgtcggatgttgagtaccgctgcttcgtcggcggcctcgcctgggccacggacgaccactccctccacaacgccttcagcacctacggcgaggtcctcgagtccaagatcatcctcgatcgggagacgcagaggtcccgcggcttcggcttcgtcaccttctccacggaggaggcgatgcggaacgccatcgagggcatgaacggcaaggagctggacggccgcaacatcaccgtcaacgaggcccagtcccgcggcggccgtggaagcggcggcggtgggtacggtggt

SEQ ID NO: 317409 - DNA, 429 bp, Zea mays
ttttgagcattcagaaacacaccaagcgaagctacctagcaacgacttaacaacaagtgtctaccaagatattagccctccttgcgcttcttgccctttttgtgagcgcaacaaatgcgttcattattccacaatgctcacttgctcctagtgccattataccacagttcctccgaccagttacttcaatgggcttcgaacacctagctgtgcaagcctacaggctacaacaagcgcttgcggcgagcgtcttacaacaaccaattaaccaattgcaacaacaatccttggcacatctaaccatacaaaccatcgcaacacaacagcaacaacagttcctaccagcactgagccaactagatgtggtgaaccctgtcgcctacttgcaacagcaggtgcttgcatccaacccacttgctctggcaaacg

SEQ ID NO: 317410 - DNA, 402 bp, Zea mays
cccagctcttcaaccatataggcttcaacaagcaatcgcagcaagcaacatacctttgtcggccttgttgtttcaacaatcgccagccctatctttggtgcagtcattggtacaaaccatcagggcacaacagctgcagcaactcgtgctacctctgatcaaccaagtagctctggcaaacctttctccctactctcagcaacaacaatttcttccattcaaccaactgtctacactgaaccctgctgcttatttgcagcaacaactattaccatttagccagctagctactgcctactctcagcaacaacaacttcttccatttaaccaattggccgcactgaaccccgctgcttatttgcagcagcaaatactactaccatttagccagctagctgcagc

SEQ ID NO: 317411 - DNA, 413 bp, Zea mays
cggacgcgtgggcggacgcgtgggttttttttttttttttttttttttttttaccctagagtagaaataacgagtgcatgtagtaaattgtcatattgcatcagttgataagttggtatctccggtgcaacttgcttgagtagttgagttgttgccaacactcaacactccacttgaaccacatattcttaaacattactagaacatcgaagagacacactacgcttacacaccgtcgtggaagaataattgaatagccccaataccacagtgatcgtgatctataaaggacaacaacatgccgttcaaggccccatttaatattaaaaggttttttaagtttaactactaatggtttttcctaagtttttttcaacaaccattgcttttgccggttttttttttgggatttt

SEQ ID NO: 317412 - DNA, 402 bp, Zea mays
aagagttcttcagcgcctccaatgtttatgcctgcccgatttttccttgaacccatgccccttttactaacccgtgacccaaacgctggcgcggagatgccgatgcttcctatggcagcaggtataggtggtggcgccggtgggctccacctcaacggcgccgccctgttcggcaatccgatggccgcgccccagcccatgagcttctaccaccagatgggcacggggactgcttgcgcttgcggcttcgatgtttctgcccccgaaaataagccctcctcgatggtgtcgcaaaaagacgaccaggctaatggcgctgagatctcgtcgatgatgtccgtggccggcccaaggccttggaacaacaacaaccattaaaaatgattgcgtgtggaagtactg

SEQ ID NO: 317413 - DNA, 356 bp, Zea mays
cccactcgtccgcccacgcgtcctaataaaaaaaaaaaaaaaaaaaaaaaaaaagaaagattaaaaaaaaaaaaaaaaaaaaaaaaaaaaaaaaaaaaaaaaaaaaaaaaaaaaaaaaaaaaaaaaaaaaaaaaagggcgccctttttaaagaatccaattttacttacccttccttccaacttaatactttttttatagtgtaacctaaattaaattaatttcccttctttttaaaacttcttaattggaaaaaccttggctttaccaaattaaatccctttgaaaaaaatccccttttcgcaagttggcttaataccaaaaagcccctaaccaatcgcctttccaaaaattttc

SEQ ID NO: 317414 - DNA, 208 bp, Zea mays
ttcccttctctacccactcttcctcccactcttcctaaaaaaaaaaaaaattttttaaaaaaaaaaaaacaaaaaaaaaaacaatgtcattatttaaatatattataccatatcaaaaatacaaaaaataaaaaatcaaacataataaaatattttatcttctttaattttttccaattcacttttcacttcctttacaatttacaac

SEQ ID NO: 317415 - DNA, 272 bp, Zea mays
aaaaaaaaaaaaaaaaaaaaaaaaaaaaaaaataaaaaaaaaaaaaaaaaaaaaaaaaagaaagaataaaaaaaaaaaaaaaaaaaaaaataaaaaaaaaaaaaaaaaaaaaaaaaataaaaaaaaaaaaaaaaaaaaaaaaaaaaaaaaaaaaaaaaaaaaaaaaaaaaaaaaaaaaaaaaaaactaaattaataaaaaaacttttaaattcatccattttaatactcccttaataaaaaacatttttttacttatttaatattaccaaaa

SEQ ID NO: 317416 - DNA, 160 bp, Zea mays
tctttactatctttcctaattctatctaatccagtcaactatttatttctcatataaatcatctactacaccataataaattcttttatatctcttaaaaattatttatctcatatcttatactttttacttacctttatataattaatttaatttattc

SEQ ID NO: 317417 - DNA, 435 bp, Zea mays
ccactcatccggttctagatcgcgagcgccgccctttttttttttttttttttttttttttttttagtttttttttttttttttttttttttttttttttttttttttttttttttttttttttttttttttttttttttttttttttttttttttttttttttttttatattattattattttttttttttaaaaaaaaaactcttaaaaaccctttattcatcaataattataataaccctccccaattttttaaaaacatattttttttacaaaaaaattatcactaattttttttttatccattataaataattttacaccttattttttaaataaaaataaatcatattaaatttttttttttccaaaaaaataatattttacctttaaatttttttaaaaaaaattttcatccccaaaaaatttttttt

SEQ ID NO: 317418 - DNA, 66 bp, Zea mays
  unsure (1)..(66): unsure at all n locations
cagaaataagaaagtacatttctaaaattaaaaaaaaaaaaaaaaaaaaaaaaaaaaaaagtnnct

SEQ ID NO: 317419 - DNA, 332 bp, Zea mays
caacaatggctaccaagatattaaccctccttgcgcttcttgcgctggttgtgatcgcaacaaatgcgttcattattccacaatgctcacttgctcctagtgccattattccacagttcctcccaccagttacttcaatgggcttcgaacacctaactttgcaagccaacatgcaacaacaagcgcttgcggcgagcgtcttacaacaaccaattgcccaattgcaacaacaatccttgccacatctaacaatacaagccatcacaacgcaacagcaacaacagttcctaccagcactgaaccacctagccatggtgaaccctgccgcctac

SEQ ID NO: 317420 - DNA, 384 bp, Zea mays
gggttggcttctcctccccctccggttcgggttcgggttcgtgaggttctccgggggtcggtttcgtgggtgagcggatcgagatggcggcgtcggatgttgagtaccgctgcttcgtcggcggcctcgcctgggccacggacgaccactccctccacaacgccttcagcacctacggcgaggtcctcgagtccaagatcatcctcgatcgggagacgcagaggtcccgcggcttcggcttcgtcaccttctccacggaggaggcgatgcggaacgccatcgagggcatgaacggcaaggagctggacggccgcaacatcaccgtcaacgaggcccagtcccgcggcggccgtggaggcggcggcggtgggtacggtggtggcc

SEQ ID NO: 317421 - DNA, 206 bp, Zea mays
catcaagatcaacgtcaccaacatgaactaagtcaaaatcatcaaactaactcactacaactcctagcaccgaatatactccaactacattatctattaatcaaaccaagcttactattctgtatcactcccaacatatcaacttctctctatatatctattctatcttcatttccaaatccactctttcaccttgctggtattat

SEQ ID NO: 317422 - DNA, 250 bp, Zea mays
cccacgcgtccgcccacgcttccgacaatctttacaaagcctaacaggtagattgttttgtttttttaatcttgtgtgaattcataaacgtgcctgaagctttcacatatacatcacttgcttttatcatttcaataatttcagcctttctgtcagatgaaaaaaactacaaagtgctttcagtatttattgcaactatgtagtaattgaaagaatggaaacaccatcattatctataaaggaaacattt

SEQ ID NO: 317423 - DNA, 184 bp, Zea mays
tcggacttcgtgggctgactcttgagatctcgagcgctcacccattcatacatacaacaagatatttttaaaattatatgacctatattacatccactttcctaaattatacaacatattaactaataaaaccctaatcatacataacttaatatcatatcaaaacatcctcatatatctatca

SEQ ID NO: 317424 - DNA, 106 bp, Zea mays
cccactcgtccgcccacgcgtccgcccttacgtccatccacacgtccctgaacagtagaaaatttatacaagcattgatgcatcaaaaaaaaaaaaaaagctctct

SEQ ID NO: 317425 - DNA, 169 bp, Zea mays
aagaaatctggtaattgctagctctacttttatggcacgaaagtgtttgtccgtctcaggtatctctgcagccatacatgcagtacaggagatcggcaattaccagatttatttactagctctacttttatggcacgaaagtgtttgtcggtctagttctagatcgcga

SEQ ID NO: 317426 - DNA, 83 bp, Zea mays
cccacgcgtccgcccacgcgtccgcccacgcgtccgcccacgcgtccgggaacagtggaaaatttatgcaagcatttctgctc

SEQ ID NO: 317427 - DNA, 378 bp, Zea mays
ctagcaacatagaaagcacaatagtgtaccaacaatggcagccaaaatattttgcctacgtaggctccttggtctttctgcaagtgctgctacggcgaccattttcccgcaatgctcacaagctcctatagcttcccttcttcccccgtacctctcaccagtgttgtcttcagtatgtgaaaacccaattcttcaaccctacaggatccaacatgcaattgcatcaggcatcttacctttatcacccttgttccttcaacaatcatcaaccctattacagcaattacctttggtgcaattaatggcaccaaaccttaaggcaccaccaccttttccaacaaaccttgcttgccaactttatcaacaacagttaccttt

SEQ ID NO: 317428 - DNA, 394 bp, Zea mays
caattgcccaattacaacaacaatccttggcacatctaaccatacaaaccatcgggacgcaacagcaacaacaatttctaccagcactaagccaactagctgtggtgaaccctgtcgcctacttgcaacagcagttgcttgcatccaacccacttgctctggcaaacatagttgcataccaacaacaacaacaattgcaacagtttctaccagcgctcagtcaactagccatggtgaaccctgccgcctacctacaacagcaacaactgatttcatctagccctctcgctgtggttaatgcacctacatacctgcaacaacagttgctgcaacagattgtaccagctctgactcagctagctgtggcaaaccctgctgcctacttgcaacagct

SEQ ID NO: 317429 - DNA, 405 bp, Zea mays
  unsure (1)..(405): unsure at all n locations
gcgcaagttgttgtagttgttgtgctatcaaaccttgctgcctactctcagcaacancggtttcttccattcaaccaagtagctgcattgaactctgctgcttatttgcaacaacaactaccattcagccagctagctgctgcctacccccaacaatttcttccattcaaccaactggcatcattgaactctcctgcttatttacagcagcaacaactactaccattcagccagctagctggtgtgagccctgctgccttcttgacacaacaacagttattgccgttctacctgcacgctgcgcctaacgctggcaccctcttacaactgcaacaattgctgccattcaaccaacttgctttgacaaacccagcagcgttctaccaacaacccatcattggtggt

SEQ ID NO: 317430 - DNA, 274 bp, Zea mays
cccacgcgttcgacctcactaacaccgagctagcagctcgctctgtcctgcaacaaggcccgctcgctcctgctcccagcagctggtcaaggcggccgtactggcaggcgcgctgctgatgctggcggcgggggccggaacggcttcagctgcggagagctgcatgccaggtgaccacttctgacgagacgtgccttagatacgcaatacacagaacggcattctccaacatgacgagctgcacctgggtgcgctagattaacagacgtgcgtc

SEQ ID NO: 317431 - DNA, 423 bp, Zea mays
gaaagtggaatccagtagcaacaatagagcaacaatggcgaccaagatattttccctgctgatgctccttgctctttctacatgtgttgctaacgcgacaattttccctcaatgctcacaagctcctatagcttcccttcttcccccataccttccatcaattatagcttcaatatgtgaaaacccagctcttcaaccatataggcttcaacaagcaatcgcagcaagcaacatacctttatcgcccttgttgtttcaacaatcgccagccctatctttggtgcagtcattggtacaaaccatcagggcacaacagctgcagcaactcgtgctacctctgatcaaccaagtagctctggcaaacctttctccctactctcagcaacaacaatttcttccattcaaccaactgtctacactgaa

SEQ ID NO: 317432 - DNA, 183 bp, Zea mays
cccactcaacacacccatcctccactactaccacactttttccaacctactaaccactcatcatccaatgatactattataacttctgtaaacatccccacctcactctccatcaactcaacaaatacatctactattccacactactcactccccaccaataacactataccacatatcctc

SEQ ID NO: 317433 - DNA, 352 bp, Zea mays
cggacgcgtgggcggacgcgtgggaccaactggcatcattgaactctcctgcttattgacggcagcaacaactactaccattcagccagctagctggtgtgagccctgctgccttcttgacacaacaacagttattgccgttctacctgcacgctgcgcctaacgctggcaccctcttacaactgcaacaattgctgccattcaaccaacttgctttgacaaacccagcagcgttctaccaacaacccatcattggtggtgccctcttttagatttcttatgagttatagttcaataataaagttttttgtctgatgtttgtggcttcccagaaataataaagtccatttct

SEQ ID NO: 317434 - DNA, 419 bp, Zea mays
gcattctctctacacaagcgactgacaaagcaattaccaaagtcaacaacagaacgtcaatggccaccaagatattttccctccttatgctccttgctctttctgcatgtgttgctaacgcgacaattttccctcaatgctcacaagctcctatagcttcccttcttcccccataccttccatcaatgatagcttcagtatgtgaaaacccagctcttcagccctataggctccaacaagcaatcgcagcaagcaacatacctttatcacccttgttgtttcaacaatcgccagccctatctttggtgcagtcattggtacaaaccatcagggcacagcagctgcagcaactcgtgctacctgtgatcaaccaagtagctctggcaaacctttctccctactctcagcaacaacaattt

SEQ ID NO: 317435 - DNA, 265 bp, Zea mays
accgcactctacaccgtaacacctctcatctaaccaccgcagccctactaacaaagaaagacgcttatcacgatgtccagtgcacctatactcgttcaacaccaccttttccaacaacatttgcaccatcacaatacacctattatcacttatccttaagagctactcacttcacactactttcaccacccactttccataatcaactgactgtttctaactctactgcatacctacaacatcgaccacaaacacttaatccact

SEQ ID NO: 317436 - DNA, 516 bp, Zea mays
  unsure (1)..(516): unsure at all n locations
cggttccggaatttcccgggtgcgacgccactgcgtctccgttgcttacccagaggttaatggggtcttgagntagtattnnntccaattgcatttattattttatttaaatgtccacactcctaagtgatctgctgtttatttnnngtcaattaagggtcacttagtcaanngcttgcagccnnttaaagggaccctcgatgcaaggctttanngggagatnccgaagnnctatttggnnatcttgtaattgatcgggaagcttcccatctgaatcatcgaaatttntgtactcattttgcaggatgtnnctttaatctccttccaaattntgaactgtaaatgagccctaattaaagccttttgcagtgaaaacataacgaccatgatgtttggtgaatataacctgtctttctctgatcccggaagcgtcatttgcgccttctnacaatttaatcanacaattaagatgcttaaacaaaggagcatcgagaaaggccgaggggattcgaaacc

SEQ ID NO: 317437 - DNA, 267 bp, Zea mays
tacctacatagataataaatcaattcacgtttaaatgaagctcattattctcaccaatgatcattcttacaatcccatgtatcactcctacaacctacatctttcatacactctacttcataatgctcctcgtcccagtataacttatatacatccaaacccctcacaatacacttcctaatatctacgcatttcttaaccattatataactcatctctttaattatattcacattccttataccccaatctacaacatcaacactt

SEQ ID NO: 317438 - DNA, 204 bp, Zea mays
tccaatcccaatccatctccgggcattccggcgcgtttagttcattaggtcttctttctcatcgggggctagtgttattttacctttcttcttttctgtctattggttaattggttccccctgaatgtttttttgtttgtatagagagagaaagagaaaagaaggttagaagagaagcaagagaaatagatgaatcaaagtggt

SEQ ID NO: 317439 - DNA, 422 bp, Zea mays
tagcaacataaaaagcacaataatggtccaacaatggtaggccaaataattttgcctcctgatgctccttggtctttctgcaagtgctgctacgacgaccattttcccgcaatgctcacaagctcctatagcttctcttcttcccccatacctctcaccagcgttgtcttcagtatgtgaaaacccaattcttcaaccctacaggatccaacaggcaatcacagcaggcatcttacctttatcacccttgttcctccaacaatcatcagcctattacatcaattacctttggtgcatttattggcacaaaacatcagggcacaacaactacaacaactcgtgctagcaaaccttgctgcctacgctcagcaacagcagttacctttggtgcaattgttggcacaaaacatcagggcacaaca

SEQ ID NO: 317440 - DNA, 406 bp, Zea mays
ggcggcggctgatgtggagtaccgttgcttcgtcggcgggcttgcctgggccacgagcaacgagtcgctggagaatgccttcgcctcctacggcgagatcctcgactccaaggtcatcaccgaccgggagacggggaggtcccgcggcttcggcttcgttaccttctcctccgagaactccatgctcgacgctatcgagaacatgaacggcaaggagctcgacggccgtaacatcaccgttaaccaggcccagtcccgtggcggtggcggtggcggcggtggctacggcggcggtcgcggcggcggcggcggttatggtggcgggcgccgtgacggcggttatggcggcggtggcggctacggcggtcggcgcgaaggtggcggcggcggctacggaggcggtggc

SEQ ID NO: 317441 - DNA, 421 bp, Zea mays
cccacgcgtccggaccaactagcaacatagaaagcacaatagtgtaccaacaatggcagccaaaatattttgcttgcttatgctccttggtctttctgcaagtgttgctaccgcaaccattttcccacaatgctcacaagctcctatagcttcccttcttcccccatacctctcaccagcggtgtcttcaatgtgtgaaaacccaattgttcaaccctacaggatccaacaggcaatcgcaacaggcatcttaccattatcacccttgttcctccaacaaccgtcagccctattacagcagttacctttggtccatttggtggcacaaaacatcagggcacaacaactacaacaacttgtgctagcaaaccttgctgcatactctcagcaacatcagtttcttccattcaaccaactggct

SEQ ID NO: 317442 - DNA, 113 bp, Zea mays
gtgaacatggcggtcgttggctttactcccaaaatacgagcgacaaaaaaaaaagaagaaaataataaaaaaaataaaaaaaaaaaaaaaaaaacgacctcccactttatata

SEQ ID NO: 317443 - DNA, 142 bp, Zea mays
attcccagctggacgccactcatccgcccacgcgtccgaaaaaaaaaaaaaatttattaaaaaaaaaaaaaaaaaaaaaaaaaaaagaaaattaaaaaaaaaaaaaaaaaaaaaaaaaaaaaaaaaaaaaaaaaaaggccgc

SEQ ID NO: 317444 - DNA, 55 bp, Zea mays
gtcaaacaaaacatatcatacaaatccacttttggttttgttaattccaaatacc

SEQ ID NO: 317445 - DNA, 417 bp, Zea mays
gttggcttctcctcccccaccggttcgtgttcaggttctggttcgtgggcgagaggggggagatggcggcgtcggacgttgagtaccgttgcttcgttggcggcctcgcctgggccaccgacgaccactccctcaacaacgccttcagcacctacggcgaggtcctcgagtcgaagatcatcctggatcgggagacgcagaggtcccgcggcttcggcttcgtcaccttctccacggaggacgcgatgcgcagcgccatcgagggcatgaacggcaaggagctcgacggccgcaacatcaccgttaacgaggcccagtcccgcggcggccgtggaggcggcggtggcggatacggtggcgggcgccgtgatggaggcggctacggcggtggcggtggaggctacggcggtggtcgtg

SEQ ID NO: 317446 - DNA, 123 bp, Zea mays
cccacgcgtccgcaatgatgggttgttggtagaacactgctgggtttcttatgaggtgtagttcaataataaagtgttttatctgatgtttgtggcttcccagaaataagaaattacatttct

SEQ ID NO: 317447 - DNA, 389 bp, Zea mays
cggacgcgtgggcggacgcgtgggattgagaccaacaagcaacatagaaagcggaatggaggagcaacaatagagcaacaatggcgaccaagatattttccctccttatgctccttgctctttctacatgtgttgctaacgcgacaattttccctcaatgctcacaagctcctatagcttcccttattgccccataccttccatcaattatagcttcaatatgtgaaaacccagctcttcaaccatataggcttcaacaagcaatcgcagcatgcaacatacctttatcgcccttgttgtttcaacaatcgccagccctatctttggtgcagtcattggtacaaaccatcatggcacaacagctgcagcaactcgtgctacctctgatc

SEQ ID NO: 317448 - DNA, 194 bp, Zea mays
gcggcggcggcgcccgcctcggcattgcctcggggcggcggcggcggcctgatcagattgcatctacgtcatccgggacgtcaacggggaactgttctcgggcggtgtcggcggcggctgcttgccgacggcgtcgaatgccgcgatcgccgctctgtaagaggtgaaggcctgtgagtggttcggtcgctctt

SEQ ID NO: 317449 - DNA, 398 bp, Zea mays
cttggccgaccccttggccaaaagtaaattccgggaaaaaaggaaaccagaaagaatgtataaaggccgaggattaaaagaaaaggaaaaggaaaaagaaaaaaagattcaaaaaagaaaaaaccaaaaagggaaaaaggaagaaagaagatacataaataaaagggaaaaaaaaaaggaaggcatgaaaaaaaagatgaacaaagttaaagagaaaagagagaaggacaagaaaaaggagaagaaaaaagcaaaagagcagaaaaaaaaagaaggaacaaaaaaaagcaaaaaaaaaaaaaaaaagaaggacaaaaaaaaaaaaaaaaaaaaaaccaaagaccaaaaaaaaaaaccaaaagagaaaaaaaggaagggaataagggaaggagaacctt

SEQ ID NO: 317450 - DNA, 401 bp, Zea mays
ctgcggggttcgggttcgtgggtgagcggatcgagatggcggcgtcggatgttgagtagctgtgcttcgtcggcggcctcgcctgggccacggacgaccactccctccacaacgccttcagcacctacggcgaggtcctcgagtccaagatcatcctcgatcgggagacgcagaggtcccgcggcttcggcttcgtcaccttctccacggaggaggcgatgcggaacgccatcgagggcatgaacggcaaggagctggacggccgcaacatcaccgtcaacgaggcccagtcccgcggcggccgtggaggcggcggcggtgggtacggtggtggccgtggaggcggcggctacggcggtggcgggcgccgtgatggcggtggcggctacggcggtggcggc

SEQ ID NO: 317451 - DNA, 207 bp, Zea mays
ataaatcttatgcattttatgacatgatattctcaaatacaacacttttcctacatgcaattttttatatactttatctactgcatcacacacattgaccatcccttattttctccaaaaaaaacaaaataaaaaaaaaaaaaaaaaaaaaaaaaaaaaaaaaaaaaaaaaaaaaaaaaaaaaaaaaaaggccgtcccttctaaata

SEQ ID NO: 317452 - DNA, 451 bp, Zea mays
  unsure (1)..(451): unsure at all n locations
cactcgttcgagccttgcctcgcgcagcggtctggttcggttgggtgccctcttcgccggtggctctgatgcttttgggaagccggaggacgcttagggcngtcttattccttntttttttattttttttttttttttttttttttttttttttttttttttttttttttttttattttttttttttttttttttttttttttttttattttttttttttttttatttttttttttttttttttttttattattttttatttattatttttttttttttttttatattttttttttttttttttttattttttattttttttttatttattttttttattgttttttttttttttatttttattttattttttttttttttttttgtttttgtttttttttttttttattattttttttttgtttttttttttgtattttttttttttttt

SEQ ID NO: 317453 - DNA, 243 bp, Zea mays
gtgtgtccgtgtgtgttctgcagttctgctggtaagactcgtagcccaagaataagaaccaggacatgggccttaataatcaccttgaactgccaaagggaacgcctgtgtgggtgtgtgcaagcgtgctaaaggccacttagaaaagtctcattagtatctgagttgagttccagttccactcttatgttttcaacagtagacaatgttcctgttcgtgagttgtctgtgtgattttcttct

SEQ ID NO: 317454 - DNA, 268 bp, Zea mays
aaaaaaaaaaaacagaaaaaaaaaaaaattaaataaaaaaaaaaaaaaaaaaaaaaaaaagaaaggataaaaaaaaaggggcggccgttttaaagatcccaatttaacttccccttccttccaacttaataccttttttatagggccccctaatttaaattcattgcccgttttttaaaaacttcttaactgaaaaaaccttggctttcccaaattaaatccctttgaaaaaaatccctttttccccagttggcttaataccaaaaag

SEQ ID NO: 317455 - DNA, 441 bp, Zea mays
cggcggcggccacgtgcgcgccgtcgtccaagctgcccgacggcgccggctccggcggagtgccggggctagcgccctgctgcagcaggcagcagtcgatgacggcgcaggtggcgcgcacgcagaaggtagcggacaaggtcgcgctgagcctgccgagcgacggcaggtacacgtcgggcgacagcgtcggcgtgaccatcttcagcggagggccgctgttattggtaccgacagaccgcagagacttcaccacgatgctggccgggacggcgccgctccacgccggagccggagccggtgcccacgggtactacgattactacatcggcattgacgtggagcatgcacaagttggcggccccggcggggcgctcgtcgcggcgctgcactacacggtccattacacggcgctacagcccgacgtgtacgcgtcgttcg

SEQ ID NO: 317456 - DNA, 424 bp, Zea mays
ctttgttgtggcaatcctcttagtgctgatataatcttctaaaaaaaaaaaaaagaaagaaaaaaaaaaaaaaaaaaaaaaaaaaaaaaaaaaaaaaaaaaaaaaaaaaaaaaaaaaaaaaaaaaaaaaaaaaaaaaaaaaaaaaaaaaataaaaaaagggataacacattaaagattacaaacttacataagctaacctaaaaaacatgatttaactgtaaatgaaactcaaaacaatatcaccatcaatataacaaaaaaactgagatttacaaaacgcacagataaatcacactgaatgtcaaaaagaactaatcctattatttcacattatacacaataacaaaaacgcctacatatatcccgacaaaaaaaattgctaaattacaaatggaaattacaatctatcttatcactaaattt

SEQ ID NO: 317457 - DNA, 139 bp, Zea mays
cggacgcgtgggaaaaaaaaaaaaaaattaataaaaaaaaaaaaaaaaaaaaaaaaaaaggaagaaaaagggcccccgctttatagaatccacatttttgctctcttgaatgcgacaccttatattttttatatagtgc

SEQ ID NO: 317458 - DNA, 383 bp, Zea mays
cccacgcgtccgcccacgcgtccggttctagatcgcgagcggccgcccttttttttttttttgtctgttttttttttttttttttttttttttttttttttttttttttttttttttttttttttttttttttttttttaaaaaaatttgctaatttttttcctggaaaaaaactcggtgtataaaaaactttaaaactatttaattaaaaaactaattaaaacccaatttaaccatgaacaaactttgttaaattattacagtctacaaatacttattcaggcaaaaaactttgaggttggccctactgttgggccctacaaaattgacctttttggaaactcccaattccaacaggattaaacaaaaccagttaatgcttt

SEQ ID NO: 317459 - DNA, 139 bp, Zea mays
cccacgcgtccgcggacgcgttggaaataaaaaaaaaaaaaaaaaaaaaaaaaaaaaaggaaaaaatcaaaaacaaacaattttaaaaaatccaaatttaacaaacccttccatccaacatcataacatcttaaaaaga

SEQ ID NO: 317460 - DNA, 429 bp, Zea mays
gctgcctactctcagcaacagcagtttcttccattcaaccaactggctgcattgaggtctgctgcttatttgcaacaacaactaccattcagtcagctagctgctgcctacccccagcaatttcttccattcaaccaactggcagcattgaactctgctgcttatttacaacagcaacaactaccaccattcagccagctagctgatgtgagccctattgccttcttgacacagcaacagttgttgccgttctacctgcacgctgcgcctaacgctggcaccctcttacaactgcaacaattgctgccattcaaccaacttgctttgacaaacccaacagcgttctaccaacaacccatcattggtggtgccctcttttagattgcttatgagttatagttcaataatgaagttttttggatgatgttt

SEQ ID NO: 317461 - DNA, 96 bp, Zea mays
cccacgcgtccgcccacgcgtccgcaaaggatgtttgtttttaactagtcgtgcgcacgtgattaattcagttcatgttgttatggttgtcttccc

SEQ ID NO: 317462 - DNA, 453 bp, Zea mays
  unsure (1)..(453): unsure at all n locations
agccttccggggccttagttaacttgaagccggttgttatgaaccacagactcgtaaagcttcctcgggggaaacctgcagcatgagcaccaatttgagagccctcaagataccaaggagaaactggaagttaggagaaaagaagtccttggccgaataaaatgtgtgcctacactttactttttggtctctacagctttgcaggagtatttagtattttgatttgacagcaacacataatgacataactactatgagcattgctaattaatttacaccggtaccttcgtttgagaaattttcttccatttccagcatctgctggcagacctgaagggtcatctccagctcagggatcatctagtgngaatcaccaccaaaatgaactctattaggagggattatatgaagacaattcatgcttctnctattgaagatcctcgtttcagtcat

SEQ ID NO: 317463 - DNA, 52 bp, Zea mays
aaaaaaaaaaaaaaaaaaaaaaaaaaataaaaaaaaagtactaaatcgcaaa

SEQ ID NO: 317464 - DNA, 439 bp, Zea mays
gggtcttcagaccattagctttatctactccagagcgcagaagaacccgatcgacaccatgagggtgttgctcgttgccctcgctctcctggctctcgctgcgagcgccacctccacgcatacaagcggcagctgcggctgccagccaccgccgccggttcatctaccgccgccggtgcatctgccacctccggttcacctgccacctcctgtgcatctcccaccgccggtccacctgccgccgccggtccacctgccaccgccggtccatgtgccgccgccggttcatctgccgccgccaccatgccactaccctactcaaccgccccggcctcagcctcatccccagccacacccatgcccgtgccaacagccgcatccaagcccgtgccagctgcagggaacctgcggcgttggcagcaccccgatcctgggccag

SEQ ID NO: 317465 - DNA, 398 bp, Zea mays
cccactcgtccgctgacactcgttgctttcactgactactatgataaatgattgtgcggcaatatctgaaggtatcgagactttcaagctacacgttcaagatcctaaatttcctgatatataccatattaatatgtagtattatttcctcatggtaccatgacactattcatgcgaacaaccaccaatcaaactttcaattcatcacttacacaggataaaccttctactgatctatctaattctttttcttacagtttcagactataactcgatcttatacacaaattataaacacagagctatgacgatcactaactcatcaatcctttattctcaaatcattataaccctgtaataccaacatgtctcatatgatcatactataatacttactt

SEQ ID NO: 317466 - DNA, 439 bp, Zea mays
tcgcccacaccttccaaagaaaaaagtgttatggaattaggtagaaataccggggttccaccgaggaattaccttttgggccaaccttgtaccttaaagaaaccttccactgggaaaaaggaccatgctcttatttctggaatggaaaatgccaatgaaactggtactagaaaccgatcatttgccccgaaaccatcttatttttatcaaggtgaagacccttggacctgttaacttttccggatacttgaaacccttaatggttaaacctcaaatttaaccgtccacattttgaccagttaaacacccaggcctttcaaccagaggagccgacctcctgggtttctcagcaggaggagcagttaaatgttgctaaaggccagagatcaaagaggaagaggccttcgatggagaaggcagatggtttggacggtataac

SEQ ID NO: 317467 - DNA, 377 bp, Zea mays
atttctgggacgccacaaacatcatccaaaaaaaaaaaaaaaaaaaaaaaaaaaaaaagaaaggaaaaaaaaaaaaaaaaaaaaaaaaaaaaaaaaaaaaaaaaaaaaaaaaaaaaaaaaaaaaaaaaaaaaaaaaaaaaaaaaaaaaaaaaaaaaaaaaaaaaaaaaaaaaaaaaaaaaaaaaaaaaaaaaaaaaaaaaaaaaaaaaaaaaaaatgacgaaacctaataaaaaaaaaataatattaaaaacaattataaaaaaataaatatatataaaaatacaccaaaaaaaaaaaatatatccaatagttaaaaaatcactaattttaaaaaaaactattaatttaaaaaaaaataataatctaaataataatt

SEQ ID NO: 317468 - DNA, 438 bp, Zea mays
cccacgcgtccgaggaaaaatatccccaaaccctagctcccgatctcgatggcgaacgctcgcgtcttcttcgacatgaccgtcggcggcgccccggcgggccggatcgtgatggagctgtatgccaacgaggtgcccaagaccgcggagaacttccgcgcgctgtgcacgggcgagaagggcgtgggcaagtccgggaagccgctccactacaagggctccaccttccaccgcgtcatccccgagttcatgtgccagggcggcgacttcacccgcggcaacggcaccggcggcgagtccatctacggcgagaagttccccgacgagaagttcgtgcgcaagcacaccgtccccggtgtgctctccatggccaacgccgggcccaacaccaacggctcctagttctgcatctgcaccgtctcgacctcttggctcgac

SEQ ID NO: 317469 - DNA, 443 bp, Zea mays
cccacgcgtccgatttaatctgtgccaaactattggtggtgcaggatataacatgaaaggaaaaaaaaaaaaaaaaaaaaaaaaaaaaaaaaaaaaaaaaaaaaaaaaaaaaaaggaaaaaaaaaaaggaggatcaaggtaaaggaaccaaaaaaaggaacgaaaaaaataaaagaaaaaagtcaccaaaatgaaatccataggaccaatgattaaaaacgtagttgaagggaaaaacaatgggaaaacccaagtaaaaccccatgtaaaacaggcaaatttaaacagctggtaaaatagcgaagaggccagaaaaaaggcctttaccaaacaggggaaaaaccaaaagggcaaatggaacgggcattggaaaggcctttaaagcgcggaataagaaggggaaacgcccagggtaaccgcaacagtggccagtgctttagcgc

SEQ ID NO: 317470 - DNA, 436 bp, Zea mays
cccacgcgtccgggagagcaccctccacctggtgctccgtctcaggggtggcatgcagatctttgtgaagacactcactggcaagacaatcacccttgaggtggagtcttcggataccattgacaatgtcaaggccaagatccaggacaaggagggcatcccaccggaccagcagcgcctcatcttcgccggcaagcagctggaggatggccgcaccctggcggattacaacatccagaaggagagcactctccacctggtgctccgtctcaggggtggcatgcagatttttgtgaagacattgactggcaagactatcaccttggaggtggagagctctgacaccattgacaatgtgaaggccaagatccaggacaaggagggcattcccccagaccaacagcgtctgatctttgcgggcaagcagctggaggat

SEQ ID NO: 317471 - DNA, 417 bp, Zea mays
cggacgcgtggggaagaacccgatcgacaccatgagggtgttgctcgttgccctcgctgtccgggctctcgctgcgagcgccacctccacgcatacaagcggcagctgcggctgccagccaccgccgccggttcatctaccgccgccggtgcatctgccacctccggttcacctgccacctcctgtgcatctcccaccgccggtccacctgccgccgccggtccacctgccaccgccggtccatgtgccgccgccggttcatctgccgccgccaccatgccactaccctactcaaccgccccggcctcagcctcatccccagccacacccatgcccgtgccaacagccgcatccaagcccgtgccagctgcagggaacctgcggcgttggcagcaccccgatcctgggccagtgcgt

SEQ ID NO: 317472 - DNA, 445 bp, Zea mays
cgcttaagaaagaacttgaccccagcctggttgacctaagggtcctaaactccaactgggggaacaaggtgaacctgctatttatggagaggaccgttgatagccattgtcctgggatggtagtccgcatggctgaacgagcactctgccatcaataaactcattagcaaggtggtttggagagcctgtaagggctgctattctgcaaaccgaggcttttcttacaaatgcaaaaggatatccttgtttatcaaagcgccatcagagtctgctaactggattttttaaacattctgttcatgtttgttatttttattgcttttatgcttacgcttagtcaacctttgtattttcatatcttcagagtcaatgatccaatgttgtatgcttcttttaacttgtttttttaatatatattcaattttgtgcttcaattgaggtaatt

SEQ ID NO: 317473 - DNA, 443 bp, Zea mays
cccacgcgtccgcccacgcgtccgtttgagcattcagaaacacaccaagcgaagcgcagtagcaacaacctaacaacaatggctaccaagatattatccctccttgcgcttcttgcgctttttgcgagcgcaacaaatgcgtccattattccacaatgctcacttgctcctagttccattattccacagttcctcccaccagttacttcaatggccttcgaacacccagctgtgcaagcctataggctacaacaagcgattgcggcgagcgtcttacaacaaccaattgcccaattgcaacaacaatccttggcacatctaacaatacaaaccatcgcaacgcaacagcaacaacagttcctaccagcactgagccacctagccatggtgaaccctgtcgcctacttgcaacagcagctgcttgcatccaacccacttgctct

SEQ ID NO: 317474 - DNA, 433 bp, Zea mays
cccacgcgtccgcccacgcgtccgcccacgcgtccggaccaactagcaacatagaaagcacaatagtgtaccaacaatggcagccaaaatattttgcttccttatgctccttggtctttctgcaagtgctgctaccgcaaccattttcccacaatgctcacaagctcctatagcttcctttcttcccccatacctctcaccagcggtgtcttcagtatgtgaaaacccaattcttcaaccctacaggatccaacaggcaatcgcagcaggcatcttacctttatcacccttgttcctccaacaaccgtcagccctattacagcagttacctttggtgcatttgttggcacaaaacatcaaggcacaacaactacaacaacttgtgctaggaaaccttgctgcctactctcagcaacagcagtttcttccattc

SEQ ID NO: 317475 - DNA, 366 bp, Zea mays
cccacgcgtccgggttggcttctccttcccctccggttcgggttcgggttcgtgaggttctccggggttcgggttcgtgggtgagcggatcgagatggcggcgtcggatgttgagtaccgctgcttcgtcggcggcctcgcctgggccacggacgaccactccctccacaacgccttcagcacctacggcgaggtcctcgagtccaagatcatcctcgatcgggagacgcagaggtcccgcggcttcggcttcgtcaccttctccacggaggaggcgatgcggaacgccatcgagggcatgaacggcaaggagctggacggccgcaacatcaccgtcaacgaggcccagtcccgctgcggccgtgg

SEQ ID NO: 317476 - DNA, 420 bp, Zea mays
agctcctatagcttcctttcttcccccatacctctcaccagcggtgtcttcagtatgggaaaacccaattcttcaaccctacaggatccaacaggcaatcgcagcaggcatcttacctttatcacccttgttcctccaacaaccgtcagccctattacagcagttacctttggtgcatttgttggcacaaaacatcaaggcacaacaactacaacaacttgtgctaggaaaccttgctgcctactctcagcaacagcagtttcttccattcaaccaactggctgcattgaactctgctgcttatttgcaacaacaactaccattcagtcagctagctgctgcctacccccagcaatttcttccattcaaccaactggcagcattgaactctgctgcttatttacaacagcatcaactacc

SEQ ID NO: 317477 - DNA, 199 bp, Zea mays
acgcaactactaccattcagccagctagctggtgtgagccctgctaccttcttgacacaagcacggttgttgccgttctaccagcacgcttcgcctaacgctggcaccctcttacaactgcaacaattgctgccattcaaccaacttgctttgacaaacccagcagcattctaccaacaacccatcattggtggtgccc

SEQ ID NO: 317478 - DNA, 405 bp, Zea mays
cggacgcgtgggttgccgtctcccttttgcgtgagcaaagaaagagagcgagaagagcagtcgccatgtctggcatcatccacaagatcgaggagaagctccacatggggggcgaccacaagaataaggaggaggagcaccacaagaaggccgaggagcaccacaagaaggaggagggggagcaccacaagaaggacggcggggagcacaaggaaggcatcgtggagaagatcaaggacaagatcaccggcgagcacggcgacaagtccggcgaccacaaggaaaagaaggacaagaaaaagaagaagcacggcgagggccacgaccacgacggcggccacagtagcagcagcagcgacagcgactgagatctggtgtcgcagcacaggtgcaacacatgtatgc

SEQ ID NO: 317479 - DNA, 363 bp, Zea mays
  unsure (1)..(363): unsure at all n locations
gcaacatagaaagcacaatagtgtaccaacaatggcagctaaaatattttggctcggtatgctccttggtctttctgcaagtgctgctacggcgaccattttcccacaatgctcacaagctcctatagcttcccttcttcccccgtacctctcaccaacggtgtcttcggtatgtgaaaacccaattcttcaaccctacaggatccaacaggcaatcgcagctggcatcttacctttatcacccttgttccttcaacaatcatcagccctattacagcaattaccttnggtgcatttatgggcacaaaacatcatggcacaacatctacaacaacttgtgctatgcaaccttgctgcctactc

SEQ ID NO: 317480 - DNA, 392 bp, Zea mays
cgcacgcgtccggcaacatagaaagcacaatattgtaccaacaatggcagccaaaatgtttggcctccttatgctccttggtctttctgcaagtgctgctaccgcgaccattttcccgcaatgctcacaagctcctatagcttcccttcttcccccgtacctctcaccagcggtgtcttcggtatgtgaaaacccaattcttcaaccctataggatccaacaggcaatcgcagctggcatcttacctttatcacccttgttcctccaacaatcatcagccctattacagcagttacctttggtgcatttattggcacaaaacatcagggcacaacaactacaacaacttgtgctagcaaaccttgctgcctactctcagcaacagcagtttc

SEQ ID NO: 317481 - DNA, 415 bp, Zea mays
cggacgcgtgggcggacgcgtgggctttctccctactctcagcaacaacaatttctggcattcaaccaactgtctacactgaaccctgctgcttatttgcagcaacaactattaccattcagccagctagctactgcctactctcagcaacaacaacttcttccatttaaccaattggccgcactgaaccccgctgcttatttgcagcagcaaatactactaccatttagccagctagctgcagcaaaccgtgcttccttcttgacacagcaacagttgctgcctttctaccagcagtttgcggctaaccccgcaaccctcttacaactacaacaattgttgccctttgtccaacttgctttgacagacccagcggccttctaccaacaacacatcattggtggtgccctctttt

SEQ ID NO: 317482 - DNA, 280 bp, Zea mays
cccagcgatcgactgacaaaaaaggtacccttctaaagtcacgacaaagaaatagaggttgataatcaagctggtgatatagtgatagcataccgactcactgatccaatctagttaagatcgaattatgatagggattagcgcaatggttacatgcactgtcattatccattgaactgtgatctgtttttcatgcagaatactgactcatttatgcttatgctcaacatactacaataaagcgagtcttgctatatcattgttaaatgcacgttcatat

SEQ ID NO: 317483 - DNA, 336 bp, Zea mays
aggaggaacagcaaaaccaaaagttcgcgcaatatcgttgaccgcaaccatgaccagaaggaagagcagttagtacaatccttgagggagttacttcttgcaagcaaacagctcccagataagtttgatgactactatgtccttctacggtatgcccattttatttattttctggaaaatttatgttatatattgtccttagactgacataatccacccaagtaacaggggaagagatgttttattcttcagtacttctaggatgcctgtttccttccagttttgcactgaagagatcatgacctcattgttctctggtcttgcagctatcttaaa

SEQ ID NO: 317484 - DNA, 318 bp, Zea mays
gagagcgcgatacagtcgcatcaactacccagccgcggagaccatgagatacacgttgcaggccctccgagacgtggatactgtgtcgctaacgcgacgctcattgaccatggctcacacgctcccatgacctcccagcaccccgcatacctacacatgaacaagagcaccaggctgcgctaacccaacacgacaaccatatacgcctcaacgagccgtcaccatatgcaacaatcgcaaagcggaccagttgacacaacaactgccagccctatgcataacgcacacagtggcacataacatcatggcacatcaact

SEQ ID NO: 317485 - DNA, 175 bp, Zea mays
  unsure (1)..(175): unsure at all n locations
ggctgttccgctcgggtgctgctgttttttcgggtctcgctgtcttctctgggcctgggccgcggcgcgcggntcgcgtgcggctcggcgttggtgccttgcgggtggcggtggtctgcggcggcgcgctcctcctggtgccccgcctcggtgtgcctgtggctcgcgctcgccg

SEQ ID NO: 317486 - DNA, 395 bp, Zea mays
gggagacgcagaggtcccgcggcttctgcttcgtcaccttctccacggaggaggcgaggcggaacgccatcgagggcatgaacggcaaggagctggacggccgcaacatcaccgtcaacgaggcccagtcccgcggcggccgtggaggcggcggcggtgggtacggtggtggccgtggaggcggcggctacggcggtggcgggcgccgtgatggcggtggcggctacggcggtggcggcggctacggtggcggcggcggctactgtggtggtggcggcggctacagcggtggcaaccgtggcggcggctactgcaactccgacgggaactggaggaactgatcggtggggcccgcgcggccaaattatcctgttcgctaccgtgatgtttaccct

SEQ ID NO: 317487 - DNA, 458 bp, Zea mays
gattcccggtcgacccagcgttcgacacacctagcgaagcgcactagcaacgacctaacaacaatggcttccaagacattatccctccttgcgcttcttgccctttttgtgagtgcaacaaatgcgttcattattccacaatgctcacttgctccgagtgccattattccacagttcctccctccagttacttcaatgggcttcgaacacccagctgtgcaagcctataggctacaacaagcgcttgcggcgagcgtcttagaacaaccaattgcccaattacaacaacaatccttggcacatctaaccatacaaaccatcgcaacgcagcagcaacaagcactgagccacctagccgtggtgaaccctatcgcctacttgcaacaacagctgcttgcatccaacccacttgctttggcaaacgtagctgcataccaacaacaacaacagttgcaaca

SEQ ID NO: 317488 - DNA, 332 bp, Zea mays
cggcgcgtggcaggttgatcggtcacgcatgccatgcagcagggccgcagcgtgcgcgtgcttacgcgcgccgatgccgatgccgcttcgtcgtcgtcgtcgtatttttcctcctcccgtgcccctgctagtaatgctgctgtggccacggcgccgggcgacgacgaggatatcgacatcgtcgccattgtcaccggctgctgcctcgcctccgaggaagaatctaaggctgccggcggcggcgactacccgcacttggacctcaacctcatcatggacatcgtgaggatgaactagatagctacaaattaaagatatacctgccagtgcat

SEQ ID NO: 317489 - DNA, 303 bp, Zea mays
cacaccgttgtcacacaagtgactgtacctttgcacacattcggctcaccgtttgcacactgttggtgcaccggactgtccggtgtgttaaaactagccgttggctgcacagcattgtcacactgatgactcaccgtttgctcactgttggctcactgtttgcacacaatttgctcaccgtttgctgacaagactttcctgtgtgtcagaactagccattgtcttcacatcgttggctcacttttttttcaccattttcgcaccgttatctcacatttttctcacctttgtttgacattactt

SEQ ID NO: 317490 - DNA, 421 bp, Zea mays
tgagcattcagaaacacaccaagctatacgcactaccaacgacctaacaacaatgggtaccaagatattagccctccttgcgcttcttgccctttttgtgagcgcaacaaatgcgttcattattccacaatgctcacttgctcctagtgccattattccacagttcctcccaccagttacttcaatgggcttcgaacacctagctgtgcaagccaacatgcaacaacaagcgcttgcggcgagcgtcttacaacaaccaattgcccaattgcaacaacaatccttgccacatctaacaatacaagccatcacaacgcatcagcaacaacagttcctaccagcactgagccacctagccatggtgaaccctgccggctacttgcaagagcagctgcttgcatccaacccacttgctctggcg

SEQ ID NO: 317491 - DNA, 186 bp, Zea mays
tcggcgttcgcggctgtggcggtcgtggcgctggacagggcgcggatcagccgcgcgcagacggggagcggatcaagacgtggcatgactgtgccggatacgtccgcggcgtgcgcttcgccgacgtggccgtggacggcgtcgaccaccccatcgtcatcgaccagttctactgcgacgtgaccc

SEQ ID NO: 317492 - DNA, 186 bp, Zea mays
  unsure (1)..(186): unsure at all n locations
ggggcccgngnngntncgcttgtgtntgtttccgccgtgtgcctcgtcngtcgggccggggggcgcccgttctcggtggctgccctgcgtggcccgtgcgctgtgcctgctctgcgggctctggncggtggcctcgcgggcctggccctgggctggnggtggctgtggtgctctgggcccggggcc

SEQ ID NO: 317493 - DNA, 186 bp, Zea mays
gtgacttactctctcgtatcttgaactcctcaaactcacctactggctctgaggctgggtccatccctagcgtcgtcccagtgccaaggcgcagccggccatcgactcaatcgcacttgatgacccatgaatgaacattacaagtaccttctcaatctactgcttatacgcgctcctgatgtagct

SEQ ID NO: 317494 - DNA, 351 bp, Zea mays
gcgcccacgcgtccgcacaatgctcactttttccgagtgccattattccacaggtgctccgtgcagttacttcaatgggcttcgaacacccagctgtgcaagcctataggctacaacaagcgcttgcggcgagcgtcttagaacaaccaattgcccaattacaacaacaatccttggcacatctaaccatacaaaccatcgcaacgcatcaacaacaagcactgagccacctagccgtggtgaaccctatcgcctacttgcaacaacagctgcttgcatccaacccacttgctttaacatacgtggctgcataccaacaacaacaacagatgcaacagtttctaccaacgc

SEQ ID NO: 317495 - DNA, 382 bp, Zea mays
gtgggttggcttctcctccccctccggttcgggttcgggttcgtgaggttctccggggttcgggttcgtgggtgagcggatcgagatggcggcgtcggatgttgagtaccgctgcttcgtcggcggcctcgcctgggccacggacgaccactccctccacaacgccttcagcacctacggcgaggtcctcgagtccaagatcatcctcgatcgggagacgcagaggtcccgcggcttcggcttcgtcaccttctccacggaggaggcgatgcggaacgccatcgaaggcatgaacggcaaggagctggacggccgcaacatcaccgtcaacgaggcccagtcccgcggcggccgtggaagcggcggcggtgggtacggtggt

SEQ ID NO: 317496 - DNA, 425 bp, Zea mays
cggacgcgtgggtagcaacatagaaagcacaatagtgtaccaacaatggcagccaaagtatggtgcctccttatgctccttggtctttctgcaagtgctgctacggcgaccattttcccgcaatgctcgcaagctcctatagcttcccttcttcccccgtacctctcaccagcggtgtcttcggtatgtgaaaacccaattcttcaaccctacaggatccaacaggcaatcgcagctggcatcttacctttatcacccttgttcctccaacaatcatcagccctattacaacagttacctttggtgcatttattggcacaaaacatcagggcacaacaactacaacaacttgtgctagcaaaccttgctgactactctcagcaacagcagtttcttccattcaacccaacaagttcattgaactc

SEQ ID NO: 317497 - DNA, 358 bp, Zea mays
cggaccctggtgggttggcttctcctccctctccggttcgggttcgggttcgtgaggttgtcccgagttcggcttcgtgggtgagcggatcgagatggcggcgtcagatgttgagtaccgctgcttcgtcggcggcctcgcctgggccacggacgaccactccctccacaacgccttcagcacctacggcgaggtcctcgagtccaagatcatcctcgatcgggagacgcagaggtcccgcggcttcggcttcgtcaccttctccacggaggaggcgatgcggaacgccatcgaaggcatgaacggcaaggaactggacggccgcaacatcaccgtcaacgaggcccagtcccgctgc

SEQ ID NO: 317498 - DNA, 332 bp, Zea mays
  unsure (1)..(332): unsure at all n locations
cggacgcgtgggcggacgcgtgggctgacgcgtgggaaaaaaaaaaaaaaaaaaaaagaaaagaaaaaaaaaaaaaaaaaaaaaaaaaaaaaaaaaaaaaaaaaaaaaaaaaaaaaaaaaaaaaaaaaaaattaaaaaaaaaaaaattaanaaaaaaattaataaaaattaaaaaatttaaaataaataaaaaaaaaaaaaataaaataaaaaaatataaaaaaaaaanaaaattaaaaaaaaattaaattaaaaaaaaaaaaaaaatttaaaaaaaattaaaattataaaaaatttaaaaaaaaaaaaaaaaataaaaaaaataatttatt

SEQ ID NO: 317499 - DNA, 185 bp, Zea mays
  unsure (1)..(185): unsure at all n locations
ccgtctcgtccgggctcgtgcttctcctcctctccggcgtcgtcttcctcgggggtggcgctgttcgcgtcccctgtgtccccgntgtcgcgctcctggctgcgctgggcggcgccggcgcgcggctgcggctgttctgggcgggcctgcgggtccctgccggcgtctccgcggccgtggctggc

SEQ ID NO: 317500 - DNA, 422 bp, Zea mays
gagccacgcgtccggctccatgtatggatgaattgttggtatcaagttcctcaacatttttgtgtttaaatgctctgtatggaagaatgagccgacggatcttgagatcgacgaaatcactaaaccacgcggaggaggaggacgattatatatatggacataaattgggtctccttgctgcgtaaatgcttcaagaggctgctgatccaaaagaatgaagccatccatggtctgactgcaaatatcgacaacatgttttggacaagacatttagcgatataggtcgtcattagttttaacatttacaaaagaacaatatttgttttcaattgaagtttaaacttgcagactgtatagttgtgattacaacaagtattgcggatcctgtcactttaaaccattgtttagttgccttaatcaaa

SEQ ID NO: 317501 - DNA, 439 bp, Zea mays
gcaacatagaaagcacaatagtgtaccaacaatggcagccaaaatattttgcttccttatgctccttggtctttctgcaagtgctgctaccgcaaccattttcccacaatgctcacaagctcctatagcttcctttcttcccccatacctctcaccagcggtgtcttcagtatgtgaaaacccaattcttcaaccctacaggatccaacaggcaatcgcagcaggcatcttacctttatcacccttgttcctccaacaaccgtcagccctattacagcagttacctttggtgcatttgttggcacaaaacatcaaggcacaacaactacaacaacttgtgctaggaaaccttgctgcctactctcagcaacagcagtttcttccattcaaccaactggctgcattggactctgctgcttatttgcaacaacaactacca

SEQ ID NO: 317502 - DNA, 93 bp, Zea mays
ctacgacccactcgtccgaaaaaaaaaacacatacaaaataaaaatataaaaaaaaaaaaaaaaaaaaaaaggaaaagatactaaaatacaat

SEQ ID NO: 317503 - DNA, 264 bp, Zea mays
gttgctactcggacgaggagggaaagcggaggtaaatctctcttggtagatcggacgggtgctttgatttttcatacgaatgtgcttgttttatggtatatagattattgggtatttctactgtactgtttctgcccctgctttcatttgatgtcactagtggtagggagtgtggcataatcatgtagatgtacctgctatgcatacatcgtattaataaatggcaccattgctctcatatactaagaacaactgtaaaaaggt

SEQ ID NO: 317504 - DNA, 95 bp, Zea mays
gttctagatcgcgagcggccgcccttttttttttttttttcaacaacaactatgtgaaaagatcaacattcaacatccctaaaattcattattta

SEQ ID NO: 317505 - DNA, 219 bp, Zea mays
gttgccgttctacctgcacgctatgcctaacgctggcaccctcttacaactgcaacagttgctgccattcaaccaacttgctttgacaaactcaacagtgttctaccaacaacccatcattggtggtgccctcttttagattgcttatgagttatagttcaataatgaagttttttggatgatgtttgtggcgtcccagaaataagaaagtacatttct

SEQ ID NO: 317506 - DNA, 386 bp, Zea mays
gctgcctacccccagcaatttcttccattcaaccaactgacagcattgaactctgctggttatttacagcagcaacaactactaccattcagccagctagctggtgtgagccctgctaccttcttgacacaaccacagttgttgccgttctaccagcacgctgcgcctaacgctggcaccctcttacaactgcaacaattgctgccattcaaccaacttgctttgacaaacccagcagcattctaccaacaacccatcattggtggtgccctcttttagatttcttatgagttatagttcaataataaagttttttgtctgatgtttgtggcttcccagaaataagaaagtacatttctaaaaaaaataatattatttattataat

SEQ ID NO: 317507 - DNA, 426 bp, Zea mays
cccagcgtccgcagaaacacaccaagctaagcgcactagcaacaacctaacaacaatggctagcaagatattatccctccttgcgcttcttgcgctttttgcgagcgcaacaaatgcgtccattattccacaatgctcacttgctcctagttccattattccacagttcctcccaccagttacttcaatggccttcgaacacccagctgtgcaagcctataggctacaacaagcgattgcggcgagcgtcttacaacaaccaattgcccaattgcaacaacaatccttggcacatctaacaatacaaaccatcgcaacgcaacagcaacaacagttcctaccagcactgagccacctagccatggtgaaccctgtcgcctacttgcaacagcagctgcttgcattcaacccacttgctctagcaaa

SEQ ID NO: 317508 - DNA, 427 bp, Zea mays
caacaatccttggcacatctaaccctacaaaccattgcaacgcaacaacaacaagaacggtttctgccatcactgagccacctagccgtggtgaaccctgtcacctacttgcaacagcagctgcttgcatccaacccacttgctctggcgaacgtagctgcataccagcaacaacaacagctgcaacagtttatgccagtgctcagtcaactagccatggtgaaccctgccgtctacctacaactactttcatctagcccgctcgcggtgggcaatgcacctacgtacctacaacaacagttgctgcaacaaattgtaccagctctgactcagctagctgtggcaaaccctgctgcctacttacaacagttgcttccattcaaccaactggctgtgtcaaactttgctgcgtacctacaacagcgac

SEQ ID NO: 317509 - DNA, 290 bp, Zea mays
aaagctcgcagcagcagctagcagctcgttcttgttcgtcagctctagcctagcctgcgctggctcttctttaattctgcagggaagttccagtttcagctagagtgcaggcggagaaccaatgggggcggcgccgtcgtccgacgactcgtcacgcgccggagacggccgggctgtggcgagcagcgctgcctctggcactggcactgtcagcaacagcatccaggcccagtctaagctggcgtcctttgttttaatgttcctattagatgtttttgtttgttctatta

SEQ ID NO: 317510 - DNA, 286 bp, Zea mays
cggacgcgtgggctcgagcgccgcccttttttttttttttatctttttttttttgtttgtttttttttttttttttattttttttttattttttttataattttttttttttttttatttggggccataaaatcaatcattaattaaaataaaaaaatcattatacccataaaaaaaattaacatactatattcccaacaaattttaactgacattatacaataaacaaaataaaaaaaatacccccaattatgaaatccccttaattaattgaatataaaccctt

SEQ ID NO: 317511 - DNA, 199 bp, Zea mays
aactacaacaattgttgccctttgtccaacttgctttgacagacccagcggcctgctagcaacaacacatcattggtggtgccctcttttagattgcttattagttgtaattcaataataaagttttttggatgatgtatgttgccaaccagaaatatgaagttacatttccagatgttaatgtgaaaaaaaaaattga

SEQ ID NO: 317512 - DNA, 356 bp, Zea mays
gatcgtcgaacagaacagcatgaagatggtcatcgttctcgtcgtgtgcctggcgctggcagctgccagcgcctctgcaatgcagatgccctgcccctgcgcggggctgcagggcttgtacggcgctggcgccggcctgacgacgatgatgggcgccggcgggctgtacccctacgcggagtacctgaggcagccgcagtgcagcccgctggcggcggcgccctactacgccgggtgtgggcagccgagcgccatgttccagccgctccggcaacagtgctgccagcagcagatgaggatgatggacgtgcagttcgtcgcgcatcagctgcagatgatgatgcaacttgagcgtg

SEQ ID NO: 317513 - DNA, 460 bp, Zea mays
ttccctggtctacccactcttcctccaactcatatgaaacaaccatttctactcaataaatacatcactaatcaattcgcctgctcaactatcaatttcccaatcctctacacttaattttattccttccaccattaatctctactacctccttcaattcttcctgtcccatcctatttatgtctttttcctcttctttctttcttttcttttttacctttttttttctttttactttcctttatatattatttttttttcctctttcattcttttctttttttttctctttttttttttttttttttttttttttttcttccttttcttgtttctttttatatttctatttttttttttattttttttttttttttttttttattttattattttttttttttttttttttattttttttttttttttttttttattttttttttatattttttttatt

SEQ ID NO: 317514 - DNA, 429 bp, Zea mays
cccacgcgtccgcggacgcgtgggcaactagcaacatagaaagcacaatagtgtaccagcaatggcagccaaaatattttgcttccttatgctccttggtctttctgcaagtgttgctaccgcaaccattttcccacaatgctcacaagctcctatagcttcccttcttcccccatacctctcaccagcggtgtcttcagtgtgtgaaaacccaattgttcaaccctacaggatccaacaggcaatcgcaacaggcatcttaccattatcacccttgttcctccaacaaccgtcagccctattacaagagttacctttggtccatttggtggcacaaaacatcagggcacaacaactacaacaacttgtgctagcaaaccttgctgcatactctcagcaacatcagtttcttccattcaaccaactggc

SEQ ID NO: 317515 - DNA, 417 bp, Zea mays
gggcgatgaaattgatcaaaaaagacgagatgatagtggtagactgcaggggaaggtggatgagcgttatcatgccaaacaaaaggatgacaactggagacatagagaaagggacaatagacagaggcccaagcatgaaaatgtgttaacccttccgaaggaagaaggaagaggaactggtcggcgtagtcggatgatggatgataagttggtcagtggtggtaggaacaagggtgaaccaagatcttctgtattaagcaaagacactcgagaacgtacaaggcaaaatgaatcttcgaggagaggtcagggtgtgcaagaaaacaacatgcataataaagggcgtactgatgtacattcacgtgatgacagtttaaacagtgagaggaacttcaggctagtataacataacaataa

SEQ ID NO: 317516 - DNA, 94 bp, Zea mays
cccacgcgtccgcggactcgtgggtgttaaccatggcggcgtcagcaggcggaggcggggttctctcgcagtttgagatggagcattacataca

SEQ ID NO: 317517 - DNA, 246 bp, Zea mays
agcgccggccagccggtctccaatcctgcaatccctccaatatccaataggggatgaggtgcagcgagcaagtccaataacctacagtgcttggaatttgtggaaggagagatgctggcgaatctttgataacagactttgctttgtactggatgagaaggcagagcacctgccaggctccaatcctgcgtcagcgttcctgcctccctggctccctgccgtctactcgtctccaagaatcatgct

SEQ ID NO: 317518 - DNA, 426 bp, Zea mays
agggcacaacaactacaacaacttgtgctagcaaaccttgctgcctactctcagcaacagcaggttcttccattcaaccaactagctgcattgaactctgctgcttatttgcaacaacaactaccattcagccagctagctgctgcctacccccaacaatttcttccattcaaccaactggcatcattgaactctcctgcttatttacagcagcaacaactactaccattcagccagctagctggtgtgagccctgctgccttcttgacacaacaacagttattgccgttctacctgcacgctgcgcctaacgctggcaccctcttacaactgcaacaattgctgccattcaaccaacttgctttgacaaacccagcaacgttctaccaacaacccatcattggtggtgccctcttttagatttct

SEQ ID NO: 317519 - DNA, 421 bp, Zea mays
cccactcgtccgcccactcgtccgcccacgcgtccgaaaaaaaaaaaaaaaaaaaaaagaaaagtttaaaaaattaggtaaaaaaaaaaaaaaaaaaaaaaaggttatctattttaaattttccatgtttacttacccttccttcctatttaataacttttttatttcttcccctaatttaaatctattgcccttatttaaacatctcctatacttttaaaacttttcttttaccaattttattttccttgaaaaatttttctttttctcaagttttctattttttttatttcctccttttttatgggtgttttcaatatttttacttctttattttattatttttttctcttttttattttctttttatttccctttttttttctttttttttctcatttttacttttttttttctttat

SEQ ID NO: 317520 - DNA, 429 bp, Zea mays
ataccttccatcaatgatagcttcagtatgtgaaaacccagctcttcaaccctatagggtccaacaagcaatcgcagcaagcaacatacctttatcacccttgtttcaacaatcgccagccctatctttggtgcagtcattggtacaaaccatcagggcacagcagctgcagcaactcgtgctacctgtgatcaaccaagtagctctggcaaacctttctccctactctcagcaacaacaatttcttccattcaaccaactgtctacattgaaccgtgctgcttatttgcagcaacaactattaccattcagccagctagctactgcctactctcagcaacaacaacttcttccatttaaccaattggccgcactgaaccccgctgcttatttgcagcagcaaatactactaccatttagccagctagc

SEQ ID NO: 317521 - DNA, 436 bp, Zea mays
cccacgcgtccgcacaagcaacatagaaagtggaatccagtagcaacaacagagcaagaatggcgaccaagatattttccctccttatgctccttgctctttctgcatgtgttgctaacgcgacaattttccctcaatgctcacaagctcctatagcttcccttcttcccccataccttccatcaatgatagcttcagtatgtgaaaacccagctcttcagccctataggctccaacaagcaatcgcagcaagcaacatacctttatcacccttgttgtttcaacaatcgccagccctatctttggtgcagtcattggtacaaaccatcagggcacagcagctgcagcaactcgtgctacctgtgatcaaccaagtagctctggcaaacctttctccctactctcagcaacaacaatttcttccattcaaccaact

SEQ ID NO: 317522 - DNA, 198 bp, Zea mays
ggccaccttggtatgtcatcatttaggtcataggataggagagcataagagggtacggttctgatattgggggcctggactcacctgtacaaatgagttggaaacaaccagccagcatgtttttttatctatttgattggatggacataagcgctcaccttggaagaaactacccagattttaccgaatgattttgct

SEQ ID NO: 317523 - DNA, 384 bp, Zea mays
cattttccttgcaaccgattgcctatccccctcccaaccaaagaccgatggcgcccaaggccgagaagaagcccgcggcgaagaagccggcggaggaggagcccgcggccgagaagacgaccgccgggaagaagcccaaggcggagaagcgggtccccgcgggcaagtccgccggcaaggagggcggcgagggcaagcgtggcaagaagaagggcaagaagagcgtggagacgtacaagatctacatcttcaaggtgctgaagcaggtgcacccggacatcggcatctcctccaaggccatgtgcatcatgaactccttcatcaacgacatcttcgagaagctggccggcgaggcctgcaagctcgcgcgctacaacaagaagc

SEQ ID NO: 317524 - DNA, 372 bp, Zea mays
cccacgcgtccgggcaaaccccccaagttcgcctgggggcacagcacctgcgtggttggcggcactagggtcctcgtcctcggaggccacaccggggaggagtggatactgaacgagctacatgagctctgcctggcaagcaggcccgacgacgacgacgatgaccgctactgactagtttcgttgcacatggttcatctgttttatatgctatatgctattgttcgtaactacttccagtatgttgttgggtaatcggtatgagaaaaaatagtggaaaattaattaaaaaagttagactagaagattttagtgtattttgttttcatcggagaagttttcttttatcggtctagatagattctatggtct

SEQ ID NO: 317525 - DNA, 85 bp, Zea mays
aaaaaaaaaaaaaaaaaaaaaaaaaaattaatttaaaaaaaaaaaaaaaaaaaaaaaagaaaagataaaaggcctgcctttttaa

SEQ ID NO: 317526 - DNA, 426 bp, Zea mays
gatcacccttgaggtggagtcctcagacaccattgacaacgtcaaggccaagatccatgacaaggagggcattccaccggaccagcagcggctgatcttcgccggcaagcagctggaggatggtcgcaccttggctgactacaacatccagaaggagagcaccctccacctggtgctccgcctcaggggtggtatgcagatttttgtgaagacattgactggcaagaccatcaccttggaggtggagtcgtctgacacaatcgataatgtcaaagccaagatccaggacaaggaaggcattccaccggaccagcagcgcctgatctttgctggcaagcagctggaggatggccgtaccctcgccgactacaacatccaaaaggagagcaccctccacctggtgcttcgcttgcgaggtggtatgca

SEQ ID NO: 317527 - DNA, 244 bp, Zea mays
cgaattgcaatttcgacctagacctacgcatgcgcataagcatacttccaatcgttttcataaacctccaaaaagtcaaatatagagagcagttaagacactgggtagggccagtcattaataaaatcatcatattatatatgactaactattatatttcaaatcatattgaaaattagattgtatacagaaagtattacaacaactcttaaaacaatctcttatatgataactttaatctatt

SEQ ID NO: 317528 - DNA, 436 bp, Zea mays
caatcgccagccctatctttggtgcagtcattggtacaaaccatcagggcacagcagctgcagcaactcgtgctacctgtgatcaaccaagtagctctggcaaacctttctccctactctcagcaacaacaatttcttccattcaaccaactgtctacattgaaccgtgctgcttatttgcagcaacaactattaccattcagccagctagctactgcctactctcagcaacaacaacttcttccatttaaccaattggccgcactgaaccccgctgcttatttgcagcagcaaatactactaccatttatccagctagctgcagcaagccgtgctttcttcttgacacagcaacagttgctgcctttctaccagcagtttgcggctaaccccgcaaccctcttacatctacaacaattgttgccctttgtccaac

SEQ ID NO: 317529 - DNA, 400 bp, Zea mays
atttgagcattcagaaacacaccaagctaagcgcactagcaacaacctaacaacaatggctgccaagatattatccctccttgcgcttcttgcgctttttgcgagcgcaacaaatgcgtccattattccacaatgctcacttgctcctagttccattattccacagttcctcccaccagttacttcaatggccttcgaacacccagctgtgcaagcctataggctacaacaagcgattgctgcgagcgtcttacaacaaccaattgcccaattgcaacaacaatccttggcacatctaacaatacaaaccatcgcaacgcaacagctacaacagtttctaccatcactgatccacctatccatggtgaactctgtattcttattgcaacaactgtttttt

SEQ ID NO: 317530 - DNA, 411 bp, Zea mays
cagagtgtgagaatagtttgtagggttgtcatcaaccaccaaaaagggcgagattgagggcatgtatgcccgtggttggttttagtaattaatgacaacgtaatattatatgtgactaacgtgtgttctgcagagcaaatggtaagttagattgtattacaggaagttgtactacaacggtgaatacaatcactgagatgagaacttgaagcaacagctgaaacgacgaatcaaaagatgaatgtcttcatattccaagtgtcatgagttgcggacactttgtatagaattatgtcttctattgtattttatccatactattaagaggagttgtggatgagttattttgaccaagataatgctagtgtattgttgtatcatattgcacactctattactagtttaactcta

SEQ ID NO: 317531 - DNA, 328 bp, Zea mays
gctgcttatttacagcagcaacaactactaccattcagccagctagctgatgtgagccgtgctgccttcttgacacaacaacagttgttgccgttctacctgcacgctatgcctaacgctggcaccctcttacaactgcaacaattgctgccattcaaccaacttgctttgacaaactcaacagtgttctaccaacaacccatcattggtggtgccctcttttagattgcttatgagttatagttcaataatgaagttttttggatgatgtttgtggcgtcccagaaataagaaagtacatttctagattcaaaaaaaaaaataaaaa

SEQ ID NO: 317532 - DNA, 426 bp, Zea mays
ggcacaaaacatcagggcacaacaactacaacaactcgtgctagcaaaccttggtgccgactctcagcaacagcagtttctgccattcaaccaactagctgcattgaactctgctgcttatttgcaacaacaacaactactaccattcagccagctagctgctgcctaccaccagcaatttcttccattcaaccaactggcatcattgaactctcctgcttatgtacaacaacaactactaccattcagccagctagctgctgtgagccctgctgccttcttgacacagcaacagttgttgccgttctacctgcacgctgcgcctaacgttggcaccctcttacaactgcaacaattgctgccattcaaccaacatgctttgacaaacccaacagcgttctaccaacaacccatcattggtggtgc

SEQ ID NO: 317533 - DNA, 299 bp, Zea mays
tagacgtacgcgtacgcgtacgcctacgcgtcctgttctcacatatataggacagagaacaataaattgcagaatccgtatcttattatcaactggtaataatcccttcgcgtcaagcgcatcaaggccctgttcaaagcccacacaaagcatcaccggacggtgctactcgacaacatacagatcatcacgaatcatactatccctatgctatcacggatgcacgacactgaccgcatttctgagctcatctactagaatacccgcaacgtactcaagatctttatggaaaacttcat

SEQ ID NO: 317534 - DNA, 420 bp, Zea mays
attttgagcattcagaaacacaccaagcgaagcacattagcaacaacctaacagcaagggctaccaagatattatccctccttgcgcttcttgcgctttttgcgagcgcaacaaatgcgttcattattccacaatgctcacttgctccaagttccattattacacagttcctcccaccagttacttcaatgggcttcgaacacccagctgtgcaagcctataggctacaacaagcaattgcggcgagcgtcttacaacaaccaatttcccagttgcaacaacaattcttgtcacatctaacagtacagaccatcgtaactcatcagcatcaacaattcctaccagcactgagccacctagccatggtgaaccctgtcgcctacttgcatcagcagttgcttgcatcaaacccacttgctc

SEQ ID NO: 317535 - DNA, 442 bp, Zea mays
cggactcgtggtcggactcgtgggaaaaaaaaaaaaaaaaaaaaaaaaaaaaaaggaagagaaaaaaaaaaaaaaaaaaaaaaaaaaaaaaaaaaaaaaaaaaaaaaagggctcggccgttttaaaggtcccaaccttccttccccttccttccaacttcataccttttttatagtgccccctaatttcatttcactgcccttcttttaacaccttcttacctggaaaacccctgcctttcccaattttattccctttgcatcacttccccttttcccctgttgccttattaccaaatagccccgtacctatcgctcttccaatcattttcccacccttattgtctattgtaccccccctttttcctgcccttatatccctctttttttggttttaactctcattttaccctttttattttcttttctttatttcttttttt

SEQ ID NO: 317536 - DNA, 253 bp, Zea mays
cggacgcgtgggaaaaaaaaaaaaaaaaaaaaaaaaaaaaaaaaaaaaaaaaaaaaaaagaaaaaaaaaaaaaaaaaaaaaaaaaaaaaaaaaaaaaaaaaaaaaaaaaaaaaaaaaaaaaaaaaaaaaaaaaaaaaaaaaaaaaaaaaaaaaataaattaaaaaaatatataaaaaattatattaattaaaaaaatattattaattaaataaattaaaataataaaaaaaaaatatttaatataataatata

SEQ ID NO: 317537 - DNA, 141 bp, Zea mays
gcatacagttatctgctatactccattgcataaggtcccgttggatcaattagctaggaataatagttagctagctaagggcatgcacagtaagggagtgtttggtacgatgaatcactctatctatgcacagataaagaa

SEQ ID NO: 317538 - DNA, 230 bp, Zea mays
cccctgctgacaccacaccacttcctatatactctcccgcccgctgctgccctcggtccgcgtacatatcccgtcaccaaccgatcctacaccctccagcatggccgttgcgactgccaacgccgcgacagccctggctcttgcgctcgatctctcgctcgcggacaccaactctgagggcgacgcgctctccacgcttctccacatcctaaggtaccccatctacattc

SEQ ID NO: 317539 - DNA, 432 bp, Zea mays
gggtcttcagaccattagctttatctactccagagcgcagaagaacccgatcggcacgatgagggtgttgctcgttgccctcgctctcctggctctcgctgcgagcgccacctccacgcatacaagcggcagctgcggctgccagccaccgccgccggttcatctaccgccgccggtgcatctgccacctccggttcacctgccacctcctgtgcatctcccaccgccggtccacctgccgccgccggtccacctgccaccgccggtccatgtgccgccgccggttcatctgccgccgccaccatgccactaccctactcaaccgccccggcctcagcctcatccccagccacacccatgcccgtgccaacagccgcatccaagcccgtgccagctgcaaggaacctgccgcgttggcagcaccccgatcct

SEQ ID NO: 317540 - DNA, 249 bp, Zea mays
cgaaaagtctgatctgaagccagcagacgtgaaaccgacagcacgtacgtacgtacgtgtgagggctgctcggcggccatgggagaatggtgcttcaagaaacgcgcagctctggtgattattgtggccattattagctcgctgcagctgctcctgataactgctcaagaagctggaggagaccacgaggtgtggtcgtcgtcatcctcgccggccggtggtcgtggtggcggcgccgtcgtcgtcccg

SEQ ID NO: 317541 - DNA, 328 bp, Zea mays
aagaaaaaaaaatataaaaaaaaaaattttttttttaacaaacaaacataaaaaaaagggatagtataaaaaataagcttgggaaccaatcaatatatataaaataactatatatgcatgacagttaaaaatatacatacttcctttaaaaatattagccaatactatttgcctatggtgaactaatcaatccttaatgactgcccccatgtacaaaaccagatcaagattctagctcttccggttgaaattactccttatgtgctgtaagtttacccttgacattatattttccaacttaaatgcagcatgatttattcttttaata

SEQ ID NO: 317542 - DNA, 416 bp, Zea mays
gacacttgatgccattatagctgggtctgggccttaactagcttctctaattgttgcgcgcgtgtatgtggttacattgcaggaaagcttactgatttgatgctggttaatttgccaggcatccttgttgtgcttggactccatgagcagctgcacaaatttcgtttcagctttcaaatatctcctttttctgcaagttttctggttgtaaaagatgatggtggcaataatatggtacttgagctcacaggatgcacatttcttgtaacctgtattccaaaactttatctacctgaaaccatagttactgtttaagaataaaatattttaatttttattattttattatttttttttttttattttatttattatttatttttttttattatatttttttatttatattttttttt

SEQ ID NO: 317543 - DNA, 416 bp, Zea mays
agcaatgcgagcgttcttcgttctgtttgtacttaataccatctattccttcgactggttttctagggacgcttgccagcctggcgtgtctgtcgtgtaactctgtctgcacgcgcttatttatatgcatccttcctttaagccgatttccactcatatctacctatagcgagctcatccgcccttattgtctgtccaccacgcactaactcacttcatgatacttcgtctttctgctgagtctactccttaccttctttttgcttaccttctactttatattttttatcttatatgagtggggttatttacatatttttctaaatttcttcttttattttcttttttttaatctttctactctttctttcttttttctatcttttttattttttttctcttattttttttctttt

SEQ ID NO: 317544 - DNA, 384 bp, Zea mays
cccacgcgtccggctgcctactctcagcaacagcagtttcttccattcaaccaacttgctgcgttgaactctgctgcttatttgcaacaacaactaccattcagtcagctagctgctgtgagccctgttgccttcttgacacaacaacagttgttgccgttctacctgcacgctgcgcctaacgctggcaccctcttacaactgcaacaattgctgccattcaaccaacttgctttgacaaacccaacaacgttctaccaacaacccatcattggcggtgccctcttttagattgcttatgagttatagttcaataatgaagttttttggatgatgtttgtggcttcccagaaataagaaagtacatttctagattcttatgtg

SEQ ID NO: 317545 - DNA, 325 bp, Zea mays
ggtgggctggcttctcctccccctccttttcgggttcaacttcgtcaggttctacggcgttctgatacatgtttgagcgaatctagatatcagctgtacgatgatgaataccgatgctatcgtcacaggacatccctgatccacacgactaccactccctctacaactccttaagcacctacgccaaggtaccttattccaaaatattactcaacccctatacgcaaaaatccaagctatcaacctgcgcctctgctcgcagaccggacgtaaccacgttagggcattagcgcataaacggcacgttccattgactcatccagat

SEQ ID NO: 317546 - DNA, 392 bp, Zea mays
gccacacattcgtgcagaaaatgcagtacttatcacaatggatataaaatcggatcgtgatgctgagcatgctaaaggcaatgttaatgttgacatagatctctacgaaggcatctgcactgacatcttaactttaataatatggaaactgtatgtcacaaaattatactctctaaaatactctggcaatgctgtttgcactgagctgatgattgtcgagatcattatggcaaatccaacaagagatccatgatcagatgccgagactgacgacgatatggacgatgattattgtgatcatagtattatgctttagatgacttatatcaggtatcatagcatatatcatactttatctttgctgaaggttctgtataatgtatgttagcctt

SEQ ID NO: 317547 - DNA, 382 bp, Zea mays
cccacgcgtccgaaagccggccgagccataaccgccgccgcaggccattgccgacttgcggtgaaccttgtcttgcaacggcttccaagtcaagggcccaccgccaccggttgggaagggccgccaaaggtatcccagggaagcctgtgagcgaaggctgagagaggccacgccgtccggagtctccagttccgtcgccacagcttcctgccgcgcctgtgccgaggtaaacgagagggatcgaggaagaagtatcccccggagccccttcccccgaacccgaaggctccggaatggcgcactgggttagcgacagtgatggcagtgacaactttgaatgggatagtgatggcaatggggaggaaccagcgaacttcaatgc

SEQ ID NO: 317548 - DNA, 270 bp, Zea mays
gttctagatcgctcgcgatctataactagtcctagatcgcgagctgccccctgttttgtttttttaattcgaaagacttctcaattacattacaaaaaaacatcaacttttatcctcatgatatcatgttttaccacaaattaatgacattacgacatgccacagttctttctcatagcttcttacaatctttaaatcctacacacctcaataccctattactctatatcttatatagtagatatatttactcaaattgtcatcctttat

SEQ ID NO: 317549 - DNA, 367 bp, Zea mays
gccacctccacgcatacaagcggcagctgcggctggcagccaacggcggccgttcatcgtccggccgccgtgcctctgccaacctccgttcacctggcaactcctgtgcatctcccaccgccggtccacctgccgccgccggtccacctgccaccgccggtccatgtgccggccgccgttcatctgccgccgccaccatgccactaccctactcaaccgccccggcctcagcctcatccccagccacacccatgcccgtgccaacagccgcatccaagcccgtgccagctgcagggaacctgcggcgttggcagcaccccgatcctgggccagtgcgtcgagttcctgaagcatcagtgcagcccga

SEQ ID NO: 317550 - DNA, 427 bp, Zea mays
gcaacatagaaagtggaatccagtagcatacaacagagcaacaatggcgaccaggatagtttccctccttatgctccttgctctttctgcatgtgttgctaacgcgacaattttccctcaatgctcacaagctcctatagcttcccttcttcccccataccttccatcaatgatagcttcagtatgtgaaaacccagctcttcagccctataggctccaacaagcaatcgcagcaagcaacatacctttatcacccttgttgtttcaacaatcgccagccctatctttggtgcagtcattggtacaaaccatcatggcacagcatctgcagcaactcgtgctacctgtgatcaaccaagtagctctggcatacctttctccctactctcagcaacaacaatttctttcattcaaccaactgtctaca

SEQ ID NO: 317551 - DNA, 228 bp, Zea mays
cggactcgtgggctgacgcgttttcctttagctcaatgacggaagggtcataggagtggttccatctactggttaactggagcgttcgctatggcgataggcgtcataaggagaacgttttttgccatacactagcgttcttaacttctactaactttctctgtagtttctcttccttttgtcctgtctcatctcatttgtctcatctttatttacatttttatatca

SEQ ID NO: 317552 - DNA, 268 bp, Zea mays
aaaaaaaaaaaaaaaaaaaaaaaaaaataaaaaaaaaaaaaaaaaaaaaaaaagaaaagaaaaaaaaaaaaaaaaaaaaaaaaaaaaaaaaaaaaaaaaaaaaaaaaaaaaaaaaaaaaaaaaaagagaatgcattaaaaaagacataaacaatacttacaacaagaataaaataaaaaggccatgaaactaagacaaaacttaaaaaaaaaaaactcttatctaaaaaaatacataacatgaaaaacataaacaatacataaataaa

SEQ ID NO: 317553 - DNA, 417 bp, Zea mays
gttggttgaatggaagaaattgtctacattgaaccgtgctgcttatttgcagcggcagctattaccattcagccagctagctactgcctactctcagcaacaacaacttcttccatttaaccaattggccgcactgaaccccgctgcttatttgcagcagcaaatactactaccatttagccagctagctgcagcaagccgtgcttccttcttgacacagcaacagttgctgcctttctaccagcagtttgcggctaaccccgcaaccctcttacaactacaacaattgttgccctttgtccaacttgctttgacaaacccagcagcctcctaccaacaacacatcattggtggtgccctcttttagattgcttattagttgtaattcaataataaagtttttttggatgatgtatg

SEQ ID NO: 317554 - DNA, 430 bp, Zea mays
gcaacatagaaagcacaatagtgtaccaacaatggcagccaaaatattttgcttcgttatgctccttggtctttctgcaagtgttgctaccgcaaccattttcccacaatgctcacaagctcctatagcttcccttcttcccccatacctctcaccagcggtgtcttcagtgtgtgaaaacccaattgttcaaccctacaggatccaacaggcaatcgcaacaggcatcttaccattatcacccttgttcctccaacaaccgtcagccctattacaagagttacctttggtccatttggtggcacaaaacatcagggcacaacaactacaacaacttgtgctagcaaaccttgctgcatactctcagcaacatcagtttcttccattcaaccaactggctgcattgaactctgctgcttatttgcaacaa

SEQ ID NO: 317555 - DNA, 377 bp, Zea mays
cggacgcgtgggtagcaacatagaaagcacaatagtgtaccaacaatggcaggcaaagtatttcgcctccttatgctccttggtctttctgcaagtgctgctacggcgaccattttcccacaatgctcacaagctcctatagcttcccttcttccaccgtacctctcaccagcggtgtcttccgtatgtgaaaacccaattcttcaaccctataggatccaacaggcaatcgcagctggcatcttacctttatcacccttgttcctacaacaatcatcagccctattacagcagttacctttggtgcatttattggcacaaaacatcatggcacaacatctacaaccaactgtgctagcaaaccttgctgcctactt

SEQ ID NO: 317556 - DNA, 230 bp, Zea mays
ctcgataatggtgccctcattccggcatgtgtttcctagaaataatcaatatattgatggaaatttatctcaatataaaaaaaaaaaaaaaaaaaaaaaaaaaaaaaaaaaaaattaaaaaaaaaaaaaaaaataaaaaaaaaaaaaaaaaaaaaaaatcaaaaaaaaaatacataaaaaataaaaaaaaaataaaaaaaataaaaaaaatgtttaatttttaaatattt

SEQ ID NO: 317557 - DNA, 333 bp, Zea mays
cccacgcgtccgcccacgcgttcgcctacgcgtccgcccacgcgtccgcaagctgatgtcggcctgtgtggatttgagggttcgttgcccgtacttttatgagctaggatgcaagattgttcctttggtgagtgacaatagcattggcctgttcttgcgatatgcattcaccagtaggtacaaagaggttctaagtaagtcccacagttcttccatgatgacagtgcccaagttcgttccacgccttacaaaagaagaaactcgggtgtttgaatctgccagagaatcgatgactggtttcaagaaatggctagcatgtgggatgagactgca

SEQ ID NO: 317558 - DNA, 133 bp, Zea mays
acttcgaatggctcattaaatcaattatagtatgtttgattgtacattctactcttataacctttattaattctagatctaatactttcaacaaacccctacttcctttattatctcatttattatataaaat

SEQ ID NO: 317559 - DNA, 422 bp, Zea mays
cagaagtacatactagcttactttctgttggtcaggaatgagtacttctctggggaggcgaagaaacactcagatgtgttctgtgatatttcagaattagatttctttctatatgctacagatttggatagtgaagaacttgaactgaaggagcagaaacccattacgaaggctcaatcaggaggtgattcaagtggcaacagatcgaatgattgctacttccccggccttcatgatgatctgtctcaagactgccttgcttgggcaagcatatcatactacccttccctttcttgtctgaacaaaagattcaatttgttaattaacagtggatatttttactgactgcttaatatatattgtattgttgagctctgttttatttatctttttatttttatctctattaatctttttttttt

SEQ ID NO: 317560 - DNA, 396 bp, Zea mays
  unsure (1)..(396): unsure at all n locations
attaagaccaactagcaacatataatgtacaatagtgtaccaacaatggcancgcgaggtattttgcttccttatgctccttggtctttctgcaagtgctgctaccgcgaccattttcccgcaatgctcacaagctcctatagcttcccttcttcccccatacctctcatcagcggtgtcttcagtatgtgaaaacccaattcttcaaccctacaggatccaacaggcaatcgcagcaggcatcttacctttatcacccttgttcctccaacaaccgtcatccctattacagcagttacctttggtgcatttgttggcacaaaacatcatggcacaacaactacaacaacttgtgctagcataacctgctgcctactctcagcaacagcagtttct

SEQ ID NO: 317561 - DNA, 432 bp, Zea mays
ctctgcatctgcaggcgtcgtcgtcactcttggtggacgtagtacatcggtgcgtggagtatctgttgtttaattgcgtacgttcagttcattctgtttcttgtattctttcggttcctttcctctggtatattcatggatgatgaggtgtttctgtttaatcctctgattcacctgtaaccatgtatcatgtaacgtgcgcgtttatgtcctactgatttctgcagctgtatttattttacttgatagcttactatcgacatatgatcatgctactatcattcatatgataacaattacgtggggtgcatttgttgtcacaaatcattttttctcattatcttctttctcttttgctttctaactctttctttctacttttatcttctttcttttatttttctttctacttatttttcttttttttatttt

SEQ ID NO: 317562 - DNA, 342 bp, Zea mays
ccacgcgttcggggaaacgtgctgacaaacgtcacgcttagagactgccacgctgtcctccggcatttgcactgacctctccatcgcctacgacgccgcctacgaccgcacgcaccgtccttactccgctctagactacgacggtgagtacaaccgcccgtaccgcaactaggttgtgccctacatagacatcatcatcaacatgatcgccaagccgcccgcgaggtcgtctaagacggtctccaacagaggcggaggctcaggggtgggcttgacatcatgcttgagcgatacgcacttgcagaggctgagatctacggccagctcttcggcttactcaac

SEQ ID NO: 317563 - DNA, 424 bp, Zea mays
  unsure (1)..(424): unsure at all n locations
gaccaactagcaacatagaaagcacaatagtgtaccaacaatggcagccaaaatatttggcctccttatgctccttggtctttctgcaagtgctgctaccgcgaccattttcccgcaatgctcacaagctcctatagcttcccttcttcccccgtacctctcaccagcggtgtcttcggtatgtgaaaacccaattcttcaaccctataggatccaacaggcaatcgcagctggcatcttacctttatcacccttgttcctccaacaatcatcagccctattacagcagttacctttggtgcatttattggcacaaaacatcagggcacaacaactacaacaacttgtgctagcaaaccttgctgcctactctcagcaacagcagtttcttccattcaaccaactntctgcattgaactctgct

SEQ ID NO: 317564 - DNA, 225 bp, Zea mays
caacaacacatcatcattggttctcctcttttaaatagccaattaattgtaatgcaatgatcaattcattctcatgcaaacaagccattaaacctcttaaaaaatgtcggcccatctatagaaacctatccatcatacccaaccttgcaccttataccgtttaaatgtttacgcactaattccatcactcaccgctaatatttcacctatcgaatgttcaatcac

SEQ ID NO: 317565 - DNA, 429 bp, Zea mays
gcaaaccttgctgcctactctcacatcagcagtttcttccattcaaccaactaggttcattgaactctgcttcttatttgcaacaacaacaactaccattcagccagctacctgctgcctacccccagcaatttcttccattcaaccaactagcagcattgaactctcctgcttatttacagcagcaacaactactaccattcagccagctagctggtgtgagccctgctaccttcttgacacaaccacagttgttgccgttctaccagcacgttgcgcctaacgctggcaccctcttacaactgcaacaattgctgccattcaaccaacttgctttgacaaacccagcattgttctaccaacaacccatcattggtggtgccctcttgtagatttcttatgagtcatagttcaataataaagtttttt

SEQ ID NO: 317566 - DNA, 441 bp, Zea mays
cttggtctttctgcaagtgctgctaccgcaaccattttcccacaatgctcacaagctcctatagcttgctttcttcccccatacctctcaccagcggtgtcttcagtatgtgaaaacccaattcttcaaccctacaggatccaacaggcaatcgcagcaggcatcttacctttatcacccttgttcctccaacaaccgtcagccctattacagcagttacctttggtgcatttgttggcacaaaacatcaaggcacaacaactacaacaacttgtgctaggaaaccttgctgcctactctcagcaacagcagtttcttccattcaaccaactggctgcattgaactctgctgcttatttgcaacaacaactaccattcagtcagctagctgctgcctacccccagcaatttcttccattcaaccaacttgcagcattgaac

SEQ ID NO: 317567 - DNA, 430 bp, Zea mays
ggtgggctggcttctcctccccctcttaccaagtccttctcgggttagggttccttagggttttgtggaggggcgatggcggcggctgatgtggagtaccgttgcttcgtcggcgggcttgcctgggccaccagcaacgagtcgctggagaatgccttcgcctcctacggcgagatcctcgactccaaggtcatcaccgaccgggagacggggaggtcccgcggcttcagcttcgttaccttctcctccgagaactccatgctcgacgctatcgagaacatgaacggcaaggagctcgacggccgtaacatcaccgttaaccaggcccagtcccgtggcggtggcggtggcggcggtggctacggcggcggtcgcggcggcggcggcggttatggtggcgggcgccgtgacggcggttatggcggcggtg

SEQ ID NO: 317568 - DNA, 429 bp, Zea mays
gcaacatagaaagtggaatccagtagcaacaacagagcaacaatggcgaccaagatattgtccctccttatgctccttgctctttctgcatgtgttgctaacgcgacaattttccctcaatgctcacaagctcctatagcttcccttcttcccccataccttccatcaatgatagcttcagtatgtgaaaacccagctcttcagccctataggctccaacaagcaatcgcagcaagcaacatacctttatcacccttgttgtttcaacaatcgccagccctatctttggtgcagtcattggtacaaaccatcagggcacagcagctgcagcaactcgtgctacctgtgatcaaccaagtagctctggcaaacctttctccctactctcagcaacaacaatttcttccattcaaccaactgtctacactg

SEQ ID NO: 317569 - DNA, 433 bp, Zea mays
caagcaacatagaaagtggaatccagtatcaacaacagagcaacaatggcgaccaagagattttccctccttatgctccttgctctttctgcatgtgttgctaacgcgacaattttccctcaatgctcacaagctcctatagcttcccttcttcccccataccttccatcaatgatagcttcagtatgtgaaaacccagctcttcagccctataggctccaacaagcaatcgcagcaagcaacatacctttatcacccttgttgtttcaacaatcgccagccctatctttggtgcagtcattggtacaaaccatcagggcacagcagctgcagcaactcgtgctacctgtgatcaaccaagtagctctggcaaacctttctccctactctcagcaacaacaaatttcttccattcaaccaactgtctacactg

SEQ ID NO: 317570 - DNA, 427 bp, Zea mays
acaaacacacctagcgaagcacattagcaactacctatcaacaatggctaccaagatattatccctccttgcgcttcttgcgctttttgcgagcgcaacaaatgcgttcattattccacaatgctcacttgctccaagttccattattacacagttcctcccaccagttacttcaatgggcttctaacacccagctgtgcaagcctataggctacaacaagcaattgcggcgagcgtcttacaacaaccaatttcccagttgcaacaacaatccttggcacatctaacaatacaaaccatcgcaacgcaacagcaacaacaattcctaccagcactgagccacctagccatggtgaaccctgccgcctacttgcaacagcagttgcttgcatcaaacccacttgctctggcaaacgtagttgcaaac

SEQ ID NO: 317571 - DNA, 101 bp, Zea mays
  unsure (1)..(101): unsure at all n locations
cccacgcgtccgcagacgcgtgnggggtgaccaactcagttaattcctagctacttcggctgtaaacatacttgtctccgaagtttttttttttttgggct

SEQ ID NO: 317572 - DNA, 413 bp, Zea mays
caacatacctttatcgcccttgttgtgtcaacaatcgccagccctatctttggtgcagtcattggtacaaaccatcagggcacaacagctgcagcaactcgtgctacctgtgatcaaccaagtagctctggcaaacctttctccctactctccgcaacaacaatttcttccattcaaccaactgtctacactgaaccctgctgcttatttgcagcaacaactattaccatttagccagctagctactgcctactctcaacaacaacaacttcttccatttaaccaattggccgcactgaaccccgctgcttatttgcagcagcaaatactactaccatttagccagctagctacagcaagccgtgcttccttcttgacacaacaacagttgctgccgttctaccagcagtttg

SEQ ID NO: 317573 - DNA, 399 bp, Zea mays
cccacgcgtccggcattgctagaggtgacatgagtttcacttctactgaaccggtgctacatgtagcatctgttgatgaaccaatgctacatgtaccacgagcgggcagcgagatcaatgttgctggaccaagtgtgggcagtgagactaatgttgttggactaacgttggatcgagaggcttgtgaagttcagtcaccaccttctggtacgtcagtacatggaagcgggaaaaagaggaagaaaagtcaagttgcaagtgttttggatgactatttggagcacaagatgaaccaaacagataagactgtggaggcgttccttgagaagaagactcgtggagaggagtctatggataggtgtatccacatatttgaagctatggaggacttgacagatg

SEQ ID NO: 317574 - DNA, 92 bp, Zea mays
ctgactccaaatgggtgacacaacgtaaaatatacagctatctacttcggctgtaaacatacgtgtctccgaagttttttatattttgggct

SEQ ID NO: 317575 - DNA, 331 bp, Zea mays
ccacgcgtccggaaaaaataatgtttaaagtgcaggctatgggaaagctggactctgagaatcacttgtcggctgcaactgaggtgagacttcatcagatcacaggatcctgccactggacgtatctcgcgctactggaaagcgatactttacgtttcggccctagcttttgcttgtcggccaggatacaagaacatgctttgatgccatcttccaaattggcataatgtgagaattgaccggctgcacgactgttcggcatattgacatactatgaccaatggagtatgttatgtagctagctgctactttgtagttagtgcgtgatgat

SEQ ID NO: 317576 - DNA, 416 bp, Zea mays
cggacgcgtgggctcctctggtctctagacaaccaagccagagaggagcagccaggcgagccaaagcgcaaggacacacggccagcgacaacctcctcccctcttattccgcgcccagcagcgaggcatggtggagaaggcgaggaccatggcgcgcaggctggagatcccccagtggaaggccgacggccttccgtcgccgacgagcccgctggaccgcgcgtcgccgtcgccccgggggtggcgccaccgcgacgccgtaggaggaggcgtggggctcgggatcctggcggcgctcgaggccgagggcccgccgcagcccgcgccgagggtgtccatcccgcggcgcgcggcgcggcttgaggtgtcggagctcgggtgcagcgggcgctgcgccaccagcctgtgcggcggcg

SEQ ID NO: 317577 - DNA, 97 bp, Zea mays
cccacgcgtccgcggacgcgtgggaaattaaaaaaaaaaaaaaaaaaacgaaaaaaaaggaaaaaaaaaataaaaaataaaaaaaggccatacaatt

SEQ ID NO: 317578 - DNA, 415 bp, Zea mays
  unsure (1)..(415): unsure at all n locations
cggacgcgtggggatcagcaaagcggcagtgcgtagagaggatcgtcgaacagaacagcatgaagatggtcatcgttctcgtcgtgtgcctggctctgtcagctgccagcgcctctgcaatgcagatgccctgcccctgcgcggggctgcagggcttgtacggcgctggcgccggcctgacgacgatgatgggcgccggcgggctgtacccctacgcggagtacctgaggcagccgcagtgcagcccgctggcggcggcgccctactacgccgggtgtgggcagccgagcgccatgttccagccgctccggcaacagtgctgccagcagcagatgaggatgatggacgtgcagtccgtcgcgcagcagctgcagatgatgatgcagcttgagcgtgccgctgccgncagcagcag

SEQ ID NO: 317579 - DNA, 259 bp, Zea mays
cagatgcatacaaccgatgctgagtgatatggtggtaggaataattcatcccgcaatgatctgacgctgacgctcagaccttgtgatgctcgtcatatgatgctgcatgagcgccggcaccacgtatgaagttactaagaatgaattcaccgtgggactagcgatcagttgcctgttatacaatcgagaagtcgcgtggaaaactaccataatgacgagctgagctatcagaagacaattgattccgtgatatatacaa

SEQ ID NO: 317580 - DNA, 424 bp, Zea mays
ccacgcgtccggcaacatagaaagtggtatccagtagcaacaacagagcaacaatggcgaccaagatattttccctccttatgctccttgctctttctgcatgtgttgctaacgcgacaattttccctcaatgctcacaagctcctatagcttcccttcttcccccataccttccatcaatgatagcttcagtatgtgaaaacccagctcttcagccctataggctccaacaagcaatcgcagcaagcaacatacctttatcacccttgttgtttcaacaatcgccagccctatctttggtgcagtcattggtacaaaccatcagggcacagcagctgcagcaactcgtgctacctgtgatcaaccaagtagctctggcaaacctttctccctactctcagcaacaacaatttcttccattcaa

SEQ ID NO: 317581 - DNA, 54 bp, Zea mays
attctttgcaactctgagtagagagatacacggaatgttcagcttttcagatcc

SEQ ID NO: 317582 - DNA, 175 bp, Zea mays
cgattcacggttgatctggtgactgctgttcagtttgcttctttcgcgtaaaattatcgggtgctctggaaaagaaacttgaggcttgtattgcatctttgataacataatattataatatatgtagagactcaaaaaaaaaaaaaaaaaaaaaaaaaaaaaaaaaaaaaagaaa

SEQ ID NO: 317583 - DNA, 198 bp, Zea mays
tcgaaaaaaaaaaaaaaaaaaaaaaaaaatttaaaaaaattaaaaaaaaagaaaaaaagatatggaaaatagggatttacaaaatcaataatgctaaattattaacaataaaaaagtggtatctaaattcatataaattggacgatatttaacaactgtaactaatgataaaacgttgtaagttagcgatcttattaa

SEQ ID NO: 317584 - DNA, 194 bp, Zea mays
aacactcgtgctctaaagcatgatacttatatcattacgtagaccgttcgggtgctggggtcgcttaatatgccgtttgcacttgcagactacccacgaaatgcccacaacagtttggataattagttgaaccgctaatcgcacaatctgatcttaatataaacgcacactctcatatgctcaactacatacag

SEQ ID NO: 317585 - DNA, 317 bp, Zea mays
aacgctcatactaggaagtgagccactttgaacaaaacgttgacagttctgagcgaccgggacgcctaagatgccgtcggcggaggcaagggcacgagggcgtggcctccaaagctctgatcgtcagttgatccgcgaatcggtctgtctgaactcagcatctactcacactctcacatgctcagctagtacagaccgccacatacacccctgtgtctgaaactcggcggttgtcttttagcttcccaatgcatgtgtagtctgatctctctatcatgaaaacgcgcatctcatttagaatgaactgcagttggaaa

SEQ ID NO: 317586 - DNA, 275 bp, Zea mays
aacacgcgtacgctgatagatcgcgatttgacgccaacgttttctattcgtgaaatggggaattatacattgccgatgatcactagcagatcccagcatgaatgcactatacagtttggatcattactatatcggcgtgtccataaagacagatcctagtaatcactgatactcccaggagctctactcatacataccgcgaaactatccagtgtagtcgcatctctgaagtcgacggccacaatcaaactggtattgaactcagatctatccat

SEQ ID NO: 317587 - DNA, 387 bp, Zea mays
gttcgtgaggttctccggcgttcggcttcgtgggtgagcggatcgagatggcggcgtcggatgttgagtaccgatgcttcgtcagcggcctcgcctgggccacggacgaccactccctccacaacgccttcagcacctacggcgaggtcctcgagtccaagatcatcctcgatcgggagacgcagaggtcccgcggcttcggcttcgtcaccttctccacggaggacgcgatgcggaacgccatcgagggcatgaacggcaaggagctggacggccgcaacatcaccgtcaacgaggcccagtcccgcggcggccgtggaggccgccgcagtgggtaccgtggtggcacgtggaggcggcggctacggccgtggcgggcgccgtgat

SEQ ID NO: 317588 - DNA, 421 bp, Zea mays
agaccaacaagcaacatagaaagtggaatccagtagcaacaacagagcaacaatggcgaccaagatattttccctccttatgctccttgctctttctgcatgtgttgctaacgcgacaattttccctcaatgctcacaagctcctatagcttcccttcttcccccataccttccatcaatgatagcttcagtatgtgaaaacccagctcttcagccctataggctccaacaagcaatcgcagcaagcaacatacctttatcacccttgttgtttcaacaatcgccagccctatctttggtgcagtcattggtacaaaccatcagggcacagcagctgcagcaactcgtgctacctgtgatcaaccaagtagctctggcaaacctttctccctactctcagcaacaacaatttcttccattc

SEQ ID NO: 317589 - DNA, 420 bp, Zea mays
caagctcctatagcttcccttcttcccccgtacctctcaccagtgttgtcttcagtatgtgaaaacccaattcttcaaccctacaggatccaacatgcaattgcatcaggcatcttacctttatcacccttgttcctccaacaatcatcagccctattacagcagttacctttggtgcatttattggcacaaaacatcagggcacaacaactcgtgctagcaaaccttgctgcctactctcagcaacaacagttacctttggtgcatttgttggcacaaaacatcaaggcacaacaactacaacaactcgtgctagcaaaccttgctgcctactctcagcaacaacagtttctgccattcaaccaactagctgcattgaactctgctgcttatttgcaacaacaactagtactaccattc

SEQ ID NO: 317590 - DNA, 444 bp, Zea mays
cccacgcgtccgcaaagcggcagtgcgtagagaggatcgtcgaacagaacagcatgaagatggtcatcgttctcgtcgtgtgcctggctctgtcagctgccagcgcctctgcaatgcagatgccctgcccctgcgcggggctgcagggcttgtacggcgctggcgccggcctgacgacgatgatgggcgccggcgggctgtacccctacgcggagtacctgaggcagccgcagtgcagcccgctggcggcggcgccctactacgccgggtgtgggcagccgagcgccatgttccagccgctccggcaacagtgctgccagcagcagatgaggatgatggacgtgcagtccgtcgcgcagcagctgcagatgatgatgcagcttgagcgtgccgctgccgccagcagcagcctgtacgagccagctctgatgcagcagcagcagc

SEQ ID NO: 317591 - DNA, 360 bp, Zea mays
gaaagttatgagtcagttgcaagaactgataccaacgggcctcatcctacacaatacgggcgtacattatccgtctggactaaggataacattacagaaccgaacaggatgactagggcaaacgcgcccaatggctgagaatctccagttgcgatgtgaatggccgtagccaatcacactacatgccgaccgacgcacacggcatcaccaatgaccgtactcatcgtccaaccagcaggcgactggaacgtcatagaccgcgacatcatcactgctcacggcaccgccatagacgtcaactacactgtcaccaacttacccagcgatagcaccttcactgacgacgcgggactgggcctc

SEQ ID NO: 317592 - DNA, 418 bp, Zea mays
cggacgcgtgggcggcgaccattttcccacaatgctcacaagctcctatagcttcccgtcttcccccgtacctctcaccaacggtgtcttcggtatgtgaaaacccaattcttcaaccctacaggatccaacaggcaatcgcagctggcatcttacctttatcacccttgttcctccaacaatcatcagccctattacagcagttacctttggtgcatttattggcacaaaacatcagggcacaacaactacaacaacttgtgctagcaaaccttgctgcctactctcagcaacagcagtttcttccattcaaccaactagctgcattgaactctgcttcttatttgcaacatcaacaactaccattcagccagctatctgctgcctacccccagcaatttcttccattcaaccaact

SEQ ID NO: 317593 - DNA, 417 bp, Zea mays
cgggttcgtgaggttctccggggttcgggttcgtgggtgagcggatcgagatggcggcgtcgagatgttgagtaccgctgcttcgtcggcggcctcgcctgggccacggacgaccactccctccacaacgccttcagcacctacggcgaggtcctcgagtccaagatcatcctcgatcgggagacgcagaggtcccgcggcttcggcttcgtcaccttctccacggaggaggcgatgcggaacgccatcgagggcatgaacggcaaggagctggacggccgcaacatcaccgtcaacgaggcccagtcccgcggcggccgtggaggcggcggcggtgggtacggtggtggccgtggaggcggcggctacggcggtggcgggcgccgtgatggcggtggcggctacggcggtggcggc

SEQ ID NO: 317594 - DNA, 273 bp, Zea mays
gtcactcgatcaacatcgactgtggacttcaatagcaccattgcgatcccactgtcggcgattatatgttgcgtctccatgcgcagcgcgctctctgcgtgcgtgctgatcccgacacgattctctcactgttcacacgctcctatatcgctcctgacttttcccatacacaccataccagctgtgttcaaggtgtgcgaacacacatttgttacactgtaggcgatacaacgcggtcgcagagctctgctcacatctataacactcgtgtta

SEQ ID NO: 317595 - DNA, 284 bp, Zea mays
cccacgcgtccgaaaaaaaaaaaaaaatttaaaaaaaattaaaaaaggacggaccttccggggtatccgggccaacctaccgttccctgcaatgcaatagctttcctatagtgtaacgtaacctaaattcactgccctggccttaacaccacaacgactggaaaaaccatgccctgccccaactcaacttaattgcattacatcccattttcctcacctgagctatcgccaaagaggccaggcccgttcggattgcccatcacttcagcagcccaaacggaaat

SEQ ID NO: 317596 - DNA, 432 bp, Zea mays
cccactcgtccgcggactcgtgggcggtctcgtggggcaacatagaaagcacaatagggtaccaacaatggcagccaaaatattttgcctccttatgctccttggtctttctgcaagtgctgctacggcgaccattttcccgcaatgctcgcaagctcctatagcttcccttcttcccccgtacctctcaccagcggtgtcttcggtatgtgaaaacccaattcttcaaccctacaggatccaacaggcaatcacagctggcatcttacctttatcacccttgttcctccaacaatcatcagccctattacatcagttacctttggtgcatttattggcacaaaacatcagggcacaacaactacaacaacttgtgctagcaaaccttgctgcctactctcagcaacagcagtttcttccattcaaccaact

SEQ ID NO: 317597 - DNA, 417 bp, Zea mays
acatagaaagtggaatccagtagcaacaacagagcaacaatggcgaccaagatattttccctccttatgctccttgctctttctgcatgtgttgctaacgcgacaattttccctcaatgctcacaagctcctatagcttcccttcttcccccataccttccatcaatgatagcttcagtatgtgaaaacccagctcttcagccctataggctccaacaagcaatcgcagcaagcaacatacctttatcacccttgttgtttcaacaatcgccagccctatctttggtgcagtcattggtacaaaccatcagggcacagcagctgcagcaactcgtgctacctgtgatcaaccaagtagctctggcaaacctttctccctactctcagcatcaacaatttcttccattcaaccaactg

SEQ ID NO: 317598 - DNA, 397 bp, Zea mays
cactgacgccttgcatggtgaacactgttacgtaccttaatattcatagatcaataggagaacctattgaggatcgtacgacgattccaagataccttaatgcacatacagagggatactctcaaaaggcaaacattgatgcaacggtgaaaaaattttcagataacttcacaattatgttgatccattatgatggccggacaactgagtgggatgaatttgagcggtcaataagggctgcccatgtgagtgtcacaaaacagaccaaatggtggtatgccaaacgattcctacatcctgacattggtgcccgctacgactacatattgatgtgagatgaagatcttggcgtagaacattctaatgcagaggcgtacatttagctcgttaggaagca

SEQ ID NO: 317599 - DNA, 409 bp, Zea mays
cagctagtcgtccgcccactcgtgcgtcctactctgccagcgccacctccacgcatacaagcggcggctgcgggtgccagccaccgccgccggttcatctaccgccgccggtgcatctgccacctccggttcacctgccacctccggtgcatctcccaccgccggtccacctgccgccgccggtccacctgccaccgccggtccatgtgccgccgccggttcatctgccgccgccaccatgccactaccctactcaaccgccccggcctcagcctcatccccagccacacccatgcccgtgccaacagccgcatccaagcccgtgccagctgcagggaacctgcggcgttggcagcaccccgatcctgggccagtgcgtcgagtttctgaggcatcagtgcagcccgac

SEQ ID NO: 317600 - DNA, 369 bp, Zea mays
ccgacgcgtgcgcgcaagagttcgaaatgagcgctaagaggatgctattgctgcccttgagtctgcagaacttacagattagataggagctgatcatgaaaacggagatcatcgaacctataaggtgaatgaagcaattgcagcatgtaatagagctgaatgacgctggtgttaaaaatcgggatcctatatgtgatggcagtcatcaatacaaagcatctggacacatgatgtacagcaacgcacgctatctgggagctaccactgagctgttaccaaacatttctgcctacctattagcaacaagctgtgagtaggatgtaaccaactgtgtaaactgaaccgtgctgctgatgtgcagcatcaact

SEQ ID NO: 317601 - DNA, 431 bp, Zea mays
aacacaccaagcgaagcacattagcaacaacctaacaacaatggctaccaagatattatgcctccttgcgcttcttgcgctttttgcgagcgcaacaaatgcgttcattattccacaatgctcacttgctccaagttccattattacacagttcctcccaccagttacttcaatgggcttcgaacacccagctgtgcaagcctataggctacaacaagcaattgcggcgagcgtcttacaacaaccaatttcccagttgcaacaacaatccttggcacatctaacaatacaaaccatcgcaacgcaacagcaacaacaattcctaccagcactgagccacctagccatggtgaaccctgccgcctacttgcaacagcagttgcttgcatcaaacccacttgctctggcaaacgtagttgcaaaccagccac

SEQ ID NO: 317602 - DNA, 392 bp, Zea mays
cagtttcccagttgcaacaacaatccttggcacatctaacaatacaaaccatcgcaacgcaacagcaacaacaattcctaccagcactgagccacctagccatggtgaaccctgccgactacttgcaacagcagttgcttgcatcaaacccacttgctctggcaaacgtagttgcaaaccagccacaacaacagctgcaacagtttctgccagcgctcagtcaactagccatggtgaaccctgccgcctacctacaacagcaacaactgctttcatatagcccgctcgctgtggccaatgcacctacatacctgcaacaacaattgttgcaacagattgtaccagctctgactcatgtagttgtggcaaacccttgtgcctacttgcaacag

SEQ ID NO: 317603 - DNA, 340 bp, Zea mays
aaaaaaaaaaaaaaaaaattaaaaaaatataaaaaaaaaaaaaaaaaaaaaaaaaaaaagggaaaaaaaaaaaaaaaaaaaaaaaaaaaaaaaaaaaaaaaaaaaaaaaaaaaaaaaaaaaaaaaaataaagattaaaatttaattacataaaaaaataataaaaaaaaaataatatttaataaaaacataaaaaaaaaaaaacatgacagtagttaaaaaatttacaactttgaaaaactataatatttccaaattaaatcgtatttgtccatattcccatttggcaatttgccttaatcgcgaataggaccgacccttttgcctttcataaattttaa

SEQ ID NO: 317604 - DNA, 135 bp, Zea mays
tgttttttttttttttttttttttttttttttttttttttttttttttttttttttgtgttttttttttttttttttttttttttttttttttttttttttttttttttttttttttttttttttttttgttctt

SEQ ID NO: 317605 - DNA, 421 bp, Zea mays
  unsure (1)..(421): unsure at all n locations
aaggacatcagggcacaacttctacaacttcttgtgctagcaaaccttgctgcatactggcancaacatcagtttcttccattcaaccaactggctgcattgaactctgctgcttatttgcaacaacaactaccattcagccagctagctgctgcctacccccagcaatttcttccattcaaccaactagcagcattgaactctgctgcttatttacagctgcaacaattgctgccattcaaccaacttgctttgacaaacccagcagtgttctaccaacaacccatcattggtggtgccctcttttagattgcttatgagttatagttcaataatgaagttttttggatgatgtttgtggcttcccagaaataagaaagtacatttntagattcttatgtgcttctagtctccaaatgtg

SEQ ID NO: 317606 - DNA, 436 bp, Zea mays
gttaaattggtcgtggatgacatctcatatgactttgtaaaaggtgccactgtggattatgaggaggaacttatacgttcagcgttcgtggcagaggtgagtatacttatggttggtactcagcaagtgggtgaatatgcaaggtttcaacaaatcctagtgctgttgggggctgcagctgcaagagttctttcatggtgaaatagcttcaattaccttgaagagatcaataattggaaatagcattctgtagcgaatcatacgctttggatctgagtgtacaattgttattttttggtagttctgaagacgtttctttttgagttttgttactgttggaaacatcatcacaaactgtctggttcaatctgtatccctctaacttgtgatagttgtgatatgatgacaagtttatgtacataatcttgtagctatt

SEQ ID NO: 317607 - DNA, 175 bp, Zea mays
  unsure (1)..(175): unsure at all n locations
tccacgtcgtccgggccatgctagtctgcttgtagagcggctctcaagggtcaagggagtaccgagcgtggctcaggtagggaaccttcagtcgacactcgtggtgccctttggtttcggtattccaggtagcatcattcgactctnntggtatcaagtaccgatctctgtcaac

SEQ ID NO: 317608 - DNA, 375 bp, Zea mays
tggactcgtggtcggactcgtgggttctagatcgcgactgccgtccttttttttttttgttttttttttttttttttttttttttttttttttttttttttttttttttttttttttttttttttttttttttttttttttttttttttttttttttttttttttttttttttttttttttatctttttttttttttaatgatcttttttttttgttcatgtactttttctgcattaagataaatttaccaacaaggactccatgaattgtttctagttcaatcaaatatacgttattattacaatgcttattttatcactttttttaccttacccatttttaaaacatctctttggtctcatgctatattttgt

SEQ ID NO: 317609 - DNA, 400 bp, Zea mays
cggacgcgtgggcagaaacacacctagcgaagcgcactagcaacgacctaacaacaatggctaccaagatattatccctctttgcgcttcttgccctttttgtgagcgcaacaaatgcgttcattattccccaatgctcacttgctcctagtgccattattccacagttcctccctccagttacttcaatgggcttcgaacacccagctgtgcaagcctacaggctacaacaagcgcttgcggcgagcgtcttacaacaaccaattgcccaattacaacaacaatccttggcacatctaaccatacaaaccatcgcaacgcatcagcaacaacaatttctaccagcactaagccaactagctgtggtgaaccctgtcgcctactttgcaacagcagttgc

SEQ ID NO: 317610 - DNA, 362 bp, Zea mays
  unsure (1)..(362): unsure at all n locations
ccaactagcaacatagaaagcacaatagtgtaccaacaatggtagccaaaatattttgcctccttatgctccttggtctttctgcaagtgctgctacgacgaccattttcccgcaatgctcacaagctcctatagcttctcttcttcccccatacctctcaccagcgttgtcttcagtatgtgaaaacccaattcttcaaccctacaggatccaacaggcaatcacagcaggcatcttacctttatcacccttgttcctccaacaatcatcagccctattacatcaattacctttggtgcatttattggcacanaacatcagggcacaacaactacaacaactcgtgctagcaaaccttgct

SEQ ID NO: 317611 - DNA, 435 bp, Zea mays
cactagcaacgacctaacaacaatggctaccaagatattatccctctttgcgcttcttgccctttttgtgagcgcaacaaatgcgttcattattccccaatgctcacttgctcctagtgccattattccacagttcctccctccagttacttcaatgggcttcgaacacccagctgtgcaagcctacaggctacaacaagcgcttgcggcgagcgtcttacaacaaccaattgcccaattacaacaacaatccttggcacatctaaccatacaaaccatcgcaacgcaacagcaacaacaatttctaccagcactaagccaactagctgtggtgaaccctgtcgcctacttgcaacagcagttgcttgcatccaacccacttgctctggcaaacatagttgcataccaacaacaacaacaattgcaacagtttct

SEQ ID NO: 317612 - DNA, 436 bp, Zea mays
gggacacgagcggatccgagcgaagcgaccgcgcgtccgcgccctccgtcgccaccaccatccgctccgccgccgctccatcgtcgtccacattgctgccatccgctctgccgctactccatcgtcgtccttccccgaagcagtcgtgagcgagacgtgaggcgacggtgccctccaccaccgccaccgtctcggatttgtcgtcattcaccgccatctctgcctcagtttgctgtcctccaccaccgtcttccgcggcactatgtacaatacaatgttgtctccaagacccagtacatggtcttctccaagatccagtacaagatcgtctcctccaagatttgaaccccaacgctagtgagagtggaggcaacacatgaaaccaacatggagaagaaaaatgaaatggcattccacatgaagcttgtgaaaaaga

SEQ ID NO: 317613 - DNA, 169 bp, Zea mays
cggacgcgtgggcggacgcgtggggtgttctaccaacaacccatcattggtggtgccctcttttagattgcttatgagttatagttcaataatgaagttttttagaaatgtactttcttatttctgggaagccacaaacatcatccaaaaaataagaaagtacatttct

SEQ ID NO: 317614 - DNA, 434 bp, Zea mays
ggtcatcagagcccgcttgcaggttttacttttgaaactttctaagttttcatgtccatgcttattttggaattttaatctcttctgagttttgattatttataactcttatgtgtggttttccagcaacggcctggcactgatggtactccaaagtactcaaatagctggcatgtagtgaaggaaactgcaaagtatgaaggcgtccgtggattttacaggggcatcacgtccaatctactgaaaaaccttccagctgcgtccctcacgttcgtggtgtatgaaaatgttatcaaactattcaaagcaaccaaggagaagacgtagctactcattaaatccaggagtactatgcatggtctgacatttctgagttcaaacgatgcctataatttccattccacgtcaagcccatattttatccatttaacatc

SEQ ID NO: 317615 - DNA, 435 bp, Zea mays
cagaaacacaccaagcgaagcacattatcaacaacctaacaacaatggctaccaagatggtatccctccttgcgcttcttgcgctttttgcgagcgcaacaaatgcgttcattattccacaatgctcacttgctccaagttccattattacacagttcctcccaccagttacttcaatgggcttcgaacacccagctgtgcaagcctataggctacaacaagcaattgcggcgagcgtcttacaacaaccaatttcccagttgcaacaacaatccttggcacatctaacaatacaaaccatcgcaacgcaacagcaacaacaattcctaccagcactgagccacctagccatggtgaaccctgccgcctacttgcaacagcagttgcttgcatcaaacccacttgctctggcaaacgtagttgcaaaccagccac

SEQ ID NO: 317616 - DNA, 348 bp, Zea mays
acatagaaagtggaatccagtagtcaacaatagagcaacaatggcgaccaagatgttttccctccttatgctccttgctctttctgcatgtgttgctaacgcgacaattttccctcaatgctcacaagctcctatagcttcccttcttcccccataccttccatcaatgatagcttcagtatgtgaaaacccagctcttcaaccctataggctccaacaagcaatcgcagcaagcaacatacctttatcacccttgtttcaacaatcgccagccctatctttggtgcagtcattggtacaaaccatcagggcacagcagctgcagcaactcgtgctacctgtgatcaa

SEQ ID NO: 317617 - DNA, 495 bp, Zea mays
  unsure (1)..(495): unsure at all n locations
cctagttccatgtatgccacagtgttctcctcaccagttatcttcatatggcctgtcgaacaccgcgagctgtgtcaagtcctatgaggctacatacaaggcgattggcggcgagcgtcgttacaacaactcaattagcccaattgacaacaactaatccattggcacatgctaacaatacagaaccatgcgcaacgacatcagcaactaacagttgcctactcagctactgagccatcctagccatggntgaactcctgtcgtcctacgttgcaacagtcagctgcttgctatccaaccgcactttgcttctagcaagacgtagattgcaaaaccagtcaacaaccaacatactgcaacgagtttctggccagcgcttagtcaacttagccatgtgtgaaccactggccgcctgacctacatacagcaacaacatggctttcatnctagtcccgcttcgcttgtgtgccaatgctacctacatactctgcaaca

SEQ ID NO: 317618 - DNA, 319 bp, Zea mays
  unsure (1)..(319): unsure at all n locations
tcgcggacgcgtgggcggactcgtgggtttttttttttttttttttttttttggttttttgttttttttttttttttttttttttttttttttttttttttttttttttttttttttttttttttttttttttttttttttttttttttttttttttttttttttttttttttttttttttttttttttttttttttttttataaaaaaaataaattttttnttttaaaatttaatataatttttatattttataattttaattttttttttttaataatatatttttttaataatttatttttattttattttttttt

SEQ ID NO: 317619 - DNA, 420 bp, Zea mays
cccacgcgtccgcccacgcgtccgcaattgcccaattgcaacaacaatccttggcacatctaaccctacaaaccattgcaacgcaacaacaacaacaacagtttctgccatcactgagccacctagccgtggtgaaccctgtcacctacttgcaacagcagctgcttgcatccaacccacttgctctggcgaacgtagctgcataccagcaacaacaacagctgcaacagtttatgccagtgctcagtcaactagccatggtgaaccctgccgtctacctacaactactttcatctagcccgctcgcggtgggcaatgcacctacgtacctacaacaacagttgctgcaacaaattgtaccagctctgactcagctagctgtggcaaaccctgctgcctattacaacagttgcttccatt

SEQ ID NO: 317620 - DNA, 425 bp, Zea mays
gcaacatagaaagcacaatagtgtaccaacaatggcagccaaaatattttgcctccttatgctccttggtctttctgcaagtgctgctaccgcgaccattttcccgcaatgctcacaagctcctatagcttcccttcttcccccgtacctctcaccagcggtgtcttcggtatgtgaaaacccaattcttcaaccctataggatccaacaggcaatcgcagctggcatcttacctttatcacccttgttcctccaacaatcatcagccctattacagcagttacctttggtgcatttattggcacaaaacatcagggcacaacaactacaacaacttgtgctagcaaaccttgctgcctactctcagcaacagcagtttcttccattcaaccaactagctgcattgaactctgctgcttatttgc

SEQ ID NO: 317621 - DNA, 439 bp, Zea mays
gcaacatagaaagcacaatagtgtaccaacaatggcagccaaaatattttgcctccgtatgctccttggtctttctgcaagtgctgctacggcgaccattttcccgcaatgctcacaagctcctatagcttcccttcttcccccgtacctctcaccagtgttgtcttcagtatgtgaaaacccaattcttcaaccctacaggatccaacatgcaattgcatcaggcatcttacctttatcacccttgttcctccaacaatcatcagccctattacagcagttacctttggtgcatttattggcacaaaacatcagggcacaacaactcgtgctagcaaaccttgctgcctactctcagcaacaacagttacctttggtgcatttgttggcacaaaacatcagggcacaacaactacaacaactcgtgctagcaaacctt

SEQ ID NO: 317622 - DNA, 438 bp, Zea mays
cggggttcggtttcgtgggtgagcggatcgagatggctgcgtcggatgttgagtaccggtgcttcgtcggcggcctcgcctgggccacggacgaccactccctccacaacgccttcagcacctacggcgaggtcctcgagtccaagatcatcctcgatcgggagacgcagaggtcccgcggcttcggcttcgtcaccttctccacggaggaggcgatgcggaacgccatcgagggcatgaacggcaaggagctggacggccgcaacatcaccgtcaacgaggcccagtcccgcggcggccgtggaggcggcggcggtgggtacggtggtggccgtggaggcggcggctacggcggtggcgggcgccgtgatggcggcggcggctacggcggtggcggcggctacggtggcggcggcggctacggtggtggtggcggcg

SEQ ID NO: 317623 - DNA, 394 bp, Zea mays
  unsure (1)..(394): unsure at all n locations
cggacgcgtgggcggacgcgtgggctttctccctactctcagcaacaacaatttcttcgattcaaccaactgtctacactgaaccctgctgcttatttgcagcaacaactattaccattcagccagctagctactgcctactctcagcaacaacaacttcttccatttaaccaattggccgcactgaaccccgctgcttatttgcagcagcaaatactactaccatttaaccagctagctgcagcaaaccgtgcttccttcttgacacagcaacagttgctgcctttctaccagcagtttgcggctaaccccgcaaccctcttacaactacaacaattgttgccctttgtccaacttgctttgacagacccagcggnctcctaccaacaacaca

SEQ ID NO: 317624 - DNA, 439 bp, Zea mays
caacaagcaacatagaaagtggaatccattagcaacaacagagcaacaatggcgaccaggatattttccctccttatgctccttgctctttctgcatgtgttgctaacgcgacaattttccctcaatgctcacaagctcctatagcttcccttcttcccccataccttccatcaatgatagcttcagtatgtgaaaacccagctcttcagccctataggctccaacaagcaatcgcagcaagcaacatacctttatcacccttgttgtttcaacaatcgccagccctatctttggtgcagtcattggtacaaaccatcagggcacagcagctgcagcaactcgtgctacctgtgatcaaccaagtagctctggcaaacctttctccctactctcagcaacaacaatttcttccattcaaccaactgtctacactgaacc

SEQ ID NO: 317625 - DNA, 431 bp, Zea mays
gaccaactagcaacatagaaagcacaatagtgtaccaacaatggcagccaaaatatttggcctccttatgctccttggtctttctgcaagtgctgctacggcgaccattttcccgcaatgctcacaagctcctatagcttcccttcttcccccgtacctctcaccagtgttgtcttcagtatgtgaaaacccaattcttcaaccctacaggatccaacatgcaattgcatcaggcatcttacctttatcacccttgttcctacaacaatcatcagccctattacagcagttacctttggtgcatttattggcacaaaacatcagggcacaacaactcgtgctagcaaaccttgctgcctactctcagcaacaacagttacctttggtgcatttgttggcacacaacatcaaggcacaacaactacaacaac

SEQ ID NO: 317626 - DNA, 425 bp, Zea mays
cccacgcgtccgattttatctaggaaaaaaggtgacaaaaggtaaaggagaatcagctgaagcagttcttcccagcaaggacgatctgaggaagaccattactgaaatcctcaagaaagttgacttcaacacggcaactttcagtgacattcttaagaagctcggtaagattttgagacatgttttactgattttcagtcgttcatgctagatgcactaacaaactttatcttgtagacaatcactacaaaatggatctgaccccaaagaaagaagccatcaaagttatgatccaagacgagttaaccaagctatcagaggaggatgaagaaggagagggagacgaagacaccgggaagaaacagcagcagcctcaggcgcaggagatcgaggcatgaggatccgcggaaccccgtagctgtagt

SEQ ID NO: 317627 - DNA, 336 bp, Zea mays
gggttggcttctcctccccctccggttcgggttcgggttcgtgaggttctccggggttcgggttcgtgggtgagcggatcgagatggcggcgtcggatgttgagtaccgctgcttcgtcggcggcctcgcctgggccacggacgaccactccctccacaacgccttcagcacctacggcgaggtcctcgagtccaagatcatcctcgatcgggagacgcagaggtcccgcggcttcggcttcgtcaccttctccacggaggaggcgatgcggaacgccatcgagggcatgaacggcaaggagctggacggccgcaacatcaccgtcaacgaggccc

SEQ ID NO: 317628 - DNA, 355 bp, Zea mays
ggacacgtgcgatggtctcgactctggtactatatgctaccaagacgctgactctgagcgcgactgcgatgacgaggcacatgttacgtgatgcgcaacgagttgcacagatggccgatgcctgtgataaaccaggttagtgccgactactacgctgctctgcctaccaccacatgccttgctaaggcatgcatggcggacctgatgcttccagtctacgcttcccatgccccgagaaatagctaccggtgctatgcgcttggctagtgtgatgactgctatcatgggagactcagcagtgccagcttatatgtgtctatgatctcgcagccgagcacttggaaatctgggccca

SEQ ID NO: 317629 - DNA, 410 bp, Zea mays
  unsure (1)..(410): unsure at all n locations
atcgtcgaacagaacagcatgaagatggtcatcgttctcgtcgtgtgcctggctctgtcagctgccagcgcctctgcaatgcagatgccctgcccctgcgcggggctgcagggcttgtacggcgctggcgccggcctgacgacgatgatgggcgccggcgggctgtacccctacgcggagtacctgaggcagccgcagtgcagcccgctggcggcggcgccctactacgccgggtgtgggcagccgagcgccatgttccagccgctccggcaacagtgctgccagcagcagatgaggatgatggacgtgcagtccgtcgcgcagcagctgcagatgatgatgcagctngagcgtgccgctgccgncagcagcagcctgtacgagccagctctgatgcagcagcagcagca

SEQ ID NO: 317630 - DNA, 414 bp, Zea mays
caacaagcaacatagaaagtggaatccagtagcaacaatagagcaacaatggcgaccaagatattttccctccttatgctccttgctctttctgcatgtgttgctaacgcgacaattttccctcaatgctcacaagctcctatagcttcccttcttcccccataccttccatcaatgatagcttcagtatgtgaaaacccagctcttcaaccctataggctccaacaagcaatcgcagcaagcaacatacctttatcacccttgtttcaacaatcgccagccctatctttggtgcagtcattggtacaaaccatcagggcacagcagctgcagcaactcgtgctacctgtgatcaaccaagtagctctggcaaacctttctccctactctcagcaacaacaatttcttccattc

SEQ ID NO: 317631 - DNA, 363 bp, Zea mays
cctagcgaagcgcactagcaacgacctaacaacaatggcttccaagacattatccctccttgcgcttcttgccctttttgtgagtgcaacaaatgcgttcattattccacaatgctcacttgctccgagtgccattattccacagttcctccctccagttacttcaatgggcttcgaacacccagctgtgcaagcctataggctacaacaagcgcttgcggcgagcgtcttagaacaaccaattgcccaattacaacaacaatccttggcacatctaaccatacaaaccatcgcaacgcagcatcaacaagcactgagccacctagccgtggtgaaccctatcgcctacttgcaacatcagct

SEQ ID NO: 317632 - DNA, 433 bp, Zea mays
catccccctgcatatactaaccctgcaaaactgaagggtgatagcaaaatacaatgaggattgtgtacatggcagctgttatgtgtttggttcttgcaaccatgtcttctacctccccatcattctgccaagctgggggctgcatcggctgcccacgggctccaccaccgccgtccgatgagacatgctacgaggacctcaagtgttcggcttcgaggtgccacctgggttgcatacacaggggctacaagggtacgggttcgtactgtcgtgggagggactgctgctgcaaacattgatgcaccgtagtgcatctatgcatttcatgaccatacaataaacctagatgtgtatcctttgcctccgacgactataaatgaaatgaaatactactaaggttcagcaaaaaaaaaaaaaaaagggcggccgctct

SEQ ID NO: 317633 - DNA, 437 bp, Zea mays
caacaacaacagtttctgccatcactgatccacctagccgtggtgaaccctgtcacctacttgcaacagcagctgcttgcatccaacccacttgctctggcgaacgtagctgcataccagcaacaacaacagctgcaacagtttatgccagtgctcagtcaactagccatggtgaaccctgccgtctacctacaactactttcatctagcccgctcgcggtgggcaatgcacctacgtacctacaacaacagttgctgcaacaaattgtaccagctctgactcagctagctgtggcaaaccctgctgcctacttacaacagttgcttccattcaaccaactggctgtgtcaaactctgctgcgtacctacaacagcgacaacagttacttaatccattggcagtggctaacccattggtcgctaccttcctgcagca

SEQ ID NO: 317634 - DNA, 375 bp, Zea mays
cggacgcgtgggcaaagcggcagtgcgtagagaggatcgtcgaacagaacagcatgaagatggtcatcgttctcgtcgtgtgcctggctctgtcagctgccagcgcctctgcaatgcagatgccctgcccctgcgcggggctgcagggcttgtacggcgctggcgccggcctgacgacgatgatgggcgccggcgggctgtacccctacgcggagtacctgaggcagccgcagtgcagcccgctggcggcggcgccctactacgccgggtgtgggcagacgagcgccatgtaccagccgctccggcaacagtgctgccagcagcagatgaggatgatggacgtgcagtccgtcgcgcagcagctgcagatgatga

SEQ ID NO: 317635 - DNA, 234 bp, Zea mays
gttctagatcgcgagcggcccgcccttttttttttttttttttttttttatttttttgtttttgtttttttttttttttttttattttttattttattttttttttttaatttttttttttttttttttttttattttttttacttttctaaatccattcttactactataattatctcaaactttctgtacctttacactcattaaattatgcattcttaattcaacccattt

SEQ ID NO: 317636 - DNA, 455 bp, Zea mays
gctctggcaaacctttctccctactctcagcaacaacaatttcttccattcaaccaactgtctacactgaaccctgctgcttatttgcagcaacaactattaccattcagccagctagctactgcctactctcagcaacaacaacttcttccatttaaccaattggccgcactgaaccccgctgcttatttgcagcagcaaatactactaccatttagccagctagctgcagcaaaccgtgcttccttcttgacacagcaacagttgctgcctttctaccagcagtttgcggctaaccccgcaaccctcttacaactacaacaattgttgccctttgtccaacttgctttgacagacccagcggccttctaccaacaacacatcattggtggtgccctcttttagattgcttattaggtggaattcaataataaaggtttttggatgatgtatgt

SEQ ID NO: 317637 - DNA, 377 bp, Zea mays
gcaaagcggcagtgcgtagagaggatcgtcgaacagaacagcatgaagatggtcatggttctcgtcgtgtgcctggctctgtcagctgccagcgcctctgcaatgcagatgccctgcccctgcgcggggctgcagggcttgtacggcgctggcgccggcctgacgacgatgatgggcgccggcgggctgtacccctacgcggagtacctgaggcagccgcagtgcagcccgctggcggcggcgccctactacgccgggtgtgggcagccgagcgccatgttccagccgctccggcaacagtgctgccagcagcagatgaggatgatggacgtgcagtccgtcgcgcagcagctgcagatgatgatgcagcttgagcg

SEQ ID NO: 317638 - DNA, 314 bp, Zea mays
gacgtcgcggagctgcgagcgcggaccagaggcagacgacggggagccggacacggtttacactgaatcgcgcgcgtcgtcgcgtttcgtcccatcgtacaagtcgaccaaacgtccaccgactcacggcacacttgcccatggagtaggacacgcaacggtgaccagccgacttaaccctggctggaggacaaccctaccagcacagttccgtctaactgtacagatacgcgggcgtagactgtccagaccctcattgccgtctgacttaacgccacaggcatgtacgatcaggcatgcaaggtcagttgcag

SEQ ID NO: 317639 - DNA, 303 bp, Zea mays
ccggggttcggtttcgtgggtgagcggatcgagatggcggcgtcggatgttgagtagcgctggttcgtcggcggcctcgcctgggccacggacgaccactccctccacaacgccttcagcacctacggcgaggtcctcgagtccaagatcatcctcgatcgggagacgcagaggtcccgcggcttcggcttcgtcaccttctccacggaggaggcgatgcggaacgccatcgagggcatgaacggcaaggagctggacggccgcaacatcaccgtcaacgaggcccagtcccgcggcggccgt

SEQ ID NO: 317640 - DNA, 137 bp, Zea mays
aaaaaaaaaaaaaaaaaaataaaaaattaaaaaaaaaaaaaaaaaaaaaaaggaaaaagaaaaaaaaaaaaaaaaaaaaaaaaaaaaaaaaagaaaaataatgaaaaaaaaaacaacgaaaacaaaaaaaaatatat

SEQ ID NO: 317641 - DNA, 370 bp, Zea mays
gatcagcaaagcggcagtgcgtagagaggatcgtcgaacagaacagcatgaagatggtcatcgttctcgtcgtgtgcctggctctgtcagctgccagcgcctctgcaatgcagatgccctgcccctgcgcggggctgcagggcttgtacggcgctggcgccggcctgacgacgatgatgggcgccggcgggctgtacccctacgcggagtacctgaggcagccgcagtgcagcccgctggcggcggcgccctactacgccgggtgtgggcagccgagcgccatgttccagccgctccggcaacagtgctgccagcagcagatgaggatgatggacgtgcagtccgtcgcgcagcagctgcagatgatgat

SEQ ID NO: 317642 - DNA, 349 bp, Zea mays
gtgggttggcttctcctccccctccggttcgggttcgggttcgtgaggttctccggggttcggtttcgtgggtgagcggatcgagatggcggcgtcggatgttgagtaccgctgcttcgtcggcggcctcgcctgggccacggacgaccactccctccacaacgccttcagcacctacggcgaggtcctcgagtccaagatcatcctcgatcgggagacgcagaggtcccgcggcttcggcttcgtcaccttctccacggaggaggcgatgcggaacgccatcgagggcatgaacggcaaggagctggacggccgcaacatcaccgtcaacgaggcccagtcccgcggc

SEQ ID NO: 317643 - DNA, 143 bp, Zea mays
cggacgcgtgggcggactcgtgggctttcgcgttggaaaaaaaaaaaaaaaaaaaggaaaaaggaaaaaaaaaaaaaataaaaaataaaaaaaaaaaataacatataataataaaatataaaaaaaaataaataatataaaaa

SEQ ID NO: 317644 - DNA, 417 bp, Zea mays
ccgcacgcgtccgcccacgcgtccgcctacgcgtccgcccacgcgtccgcttccattggaccaattggccgcactgaaccccgctgcttatttgcagcagcaaatactactaccatttagccagctagctgcagcaaaccgtgcttccttcttgacacagcaacagttgctgcctttctaccagcagtttgcggctaaccccgcaaccctcttacaactacaacaattgttgccctttgtccaacttgctttgacagacccagcggcctcctaccaacaacacatcattggtggtgccctcttttagattgcttattagttgtaattcaataataaaagtttttggatgaaaaaaaataatttttagtattagttaaactaattgtaaaaccataattaaaaaaaaaaagggccggc

SEQ ID NO: 317645 - DNA, 336 bp, Zea mays
atatgcaatgcaatgattggatatatacaggggtcacaaaaagaattggcgtacaaaccacacacacctaatcgattctcctgcacaaaggctgttgcattcagcaacctgtacactttatttattcctcgtcgggaatcagtcgtcctcctccggcgaggagaagaacgacgacgacgagctgaccgagagggacctatggtgtacacttcattattcctcgtcggcaatcagtgactcgtcctccttcgacgaggaggaggagaaggacgaggacgaggacgacgagctgaccgagagcgacctccggtaggtgtacagaaccgcgtcgggcac

SEQ ID NO: 317646 - DNA, 161 bp, Zea mays
cccacgcgtccgctcaatgtttgttgtgtgaacagagatacgcgtttgaatttggcgtaaagcgaactgttgtcttctttttcccttcccctctctctctatctccagtcatcggtaataggacaagtacctttccttattccatcagttctagatcgcga

SEQ ID NO: 317647 - DNA, 325 bp, Zea mays
aaaaaaaaaaaaaataaaaaaaaaaattaaaaattaaaaaaaaaaaaaaaaaaaaatagaaaaaggaaaaaaaaaaattaaaaaaaaaaaaaaaaaaaaaaaattttttaataaaaaaaaataaaaaaaataaaaaaatataacatatataaaaaataaaaattaaaaaatataaaaaacttataaaaacaacataccttttattaaaataagcggcccctttttaaaattccccattttttcacttgtttttatttcaataatatctttttttatttgacccccaaattttttttactctttatttttttaaaaatattttttt

SEQ ID NO: 317648 - DNA, 309 bp, Zea mays
  unsure (1)..(309): unsure at all n locations
gagcattagctttatctactccagagcgcagaagaacccgatcgacaccatgagggtgttgcgcgttgccctcgctctcctggctctcgctgcgagcgccacctccacgcatacaagcggcagctgcggctgccagccaccgccgccggttcatctaccgccgccggtgcatctgccacctccggttcacctgccacctcctgtgcatcttccaccgccggtccacctgccgccgccggtccacctgccaccgccggtccatgtgccgccgncggttcatctgccgncgccaccatgccactaccatac

SEQ ID NO: 317649 - DNA, 346 bp, Zea mays
cgacgcgttcgccaatgctcacttgctcctagtgccattattccacagttcctcccgccagtgacttcaatgggcttcgaacacccagctgtgcaagcctacaagctacaacaagcgcttgcggcgagcgtcttacaacaaccaattgcccaattacaacaacaatccttggcacatctaaccatacaaaccatcgcaacgcaacagcaacaacaatttctaccagcactaaaccaactagctgtggtgaaccctgtcggctacttgcaacagcagttgcttgcatacaacccacttgctctggcatacatagttgcataccaacaacaacaacaattgcaacagt

SEQ ID NO: 317650 - DNA, 328 bp, Zea mays
  unsure (1)..(328): unsure at all n locations
ccgtccggaggataccttnngtttcttggtaaggtnnctgttatgcatggtnnttgaacccanntagcaatgtgggcggagcgtnngtgtaaatnactgtcagtatgatcggaattccaactannttcatcannaccgaaatnntatggcgcgccttcannatcgtggctaccgccctgatggggacccctganntccgttatnnggtgtnngcttgaannntcgtggctttgtggagaaaatgtgtggaaacttcaaattggcttaaagtnnngtgcttntnnattaactaatgnnngtgatgctngnnatggaactngnnattttg

SEQ ID NO: 317651 - DNA, 426 bp, Zea mays
cagaaacacacctagcgaagcgcactatcaacgacctaacaacaatggctaccaagatattatccctctttgcgcttcttgccctttttgtgagcgcaacaaatgcgttcattattccccaatgctcacttgctcctagtgccattattccacagttcctccctccagttacttcaatgggcttcgaacacccagctgtgcaagcctacaggctacaacaagcgcttgcggcgagcgtcttacaacaaccaattgcccaattacaacaacaatccttggcacatctaaccatacaaaccatcgcaacgcaacagcaacaacaatttctaccagcactaagccaactagctgtggtgaaccctgtcgcctacttgcaacagcagttgcttgcattcaacccacttgctctggcaaacatagttgcat

SEQ ID NO: 317652 - DNA, 217 bp, Zea mays
cttgttctttgggattggagctttggaagagaagattggaggagaggagaggatcggaagaagctggtcgtgttcttctcccttattgggcgcgcgtgttgtgttgtgcgctgctgtgtctgtgtactccagctgtagctgctgctgtgcctagctgattgaagttggaactgtagtgggtccacagtattatgcatgttttgtttggtgagacgtc

SEQ ID NO: 317653 - DNA, 152 bp, Zea mays
caacccacttgctctggcaaacccagcagcgttctaccaacaacccatcattggtggtgccctgttttagattgcttatgagttatagttcaataataaagtttttttgatgatgtttgtggcttcccagaaataagaaagtacatttctag

SEQ ID NO: 317654 - DNA, 206 bp, Zea mays
aagaaaaaaaaaaaaaaaaaaaaaaaatataaaaaaaaaaaaaaaaaaaaaaaaaaagagaaaaaaaaaaacaaaaaaaaaaaaaaaaaaaaaaaaaaaaaaaaaaaaaaaaaaaataaaaaaaaataaaaaaaaaaaaaaataaaaaaaaaacaaaaaaaaaaaaatgaaaatacacaaaaacgctaaattcaattatatcaaac

SEQ ID NO: 317655 - DNA, 401 bp, Zea mays
ctcgagccacgcgtccggagcaggcagtcgcaacaggcatcttaccattatcacccttgttccttcaacaaccgttagcggtattacagcagttacctttggtccatttggtggcacaaaacatcagggcacaacaactacaacaacttgtgctagcaaaccttgctgcatactctcagcaacatcagtttcttccattcaaccaactggctgcattgaactctgctgcttatttgcaacaacaattaccattcagccagctagttgctggctacccccagaaatttcttccattcaaccaactagcagcattgaactctgctgcttatttacagcagcaacaactactaccattcaatcagctagctgatgtgagccctgctgtctttttgacacaacaa

SEQ ID NO: 317656 - DNA, 331 bp, Zea mays
aaaaaaaaaaacacaaaaaaaaaaaatttaaaattaaacaaaaaaaaaaacaaaaaaagaaaaaaaaaaacaaacaacacttaagttcacatctttctctactcatgcgttcctacttcttctcactcccatagtacctcctcatattaaatacacatgtcaatgcttcttcaacggccgtactttgaataccctgggattacctaacccaatgcgcttccggaataaccccctttttacatatttcgtgcttcctgcagattccctaaccgatctcctttttctactattccacatcctcaatggctaatgggtctttctaatcaatggt

SEQ ID NO: 317657 - DNA, 370 bp, Zea mays
  unsure (1)..(370): unsure at all n locations
cggacgcgtgggcggacgcgtggggaagcatgctgatgaggagggcgtggagctcagcctgggtaacgcgggaacccgcgaggaccacgcttgagctcaccgagctgctgctgcaacgtacaagacgatgcgcgtgagctgattgctgggcgtgaagtcgtatgtagtttagcggttaaacgcgtttaactttagtctatcttattactatctatcttagtatcttattactactactacaaacagtccgtctagtatcttactatccaactagtatctcatcatacatcaccagtccagtcgttatccttccgtatctttttcctttgcgagaaatctatncaaaagaaaaaaaacagacctggcaatg

SEQ ID NO: 317658 - DNA, 361 bp, Zea mays
attgagaccaactagcaacatagaaagcacaatagtgtaccaacaatggcagccaagatattgtgcctccttatgctccttggtctttctgcaagtgctgctacggcgaccattttcccgcaatgctcgcaagctcctatagcttcccttcttcccccgtacctctcaccagcggtgtcttcggtatgtgaaaacccaattcttcaaccctacaggatccaacaggcaatcgcagctggcatcttacctttatcacccttgttcctccaacaatcatcagccctattacaacagttacctttggtgcatttattggcacaaaacatcagggcacaacaactacaacaacttgtgctagcaa

SEQ ID NO: 317659 - DNA, 396 bp, Zea mays
tgagaccaacaagcaacatagaaagtggaatccagtagcaacaatagagcaacagtggagaccaagatattttccctccttatgctccttgctctttctacatgtgttgctaacgcgacaattttccctcaatgctcacaagctcctatagcttccctttttcccccataccttccatcaattatagcttcagtatgtgaaaacccagctcttcaaccatataggcttcaacaagcaatcgcagcaagcaacatacctttatcgcccttgttgtgtcaacaatcgccagccctatctttggtgcagtcattggtacaaaccatcagggcacaacagctgcagcaactcgtgctacctgtgatcaaccaagtagctctggcaaacctttctccctac

SEQ ID NO: 317660 - DNA, 395 bp, Zea mays
cggacgcgtggggtcgtgaggagttccttaacatttcttgcgacatggagtacaaagagagggtggatgcgctagtgtttttctctttacttctcctaggatactttgctgctcatgcgcatgggaacggtcatgtcacggatgatgtcaatgtttctgctccagctgaagaaggaattttgcgagaaaaaagagcacaatgcgctcaagggtttcttccatgcaaagataacaagtgctactgttgcattgggggccgaactcatgattgctactatacgatggctcagtgtagtcatgcatgcttctaatcaaaaattaagatcactgtttttatatacaatgtaatggtaggcaatgctattaataatacataaaggaattttagttttggt

SEQ ID NO: 317661 - DNA, 384 bp, Zea mays
attcagaaacacaccaagcgaagcgcactagcaacaacctaacaacaatggctaccaggatattatccctccttgcgcttcttgcgctttttgcgagcgcaacaaatgcgtccattattccacaatgctcacttgctcctagttccattattccacagttcctcccaccagttacttcaatggccttcgaacacccagctgtgcaagcctataggctacaacaagcgattgcggcgagcgtcttacaacaaccaattgcccaattgcaacaacaatccttggcacatctaacaatacaaaccatcgcaacgcaacagcaacaacagttcctaccagcactgagccacctagccatggtgaaccctgtcgcctacttgcaacagc

SEQ ID NO: 317662 - DNA, 240 bp, Zea mays
gtaaagcctatatgatgttgtattgaattgaatcgatgactgctttatgcaagattcttttgtccaagagtgactgctttatgcaagattcttttgtccaaggggtttgtagttctctattgttagtatcaccttataagatgttttagtttttctaaatatttttttactacacatctaaacataatgtacaagttacacaatacaagagtgactgctttatgcaagattcttttgtcc

SEQ ID NO: 317663 - DNA, 440 bp, Zea mays
cagctagcaacatagaaagcacaatagtgtaccaacaatggcagccaaaatattttggctccttatgctccttggtctttctgcaagtgctgctaccgcgaccattttcccgcaatgctcacaagctcctatagcttcccttcttcccccgtacctctcaccagcggtgtcttcggtatgtgaaaacccaattcttcaaccctataggatccaacaggcaatcgcagctggcatcttacctttatcacccttgttccttcaacaatcatcagccctattacagcagttacctttggtgcatttattggcacaaaacatcagggcacaacaactacaacaacttgtgctagcaaaccttgctgcctactctcagcaacagcagtttcttccattcaaccaactagctgcattgaactctgctgcttatttgcaacaacaac

SEQ ID NO: 317664 - DNA, 444 bp, Zea mays
caagctcctatagcttccctttttcccccataccttccatcaattatagcttcagtatgtgaaaacccagctcttcaaccatataggcttcaacaagcaatcgcagcaagcaacatacctttatcgcccttgttgtgtcaacaatcgccagccctatctttggtgcagtcattggtacaaaccatcagggcacaacagctgcagcaactcgtgctacctgtgatcaaccaagtagctctggcaaacctttctccctactctccgcaacaacaatttcttccattcaaccaactgtctacactgaaccctgctgcttatttgcagcaacaactattaccatttagccagctagctactgcctactctcaacaacaacaacttcttccatttaaccaattggccgcactgaaccccgctgcttatttgcagcagcaaatactacta

SEQ ID NO: 317665 - DNA, 333 bp, Zea mays
ccagagtgtcacacatctgatgcatatgtagacgctaggaacactgatcaatggctacggtcatatgttccatcttctcacaaggttaatacaagctgtcacatcatccctatcaagcagcatatgataaaacagtaagacatcctcgccggatggataatgaacgaaacaactacatggagagccaaagtggcatacgtgataataaccctgaaaacggtgctgcaacctccatgtgaacatgcattgcaacaagacttgttcaatagactactttggacttttggtgaacgctgcatgtacattctgtttacaccctttcacagtgaactt

SEQ ID NO: 317666 - DNA, 391 bp, Zea mays
  unsure (1)..(391): unsure at all n locations
ngacgcgtccgcacaagcaacatataaagtggaatccagtagcaacaatagagcagcaatggcgaccaagatattttccctccttatgctccttgctctttctgcatgtgttgctaacgcgacaattttccctcaatgctcacaagctcctatagcttcccttcttcccccataccttccatcaatgatagcttcagtatgtgaaaacccagctcttcaaccctataggctccaacaagcaatcgcagcaagcaacatacctttatcacccttgtttcaacaatcgccagccctatctttggtgcagtcattggtacaaaccatcagggcacagcacctgcagcaacttctgctacctgtgatcaaccaagtagctttggcaaaccttttt

SEQ ID NO: 317667 - DNA, 369 bp, Zea mays
attattgagaccaacaagcaacatagaaagtggaatccagtagcaacaatagagcagcaatggcgaccaagatattttccctccttatgctccttgctctttctacatgtgttgctaacgcgacaattttccctcaatgctcacaagctcctatagcttccattcttcccacataccttacatcaattatagcttcaatatgtgaaaacccagctcttcaaccatataggcttcaacaagcaatcgcagcaagcaacatacctttatcgcccttgttgtttcaacaatcgccagccctatctttggtgcagtcattggtacaaaccatcagggcacaacagctgcagcaactcgtgctacctttgatca

SEQ ID NO: 317668 - DNA, 322 bp, Zea mays
gctccttgctctttctgcatgtgttgctaacgcgaccatttatcctcaatactcacgagctcctatagctgaccttcttactccataccttccatcaatgaccgcttcagtatgtgaaaacccagcccttcaaccctacaggctccaacaagcaatcgcaacgagcatcttacctttatcacccctgttctttcaacaatcgccagccctatctttagtgcaggcattggtgcaaaccatcagggcacaacagctgcagctactcgtgctaccagtgatcagccaagtagctctggcaaacctttctccctactctcagcaa

SEQ ID NO: 317669 - DNA, 139 bp, Zea mays
acgacgacgcgtacgccgacacatgcataccgactaccaccatagaaagctcaatggggtgccaacatagcattgcacaccgacgtgctatcctatgctccttggtccttctgtaaaagctgacacctgaaccatcctg

SEQ ID NO: 317670 - DNA, 54 bp, Zea mays
cgcagccgccgtcctgctctccgtgctcgcggctgccagcgccagcgccgggac

SEQ ID NO: 317671 - DNA, 284 bp, Zea mays
cccacacctactggcacttttccagttttctagacgaacagcacaatgaggggacggtcataactctcaaggcgaagccgaataagtacactgccaacgacatcgcactgaagatccactcttcttccactaacctgtactgcttgtacgctcctcacgccgacctgactgacgcaatacaacgccggtcatgcgaagccttcgtgccacttcttacgcacccctgatcccgacatcaagtccatgcagatccaccacgacgcgcgccaccccaaactcccctt

SEQ ID NO: 317672 - DNA, 358 bp, Zea mays
cggttcgagttgcaggctcgtcccacgcgtcctggttccgaccgatacctttcttggaactcaagaaggatcttctcccctaccgacctagcgtaatcggcgatggcgactgaggcgatggacatctcgaagcccacgccggtggcgtgcggcgacgaggccgcggcggctgccaaggggaggatcggtagagtgttcttggagctagatcaggactacctgcatgtcattcacgacctgaagctacagagccattagaagactgacatctctcaccattattgaggcccaactgaatggcctcaactcccgagttacaatgctcagggaagagttgcagttgcttcaagagcctggc

SEQ ID NO: 317673 - DNA, 128 bp, Zea mays
tatgactcgtgcatacccattctctagttttgacttaacgcatttatcattttctgagggttcttcactccaagtattaactaatataattaatctttcgatgctccaataaagcttaaatttccaac

SEQ ID NO: 317674 - DNA, 325 bp, Zea mays
gcttactatgttacatgggcgcggaatttatggatcttgcatggggtgtaatggcggggggtaaatataacgtagaataagatgttgaaagatatggcataaaaccgaaacgacacagaagttgcataaatagtatataccgtttggcgtaaaacgttaagtcattgtgtgtaaatagtgtattatggatattagattgacattgacatcgccataatatcgggactgtttcggaaataatgggtagaccctgtaaacgtggatgcagttacttgtatagtatacgtgatttcctttcatccgaaaaaacaccacaaagcctgca

SEQ ID NO: 317675 - DNA, 139 bp, Zea mays
cccacgcgttcgtccacgcgtgcgcagagttgacaggtgtaggcagctccagttggcggtcaccattcctttgccgttagaagcacctcatctcccacccccagacaacataagcgatgagcggcaggaacgaggcgca

SEQ ID NO: 317676 - DNA, 142 bp, Zea mays
atctccaccaccatcggcgggaagaacggcgagcccaagcggaccatcagttacatgggagaacgtgacgtgggcacaggctcattagggatcgtcttccaggctaagtgtctggaaacaggagagaccttcgccatcaaga

SEQ ID NO: 317677 - DNA, 321 bp, Zea mays
accgccagtgcacgactaggttcagatcttggcgtcatgtgtttggcaacgagccggaaagatggtagtccttagaatcgatcggttcctgagcgagctgacgtgcatgttctagcggagcacggagaagggctacgtatggatgaccatgtagcgagcaagtctcgagggcgaggcacagttgcgttgagatggagaataatgatcaggaggtttagctcaattgagtgattcgcgcctccaatggcaagaagaatattttcagcttggtttctctaattgagtacacaaagtttcaagcttcatacgcaacagttctta

SEQ ID NO: 317678 - DNA, 239 bp, Zea mays
cccacgcgtccgcaatacttcgcttttgaaatcatgctacgcttgcagaagggtcagcgtctggatcctcgtactgtttactgaaaacctaaaagatgcacgcaatgccgaacacgatctttccatatgcatgtccattcacgggtctcagatgattattgaaacgccagatttataagtcaccctagagcgcgcatgcatctagttaggagaccgcaaaggacagggcaccattttat

SEQ ID NO: 317679 - DNA, 504 bp, Zea mays
  unsure (1)..(504): unsure at all n locations
aggcgacgcgcggacgcgtgggctggacgctgtgggacgcttgtcggcgagctgccttacaacaacgcaattgcgccaattgctaacaacacatccttggcacaaatctaaccctacaaactcattgcaactgcacaacaacaacaacnagtttctgccatcacttgagnctcacctagccgtggtgaacacctgtcancctacttgcaacnagcagctgcttgcattccaacccacttgctcttggcgaacgtagctgcattaccagcaactaacaaccagcttgcaacagtttaatgccagtgctcaagtcaactagctcatggtgaactcctgccgtctacctttacaactactttcanntctagcccgctttcgcggtgggcaaatgcaacctaacgtacctatncaacaacagttgcttgcaaccaaattgtaccaagctctgactcagnctagcttgtggcaaaaccctgcttgcctacttacaacaagttgctttca

SEQ ID NO: 317680 - DNA, 64 bp, Zea mays
agaaaaaaaaaataaaaaaaaaaatattaaaaatgaaaaaaatgaagaaaaaaaaaaagaggaa

SEQ ID NO: 317681 - DNA, 406 bp, Zea mays
cccacgcgtccgcccacgcgttcgcccacgcgtccgcccacgcgtccgcggacgcgggcgtttgagcattcagaaacacaccaagcgaagcacattagcaacaacctaacaacaatggctaccaagatattatccctccttgcgcttcttgcgctttttgcgagcgcaacaaatgcgttcattattccacaatgctcacttgctccaagttgcattattacacagttccttccaccagttacttcaatgggcttcgaacacccagctgtgcaagcctataggctacaacaagcaattgctgcgagcgtattacaacaaccaatttcccagttgcaacaacaatccttggcacatctaacaatacaaaccatcgcaacgcatcagcaacaacaatttctaccagcac

SEQ ID NO: 317682 - DNA, 101 bp, Zea mays
cagacaacccatcattggtggtgccctcttttagatttattattgaactatgactcagaagaaagctaaaagagggcgcccccactggtgcgaagcagcgt

SEQ ID NO: 317683 - DNA, 64 bp, Zea mays
aaaaaaaaataaaaaaaaaaaaaaaaaaaaaaaaaaaaataaaaaaaaaaaaaaaggggaaaaa

SEQ ID NO: 317684 - DNA, 138 bp, Zea mays
aaaaaaacaaacactaatctatcatataaaaaacgaacaaacaaaaacaggggatagggacaggacatccggtctagcagttccatgcttacaaacgaagtcatgctacttcatctctcttttatcgtcactcctaaa

SEQ ID NO: 317685 - DNA, 423 bp, Zea mays
cccacgcgtccgaccacgcgtacggcaacatagaaagtggaatccagtagcaacaacagagcaacaatggcgaccaagatattttccctccttatgctccttgctctttctgcatgtgttgctaacgcgacaattttccctcaatgctcacaagctcctatagcttcccttcttcccccataccttccatcaatgatagcttcagtatgtgaaaacccagctcttcagccctataggctccaacaagcaatcgcagcaagcaacatacctttatcacccttgctgtttcaacaatcgtcagccctatctttggtgcagtcattggtacaaaccatcagggcacagcagctgcagcaactcgtgctacctgtgatcaaccaagtagctctggcaaacctttctccctactctcagcaacaacaa

SEQ ID NO: 317686 - DNA, 97 bp, Zea mays
accgcccactcgtacgaaaaaaaaaaaaaataaaaaaaaaaaaaattaaaaaaaaaaaaagagaaaaaaaaaaaataaaaaaataaatatacataag

SEQ ID NO: 317687 - DNA, 307 bp, Zea mays
cggacacctgagccgaatcctgcacgagacacttgggaaaacaacaaacatgggagacggtcataatatgtggaaccatcaagaaggtggtcacatctaaagtatccatcttgctgctggtgcttatcagagttactcaagaggcctcgtcattgccaaagtcgatcatttggcagcacctgaacccgtacttcaaagggaacaccatgaaccagcacaactgaatggaattgtacctgcatcagctttacctctacagcaactgctacagcatgatgcgccagtatcacgtgcatcagcaagtgct

SEQ ID NO: 317688 - DNA, 146 bp, Zea mays
gacacactagcaatccaactagcaccatatagtgcacactatggctccaacaatggcaggcctaataatacgccttcttattatcgttagtgcttctgcaagtgctattacggcgaccatcttgcaggattgcacgcatgctccta

SEQ ID NO: 317689 - DNA, 146 bp, Zea mays
tcgcccactcgtacgtaagaaattgaggaggaggttgagtattaataggtataggaggaggacgaggacgattgagatgaataagaagataaaatggaaagtgtgcatcaaattgaggatgatgatgaatgtaaactgctcgatgc

SEQ ID NO: 317690 - DNA, 230 bp, Zea mays
cgttcgctcatgctcccattccacgtcagattcagtatcatcactttctcgggggtggggaccaatatgtgagcccttcttatagctccttgctcttatgtgtatgtacttgctaattcgacagttgtctctcattgctcacagactaccaactggtccacaacttctcatatacctaccatcaatgatctccattacaatatgataacccatctgtacacgcatatatg

SEQ ID NO: 317691 - DNA, 191 bp, Zea mays
acatcctatttataatcaaactgatttaccttaacagattatcataagaaacagtataaggatctaatacggaattgaatcttaaacatttcacaaacataatggtgaagctgattctatttcaaatggatgttctttctaattgaaaaacctacatttcaaggtttaaattggcttttaattatttgtca

SEQ ID NO: 317692 - DNA, 400 bp, Zea mays
cggacccgtgggctgtttaaatccacggtgctaaagtttagcactacacttttaataaactttagtacatgtaaatccaaacacgagtgttaaaaggtgctaaaagatgttaaaagtgaagtgccgaagtttagcacctgtcagtgtttggaccagtggacctaaccaactagtgaaatagtgtcgcgtgtcttggatccagatggtgatgcgagttgacacaaatgatttatcctggttcgggctatgaagggccctactttcagcagaggaaggatgtggattatattactcgcaccaaaagtgctcacagtaggggttacaagcacgacgggagagggtaggaccctaagtccctgagagtgattgagtcaagtgccaataccgtatgagagagaat

SEQ ID NO: 317693 - DNA, 289 bp, Zea mays
catgatttttatagatccatttttcttattcctatcactaaacttctaatgggctctagtacatgtatatacaaatacaaatgttaaaatctgataatacatattaatagttaaatgccgaactttaacacctcacagtgtaactactagtccacctaacctactattcaaatagaaatgcgtgtcttttattcatattattatgccagttgacacaaatcatatattcttaaccggtctattgaatttaactacttttaatataagatagaactgtattatattactt

SEQ ID NO: 317694 - DNA, 415 bp, Zea mays
  unsure (1)..(415): unsure at all n locations
cagcaagcaacatacctttatcacccttgtttcaacaatcgccagccctatctttggtgcagtcattggtacaaaccatcagggcacagcagctgcagcaactcgtgctacctgtgatcaaccaagtagctctggcaaacctttctccctactctcagcaacaacaatttcttccattcaaccaactgtctacattgaaccgtgctgcttatttgcagcaacaactattaccattcagccagctagctactgcctactctcagcaacaacaacttcttccatttaaccaattggccgcactgaaccccgctgcttatttgcagcagcaaatactactaccatttagccagctagctgcagcaagccgtgcttccttcttgacacagcaacagttgctgcctntctaccagcagtt

SEQ ID NO: 317695 - DNA, 383 bp, Zea mays
  unsure (1)..(383): unsure at all n locations
nccacgcgtccgcctttctccctactttcagcaacaacaatttcttccattcaaccaactgtctacactgaaccctgctgcttatttgcagcaacaactattaccatttagccagctagctactgcctactctcagcaacaacaacttcttccatttaaccaattggccgcactgaaccccgctgcttatttgcagcagcaaatactactaccatttagccagctagctgcagcaaaccgtgcttccttcttgacacagcaacagttgctgcctttctaccagcagtttgcggctaaccccgcaaccctcttacaactacaacaattggtgccctttgtccaacttgctttgacagacccagcggccttctaccaacaacaca

SEQ ID NO: 317696 - DNA, 159 bp, Zea mays
acccgtctcaacctgatgcaccaagaaatccatcgagaggccgtcgactggggaattaatggcgtcgtcgtctagcagcagccaccgtcgtctcatactcgcagccgtcgcctgctctccgggctcgcggctgccagcgccagcgccgggaccttctgc

SEQ ID NO: 317697 - DNA, 375 bp, Zea mays
  unsure (1)..(375): unsure at all n locations
ggcctttgcgacctctctggcgcactgattaatcggaggcccattcgtacaggtcacgggtgatggcaggcggattctgttaaccactaaagctgggcgtgttcatgtgctagattcgtttgaaggaaacagcattgcatcgtttcgcgcgaagccaatattaaccaattcgacactggaggcatcgttctgtcccgagggaaaccatattgtatctggctccggtgatggtagtgtctatgcttggaacgttgagagcggaaaggttgcatgctgggaaagcacagatgtgaaaccgccgcgggtaaggtggtctccaggatccttgatgttcgtgacaggaacgtcngagctgtcctgctgggtgccggattt

SEQ ID NO: 317698 - DNA, 261 bp, Zea mays
gcaacgcatccggggacacctgggcgttcacatgtgaaaacaactgcaaaacaaacggagagtgcccagaatgttgcaggtctatcacacgacaatctattaacctggactgcagttttagggactccatgacctttcacattcccatacgagtgccagttgtactatagtgcaagctaaatgcaatgaacttgccgaatgttatcaagcaaccgactgagaaaacactgcagttgcctactttattgcctacgaaggata

SEQ ID NO: 317699 - DNA, 374 bp, Zea mays
aaaaaaaaaaaaaaaaaaaaaaaaaataaaaaaaaaaaaaaaaaaaaaaaaaaaaaaaaaagacaaaccatataaaagataccaaacttacatacacatacatgcgacgtcctatcttttggcatcctggctccctaactcatttcactggccgtctgtttacaacttggggcccgtaaatccccttccctgccccaacttaatcaccttcctgcccgtccaacttttgcctgctcccattttaacccactggccccaactgctcgtccttcccaacggtttctcagccttaatgcccattgggaccccccttgcaaccggtcattcagcctgactgctgattgggtcacgccctgtgtggccgcttcacttgc

SEQ ID NO: 317700 - DNA, 240 bp, Zea mays
ccatattctaaggcacttgttaccactactgatgccattgactaccattaactcatctatgcaattctgattgaagcaacaatggttctccaacttgctatctgtgccgaccctaatgctacagcaactattcacctcaccgatttatcccagccatatgctacttattatcccacgatttatgccacatctgacaataattccaattccaaaaattaagccatctataataatacccac

SEQ ID NO: 317701 - DNA, 403 bp, Zea mays
gaccaacaagcaacatagaaagtggaatacagtagcaacaatagagcaacaatggcggccaagatattttccatccttatgctccttgctctttctgcatgtgttgctaacgcgaccatttttcctcaatactcacaagctcctatagctgcccttcttcccccataccttccatcaatgaccgcttcagtatgtgaaaacccagcccttcaaccctacaggctccaacaagcaatcgcaacaagcaacttacctttattacccctgttctttcaacaatcgccagccctatctttggtgcagtcattggtacaaaccatcagggcacaacagctgcagcaactcgtgctaccagtgatcagccaagtagctctggcaaacctttctccctactctcagcaac

SEQ ID NO: 317702 - DNA, 407 bp, Zea mays
attttcagcattcaaaaacacaccaagcgaagcgcactagcaacgacctaacaccaatggctaccaagatattagccctccttgcgcttcttgcccttttagtgagcgcaacaaatgcgttcattattccacagtgctcacttgctcctagtgccattattccacagttcctcccaccagttacttcaatgggcttcgaacatccagccgtgcaagcctacaggctacaactagcgcttgcggcgagcgccttacaacaaccaattgcccaattgcaacaacaatccttggcacatctaaccctacaaaccattgcaacgcaacaacaacaacaacagtttctgccatcactgagccacctagccgtggtgaaccctgtcacctacttgcaacagcagctgcttgca

SEQ ID NO: 317703 - DNA, 403 bp, Zea mays
accaactgtctacactgaaccctgctgcttatttgcagcaacaactattaccatttagccagctatctactgcctactctcaacaacaacaacttcttccatttaaccaattggccgaactgaaccctgctgcttatttgcagcagcaaatactactaccatttagccagctagctacagcaagccgtgcttccttcttgacacaacaacagttgctgccgttctaccagcagtttgcggctaaccccgcaaccctcttacaactacaacaattgttgccctttgtccaacttgctttgacaaacccagcagccttctaccaacaacacatcattggtggtgccctcttttagattgcttattagatgtaattcaataataaagttttttggatgatgtatgt

SEQ ID NO: 317704 - DNA, 289 bp, Zea mays
aaaaaaaaaaaaaaaacaaaaaaaattataataaaaaaaaacaaaaaaaaaaaaaaagtgaggtttaaaaaaaaacaaaaaataaaaaaaaaaaaaataaaaaataaaaataaaaaaaaaaaaaaaaaaaaaataaaaaaaggcaaaaattttttaaaattcaaaaatttagggcgccttctttttaaggaaaaaacttttttttagggtaccttaaattaattaacttttcatttttttaaaaaaattttaattttaaaaacccttttttaaaaacaattttatttgg

SEQ ID NO: 317705 - DNA, 428 bp, Zea mays
cccacgcgtccggcaacatagaaagcacaatagtgtaccaacaatggcagccaaaatattttgcttccttatgctccttggtctttctgcaagtgttgctaccgcaaccattttcccacaatgctcacaagctcctatagcttcccttcttcccccatacctctcaccagcggtgtcttcaatgtgtgaaaacccaattgttcaaccctacaggatccaacaggcaatcgcaacaggcatcttaccattatcacccttgttccttcaacaaccgtcagccctattacagcagttacctttggtccatttggtggcacaaaacatcaaggcacaacaactacaacaacttgtgctagcaaaccttgctgcatactctcagcaacatcagtttctttcattcaaccaactggctgcattgaactctgctg

SEQ ID NO: 317706 - DNA, 414 bp, Zea mays
cccacgcgtccgcagaaacacaccaagcgaagcacattagcaacaacctaacaacagtggctaccaagatattatccctccttgcgcttcttgcgctttttgcgagcgcaacaaatgcgttcattattccacaatgctcacttgctccaagttccattattacacagttcctcccaccagttacttcaatgggcttcgaacacccagctgtgcaagcctataggctacaacaagcaattgcggcgagcgtcttacaacaaccaatttcccagttgcaacaacaattccttggcacatctaacattacaaaccatcgcaacgcaacagcaacaacaattcctaccagcactgagccacctagccatggtgaaccctgccgcctacttgcaacagcagttgcttgcatcaaaccca

SEQ ID NO: 317707 - DNA, 144 bp, Zea mays
accttgacgcgttagaaagacatttttgatgttcatggaatcacttggaccacggcacgctaatgatataacttggtcttcttttgaaaagcacatgcttaccactaatatcataaaacgagccaagacgattgcctttaaatg

SEQ ID NO: 317708 - DNA, 394 bp, Zea mays
gcaacatagaaagtggaatccagtagcaacaacagagcaacaatggcgaccaagatattttccctccttatgctccttgctctttctgcatgtgttgctaacgcgacaattttccctcaatgctcacaagctcctatagcttcccttcttcccccataccttccatcaatgatagcttcagtatgtgaaaacccagctcttcagccctataggctccaacaagcaatcgcagcaagcaacatacctttatcacccttgttgtttcaacaatcgccagccctatctttggtgcagtcattggtacaaaccatcaaggcacagcagctgcagcaactcgtgctacctgtgatcaaccaagtagctctggcaaacctttctccctactctcagcaac

SEQ ID NO: 317709 - DNA, 409 bp, Zea mays
  unsure (1)..(409): unsure at all n locations
ctaccaagatattatccctccttgcgcttcttgcgctttttgcgagcgcaacaaatgcgtccattattccacaatgctcacttgctcctagttccattattccacagttcctcccaccagttacttcaatggccttcgaacacccagctgtgcaagcctataggctacaacaagcgattgcggcgagcgtcttacaacaaccaattgcccaattgcaacaacaatccttggcacatctaacaatacaaaccatcgcaacgcaacagcaacaacagttcctaccagcactgagccacctagccatggtgaaccctgtcgcctacttgcaacagcagctgcttgcatccaacccacttgctctagcanacgtagttgcaaaccagcaacaacaacaactgcaacagtttct

SEQ ID NO: 317710 - DNA, 411 bp, Zea mays
caacaagcaacatagaaagtggaatccagtagctacaatagagcaacaatggcgaccaagatagtttccctccttatgctccttgctctttctgcatgtgttgctaacgcgacaattttccctcaatgctcacaagctcctatagcttcccttcttcccccataccttccatcaatgatagcttcagtatgtgaaaacccagctcttcaaccctataggctccaacaagcaatcgcagcaagcaacatacctttatcacccttgtttcaacaatcgccagccctatctttggggcagtcattggtacaaaccatcagggcacagcaactgcagcaactcgtgctacctgtgatcaaccaagtagctctggcaaacctttctccctactctcagcaacaacaatttcttcca

SEQ ID NO: 317711 - DNA, 362 bp, Zea mays
cacgagaagagaagtttcacaacttctctccccatggcactcatcatcaagagcacaatcatgcgctgtgttcttggttcttggagccatatcttacacatccgtatattgcatcggtgcaatcggcacggaggacacccctgctcccaagccaaaacctgggatgccgtgcttccacgccggaacctcacagtacccctgcactactgacgggtgccgcaagttatgcgagcaccaacaccacaggagcgacatggcctactgtaaaagtatttcctcaggagaatgctgctgcccaaacgaaatgaggatgtggtcgtgtgtttgatgacgacaattattaaataaaacatgcatgattg

SEQ ID NO: 317712 - DNA, 186 bp, Zea mays
taatataacaccacctaaatacaattcactctctccttattatacaacgactcacactactaaaaccttgtcattacccaacttaataccattccatcacatcctactttatacagcattcttaataacacaaacacccaaacctaactcccttttcaacatttccccaaccacaatctcaaatat

SEQ ID NO: 317713 - DNA, 335 bp, Zea mays
attgagaccaactagcaacatagaaagcacaatagtgtaccaacaatggcagccaaaatattttgcttccttatgctccttggtctttctgcaagtgttgctaccgcaaccattttcccacaatgctcacaagctcctatagcttcccttcttcccccatacctctcaccagcggtgtcttcaatgtgtgaaaacccaattgttcaaccctacaagatccaacaggcaatcgcaacaggcatcttaccattatcacccttgttccttcaacaaccgtcagccctattacagcagttacctttggtccatttggtggcacaaaacattaaggcaca

SEQ ID NO: 317714 - DNA, 104 bp, Zea mays
  unsure (1)..(104): unsure at all n locations
acggcgtcgtcgtctagcagcagccaccgccgtctcatactcgcagccgncgtactgctctgcgtgctcgcggctgccagcgccagcgccgggagcctctgcgt

SEQ ID NO: 317715 - DNA, 169 bp, Zea mays
cgcacgcgtccgagcgtgaagtggccggatatgaagtcacagtgatgattagagaggtggaatgagatctacatcagcgagtagaacgtgcagaatccctaccggaatgcaaaagggtaacgcagatactaactacaatatcagccatgactgcggatgccattgaacc

SEQ ID NO: 317716 - DNA, 428 bp, Zea mays
gaccaactagcaacatagaaagcacattagtgtaccaacaatggcagccaaaatattgggcttccttatgctccttggtctttctgcaagtgttgctaccgcaaccattttcccacaatgctcacaagctcctatagcttcccttcttcccccatacctctcaccagcggtgtcttcaatgtgtgaaaacccaattgttcaaccctacaggatccaacaggcaatcgcaacaggcatcttaccattatcacccttgttcctccaacaaccgtcagccctattacagcagttacctttggtccatttggtggcacaaaacatcagggcacaacaactacaacaacttgtgctagcaaaccttgctgcatactctcagcaacatcagtttcttccattcaaccaactggctgcattgaactctgctgctt

SEQ ID NO: 317717 - DNA, 424 bp, Zea mays
aactagcaacatagaaagcacaatagtgtaccaacaatggcagccaaaatattttgcttccttatgctccttggtctttctgcaagtgctgctaccgcaaccattttcccacaatgctcacaagctcctatagcttcctttcttcccccatacctctcaccagcggtgtcttcagtatgtgaaaacccaattcttcaaccctacaggatccaacaggcaatcgcagcaggcatcttacctttatcacccttgttcctccaacaaccgtcagccctattacagcagttacctttggtgcatttgttggcacaaaacatcaaggcacaacaactacaacaacttgtgctaggaaaccttgctgcctactctcagcaacagcagtttcttccattcaaccaactggctgcattgaactctgctgctt

SEQ ID NO: 317718 - DNA, 425 bp, Zea mays
caactagcaacatagaaagcacaatagtgtaccaacaatggcagccaaaatgtgttgcctccttatgctccttggtctttctgcaagtgctgctacggcgaccattttcccgcaatgctcgcaagctcctatagcttcccttcttcccccgtacctctcaccagcggtgtcttcggtatgtgaaaacccaattcttcaaccctacaggatccaacaggcaatcacagctggcatcttacctttatcacccttgttcctccaacaatcatcagccctattacatcagttacctttggtgcatttattggcacaaaacatcagggcacaacaactacaacaacttgtgctagcaaaccttgctgcctactctcagcaacagcagtttcttccattcaaccaactagctgcattgaactctgcttctt

SEQ ID NO: 317719 - DNA, 415 bp, Zea mays
cagataccaacatagacagcacaatagtctaccaacaatggcagccaaaatatgttggctccttatgctccttggtctttctgcaagtgctgctacggcgaccattttcccgcaatgctcgcaagctcctatagcttcccttcttcccacgtacctctcaccagcggagtcttaggtatgtgaaaacccaattcttcaaccctacaggatccaacaggcaatcacagctggcatcttacctttatcacccttgttccttcaacaatcatgagccctattacatcagttaccttcggtgcatttattggcacaaaacatcagggcacaacaactacaacaacttgtgctagcaaaccttgctgcctactctcagcaacagcagtttcttgcattcaaccaactaactggattgaac

SEQ ID NO: 317720 - DNA, 413 bp, Zea mays
  unsure (1)..(413): unsure at all n locations
ggcttctcctccccctccggttcgggttcgggttcgtgaggttctccggggttcgggttcgtgggtgagcggatcgagatggcggcgtcggatgttgagtaccgctgcttcgtcggcggcctcgcctgggccacggacgaccactccctccacaacgccttcagcacctacggcgaggtcctcgagtccaagatcatcctcgatcgggagacgcagaggtcccgcggcttcggcttcgtcaccttctccacggaggaggcgatgcggaacgccatcgagggcatgaacggcaaggagctggacggccgcaacatcaccgtcaacgaggcccagtcccgcggcggccgtggaggcggcggcggtgggtacggtggtggccgtggaggcggcggctacngcggtggcgggcgccg

SEQ ID NO: 317721 - DNA, 139 bp, Zea mays
  unsure (1)..(139): unsure at all n locations
tcggattttctgccctccttggccctccttggctctttcagncaaacnngttgctaccgcgactatgtgattccacgaatggctctnacaacaatnnacctctcnntccggtgaccagcnncgcgagaatnnttgaata

SEQ ID NO: 317722 - DNA, 389 bp, Zea mays
  unsure (1)..(389): unsure at all n locations
cctcgaaaatcgccccgatggcgccgtccatctccgtcggcgccgcggcgccgtccggtgcatcggccccaaccccgaaaaaaccccaccaaggggagctcctgcgggggcggaacgcggagctggagcgggaagtggcggcgctgcggctggagctgggcgcggcgcggcgccgcgccgagacggcagaagaagccgaggagcggctgtgcgtgcagctcggcgacgccgaggtggaagcgctcgagctcgcgcgcgcctaccaggcccacgtccacgagctcgccagggagctcgncgccgcgcgcgcggccccgcacgcccgacagataggttctcgtgggctggtagtaggctactagtagctatagcgtgcggttcagcgggat

SEQ ID NO: 317723 - DNA, 200 bp, Zea mays
aaaaaaaaaaaaaaaaaaaaaaaaaaaaaaaaaaaaaaaaaaaaaaaaaaaaaaaaagggaaaaaaaaaaaaaaaaaaaataaaaaaaaaaaaaaaaaaaaaaaaaaaaaaaaaaaggaaaaaatgttatgggatttaaaggtaacttaacttgaattgccgtggtttaacaataatgtggctgaaaaaaacttgagtaa

SEQ ID NO: 317724 - DNA, 220 bp, Zea mays
acataagcgtcagggtcggcttatcacttgactgatattggtgtgaatgggaaggagcaccagccatatgtgcacgtcaacttctaccgcatctatggtgatacgttcaagaaaccaaggcgtgcttatgagacggagcgtcttgatgctgcactgaaactagctactgagtattgcctgaggtgcaaacatgagcttatcaggagacactatgcactga

SEQ ID NO: 317725 - DNA, 251 bp, Zea mays
aaaaaaaaaaaaaaaaaaataaataaataaaaaaaaaaaaaaaaaaaaaaatgagaaaggaaaaataaaaaaaaaaaaaaaaaaaataaaaataaaaaaaaaaaaaaataaatataaaaactaaaaaataaaaaaaaaaaaaacaaaaacaatactgcatgcctttatgggccataaagtacaacccgctaccgatctaactttggtactttaccaggcggacctgaagtatatttccttgcctcccgttt

SEQ ID NO: 317726 - DNA, 168 bp, Zea mays
  unsure (1)..(168): unsure at all n locations
cccactcgttcgaccgcttcaacaggtcataaccttaactcnaattatcnctgcaacttcaaatcaaacgtgatagtcccaaaatatttcaggtctatcaccttcaagctattcaacttcaatccacacttcaatactcaatcacctttcacattcccataacttttc

SEQ ID NO: 317727 - DNA, 394 bp, Zea mays
ttctgggccaccaaaccctaatcgggttggcctaaaaaccggccgattggcgattaggtaggggccgttaaccaaagtcctcgttggttaaggtccagtctagtaggaggcgcagagacccatctgtatggtcgctgggagatctatcttgacctcctttttctgttctttttggtcttagttatcgtggttggattctatagcagccttgacaggcattcgaacaataatgtttatggttctcctatccgctttggactctaagcatgttttcccaaaaaaaaaaaaaaaaaaaaaaaaaaaaaaaaaaaaaaaaaaaaaaaaaaaaaaaaaaaaaaaaaaaaaaaaaaaaaaaaaaaaaaaaaaaaaaaaaaaaaaaaggggcggccgtttt

SEQ ID NO: 317728 - DNA, 422 bp, Zea mays
cggacccctggggggttggcttttcttccccttccggttcgggttcgggttcgtgaggttctccggggttcgggttcgtgggtgagcggatcgagatggcggcgtcggatgttgagtaccgctgcttcgtcggcggcctcgcctgggccacggacgaccactccctccacaacgccttcagcacctacggcgaggtcctcgagtccaagatcatcctcgatcgggagacgcagaggtcccgcggcttcggcttcgtcaccttctccacggaggaggcgatgcggaacgccatcgagggcatgaacggcaaggagctggacggccgcaacatcaccgtcaacgaggcccagtcccgcggcggccgtggaggcggcggcggtgggtacggtggtggccgtggaggcggcggctacggcggtggc

SEQ ID NO: 317729 - DNA, 104 bp, Zea mays
gatcgcgagcggccgcccttttttttttttttttttttttttttttttttggatatgttataattttatttttttttttttttttttttttttttttttttttt

SEQ ID NO: 317730 - DNA, 73 bp, Zea mays
cccacgcgtccgaaaaaaaaaaaaaatataaaaaaaaaaaaaaaaaaaaaaacggacgggataaaagatacca

SEQ ID NO: 317731 - DNA, 110 bp, Zea mays
aaaaaaaaaaaaaaaaaaaaaaaaaaataaaaaaaaaaaaaaaaaaaaaaaaaaaaagggaaaaaaaaaaaaaaaaaaaaaaaaaaaaaaaaaaaaaaaacaacaaaggt

SEQ ID NO: 317732 - DNA, 408 bp, Zea mays
aggcaatcacagcaggcatcttacctttatcacccttgttcctacaacaatcatcaggcctattacatcaattacctttggtgcatttattggcacaaaacatcagggcacaacaactacaacaactcgtgctagcaaaccttgctgcctacgctcagcaacagcagttacctttggtgcaattgttggcacaaaacatcagggcacaacaactacaacaactcgtgctagcaaaccttgctgcctactctcagcaacagcagtttctgccattcaaccaactagctgcattgaactctgctgcttatttgcaacaacaacaactactaccattcagccagctagctgctgcctaccaccagcaatttcttccattcaaccaactggcagcattgaactctcctgctt

SEQ ID NO: 317733 - DNA, 407 bp, Zea mays
cctcgatcgggagacgcagaggtcccgcggcttcggcttcgtaaccttctccacggaggaggcgatgcggaacgccatcgagggcatgaacggcaaggagctggacggccgcaacatcaccgtcaacgaggcccagtcccgcggcggccgtggaggcggcggcggtgggtacggtggtggccgtggaggcggcggctacggcggtggcgggcgccgtgatggcggtggcggctacggcggtggcggcggctacggtggcggcggcggctacggtggtggtggcggcggctacggcggtggcaaccgtggcggcggctacggcaactccgacgggaactggaggaactgagcggtggggcccgcgcggccaagttatcctgttcgctaccgtgatgtttaccctagtc

SEQ ID NO: 317734 - DNA, 307 bp, Zea mays
atccacacatccacagaatccattattttttcttctatataatatatacaaacaacaggtatcacttctcctatctaagcattaacatcttaacatgaatacctccataccataaccacaaaaaagcccaataacgctccaaacgctaagactaactatgactgtacacatacttacatacatgacgctgctactatcattacacatgcctatatatcagcacgctcaacgctatacaccaaatctaatacagctacgcttgtacatgtttatcatcatatagcattttacgaacctaacaaacatt

SEQ ID NO: 317735 - DNA, 382 bp, Zea mays
cggacgcgtgggcaactagcaacatataaagcacaatagtgtaccaacaatggcagccaaaatattttgcttccttatgctccttggtctttctgcaagtgttgctaccgcaaccattttcccacaatgctcacaagctcctatagcttcccttcttcccccatacctctcaccagcggtgtcttcaatgtgtgaaaacccaattgttcaaccctacaggatccaacaggcaatcgcaacaggcatcttaccattatcacccttgttcctccaacaaccgtcagccctattacagcagttacctttggtccatttggtggcacataacatcagggcacaacaactacaacaacttgtgctagcaaaccttgctgcatactct

SEQ ID NO: 317736 - DNA, 409 bp, Zea mays
cccacgcgtccgcccacgcgtccggcggcgcccttttttttttttttttttttttttgactatggcggtgatctggttcatcgcagaaacagaagtacagaagccagtggctttgtcgtccacctgtgaagagctgaatacgttttgtctcagtgacgcagtagagtagcttaacactacatactgtaaacatcatcatttatcagcacgggatcctattctccaaaaggaaaaagacaatatttttttttgatcaactatgcctccctcatagctagagatagtaagcagggtctgcctgccggatgggctgttgatgaggctagaagatcgttgggcctcggaacggcaagcagacaaccctcaggttcctaggctgcgggacctcctccaaccatgccagccgaca

SEQ ID NO: 317737 - DNA, 408 bp, Zea mays
aaaaaaaaaaaaaaaaaaaaaaaaaatttaatttaaaaaaaaaaaaaaaaaaaaaaaagaaaaggaaaaaaaaataaaaaaaaaaaaaaaaaaaaaaaaaaaaaaaaaaaaaaaaaaaaaaaaaaaaaaaaaaaaaaaaaaaaaataaaaaaaaaaaaaaataaaaaaggcctacttttttaaaattttcaatttttattaaagttacataacaaaaattaactttcttttttttaaaactaaattaaatttaaaaaaccctgttttaaaaaattttaattggaaaaaacttatgttaaccaaaataaattgctttaaaaaaaaaaaccttttttccaattgggtttataaccaaaaggcccctttaaatgcccattttaaaaaatttttaaaccttaatttaaaaag

SEQ ID NO: 317738 - DNA, 413 bp, Zea mays
gtagcaacaatagagcaacaatggcgaccaagatattttccctccttatgctccttgctctttctacatgtgttgctaacgcgacaattttccctcaatgctcacaagctcctatagcttcccttcttcccccataccttccatcaattatagcttcaatatgtgaaaacccagctcttcaaccatataggcttcaacaagcaatcgcagcaagcaacatacctttatcgcccttgttgtttcaacaatcgccagccctatctttggtgcagtcattggtacaaaccatcagggcacaacagctgcagcaactcgtgctacctctgatcaaccaagtagctctggcaaacctttctccctactctcagcaacaacaatttcttccattcaaccaactgtctacactgaaccct

SEQ ID NO: 317739 - DNA, 429 bp, Zea mays
cagcatagaaagcacattagtggtacctccattggccggctaaaatatttggcctcctgatgctccttggtctttctgcaagtgctgctacggcgaccattttcccacaatgctcacaagctcctatagcttcccttcttcccccgtacctctcaccaacggtgtcttcggtatgtgaaaacccaattcttcaaccctacaggatccaacaggcaatcgcagctggcatcttacctttatcacccttgttcctccaacaatcatcagccctattacagcagttacctttggtgcatttattggcacaaaacatcaaggcacaacaactacaacaacttgtgctagcaaaccttgctgcctactctcagcaacagcaagttcttccattcaaccaactagctgcattgaactctgcttcttatttgcaac

SEQ ID NO: 317740 - DNA, 173 bp, Zea mays
acccactcgtccgccgactcttcctacccgacaaattctttgtacctcacctgaaaaatattgccttggtgagtctatcgtacacacatttataacctcaaaacacacccactatactttaaatccacccgtttcttaaacgccagtctaaacaaactctcgttaatcttgaa

SEQ ID NO: 317741 - DNA, 397 bp, Zea mays
gcattcagaaacacacctagcgaagcgcactagcaacgacctaacaacaatggctaccaagatattatccctctttgcgcttcttgccctttttgtgagcgcaacaaatgcgttcattattccccaatgctcacttgctcctagtgccattattccacagttcctccctccagttacttcaatgggcttcgaacacccagctgtgcaagcctacaggctacaacaagcgcttgcggcgagcgtcttacaacaaccaattgcccaattacaacaacaatccttggcacatctaaccatacaaaccatcgcaacgcaacagcaacaacaatttctaccagcactaagccaactagctgtggtgaaccctgtcgcctacttgcaacagcagttgcttgca

SEQ ID NO: 317742 - DNA, 357 bp, Zea mays
gcgcggacgcgtgggttttttatttttttttttttttttttatttttctacgtgggtggctggccaattattccattcagacctggggagcactgaagcacagaatcataaacatgcatgcagccggagcgctatcatggccatggtcaaggcttgattaccgcaattcctttccatacgttgttcgaggcctaacacatgctttcgcttcattgcactctaacagttgatcgctcccttgacattttaaaccgacacgacaacctaataacgccaattacgtttactgcatttcatttgaccagctatgggataccaaacgactatccaagcctgaaagattctcttaccaataaa

SEQ ID NO: 317743 - DNA, 429 bp, Zea mays
ccgacgcgtccgattttgagcattcataaacacacctagcgaagcgcactagcaacgacctaacaacaatggcttccaagacattatccctccttgcgcttcttgccctttttgtgagtgcaacaaatgcgttcattattccacaatgctcacttgctccgagtgccattattccacagttcctccctccagttacttcaatgggcttcgaacacccagctgtgcaagcctataggctacaacaagcgcttgcggcgagcgtcttagaacaaccaattgcccaattacaacaacaatccttggcacatctaaccatacaaaccatcgcaacgcagcagcaacaagcactgagccacctagccgtggtgaaccctatcgcctacttgcaacaacagctgcttgcatccaacccacttgctttggcaaacg

SEQ ID NO: 317744 - DNA, 425 bp, Zea mays
gctcttcagccctataggctccaacatgcaatcgcagcatgcaacatacctttatcacccttgttgtttcaacaatcgccagccctatctttggtgcagtcattggtacaaaccatcagggcacagcagctgcagcaactcgtgctacctgtgatcaaccaagtagctctggcaaacctttctccctactctcagcaacaacaatttcttccattcaaccaactgtctacactgaaccctgctgcttatttgcagcaacaactattaccattcagccagctagctactgcctactctcagcaacaacaacttcttccatttaaccaattggccgcactgaaccccgctgcttatttgcagcagcaaatactactaccatttagccagctagctgcagcaaaccgtgcttccttcttgacacagca

SEQ ID NO: 317745 - DNA, 273 bp, Zea mays
ccgactcttacccacacactgcctcatttgcatggacttggcttgcatctagggcaggatacagaatctcatgccatcacattatctataaaccattaccagcaatgctcctatgacttccaacaccagggcctttgtcctcgcccaccccgttcaagctatacaccgactactatgaacatatgcctaagcttcacagtcagcccaacttatacatgaacagcaccttgggctcgagcacatttcactacaccggatactacaacttgtcgt

SEQ ID NO: 317746 - DNA, 436 bp, Zea mays
caactagcaacatagaaagcacaatagtgtaccaacaatggcagccaaaatattttgcgctccttatgctccttggtctttctgcaagtgctgctacggcgaccattttcccgcaatgctcgcaagctcctatagcttcccttcttcccccgtacctctcaccagcggtgtcttcggtatgtgaaaacccaattcttcaaccctacaggatccaacaggcaatcacagctggcatcttacctttatcacccttgttcctccaacaatcatcagccctattacatcagttacctttggtgcatttattggcacaaaacatcagggcacaacaactacaacaacttgtgctagcaaaccttgctgcctactctcagcaacagcagtttcttccattcaaccaactagctgcattgaactctgcttcttatttgcaaca

SEQ ID NO: 317747 - DNA, 289 bp, Zea mays
aatatttcgcacgacaaaaaaaaaaaataaattaaaaaaaaaaaaaaaaaaaaaaaaaagaaaggaaaaaaaaaaaaaaagaaaaaaaaaaaaaaaaaaaaaaaaaaaaaaaaaaaaaaaaaaaaaaaaaaaaaaaaaaaaaaaaaaaaaaaaataaacataaaaaaagaaaatgaatggtaaaactaaaaaacaaaatttacatatacaaattttaataatatcctaaaatttaaaacatggacaaaaaattaaaaaatcatgaacgtgtaaaattaactagaatatt

SEQ ID NO: 317748 - DNA, 439 bp, Zea mays
agaagatctcagcgacaaaacaatgaagatcactttatgggcagattaggcgataatggtcaagcttcatgacgtgtacgatgcaaatacaaataaaccgattcttgtgctattcgtcgggtgcttaccaaaatttttcaaaggtgtctacctaagtggtggtcctgcctgtagatggtacttcaatccaacaattccagaggcagaaccttatcttaccagccagtctacaaaaagaattgtgttacagcttccccaaaatttacaacatcctccagcgatggaaacgaagccaattgtcgaacataaatccctctatgaacttcttacagttaacccatatgatttcccggaaacaggatttgaatgtactatcacaatagcagaaataccagctgaacacaaatggtggtttccatcttgcacaaaatgcaataaa

SEQ ID NO: 317749 - DNA, 169 bp, Zea mays
caatcgcttatctccatctttacaacaatccaactatatattcaactcttctactttctaacatatatcatctccctaatattataactactaaaaatcatcctcaatgccaacctattcatccttatactatacattatcatctttatcacttctatcataacatcta

SEQ ID NO: 317750 - DNA, 409 bp, Zea mays
gcagtcgcagcccacaggatcaggtgatgagcccaccacctaacgataacggcgaccggaatgattcacaccgcggcgacagcccccaagggaggcaagacagcaccagccgtaccctaaccccattcccaggtaaccgacgccctgcacctaatgggcctcgccctagccccatacgtgaccgtcatcccagccacatcgctgaccacagccccagccctaacgtccatggtctcaacgatcgtcctgatgatgatcctgcccgaggttgctaccgcacaggaaacaagtgaccattaacgctacaccgcctcaactatcaagtgcttaactatgcaaagagcaaacatacccattacttgatagctggatcactgccctatctgatacatgaacttatatagcttgc

SEQ ID NO: 317751 - DNA, 430 bp, Zea mays
gtggaatccagtagcaacaacagagcaacaatggcgaccaagatattttccctccttgggctccttgctctttctgcatgtgttgctaacgcgacaattttccctcaatgctcacaagctcctatagcttcccttcttcccccataccttccatcaatgatagcttcagtatgtgaaaacccagctcttcagccctataggctccaacaagcaatcgcagcaagcaacatacctttatcacccttgttgtttcaacaatcgccagccctatctttggtgcagtcattggtacaaaccatcagggcacagcagctgcagcaactcgtgctacctgtgatcaaccaagtagctctggcaaacctttctccctactctcagcaacaacaatttcttccattcaaccaactgtctacactgaaccctgctgctt

SEQ ID NO: 317752 - DNA, 412 bp, Zea mays
attttgagcattcagaaacacaccaagcgaagcacattagcaacaacctaacaacaagggctgccaagatattatccctccttgcgcttcttgcgctttttgcgagcgcaacaaatgcgttcattattccacaatgctcacttgctccaagttccattattacacagttcctcccaccagttacttcaatgggcttcgaacacccagctgtgcaagcctataggctacaacaagcaattgcggctagcgtcttacaacaaccaatttcccagttgcaacaacaatccttggcacatctaacaatacaaaccatcgcaacgcaacagcaacaacaattcctaccagcactgagccacctagccatggtgaaccctgccgcctacttgcaacagcagttgcttgcatcaaaccc

SEQ ID NO: 317753 - DNA, 91 bp, Zea mays
cggacgcgtgggaaaaaaaaaaaaaaataaaattaaaaaaaaaaaaaaaaaaaaaaaggagaagggaaaaaaggacggacggtataaaaga

SEQ ID NO: 317754 - DNA, 436 bp, Zea mays
cggacgcgtgggtagcaacatagaaagcacaatagtgtaccaacaatggcagccggaagattttgcttccttatgctccttggtctttctgcaagtgctgctaccgcaaccattttcccacaatgctcacaagctcctatagcttcctttcttcccccatacctctcaccagcggtgtcttcagtatgtgaaaacccaattcttcaaccctacaggatccaacaggcaatcgcagcaggcatcttacctttatcacccttgttcctccaacaaccgtcagccctattacagcagttacctttggtgcatttgttggcacaaaacatcaaggcacaacaactacaacaacttgtgctaggaaaccttgctgcctactctcagcaacagcagtttcttccattcaaccaactggctgcattgaactctgctgcttatt

SEQ ID NO: 317755 - DNA, 430 bp, Zea mays
aatacccgtgagaaataatgtgttgtgcgcagccccgtccgtgatgctgtcgacgcgtggctagtggtcgacgccgcgcttcgcgttttgcccgttcaacaaaacaccgagctgtgtggacaacctatgtgactagtctcggttcgtccaggaccgagagatgacgaccgtgcaagtgatgtggtgccaaccacaagatgcagttggtggacgacctgaagaatggacttaaccagtggatgctcgccaagcgagtaccctaccacagcaaacactatctaagtgttaaattaaaggtacttcttaggatgattggttgctggtgtgacttggccttcatccctgccaccgggatagatggtcgagtgggttattgcttccgcaggagaggaccaggaggagtagcgtggctaggcttcgccatgttact

SEQ ID NO: 317756 - DNA, 266 bp, Zea mays
caccgtcgtcacctactttatctcactactcaattgaaacggcgccataagtatgtagagccttgctctctgactcctggacgtctactcaaacagccaagcacgctcccagacctaccgatcattacactacctcatattccacttcgactattccccaaaagcaacgatcatcaataaccataaccaatgaataagctgacaccatgataatcctcagccatcacatagactatcgtactgaacattctgagacctgatgcacc

SEQ ID NO: 317757 - DNA, 110 bp, Zea mays
cccacgcgtccgactcaatataggacgtgaggtacagcttcatcaacacatcctgcgggaaggtcaagatattggaacctccttaaggcttcttgatgaattatgaatgt

SEQ ID NO: 317758 - DNA, 375 bp, Zea mays
ttgtttttttttttttttttttttttttttttttttttttttttttttttttcatgggtttgttttctcttttgtttatatttctatatttaaatatttctaaaaaaacaaccaaccctttttaagaaccaaaatttactacattaatcttaaaaaataaaatgaacctataaggttacccaaattcaattcaattagccatcatactaaaaaactattgacttacaaaaacctaaactaacccaacataatcaccttttaaaacatatcacattaaaaaactatttgaaacccaaaaagccccaaccaaaagccatttccaatcattaaacaacactaattctgaaagggaccatccctatatcccttcataaa

SEQ ID NO: 317759 - DNA, 385 bp, Zea mays
aaaaaaaaaaaaaaaaaaaaaaaaaaaatttaattaaaaaaataaaaaaaaaaaaaaaaaagaaatgtataaaaaaaagagtaaaaaaaaatataaataaacacatataaactatcttataaaataaaataaatataaataaactgtactcaattttacaatttcatctcttgtaaaaccttgtctttactcaattttattaccttttagatcatccttttttcatcatatggcgtatttttcaagaagtgtaatcctatacaattttccaaaatttttattaccttaatggaccattcaacattccacttttgctacatattaatcctgctagcttattctgcttatccacagattaatccttatacttgcaatttccattata

SEQ ID NO: 317760 - DNA, 369 bp, Zea mays
acacaaattctacaggagttcggttaagcgattttaagcatgaactctggggagacagattcagacattgcaacggttttatgggtagcctgcctgaagggtcgccacctaatccctgccgatcggggcaatgctattctgggaaatgctatgcttgcacttgtaataactgccgcttctctgactgagcttcgtttgcagctgctggacttcaatcatgccgcttctctgtgattgagcttcgcttcctttttgctgcagctacttttcgtcgtacaagtggttaccaacagctgcagtagatttggtgggtgtttgcattctaagtactcatggttagacgccttatctgacacttttataatgatc

SEQ ID NO: 317761 - DNA, 407 bp, Zea mays
aactctgctgcttatttgcaacaacaactaccattcagccagctagctgctgcctaccgccagcaatttcttccattcaaccaactagcagcattgaactctgctgcttatttacagcagcaacaactactaccattcagccagctagctgatgtgagccctgctgccttcttgacacaacaacagttgttgccgttctacctacacgctatgcctaacgctggcaccctcttacaactgcaacaattgctgccattcaaccaacttgctttgacaaacccagcagtgttctaccaacaacccatcattggtggtgccctcttttagattgcttatgagttatagttcaataatgaagttttttggatgatgtttgtggcttcccagaaataagaaagtacatttct

SEQ ID NO: 317762 - DNA, 411 bp, Zea mays
cccacgcgtccgcggacgcgtgggtccagatcagcaaagcggcagtgcgtagagaggatcggggaacagaacagcatgaagatggtcatcgttctcgtcgtgtgcctggctctgtcagctgccagcgcctctgcaatgcagatgccctgcccctgcgcggggctgcagggcttgtacggcgctggcgccggcctgacgacgatgatgggcgccggcgggctgtacccctacgcggagtacctgaggcagccgcagtgcagcccgctggcggcggcgccctactacgccgggtgtgggcagacgagcgccatgtaccagccgctccggcaacagtgctgccagcagcagatgaggatgatggacgtgcagtccgtcgcgcagcagctgcagatgatgatgcagcttgagcgt

SEQ ID NO: 317763 - DNA, 191 bp, Zea mays
cctcccactcgtcctcccacgcgtccgccctttctttcaaccacacttactattacttatcgacagtttcataaacaagttcgtctactaacacctatacactctcttaattatatacacctaataacatctactaccattcattcatattaatttatatgatatatttttacttataataacaacaacat

SEQ ID NO: 317764 - DNA, 433 bp, Zea mays
gcaaggagtgtgatgtactcgtggaggtacaagctttacagagagcactgcaagagtgggtggcacaaacacaactacacacgccacaagaatgggctcccgcctctcagccaagaggagtgtatggtggagatggaattggccgactccaagaaagaccttaaagactacgatttctgatgaggttacctggaagttcctttgacatgctatcttgtatttgggcactaatgttgtctgtctaatgcttttctaccacccaatcttatccaagatggttaacaaggggtgcacatggcatgaagttgtttccaatccgtttttattttaacgaggaagtgatgagtgaggcacatggtcgctttctgatgctgtatacgaattattagaatgagatggtttagccacatctttgaactgagggtagaacctg

SEQ ID NO: 317765 - DNA, 196 bp, Zea mays
ataatatacagttaggcaccgacgttggtcctccttgcgcttcttgcccttagagtgggcggcaacaaatgcagttgattattaccacagagcattacttgctccatagctgcacaggcttccaaaatctactcctactcagttacattcaatgtcatcaggaacattcatcacgtgcaagcactacacagctact

SEQ ID NO: 317766 - DNA, 396 bp, Zea mays
cggacgcgtgggcgagcgagagagagaggtttgccaccttcgcaactgtgccaatggggacctgctgcagcatctccctgccgtcgtcgccatggctcctcctgctggcggtcctcatcatcggcgacgccgcggctgtgatggcggtgccccccaccaggccgctgctgcgcatcgccgagccgccaaccgcgccgggcacggcagcggggcccgccggcgcgtcgcggcccgggggcggccgaggcgggaggccgcctgaccggtcggtggccggcgccgaggtgatcctcgccgggttcgctgccgcggtgatgatcatcgtcttctgctatatcagggtcaccaggagaaacagcggcggcggcggcggcgtatgagcgggagggaagcagc

SEQ ID NO: 317767 - DNA, 386 bp, Zea mays
cccacgcgtccgcccacgcgtccgctttttgccctgttttctaatgtaccgtggttgtgaaccggtcaatgtgatctgaaataaaacattgcgtgccaaaaaaaaaaaaaaaaaaaaaaaaaaaaaaaaaaaaaaaaaaaaaaaaaaaaaaaaaaaaaaaaaaaaaaaaaaaaaaaaaaaaataaaaaaaaaaaaaaaaaaaaaaaataaaaaaaattaagatccaacatgttaaacaaaactggaatctgacaaaatattagtcttaaactctaaaaaatatcaggcctatatccgcatttaaacaagtggaatattttaaaaaacgtcattaaagaacattaattacaacagcttgtaattccaaatagctaatgggtactttt

SEQ ID NO: 317768 - DNA, 429 bp, Zea mays
gtgaaaacccaattcttcaaccctataggatccaacaggcaatcgcagctggcatcttgcctttatcacccttgttcctccaacaatcatcagccctattacagcagttacctttggtgcatttattggcacaaaacatcagggcacaacaactacaacaacttgtgctagcaaaccttgctgcctactctcagcaacagcagtttcttccattcaaccaactagctgcattgaactctgctgcttatttgcaacaacaactaccattcagccagctagctgctgcctacccccaacaatttcttccattcaaccaactggcatcattgaactctcctgcttatttacagcagcaacaactactaccattcagccagctagctggtgtgagccctgctgccttcttgacacatcaacagttattgccgt

SEQ ID NO: 317769 - DNA, 436 bp, Zea mays
cccacgcgtccggcaacatagaaagcacaatagtgtaccaacaatggcagccaagatagggtgcctccttatgctccttggtctttctgcaagtgctgctaccgcgaccattttcccgcaatgctcacaagctcctatagcttcccttcttcccccgtacctctcaccagcggtgtcttcggtatgtgaaaacccaattcttcaaccctataggatccaacaggcaatcgcagctggcatcttacctttatcacccttgttcctccaacaatcatcagccctattacagcagttacctttggtgcatttattggcacaaaacatcagggcacaacaactacaacaacttgtgctagcaaaccttgctgcctactctcagcaacagcagtttcttccattcaaccaactagctgcattgaactctgctgcttatttg

SEQ ID NO: 317770 - DNA, 372 bp, Zea mays
gggttggcttctcctccccctccggttcgggttcgggttcgtgaggttctccgggggtcggggtcgtgggtgagcggatcgagatggcggcgtcggatgttgagtaccgctgcttcgtcggcggcctcgcctgggccacggacgaccactccctccacaacgccttcagcacctacggcgaggtcctcgagtccaagatcatcctcgatcgggagacgcagaggtcccgcggcttcggcttcgtcaccttcttcacggaggaggcgatgcggaacgccatcgagggcatgaacggcaaggagctggacggtcgcaacatcaccgtcaacgaggcccagtcccgctgcggtcgtggaggcggcggcagtgggt

SEQ ID NO: 317771 - DNA, 377 bp, Zea mays
cccacgcgtccgcccacgcgtccgcccacgcgttcgcccacgcgtccggttggcttctggtggcccttcggttcgggttcgggttcgtgaggttctccggggttcgggttcgtgggtgagcggatcgagatggcggcgtcggatgttgagtaccgctgcttcgtcggcggcctcgcctgggccacggacgaccactccctacacaacgccttcagcacctacggggaggtcctcgagtccaagatcatcctctatcgggagacgcataggttcctgcgcttcggcttcgtcaccttgttcacggtggaagcgatgcggaacgccatcgacggcatgaactgcaaggagctggacggccggaacatcaccgtcaacga

SEQ ID NO: 317772 - DNA, 436 bp, Zea mays
cccacgcgtccgggcatcttacctttatcacccttgttcctccaacaatcatcagcccgattgcagcagttacctttggtgcatttattggcacaaaacatcagggcacaacaactacaacaactcgtgctagcaaaccttgctgcctactctcagcaacagcagttacctttggtgcatttgttggcacaaaacatcagggcacaacaactacaacaactcgtgctagcaaaccttgctgcctactctcagcaacaacagtttctgccattcaaccaactagctgcattgaactctgctgcttatttgcagcaacaacaactactaccattcagccagctagctgctgcctacccccggcaatttcttccattcaaccaactggcagcattgaactctcatgcttatgtacaacaacaacaactactaccattca

SEQ ID NO: 317773 - DNA, 194 bp, Zea mays
ctagatcgcgagcggccgccctttttttttttttttttttttatcaaaatgcaaaggcctgtattagacaacgatttgtgtacatacagacactacaaccaacaaacatataataccatttattgtacatatcacatatataagacctacatcatccatattttctatactcatacctatgacattaattttac

SEQ ID NO: 317774 - DNA, 299 bp, Zea mays
acggagcattcagaaacacaccaagcgaagcgcactatcaacaacctaacaacaatggctggcaaggtattatccctccttgcgcttcttgcgctttttgcgagcgcaacaaatgcgtccattattccacaatgctcacttgctcctagttccattattccacagttcctcccaccagttacttcaatggccttcgaacacccagctgtgcaagcctatatgctacaacaagcgattgcggcgagcgtcttacaacaaccaattgcccaattgcaacaacaatccttggcacatctaac

SEQ ID NO: 317775 - DNA, 400 bp, Zea mays
cccacgcgggcgcacaggctgaagagcacacgctcgggatctccttcgaggtctgctaggatcgacttaatgccctggctataaatatggttcttattcacagcatcacatctgatcaaagggtcaatcatgcttctacagctcacaactcaattgcagctgctggatccagttcacctagctctagatccatatcctacagaaactgcaactactaccatatcacgcgtttctaccgaaaccatacatgcatcttgacacacaccaggcgctgtacctctactctacaagctctacgttacgctggctgtcttttactactgcgacaattgctgccatttaaccaacttgatctgacataacgcgtagtgttatagcgacaacgaataatgggacatga

SEQ ID NO: 317776 - DNA, 435 bp, Zea mays
caaccaatgagacgctgcttaatgggcattacaacatagtgtttgtagtgttttttgggcgaagctaattgcggtccgtctcttcattggaactcatagcagtaccacacaaccagtgagaccataccactaattttattataccactagaaccagcttctcactagcttctcaccaggggtttgactttgtaacataggagatacagtgtgctcttctggaacttcatccccaacatcatcctcactgatcttgtgcagtacttggcacttcagtgacggcttcaaatacaacattatctcctggattgtgactctgttttggggtcgtggctatatcagtttgcatattatctggagccttctgaagcaactcttttattatagcatcagaatgtaaggtttctatctctatgggtagatcactgactgacgc

SEQ ID NO: 317777 - DNA, 435 bp, Zea mays
cctttatcacccttgttgtttcaacaatcgccagccctatctttggtgcagtcaggggggcaaaccatcagggcacagcagctgcagcaactcgtgctacctgtgatcaaccaagtagctctggcaaacctttctccctactctcagcaacaacaatttcttccattcaaccaactgtctacactgaaccctgctgcttatttgcagcaacaactattaccattcagccagctagctactgcctactctcagcaacaacaacttcttccatttaaccaattggccgcactgaaccccgctgcttatttgcagcagcaaatactactaccatttagccagctagctgcagcaaaccgtgcttgcttcttgacacagcaacagttgctgcctttctaccagcagtttgcggctaaccccgcaaccctcttacaacta

SEQ ID NO: 317778 - DNA, 73 bp, Zea mays
cccacgcgtccggttctagatcgtagcggccgtatgcctgggaatcgtagaaggggagggaaatttttggttg

SEQ ID NO: 317779 - DNA, 366 bp, Zea mays
cccaaccaatgagactctgcttaatggtcattacatcatagtgctggtaacgtcacttgcgcaatggaattgcaggccgtctattaatttgaactcatagcagtaccacacaaccagtgagaccataccactaattttattataccactacaaccaacttctcactagcttctcaccacaggtttgactttgtaacatatgagatacagtgtgctcttctggaacttcatccccaacatcatcctcactgatcttgttcaatacttggcacttcactgacagattcaaatacaacattatctactggattgtgactctgttatagaggtcgtggctatatcaagttgcatattaatctgagccttt

SEQ ID NO: 317780 - DNA, 190 bp, Zea mays
  unsure (1)..(190): unsure at all n locations
gaggggggagccacgcgnncgggagaagacgcggggggaccngagagcagacgcaccaggcaccagaagggngaacggggggaacngcgaggcggcgagaacacaaaaagccgaacaaagcggaggcgcacgaaacaagcancagcagnggcgacgcaaacgacccggacaggaagacccaccgcagaag

SEQ ID NO: 317781 - DNA, 123 bp, Zea mays
cgcacaagtaaggtgtatcgctctccccgcccgcaagccagtggcgtccgagccgcgtcgctcgtgctccctacgaccctctacaactcagcggatccgccgactcgcctatcgatggcgtca

SEQ ID NO: 317782 - DNA, 386 bp, Zea mays
tccgaattcccgactggagccacgcgtacgcgtgctgccagcgtgtacacgaggaggtttccttttcacatccgaacactccttagtgtgctgggctcctcttctgcggggccacagcaatccgcagatattagctgactcgtgaccgactgctatagctacccttcttccgccatgcctgctatcaaatgtagttatagtccgacgaagcacaccatgtaagacgctataaggttcaacaccattgtccgacgggcaactttcacacattacccatttctggtacaaagaagtccgaacgaatcatgctgcactagattgtacaaaccaagagctcacaccatgttgtacaactactactaacgtagagccatctactttgacca

SEQ ID NO: 317783 - DNA, 296 bp, Zea mays
gcgtgcagaataacaccagaccttatgccagaggtcgaaaacctgttcataggggacgtctgaaagctgcataacacgcctctgccaccacctaggatgcagcaagatcctctgccacatggccaatgatatcaaaatcgaaacctactgcttcaaggccaaatgttgcacgagcgccagacacctcacctgatgccgctgcttcataacctgctggtcctgaagattccacggctgcacatggtgttcgaaactccacaggtcctgatctcaccagccaattgacagcttcgaac

SEQ ID NO: 317784 - DNA, 304 bp, Zea mays
aggacgcgtaggcacttatgcaggtattgaaagtgatcagtaactcatcttgcaggacgggagtcaaagtcgggctctattcagtgggcattaacaaacgacatgtatacaccaaacgcgagctgactcatggccagtaccacacaaaaggtatagcatccaagaagccgtactatcgtcatttcactaatcacagaggataacaggaatagattttatcataagcgcctcatcacactaactaaggttgtcactgacaatccacatcagatcattgccactagaaacattgctactaacaaca

SEQ ID NO: 317785 - DNA, 205 bp, Zea mays
  unsure (1)..(205): unsure at all n locations
gcgagtgcacaattatgctgnctaataaaaaatatcttgggcatctattctacagggtccgagcctacacactaaaagacacgaatcgacatctcttcactgcagagaccccactcagaatactaagcctactcttacacctccaagacctacacaaacctggcttacaccatcctaatcaacttctacatcatcctcaataacc

SEQ ID NO: 317786 - DNA, 118 bp, Zea mays
cccacgcgtccgcccacgcgtccggcgagcggccgccctttttttttttttttttttgttttgtttttttttttttttttttttttttttttcccacgcgtccggttttaaatcgcaa

SEQ ID NO: 317787 - DNA, 304 bp, Zea mays
cggacgcgtgggcggacgcgtgggcgcgcctctacatttcttctctctctgctcctgcgcctgcgcctgatccatgcaagacagggatcgccatgtcggactcggaggagcaccacttcgaatcgaaggccgacgctggggcgtccaagacctacccgcagcaggctggcaccgtccgtaagaacggcttcatcgtcatcaagaaccgtccctgcaaggttgtggaggtttctacctccaagactggtaagcatggccacgccaaatgccactttgtcgccatagacatattcaatgggaaaaa

SEQ ID NO: 317788 - DNA, 167 bp, Zea mays
cttccttttaccttttcaccaacaaaacttatattccatctcattctcaattcattataccattctccacattcttcaaatcttaaacacccactttcaaccttatctacaacacaattcactacttttacacaccaattccattcaacaacatctttctacattac

SEQ ID NO: 317789 - DNA, 191 bp, Zea mays
gcgcccacgcgtccgtccacgcgtccgccctcgcgtccgccgacacctggtgccgggctaggttctaatgagagtagggatgcacactgcactggagactgcgtagctgctcactttgaacacaaccactaccgatgtggactaaacgtgccatatccaagaaaattgtcaaaccagccctacaagtctca

SEQ ID NO: 317790 - DNA, 422 bp, Zea mays
gcgaatcgccagccctatctttggtgcagtcattggtacaaaccatcagggcacagcaggtgcagcaactcgtgctacctctgatcaaccaagtagctctggcaaacctttctccctactctcagcaacaacaatttcttccattcaaccaactgtctacactgaaccctgctgcttatttgcagcaacaactattaccatttagccagctagctactgcctactctcagcaacaacaacttcttccatttaaccaattggccgcactgaaccccgctgcttatttgcagcagcaaatactactaccatttagccagctagctgcagcaaaccgtgcttccttcttgacacagcaacagttgctgcctttctaccagcagtttgcggctaaccccgcaaccctcttacaactacaacaattg

SEQ ID NO: 317791 - DNA, 298 bp, Zea mays
cccacgcgtccgcagccggcgggaccaaacaagttacttttaagggcagtggggatgagacttggacttggaagcaagcacgtgctcgcccgtcaaaggtctagctgtcaggctctactacaagcactacctgctaaatactttgttggtagggtgtttcagtgtttgaatgcactcaactaatacttagcttcttaaattagttgaagacatccaaacagtctatttgatagttcaactattagttatttctatcaaattgcctaactacaaagtgcaactataactactataaaaa

SEQ ID NO: 317792 - DNA, 302 bp, Zea mays
cccacgcgtccgcgcaacagcaacaacaatttctaccagcactgagccaactagctggggtgaaccctgtcgcctgcttgcaacagcagttgcttgcatccaacccacttgctctggcaaacatagttgcataccaacaacaacaacaattgcaacagtttctaccagcgctcagtcaactagccatggtgaaccctgccgcctacctacaacagcaacaactgatttcatctagccctctcgctgtggttaatgcacctacatacctgcaacaacagttgctgcaacagattgtaccagct

SEQ ID NO: 317793 - DNA, 302 bp, Zea mays
ctgccagttggttgaatggaagcattgaactctcctgcttatttacagcagcaacaagtactaccattcagccagttagctggtgtgagccctgctaccttcttgatacaaccacagttgttgccgttctaccagcacgctgcgcctaacgctggcaccctcttacaactgcaacaattgctgccattcaaccaacttgctttgacaaacccagcagcgttctaccaacaacccatcattggtggtgccctcttttagatttcttatgagttatagttcaataataaagttttttgtctgat

SEQ ID NO: 317794 - DNA, 166 bp, Zea mays
gcgggccaccaatcgagagtcggctgcagcatgagcgtggtaatcataggctcgagcgtggctgcttcggtcgaaaatcccgaccatcctatctatgacatgttcgcacatccatctctgcatggtacctcttcttcagatactccatactctctcaccacctaat

SEQ ID NO: 317795 - DNA, 341 bp, Zea mays
ctagcaacatagaaagcacaatagtgtaccaacaatggcagccaaaatattttgcttgcttatgctccttggtctttctgcaagtgctgctaccgcaaccattttcccacaatgctcacaagctcctatagcttcctttcttcccccatacctctcaccagcggtgtcttcagtatgtgaaaacccaattcttcaaccctacaggatccaacaggcaatcgcagcaggcatcttacctttatcacccttgttcctccaacaaccgtcagccctattacagcagttacctttggtgcatttgttggcacaaaacatgaaggcacaacaactacaacaacttg

SEQ ID NO: 317796 - DNA, 284 bp, Zea mays
cccacgcgtccgagcgctaactgcaaccatgataacatgcgctcctgacctataatagttgagagtcaaatattagagggcatgagcgctaactgcaaccatgatatttgactctcaaataatttctgtactgctgctcggcagcgtgcatgcaaactgagcattttcgagtcagcctctgcgtgtgtgcgggctaattcaactatgaaattcattcgaatttctttccactttcactttggtatcttcagtgaatatgtaaatctttgatgttcttctgcttt

SEQ ID NO: 317797 - DNA, 331 bp, Zea mays
cagcatagaaagtggaatccagtagcatcaacagagcaacaatggcgaccaagatatgttccgtccttatgctcctagctctttctgcatgtgttgctaacgcgacaattttccctcaatgctcacaagctcctatagcttcccttcttcccccataccttccatcaatgatagcttcagtatgtgaaaacccagctcttcagccctataggctccaacaagcaatcgcagcaagcaacatacctttatcacccttgttgtttcaacaatcgccagccctatctttggtgcagtcattggtacaaaccatcagaacacagtaactgcagca

SEQ ID NO: 317798 - DNA, 284 bp, Zea mays
ggaattacgagctacgacgtacgcgtacccggacgcctacaggatccaattttacttccccttccattctacttcataggggacctgttgtatcacctacatgcaattcactgacacggatccttataacggcgttacttgtaaaacacctatgcttcccaactaaattggcttgcagcacataccaatacttcctccaagcctaatacacaaatacccgaacacatcaactttaacaacattctcgcatcctaaatggcgaattccacgcgctatgtcttctt

SEQ ID NO: 317799 - DNA, 404 bp, Zea mays
gcgctgcaagaaactggatgtctacgccatggctgtatacaaagcagaagcttgtagggcccgtgacagtgaacagcaccgacgtttgatgctccatgacaacgccgtacagtccttgacgacaggcgaaacttacatgtgtggactagctataatcgtgccgcgctccctcttgatgaaactgtacccgcaacaccgactcttggtcagctgaccatccgccttgttccttaactgttcacctttagcaggactacagctatgcattagacctgcgtttgctacaagatgttcaactagtgcatgtacatgtatatggatgcccacctcgcgtacgcgcaggtatgttcaattcacagaggaaacacaatagcatgtatgcagtgtttttcttaccacacata

SEQ ID NO: 317800 - DNA, 304 bp, Zea mays
cccacgcgtccgcaacaagcaacatagaaagtggaatccagtagcaacaacagagcagcaatggcgaccaagatatgttccctccttatgctccttgctctttctgcatgtgttgctaacgcgacaattttccctcaatgctcacaagctcctatagcttcccttcttcccccataccttccatcaatgatagcttcagtatgtgaaaacccagctcttcagccctataggctccaacaagcaatcgcagcaagcaacatacctttatcacccttgttgtttcaacaatcgccagccctatctt

SEQ ID NO: 317801 - DNA, 302 bp, Zea mays
cccacgcgtccgtgaagatgtactattgcctattttttacagattcatttgcgtattggtccgagtcttctctttgctgcgagttgggtattaattaggatgtgatattgcttaatttcccccctgtttctactcattttttggcccttgataatgtccacgagtatgtaatagggactaatgaatcaaacgttgttaaataaacatttcattccgttttgctaaaaaaaaaaaaaaaaaagatcactgcaagaatgaacattttacctacgtacatagcatgtagaccgatcaccaggatc

SEQ ID NO: 317802 - DNA, 401 bp, Zea mays
ccaggtcctcctcgtcctccatgccgcggatctggtgggtcgccgacctaatgcgggggatgtcgcgcgcgaagcgtcgatcggccaggaggcagcacgccgccacgtctgccgcggggccccggctggaggccgccgcggacccggaggagcgagagcggaaggcggcgttcgagcggctggacgatctgggacggtgcatcgcggacgtggagagcagcggcgagaaggtgttcagagccctcgtcaacaccagagtctccctcctcaacattctcagcccagtcttctgattcccgaacagctctgggatcaccagaacccagcaaactcgactgcattttgcgaccttggataaaagatgtagatagaaatgtgtgcgcgaatgcaatatagcaatg

SEQ ID NO: 317803 - DNA, 298 bp, Zea mays
gctcctagttccattattccacagtttctcccaccagttacttcaatggccgtcgagcacccagctgtgcaagcctataggctacaacaagcgattgcggcgagcgtcttacaacaaccaattgcccaattgcaacaacaatccttggcacatctaacaatacaaaccatcgcaacgcaacagcaacaacagttcctaccagcactgagccacctagccatggtgaaccctgtcgcctacttgcaacagcagctgcttgcatccaacccacttgctctagcaaacgtagttgcaaacc

SEQ ID NO: 317804 - DNA, 232 bp, Zea mays
cggacgcgtgggcgcatattgcaccaagaaatccatcgcgaggccatcaacgggggggttaatggcgtccttgtgtatctgcaagcaccgagcgctcatgctctgagcaggcggtctgctctcgaagctctcgactgccagcgccagcgccgggacctactgcctgccaggacgggccatgccgtacatcccgattgcgcgctgcccgctgtgcgtgaccagtcggacctgc

SEQ ID NO: 317805 - DNA, 303 bp, Zea mays
gggtgactgttggtgtgcgctactaggcaagacaacaaccacatgagcacggaggagggggaagaggacgtatctgacgggagcgatgcccggagggagatgaaggatgtggccttggctggagaggattgcgtccgcttgctgggacctggtccggaagtacccacttacaaggaagggtgaggactacgccgacaccgacaccgacttcgacgccgtcacggacgagctgttgtggtcgcgggactcttacccctgacgcgggcggccacttgtccttcaccatcctgcagggcaacgacg

SEQ ID NO: 317806 - DNA, 299 bp, Zea mays
catacgatggggtgaagtgtgtttctctgaccctgcacctgcagccatccaggtaatgagacttgatacaaaggcccttcctccacatctttaggcccttctgttcaagacctgaagcttttctcccttttctaagcgaatcccccgaggttgttgaccatgaacttgttggaaatgctaacggttgacacaatggagtgacaaatgcggaaatgcctaaagcatcaagggctgcaccatgtaaatgctagccaggcaggttgcaacaaaaaaaaaaaacaccaggaagttctgtgggc

SEQ ID NO: 317807 - DNA, 323 bp, Zea mays
cgccacgcgtccgttgcaagattgtctcaacaactatggttatgcgatcagtacgtgccagctgggcctggtcatgctgaacgagtgccctcgcgttggagcgcctgtctaagctgctctctagcattattcatgcgatgctgttttcgaatgggtatctcattaataagacacctatgaaactactaccatatacacaccttgaaaccaaactttctgagattcattaccttctgatatcctatgctgatggaacatactctggactcttcaccattcatacttacaccatcctgtgatcttggagtaacaacttctacttt

SEQ ID NO: 317808 - DNA, 331 bp, Zea mays
gcaaagcggcagtgcgtagagaggatcgtcgaacagaacagcatgaagatggtcatggttctcgtcgtgtgcctggctctgtcagctgccagcgcctctgcaatgcagatgccctgcccctgcgcggggctgcagggcttgtacggcgctggcgccggcctgacgacgatgatgggcgccggcgggctgtacccctacgcggagtacctgaggcagccgcagtgcagcccgctggcggcggcgccctactacgccgggtgtgggcagacgagcgccatgtaccagccgctccggcaacagtgctgccagcagcagatgagggttatggacg

SEQ ID NO: 317809 - DNA, 370 bp, Zea mays
acatagaaagtggaatccagtagcaacaatagagcaacaatggcgaccaagatgttgtccctccttatgctccttgctctttctacatgtgttgctaacgcgacaattttccctcaatgctcacaagctcctatagcttcccttcttcccccataccttccatcaattatagcttcaatatgtgaaaacccagctcttcaaccatataggcttcaacaagcaatcgcagcaagcaacatacctttatcgcccttgttgattcaacaatcgccagccctatctttggtgcagccattggtacaaaccatcatggcacaacagctgcagcaactcgtgctacctttgatcaaccaagtagctctggcaaacc

SEQ ID NO: 317810 - DNA, 353 bp, Zea mays
  unsure (1)..(353): unsure at all n locations
gacccgcggtgggtgctcaagaaatctttcnntggagaaccgtcnnattcgtgacnngccgtcacctacccaccgagcacgcnnccgccgcaaggaaccgtnncaccgccatnnggatgtnnngtctacgcgctttcaaacgacaagggggccgcacccttctttacggctnntcggcgggctaaggggtcgcttccttcaatcnntggtggcnganacctgggcatgtnngttgtcngcnncggtnnggttgggtgttgtggtggccctttaatttnaagtctaagtcccccgttctctcttaattcgtcgcttgtngnnttctggtggtgggtcttgggtagtcccaattt

SEQ ID NO: 317811 - DNA, 290 bp, Zea mays
agaccaactagcaacatagaaagcacaatagtgtaccaacaatggcagccaaaatagggtgcttccttatgctccttggtctttctgcaagtgttgctaccgcaaccattttcccacaatgctcacaagctcctatagcttcccttcttcccccatacctctcaccagcggtgtcttcagtgtgtgaaaacccaattgttcaaccctacaggatccaacaggcaatcgcaacaggcatcttaccattatcacccttgttcctccaacaaccgtcagccctattacaagag

SEQ ID NO: 317812 - DNA, 374 bp, Zea mays
accaagcgaagcgcactagcaacgacctaacaccaatggctaccaagatattagcccggcttgcgcttattgcccttttagtgagcgcaacagatgcgttcattattccacagtgctcacttgctcctagtgccagtattccacagttcctcccaccagttacttcaatgggcttcgaacatccagccgtgcaagcctacaggctacaactagcgcttgcggcgagcgccttacaacaaccaattgcccaattgcaacaacaatccttggcacatctaaccctacaaaccattgcaacgcaacaacaacaacaacagtttctgccatcactgagccacctagccgtggtgaaccctgtcacctacttgcaacag

SEQ ID NO: 317813 - DNA, 238 bp, Zea mays
  unsure (1)..(238): unsure at all n locations
cccacgcgtncggctccaccagttgttaagaacaactgatgcttgcgtgcttacgaacgagagcgaaccatgcatgaccccccaaccaagttcatttcatcctttcatgcatgtactatgtatgtagctctacatatatatatattgctactactatcaagcatgtatgtcgccgttgtggagacacatctattgatctatacatgagcttgtggaagcagataggtctgcattaatt

SEQ ID NO: 317814 - DNA, 327 bp, Zea mays
gcaacatagaaagcacaatagtgtaccaacaatggtagccaaaatattttgcctcgttatgctccttggtctttctgcaagtgctgctacgacgaccattttcccgcaatgctcacaagctcctatagcttctcttcttcccccatacctctaaccagcgttgtcttcagtatgtgaaaacccaattcttcaaccctacaggatccaacaggcaatcacagcaggcatcttacctttatcacccttgttcctccaacaatcatcagccctattacatcaattaccttcggtgcatttattggccacaaaacatcagggcacaacaac

SEQ ID NO: 317815 - DNA, 389 bp, Zea mays
cccacgcgtccgcccacgcgtccgtcgcaacgcaacagcaacaacaatttctaccaggactaagccaactagctgtggtgaaccctgtcgcctacttgcaacagcagttgcttgcatccaacccacttgctctggcaaacatagttgcataccaacaacaacaacaattgcaacagtttctaccagcgctcagtcaactagccatggtgaaccctgccgcctacctacaacagcaacaactgatttcatctagccctctcgctgtggttaatgcacctacatacctgcaacaacagttgctgcaacagattgtaccagctctgactcagctagctgtggcaaaccctgctgcctacttgcaacagctgcttccattcaaccaactgact

SEQ ID NO: 317816 - DNA, 396 bp, Zea mays
actcgtaccggaattcccgactcgagcgtcgcgtggaagggacttccgctagagatcaatggtcaggtctctgccgtcatcagcatgtcggtggggttcgacaaggccaacgaccaggtgcccgacccggacgtcatcaaggagaccgccaccaagacgttccacgacctctacgactacctactcaagaactagatggagcgacaactggagatggtccagtacagtacagttccagtccattcatcgacgcgtcacagtttactagtgcacgtcgctggtgtggtctggtgcccgtgctggttacttaatttgcttgctagctagctacgtaccgcggtccgagtccttgtctatggctgatgtttgctgcctgcgtccgtagagcatacgact

SEQ ID NO: 317817 - DNA, 281 bp, Zea mays
  unsure (1)..(281): unsure at all n locations
attgctgccattcaaccaacttgctttgacaaacccaacagcattctaccaacaaccgatcattggtggtgccctcttttagatttcttatgagttatagttcaataataaagttttttgtctgatgtttgtggcttcccagaaataagaaagtacatttctaaaaaaaaaaaaaaagggaggccgctcgcgatctanaacccacgcgtacggttctagatcgcgagcggcctcccttgatgatcctcgttagaattgtactatcttatatgtgggatgcc

SEQ ID NO: 317818 - DNA, 387 bp, Zea mays
caactagcaacatagaaagcacaatagtgtaccaacaatggcagccaaaatattttgcgttccttatgctccttggtctttctgcaagtgctgctaccgcaaccattttcccacaatgctcacaagctcctatagcttcctttcttcccccatacctctcaccagcggtgtcttcagtatgtgaaaacccaattcttcaaccctacaggatccaacaggcaatcgcagcaggcatcttacctttatcacccttgttcctccaacaaccgtcagccctattacagcagttacctttggtgcatttgttggcacaaaacatcaaggcacaacaactacaacaacttgtgctaggaaaccttgctgcctactctcagcaacagcagtttc

SEQ ID NO: 317819 - DNA, 322 bp, Zea mays
accaagcgtataccgacaactacggccttacatatgttactcccaagatataatacggggaagcacgcttgtctttctaaatgatctgaacttacgagcacattacatcacagctatcaatttctcctagctacaatatttcgctgtacccaccaactatctctaacatgggacgatgaaatcccacagtctaaatctaactgttacaacctaggcatcgatccaagaatgttacactttctataatgttgaatcgcaataactccatgtcgtctcatacataacctacagtcacattgcatcgagatcaaccacaacatca

SEQ ID NO: 317820 - DNA, 429 bp, Zea mays
agaccaacaagcaacatagaaagtggaatccagtagcaacaacagagcaacaatggcgaccaagatattttccctccttatgctccttgctctttctgcatgtgttgctaacgcgacaattttccctcaatgctcacaagctcctatagcttcccttcttcccccataccttccatcaatgatagcttcagtatgtgaaaacccagctcttcagccctataggctccaacaagcaatcgcagcaagcaacatacctttatcaacccttgttgtttcaacaatcgccagccctatctttgggtccagtaattggtccaacccaatcaggcaccaacacctgcaaccacctcgtcctacctgtgatcaaccaagtagctctggcaaacctttctccctactctcagcaacaacaatttcttccattcaacc

SEQ ID NO: 317821 - DNA, 163 bp, Zea mays
catacacataatcaaaaacaccatacttttaacatcctcaccaacgtaccatctctcgtggctctcaaaaatcatagctcctctaattcatgctgaatcttatcaccttcatacacacaacatctatctacatctttcccacatactactacctatcatctat

SEQ ID NO: 317822 - DNA, 415 bp, Zea mays
  unsure (1)..(415): unsure at all n locations
tagcaccatagaaggcacattagtgtaccaacaatggcagccaaaatatttggcttcgtggtgctccttggtctttctgcaagtgttgctaccgcaaccattttcccacaatgctcacaagctcctatagcttcccttcttcccccatacctctcaccagcggtgtcttcaatgtgtgaaaacccaattgttcaaccctacaggatccaacaggcaatcgcaacaggcatcttaccattatcacccttgttcctccaacaaccgtcagccctattacagcagttacctttggtccatttggtggcacanaacatcagggcacaacaactacaacaacttgtgctagcaaaccttgctgcatactctcagcaacatcagtttcttccattcaaccaactggctgcattgaactctg

SEQ ID NO: 317823 - DNA, 330 bp, Zea mays
cggacgcgtgggcggacgcgtggggagctgcatctccgatcggttctcctgctcgaggacttccaggaagacggggtcgacggtgatgtggctgtcgatgcggacggagaaggggcgggaccagagcagcaccgtggcctcgccggcgatctcgacggccgcgtccagctccatgtggcggcgcgcgacgtcagagaggagggcgcgggcgcggtgcgcgagctcgacaccgtcgaggcgcgccgggaggtggagcacgcggcaggaggtggcgggctgctcgccggcgtcgaggcgggcggtgccgacgtgcgcgccgtcgtaaaggat

SEQ ID NO: 317824 - DNA, 415 bp, Zea mays
caaacgcccaatcacaacaacaatccttggcacatctaaccatacaaaccatcgcagcgcgagcatcaacaagcactgagccacctagccgtggtgaaccctatcgcctacttgcaacaacagctgcttgcatccaacccacttgctttggcaaacgtagctgcataccaacaacaacaacagttgcaacagtgtctgccagcgctcagtcaactagccatggtgaaccctatcgcctacctacaacagcagcaacttctttcatctagcccgctcgctatgggcaatgcacctacatacctgcaacaacagttgttgcaacaaacaggtgctgaacaaaattgtaccagctcttactcagctagctgtggcaaaccctgctggctacttgcaacaactacttgcattcaaccaa

SEQ ID NO: 317825 - DNA, 92 bp, Zea mays
tctcacacttaatcatacacatcatcattatatataaaaaaacaaaaaaataaataaaatggaagtttttaaaaaattataaaacatctaat

SEQ ID NO: 317826 - DNA, 426 bp, Zea mays
gcgaagcgcactagcaacgacctaacaccaatggctaccaagatattagccctccttgcgcttcttgcccttttagtgagcgcaacaaatgcgttcattattccacagtgctcacttgctcctagtgccattattccacagttcctcccaccagttacttcaatgggcttcgaacatccagccgtgcaagcctacaggctacaactagcgcttgcggcgagcgccttacaacaaccaattgcccaattgcaacaacaatccttggcacatctaaccctacaaaccattgcaacgcatcaacaacaacaacagtttctgccatcactgagccacctagccgtggtgaaccctgtcacctacttgcaacagcagctgcttgcatccaacccacttgctctggcgaacgtagctgcataccagcaacaa

SEQ ID NO: 317827 - DNA, 127 bp, Zea mays
tcccactcatactaaaacacacaactcttttatctaaatcaataattaacatactgctgaccatcacaactatttaattaactcttaatcaaatacaatctacatacaacaatacaaacaatcaata

SEQ ID NO: 317828 - DNA, 202 bp, Zea mays
cggacgcgtgggatctaggtttaccaccttttcccattgcgtatggtctctgctggtgaagttgaaaaataatgtatctgaaattattcacagtgcttttcttttcgagatagcaaaatgttgtgaagagatttcacccaatcaatgaaagaaaacatgtatcttgttgatggctatagtggtttgaaaacaaatcgtccat

SEQ ID NO: 317829 - DNA, 149 bp, Zea mays
agcaaacctacactgcctaaagagtatcttctaacacaacagcatgaacatggtcatggctctcgtcacgtgcctgactctgtcagctgccatcgcctctgcaatgcaaatgccctgcccctgcgcggagctgcacggcttgtacagct

SEQ ID NO: 317830 - DNA, 421 bp, Zea mays
gcttcgaacacctagctgtgcaagcctacaggctacaacaagcgcttgcggcgagcgtgttacaacaaccaattaaccaattgcaacaacaatccttggcacatctaaccatacaaaccatcgcaacacaacagcaacaacagttcctaccagcactgagccaactagatgtggtgaaccctgtcgcctacttgcaacagcaggtgcttgcatccaacccacttgctctggcaaacgtagctgcataccaacaacaacaacaattgcaacagtttctgccagcgctcagtcaactagccatggtgaaccctgccgactacctacaacagcaacaactgctttcatctagccctctcgttgtgggtaatgcacctacatacctgcaacaacaattgctgcaacagattgtaccaactctgac

SEQ ID NO: 317831 - DNA, 415 bp, Zea mays
cccacgcgtccggagaccaacaagcaacatagaaagtggaatccagtagcaacaatagagcaacaatggcgaccaagatattttccctccttatgctccttgctctttctgcatgtgttgctaacgcgacaattttccctcaatgctcacaagctcctatagcttcccttcttcccccataccttccatcaatgatagcttcagtatgtgaaaacccagctcttcaaccctataggctccaacaagcaatcgcagcaagcaacatacctttatcacccttgtttcaacaatcgccagccctatctttggtgcagtcattggtacaaaccatcagggcacagcagctgcagcaactcgtgctacctgtgatcaaccaagtagctctggcaaacctttctccctactcttagcaaca

SEQ ID NO: 317832 - DNA, 108 bp, Zea mays
cccacgcgtccgcccacgcgtccgctgaattgtttgaccagggggactaaaactcaaggagggaatttatacatgactctaatcccaacaacaatacaaaaaatgacc

SEQ ID NO: 317833 - DNA, 393 bp, Zea mays
atccagatcagcaaagcggcagtgcgtagagaggatcgtcgaacagaacagcatgaagatggtcatcgttctcgtcgtgtgcctggctctgtcagctgccagcgcctctgcaatgcatatgccctgcccctgcgcggggctgcagggcttgtacggcgctggcgccggcctgacgacgatgatgggcgccggcgggctgtacccctacgcggagtacctgaggcagccgcagtgcagcccgctggcggcggcgccctactacgccgggtgtgggcagacgagcgccatgtaccagccgctccggcaacagtgctgccagcagcagatgaggatgatggacgtgcagtccgtcgcgcagcagctgcagatgatgatgcagcttgagcgtgccgc

SEQ ID NO: 317834 - DNA, 248 bp, Zea mays
cccacgcgtccgcgagttttaaaggtggtgacgtctgaatttcgtggaattgacaatgacatgtctgtatgattggtgtcgcaactctccagttcggaaatttgttagcacaaaaaaaaaaaaaaaaaaaaaaaaaaaaaaaaaaaaaaaaaaaaaaaaaaaaaaaataaaaaaaaaaaaaaaaaaaaaaaaaaaaatgaaaaataaaaaatatataataagacaacgaaatagaaaacaaaaacata

SEQ ID NO: 317835 - DNA, 129 bp, Zea mays
tcccagctcgacccactcatcctaacacacatacaaatactcaaccacttttttttttacaccatcattcacatcccaatagacgtctctaataactcattctacctcctattaaattccttactaaaa

SEQ ID NO: 317836 - DNA, 342 bp, Zea mays
ctcacactttaggagtctagcaaggtttgagagatatatagaaccatgagataagagagttactgatagagttaccagataccacttagaggctgctgaatgagcactgtatacttagaacatggatcagatgaataaggttgattgcccaaatccgaccgatcatgctgcactttgatcctgtcgctctacagcagaacgttcccaatgactgggaccaggcggtcctgaatctgaccatgaatgtcaacaaaatcgtatctgaaatggaccactatataatttcaacattccttgccaaataccaggatcaagaagtacatccctcaacactaaaagcct

SEQ ID NO: 317837 - DNA, 227 bp, Zea mays
ctcacacttactcactcttacttctttttttactcatacacaatagtacatccggcggactacttatactttcaaatctgcccttattcactcttatcccatatacaaatacattcagatcaatactcaaaccataatctatatatgcattagcttactctaaacattgcaaaacatcttactacaaatatttacacattgaaattaaaaccttaactcaacctatt

SEQ ID NO: 317838 - DNA, 425 bp, Zea mays
ggcaatcgcaacaggcatcttaccattatcacccttgttcctccaacaaccgtcggggctattacaagagttacctttggtccatttggtggcacaaaacatcagggcacaacaactacaacaacttgtgctagcaaaccttgctgcatactctcagcaacatcagtttcttccattcaaccaactggctgcattgaactctgctgcttatttgcaacaacaactaccattcagccagctagctgctgcctacccccagcaatttcttccattcaaccaactagcagcattgaactctgctgcttatttacagcagcaacaactactaccattcagccagctagctgatgtgagccctgctgccttcttgacacaacaacagttgttgccgttctacctacacgctatgcctaacgcttgcaccc

SEQ ID NO: 317839 - DNA, 416 bp, Zea mays
gtgcaagccaacatgcaacaacaagcgcttgcggcgagcgtcttacaacaaccaattgcccaattgcaacaacaatccttgccacatctaacaatacaagccatcacaacgcaacagcaacaacagttcctaccagcactgagccacctagccatggtgaaccctgccgcctacttgcaagagcagctgcttgcatccaacccacttgctctggcgaacgtagttgcaaaccagcaacaacaacagctacaacagtttctgccaacgctcagtcaactagccatggtgaaccctgccgcctacgtacaacaacaacaactgctttcatctagcccgctcgctgtgggcaatgcacctacatacctgcaacaacaattgttgcaacagattgtaccagctctgactcaactagctgt

SEQ ID NO: 317840 - DNA, 433 bp, Zea mays
cttcccccgtacctctcaccagcggtgtcttcggtatgtgaaaacccaattctgggacgctacaggatccaacaggcaatcacagctggcatcttacctttatcacccttgttcctccaacaatcatcagccctattacatcagttacctttggtgcatttattggcacaaaacatcagggcacaacaactacaacaacttgtgctagcaaaccttgctgcctactctcagcaacagcagtttcttccattcaaccaactagctgcattgaactctgcttcttatttgcaacaacaacaactaccattcagccagctacctgctgcctacccccagcaatttcttccattcaaccaactggcagcattgaactctcctgcttatttacagcagcaacaactactaccattcagccagctagctggtgtgagcc

SEQ ID NO: 317841 - DNA, 378 bp, Zea mays
gttggcttctcctccccctccggttcgggttcgggttcgtgaggttctccggggttcgggttcgtgggtgagcggatcgagatggcggcgtcggatgttgagtaccgctgcttcgtcggcggcctcgcctgggccacggacgaccactccctccacaacgccttcagcacctacggcgaggtcctcgagtccaagatcatcctcgatcgggagacgcagaggtcccgcggcttcggcttcgtcaccttctccacggaggaggcgatgcggaacgccatcgagggcatgaacggcaaggagctggacggccgcaacatcaccgtcaacgaggcccagtcccgcggcggccgtggaggcggcggcggtgggtacggtggt

SEQ ID NO: 317842 - DNA, 411 bp, Zea mays
acgcgtgcgagtgagaccaactagcaacatagaaagcacaatagtgtaccaacaatggcagggaaggtattttgcctccttatgctccttggtctttctgcaagtgctgctaccgcgaccattttcccgcaatgctcacaagctcctatagcttcccttcttcccccgtacctctcaccagcggtgtcttcggtatgtgaaaacccaattcttcaaccctataggatccaacaggcaatcgcagctggcatcttacctttatcacccttgttcctccaacaatcatcagccctattacagcagttacctttggtgcatttattggcacaaaacatcagggcacaacaactacaacaacttgtgctagcaaaccttgctgcctactctcagcaacagcagtttcttccattc

SEQ ID NO: 317843 - DNA, 420 bp, Zea mays
cccacgcgtccgcggacgcgtgggtcagcattcaaaaacacaccaagcgaagcgcacgagcaacgacctaacaccaatggctaccaagatattagccctccttgcgcttcttgcccttttagtgagcgcaacaaatgcgttcattattccacagtgctcacttgctcctagtgccagtattccacagttcctcccaccagttacttcaatgggcttcgaacatccagccgtgcaagcctacaggctacaactagcgcttgcggcgagcgccttacaacaaccaattgcccaattgcaacaacaatccttggcacatctaaccctacaaaccattgcaacgcaacaacaacaacaacagtttctgccatcactgagccacctagccgtggtgaaccctgtcacctacttgcaacagcagct

SEQ ID NO: 317844 - DNA, 413 bp, Zea mays
tcgtggtctttctgcaagtgctgctaccgcgaccattttcccgcaatgctcacaagctccgatagcttcccttcttcccccgtacctctcaccagcggtgtcttcggtatgtgaaaacccaattcttcaaccctataggatccaacaggcaatcgcagctggcatcttacctttatcacccttgttcctccaacaatcatcagccctattacagcagttacctttggtgcatttattggcacaaaacatcagggcacaacaactacaacaacttgtgctagcaaaccttgctgcctactctcagcaacagcagtttcttccattcaaccaactagctgcattgaactctgctgcttatttgcaacaacaactaccattcagccagctagcttgttgctacccccaacaatttc

SEQ ID NO: 317845 - DNA, 201 bp, Zea mays
cgccacgccgtcccactagttctaggatcccgaccggcccccctttttttttttttttttgtttgttttttattttttttttttttgtttttttttttttttttttaaaattttttttttcccgaaaaaaattttgtctttcaccaaaatttttggactctaacccgcatatctatcttctcactcacagagctttttttt

SEQ ID NO: 317846 - DNA, 417 bp, Zea mays
aactagcaacatagaaagcacaatagtgtaccaacaatggcagccaaaatattttgcctccttatgctccttggtctttctgcaagtgctgctacggcgaccattttcccgcaatgctcgcaagctcctatagcttcccttcttcccccgtacctctcaccagcggtgtcttcggtatgtgaaaacccaattcttcaaccctacaggatccaacaggcaatcacagctggcatcttacctttatcacccttgttcctccaacaatcatcagccctattacatcagttacctttggtgcatttattggcacaaaacatcagggcacaacaactacaacaacttgtgctagcaaaccttgctgcctactctcagcaacagcagtttcttccattcaaccaactagctgcattgaactct

SEQ ID NO: 317847 - DNA, 415 bp, Zea mays
caatgctcacttgctccgagtgccattattccacagttcctccctccagttactgcagtgggcttcgaacacccagctgtgcaagcctataggctacaacaagcgcttgcggcgagcgtcttagaacaaccaattgcccaattacaacaacaatccttggcacatctaaccatacaaaccatcgcaacgcagcagcaacaagcactgagccacctagccgtggtgaaccctatcgcctacttgcaacaacagctgcttgcatccaacccacttgctttggcaaacgtagctgcataccaacaacaacaacagttgcaacagtttctaccagcgctcagtcaactagccatggtgaaccctatcgcctacctacaacagcaacaacttctttcatctagcccgctcgctatgggca

SEQ ID NO: 317848 - DNA, 87 bp, Zea mays
gtttttttcaatatacatttatcttaaaaacagcggtactgatgtttttttgtctaaagttaatgagtttgcaatggttctgagtct

SEQ ID NO: 317849 - DNA, 162 bp, Zea mays
cccacgcgtccgcccacgcgtccgcccacgcgtccgaaaaaaaaaaaaaaaaaaaaaggaaaaaaaaaaaaaaaaaaaaaaaaaaaaaaaaaaaaaaaaaaaaaaaagggcggccgttcgtggaggaccctctcttggttccacgttcatgtacacttgtat

SEQ ID NO: 317850 - DNA, 442 bp, Zea mays
  unsure (1)..(442): unsure at all n locations
cggacgcgtggggcattcagaaacacaccaagcgaagcgcactagcaacgacctaacggcaatggctaccaagatattagccctccttgcgcttcttgccctttttgtgagcgcaacaaatgcgttcattattccacaatgctcacttgctcctagtgccattattccacagttcctcccaccagttacttcaatgggcttcgaacacctagctgtgcaagccaacatgcaacaacaagcgcttgcggcgagcgtcttacaacaaccaattgcccaattgcaacaacaatccttgccacatctaacaatacaagccatcacaacgcaacagcaacaacagttcctaccagcactgagccacctagccatggtgaaccctgccgnctacttgcaagagcagctgcttgcatccaacccacttgctctggcgaacgtagttgca

SEQ ID NO: 317851 - DNA, 350 bp, Zea mays
cccacgcgtccgcccacgcgtacttccacgcgtccgagacaatgctgatgccttgatgcttatcgttttctgtaatgttcgtaaataggctcttcgtcgccttgttgtctgactgctacattgtcaatatttcaaaacatacgtatttgaatcaaatgtctggattggttatgcctaaaaaaaaaataacttaattggatacgaacacataaataaaaaaaaaaaaatacaacaactaaaaacttaaaaaaataatattacaacaacaaaaaaaaacaattacaacaactataaataaacggggctgacatttcaagaaatcacaacttaacatcatcactagcaactac

SEQ ID NO: 317852 - DNA, 375 bp, Zea mays
ctagcaacatagaaagcacaatagtgtaccaacaatggcagccaaaatattttgcctggttatgctccttggtctttctgcaagtgctgctacggcgaccattttcccgcaatgctcacaagctcctatagcttcccttcttcccccgtacctctcaccagcagttgtcttcggtatgtgaaaacccaattcttcaaccctacaggatccaacaggcaatcgcagctggcatcttacctttatcacccttgttcctccaacaatcatcagccctattacagcagttacctttggtgcatttattggcacaaaacatcagggcacagcaactacaacaacttgtgctagcaaacgttgctgcctactctcagcaac

SEQ ID NO: 317853 - DNA, 416 bp, Zea mays
ggcgtcttcgtactcgcctacctccgcggctcaaacctttcccccttctcccagtgtggcgccgccgctccatcccgtaacgcgacaccatgagggagtgcatttcgatccacatcggccaggccggtatccaggtcggaaacgcgtgctgggagctgtactgccttgagcatggcattcaggctgacggtcagatgcccggtgacaagaccattgggggaggtgatgatgctttcaacaccttcttcagtgagactggtgctgggaagcacgtgccccgtgctgtttttgttgaccttgaacccactgtcatcgatgaggtgaggactggcacctaccgccagctcttccaccctgagcagctcatcagtgggaaggaggatgcagccaacaactttgcccgtggtcactacacc

SEQ ID NO: 317854 - DNA, 441 bp, Zea mays
caactagcaacatagaaagcacaatagtgtaccaacaatggcagccaaaatattttggcgtccttatgctccttggtctttctgcaagtgctgctaccgcaaccattttcccacaatgctcacaagctcctatagcttcctttcttcccccatacctctcaccagcggtgtcttcagtatgtgaaaacccaattcttcaaccctacaggatccaacaggcaatcgcagcaggcatcttacctttatcacccttgttcctccaacaaccgtcagccctattacagcagttacctttggtgcatttgttggcacaaaacatcaaggcacaacaactacaacaacttgtgctaagaaaccttgctgcctactctcagcaacagcagtttcttccattcaaccaactggctgcattgaactctgcttgctatttgcaacaacaac

SEQ ID NO: 317855 - DNA, 51 bp, Zea mays
aaaaaaaaaaaaaaaaaaaaaaaaaaaaaaaaaaaaaaaaaaaaaaaaaag

SEQ ID NO: 317856 - DNA, 75 bp, Zea mays
aaagaaaaaaaaaaaaaaaaaaaaaaatttttaaaaaaaaaaaaaaaaaaaaaaaaaagaggggaaaaaaaaaag

SEQ ID NO: 317857 - DNA, 423 bp, Zea mays
acccacgcgtgcgtggacgcgtgggtcagcattcaaaaacacactaagcgaagcgcactagcaacgacctagcgggaatggctaccaagatattagccctccttgcgcttcttgcccttttagtgagcgcaacaaatgcgttcattattccacagtgctcacttgctcctagtgccagtattccacagttcctcccaccagttacttcaatgggctttgaacatccagccgtgcaagcctacaggctacaactagcgcttgcggcgagcgccttacaacaaccaattgcccaattgcaacaacaatccttggcacatctaaccctacaaaccattgcaacgcaacaacaacaacaacagtttctgccatcactgagccacctagccgtggtgaaccctgtcacctacttgcaacagcagctgc

SEQ ID NO: 317858 - DNA, 354 bp, Zea mays
gaaagtggaatccagtagcaacaatagatcaacaatggcgaccaagatattttccctgcttatgctccttgctctttctacatgtgttgctaacgcgacaattttccctcaatgctcacaagctcctatagcttcccttcttcccccataccttccatcaattatagcttcaatatgtgaaaacccagctcttcaaccatataggcttcaacaagcaatcgcagcaagcaacatacctttatcgcccttgttgtttcaacaatcgccagccctatctttggtgcagtcattggtacaaaccatcagggcacaacagctgcagcaactcgtgctacctctgatcaaccaagtagc

SEQ ID NO: 317859 - DNA, 407 bp, Zea mays
tggctcgaccgacgcatgcgtgcacacaggggtcagcattcacaaccatactacgccaatcgcactcgcaacgacctagcagcattggctaccaggtatattataccattcttgcgtctcgttgcccttttagtgagcgcgataaatgcctacattatctcacattgctcactcagctcctacagccattattgcacagatacttcaacaacttacttcaatgacctactagcatccacacgcgctagcctacaggctactacttgcacttgcctcgagcgccttacaatagccagtcgtatatttgcagcaacaattgttgcaacatataacgctacaaccgatggagacgcatcagctacctctgcacaacctggcatctctgagccacctagctgcgtagtatc

SEQ ID NO: 317860 - DNA, 375 bp, Zea mays
acatagaaagtggaatccagtagcggcagacagagcaacaatggcgaccaagatattttccctccttatgctccttgctctttctgcatgtgttgctaacgcgacaattttccctcaatgctcacaagctcctatagcttcccttcttcccccataccttccatcaatgatagcttcagtatgtgaaaacccagctcttcagccctataggctccaacaagcaatcgcagcaagcaacatacctttatcacccttgttgtttcaacaatcgccagccctatctttggtgcagtcattggtacaaaccatcagggcacagcagctgcagcaactcgtgctacctgtgatcaaccaagtagctctggcaaacctttc

SEQ ID NO: 317861 - DNA, 407 bp, Zea mays
caattcttcaaccctacaggatccaacaggcaatcgcagcaggcatcttacctttatgaccgttgttcctccaacaaccgtcagccctattacagcagttacctttggtgcatttgttggcacaaaacatcaaggcacaacaactacaacaacttgtgctaggaaaccttgctgcctactctcagcaacagcagtttcttccattcaaccaactggctgcattgaactctgctgcttatttgcaacaacaactaccattcagtcagctagctgctgcctacccccagcaatttcttccattcaaccaactggcagcattgaactctgctgcttatttacaacagcaacagctaccaccattcagccagctagctgatgtgagcccttgtgccttcttgacacaacaa

SEQ ID NO: 317862 - DNA, 195 bp, Zea mays
acccactcatccgcccactcatccacacactcaaccttcatatccacacatccatcatcaataaccgtcgcactatttaaaaattttacacgactatccatctcactctatctatcatacaacaacatcaacaaccacccacatacaaactacaaccatatcaaacccatactcccatatatacacaacaacaca

SEQ ID NO: 317863 - DNA, 114 bp, Zea mays
ccaacaacccatcattggtggtgccctcttttagatttcttatgagttatagttgaataataaagttttttatctgatgtttgtggcttcccagaaataagaaagtacatttct

SEQ ID NO: 317864 - DNA, 359 bp, Zea mays
accacacgtccgtttcgttagacagagtcatcgcaccggacgcaacacgtacgcgagggagcgcaagctatagccgacgccatggcgagcaagcacctggacctcgtcgcatgcctcctcctggtcctgcccaacgtctcggtcgccaacgacctcgactactgcagtaagaaggactacccggtgaaagtgaactgcgtgcacaccctgcacgagccgaccaaacccggcaagcccttcagtatcaagatcaacgctgctactgatgaacccatcgccaacggcaagctggatattgacatcaagcatctatagttctacgtgcactcggagaccatcgacatctgcggtgagactta

SEQ ID NO: 317865 - DNA, 349 bp, Zea mays
cccagcaatttcttccattcaaccaactggcagcattgaactctcctgcttatttacagcagcaacaactactaccattcagccagctagctggtgtgagccctgctaccttcttgacacaaccacagttgttgccgttctaccagcacgctgcgcctaacgctggcaccctcttacaactgcaacaattgctgccattcaaccaacttgctttgacaaacctagcagtgttctaccaacaacccatcattggtggtgccctcttttagatttcttatgagttatagttcaataataaagttttttgtctgatgtttgtggcttcccagaaataagaaagtacatttct

SEQ ID NO: 317866 - DNA, 375 bp, Zea mays
gcaacatagaaagcacaatagtgtaccaacaatggtagccaaaatattttgcctccttatgctccttggtctttctgcaagtgctgctacgacgaccattttcccgcaatgctcacaagctcctatagcttctcttcttcccccatacctctcaccagcgttgtcttcagtatgtgaaaacccaattcttcaaccctacaggatccaacaggcaatcacagcaggcatcttacctttatcacccttgttcctccaacaatcatcagccctattacatcaattacctttggtgcatttattggcacaaaacatcagggcacaacaactacaacaactcgtgctagcaaaccttgctgcctacgctcagcaacagca

SEQ ID NO: 317867 - DNA, 287 bp, Zea mays
ccgcatcaaggagggaaggcagctagttaacattccctcggtcatggacaaggtccaagcagggaaacacattgacttatacctcaacaaccctttgggtggtggtcctgcccgaagggttaaaccgaagaaacagaaaaaaggcttatggggccgctaagcttaagaagacgaagagtataaggccaacttaggattctgcgaccggaaatggttgaaatgctaagtggaaactttaaatggtgtgcccgaatgagtatggtcattggaaagaattccaaaaatct

SEQ ID NO: 317868 - DNA, 211 bp, Zea mays
gtgatgctcggacccactgaaagcacatgatataaaaaatctacttaggcgtgtaacattgaccgagcatctgaagtcactgttacacgcctagtagtattttttgttcagacccaacgaaagcaatggaaaaaaaaatctactatgcgtgtatcagtacccatcgtctgagtcactgttactgatttgccttgcaaaatagaataaaact

SEQ ID NO: 317869 - DNA, 434 bp, Zea mays
ttgagaccaactagcaacatagaaagcacaatagtgtaccaacaatggcagccaagatattttgcttccttatgctccttggtctttctgcaagtgttgctaccgcaaccattttcccacaatgctcacaagctcctatagcttcccttcttcccccatacctctcaccagcggtgtcttcaatgtgtgaaaacccaattgttcaaccctacaggatccaacaggcaatcgcaacaggcatcttaccattatcacccttgttcctccaacaaccgtcagccctattacagcagttacctttggtccatttggtggcacaaaacatcagggcacaacaactacaacaacttgtgctagcaaaccttgctgcatactctcagcaacatcagtttcttccattcaaccaactggctgcattgaactctgctgcttat

SEQ ID NO: 317870 - DNA, 412 bp, Zea mays
gaccaacaagcaacatagaaagtggaatccagtagcaacaacagagcaacaatggcgaccaagatattttccctccttatgctccttgctctttctgcatgtgttgctaacgcgacaattttccctcaatgctcacaagctcctatagcttcccttcttcccccataccttccatcaatgatagcttcagtatgtgaaaacccagctcttcagccctataggctccaacaagcaatcgcagcaagcaacatacctttatcacccttgttgtttcaacaatcgccagccctatctttggtgcagtcattggtacaaaccatcagggcacagcagctgcagcaactcgtgctacctgtgatcaaccaagtagctctggcaaacctttcttcctactctcagcaaccacaatttc

SEQ ID NO: 317871 - DNA, 230 bp, Zea mays
cacgagcgggccgcccttttatttttttttttttttttttttttttttttttttgtggttattatattttttttaattatttttatttttttttttaatttttttataaaaaaaaaaaaataaaaaaaattaaaataaaaaaaaaaaaataaattaaaaaacatatattacataaaaaataacttaaatatatcaaaacttaattattaaaccatataacttaaaaaata

SEQ ID NO: 317872 - DNA, 410 bp, Zea mays
gcaacatagaaagcacaatagtgtaccaacaatggtagccaaaatattttgcgtgcgttatgctccttggtctttctgcaagtgctgctacgacgaccattttcccgcaatgctcacaagctcctatagcttctcttcttcccccatacctctcaccagcgttgtcttcagtatgtgaaaacccaattcttcaaccctacaggatccaacaggcaatcacagcaggcatcttacctttatcacccttgttcctccaacaatcatcagccctattacatcaattacctgtggtgcatttattggcacaaaacatcagggcacaacaactacaacaactcgtgctagcaaaccttgctgcctacgctcagcaacagcagttacctttggtgcaattgttggcacaaaacatc

SEQ ID NO: 317873 - DNA, 350 bp, Zea mays
gtgggttggcttctcctccccctccggttcgggttcgggttcgtgaggttctccggggttcggtttcgtgggtgagcggatcgagatggcggcgtcggatgttgagtaccgctgcttcgtcggcggcctcgcctgggccacggacgaccactccctccacaacgccttcagcacctacggcgaggtcctcgagtccaagatcatcctcgatcgggagacgcagaggtcccgcggcttcggcttcgtcaccttctccacggaggaggcgatgcggaacgccatcgagggcatgaacggcaaggagctggacggccgcaacatcaccgtcaacgaggcccagtcccgcggcg

SEQ ID NO: 317874 - DNA, 433 bp, Zea mays
acctactgtacatataagtacttttgatggccaacctgtctcccatatgaggtggcctatttatgctagacggcctgtctgtgagtactgcttcctaaaccgtaaatccgctcatgttacattcagctatccataataccttcaagattcacatattgccatgaacagattccatatgcagagacctgattatggaggcctataacatcccattggattgcagcattcagacaccaccttaataaggttctacttaggcaacatccagaaccgtcattcttttgagaagcctgggacgattaacgactcaagctatgaatactctttacctgcgacgacttgtgctcacgatatgaagcagctatgctccacaagcagtctttcggtgatgtacatggagctcttgcatagagtagtgtatgtggcaattatc

SEQ ID NO: 317875 - DNA, 356 bp, Zea mays
  unsure (1)..(356): unsure at all n locations
gccaacatgcaacaacaagcgcttgcggcgagcgtcttacaacaaccaattgcccaattgcaacaacaatccttgccacatctaacaatacaagccatcacaacgcaacagcaacaacagttcctaccagcactgagccacctagccatggtgaaccctgccgcctacttgcaagagcagctgcttgcatccaacccacttgctctggcgaacgtagttgcaaaccagcaacaacaacagctacaacagtttctgccaacgctcagtcaactagccatggtgaaccctgccgnctacgtacaacaacaacaactgctttcatctagcccgctcgctgtgggcaatgcacctacata

SEQ ID NO: 317876 - DNA, 421 bp, Zea mays
cctggctctcgctgcgagcgccacctttacgcatacaagcggcggctgcggctggcaagcaccgccgccggttcatctaccgccgccggtgcatctgccacctccggttcacctgccacctccggtgcatctcccaccgccggtccacctgccgccgccggtccacctgccaccgccggtccatgtgccgccgccggttcatctgccgccgccaccatgccactaccctactcaaccgccccggcctcagcctcatccccagccacacccatgcccgtgccaacagccgcatccaagcccgtgccagctgcagggaacctgcggcgttggcagcaccccgatcctgggccagtgcgtcgagtttctgaggcatcagtgcagcccgactgcgacgccctactgctcgcctcagtgccagtcg

SEQ ID NO: 317877 - DNA, 316 bp, Zea mays
gtcagcatcgtcgtcgtcgacctcaagcacagggactgagtcagtgagtgagtggggggatccggtttctgatcctgcagcgcatcagcgtaatcgatctagggctgagctgaactgatactgtgaggaggtgatcgtctagatcgtctagacctttgacatttccttggttctttcgattctaagatataagatttgtagcctaaaaaaaaaaaaaaaaaaaaaaaaaaaaaaaaaaaaaaaaaaaaaaaaaaaaaaaaaaaaaaaaaaaaaaaaaacacaaaaataaaaattagcgggggggcgactcctatta

SEQ ID NO: 317878 - DNA, 390 bp, Zea mays
ggacgtcagcctagcaattagctcatcgactccagattggagaactcgacaccatgaaggtgctgatcgttgcccttgctctcctggcgctcgctgcgagcgccgcctccagtacaagcggcggctgtggctgccagacaccaccgtttcatctaccgcctccgttctatatgccgcctccgttctatctgccgccgcagcagcagccgcagccatggcaataccccactcaaccaccgcagctaagcccgtgccagcagttcggatcctgcggcgtcggcagcgtcggcagcccgttcctgggccagtgcgtcgagttcctgaggcaccagtgcagcccggcggcgacgccctacggctcgccacagtgccaggcgctgcagcagcagt

SEQ ID NO: 317879 - DNA, 282 bp, Zea mays
caggagcttctgcttgctctggggggaatgagatagagagagagcgagagagagatctgttggggatgctagtaggcggtcctagaacgaacaagctcgcggtgttcatcgggcaggtcgtcgaggtgcccatgccaactggtcgcgctgcttcaaaccggactccgtactccaagacgaaagcagtagaattggtggtgctcttcctagaaccatccgagccaatcgcatgcctacagatctgagaccacagtcacctcacctactaccacaccaaccact

SEQ ID NO: 317880 - DNA, 426 bp, Zea mays
cccacgcgtccggatcaaccaagtagctctggcaaacctttctccctactctcaggaagaacaatttcttccattcaaccaactgtctacactgaaccctgctgcttatttgcagcaacaactattaccatttagccagctagctactgcctactctcagcaacaacaacttcttccatttaaccaattggccgcactgaaccccgctgcttatttgcagcagcaaatactactaccatttagccagctagctgcagcaaaccgtgcttccttcttgacacagcaacagttgctgcctttctaccagcagtttgcggctaaccccgcaaccctcttacaactacaacaattgttgccctttgtccaacttgctttgacagacccagcggccttctaccaacaacacatcattggtggtgccctctt

SEQ ID NO: 317881 - DNA, 175 bp, Zea mays
tcgcagggcagcccgacggcgacgccctacttgtcttctcagtgccagtcgttgcggcaaagttggtgccagcagctcaggcaggtggagccgcagcaccggtaccaagcgatcttctgcttggtcctccagatcatcctgcagcagcagccgcaaaacggacaagttgcggggc

SEQ ID NO: 317882 - DNA, 416 bp, Zea mays
  unsure (1)..(416): unsure at all n locations
attacatcaattacctttggtgcatttattggcacaaaacatcagggcacaacaactgcgacgactcgtgctagcaaaccttgctgcctacgctcagcaacagcagttacctttggtgcaattgttggcacaaaacatcagggcacaacaactacaacaactcgtgctagcaaaccttgctgcctactctcagcaacagcagtttctgccattcaaccaactagctgcattgaactctgctgcttatttgcaacaacaacaactactaccattcagccagctagctgctgcctaccaccagcaatttcttccattcaaccaactggcagcattgaactcttctgcttatgtacaacaacaactactaccattcagccagctagctgctgtgagccctgctgncttcttgacacagc

SEQ ID NO: 317883 - DNA, 57 bp, Zea mays
tcgacaacccgttcaagaactccttcgagatcgggttcgcaaccctggtgaactaca

SEQ ID NO: 317884 - DNA, 403 bp, Zea mays
cccacgcgttcggcaattagctcatcgactccagattggagaactcgacaccatgaaggtgctgatcgttgcccttgctctcctggcgctcgctgcgagcgccgcctccagtacaagcggcggctgtggctgccagacaccaccgtttcatctaccgcctccgttctatatgccgcctccgttctatctgccgccgcagcagcagccgcagccatggcaataccccactcaaccaccgcagctaagcccgtgccagcagttcggatcctgcggcgtcggcagcgtcggcagcccgttcctgggccagtgcgtcgagttcctgaggcaccagtgcagcccggcggcgacgccctacggctcgccacagtgccaggcgctgcagcagcagtgctgccaccagatc

SEQ ID NO: 317885 - DNA, 299 bp, Zea mays
cccacgcgtgcgcccacgcgtccggggttggcttctcctccccctccggttcgggttggggtgcgtgaggttctccggggttcggcttcgcgggtgagcggatcgagatggcggcgtcggatgttgagtaccgctgcttcgtcggcggcctcgcctgggccacggacgaccactccctccacaacgccttcagcacctacggcgaggtcctcgagtccaagatcatcctcgatcgggagacgcagaggtcccgcggcttcggctttctcaccttcttcaccgaagaggcgatgcggaac

SEQ ID NO: 317886 - DNA, 404 bp, Zea mays
caacaagcaacatagacagtggaatccatctagctacaatacagcaacaatggcgaccaggatattttccctccttatgctccttgctctttctgcatgtgttgctaacgcgacaattttccctcaatgctcacaagctcctatagcttcccttcttcccccataccttccatcaatgatagcttcagtatgtgaaaacccacctcttcaaccctataggctccaacaagcaatcgcagcaagcaacatacctttatcacccttgattcaacaatcgccagccctatctttggtgcagtcattggtacaaaccatcaaggcacagcagctagcatcaactcgtgctacctgtgatcaaccaagtagctcttgcaaacctttatccctactctcagcaacaacaa

SEQ ID NO: 317887 - DNA, 435 bp, Zea mays
  unsure (1)..(435): unsure at all n locations
gatgttttgcctccttatgctccttgctttttttgcatgtgttgctaacgcgacaatggtccgtcaatgctcacaagctcctatagctttccttcttcccccataccttccatcaatgatagcttcagtatgtgaaaacccagctcttcaaccctataggctccaacaagcaatcgcagcaagcaacatacctttatcacccttgtttcaacaatcgccagccctatctttggtgcagtcattggtacaaaccatcagggcacagcagctgcagcaactcgtgctacctgtgatcaaccaagtagctctggcaaacctttctccctactctcagcaacaacaatttcttccattcaaccaactgtctacattgaaccgtgctgcttatttgcagcaacaactattaccattcagccagctagctactgnctactc

SEQ ID NO: 317888 - DNA, 328 bp, Zea mays
aaaaaaaaaaaaaaaaaaaaaaatttatttaaagaaaaaataaaaaaaaaaaaggaaggaaaaaaaaataaaaaaaaaaaaacaaaaaaataaaaaaacctaaacataaaaaaactgtccgtccttttacagcatcctaccttcctacccccttcatgcaacccaattaattttctttactgccccttaacttaatttaacttcccgtcttttcccaacatctccactcgaaaaacctctcccttccccaatttaatctctttgcaaaacatccccctttctccagctttccaattagcaaagaggccttaacctatcacccttccca

SEQ ID NO: 317889 - DNA, 204 bp, Zea mays
aaaacaaacaaaaaatttctttacaaaaaaaaacaaaaaaataaaacagacagattaaaaaaataattaacccaacccaaaacaaacacaaaaaaaaaaaaaaacaacaaaaaaacacaaacaaaaaaaaaaactcaaaaaacaaaacacacaaaaaaaacacaaaacaaaaaccaaaaaaaaaaaaaaaaaaacaaacaaaaa

SEQ ID NO: 317890 - DNA, 398 bp, Zea mays
tcgaacacgcacaccacctcaccatacacctcttctcttctaccagtagttcattcattaggagtgcggtaccgggttggagtaattaaaaggccaccctccactcgcaccaccacactttagctccccactgctataggcagcccacatgcgcgcacactcctaagctagctatagcagcaaggcagccagctgagctcagagctcccagtccagcgccggcgccaccaccgcagctgctcgctggtcaccatgagcaaggagaagcaccaccgcgactggatcctccggcgctgctgcggctccatcaccgactgcatactgaatctatgcatatttgtaagcttgatagggctgataatgtacctagcgctgccccccttcaagccgaacttcta

SEQ ID NO: 317891 - DNA, 428 bp, Zea mays
ccttgctctttctacatgtgttgctaactcgacaattttccctcaatgctcacaagcgcctagagcttccctttttgccccataccttccatcaattatagcttcagtatgtgaaaacccagctcttcaaccatataggcttcaacaagcaatcgcagcaagcaacatacctttatcgcccttgttgtgtcaacaatcgccagccctatctttggtgcagtcattggtacaaaccatcagggcacaacagctgcagcaactcgtgctacctgtgatcaaccaagtagctctggcaaacctttctccctactcttcgcaacaacaatttcttccattcaaccaactgtctacactgaaccctgctgcttatttgcagcaacaactattaccatttagccagctagctactgcctactctcaacaacaac

SEQ ID NO: 317892 - DNA, 359 bp, Zea mays
gtgagcggatcgagatggcggcgtctgatgttgagtaccgctgcttcgtcggcggggtcgggtgtgccacggacgaccactccctccacaacgccttcagcacctacggcgaggtcctcgagtccaagatcatcctcgatcgggagacgcacaggtcccgcggcttcggcttcgtcaccttctccacggaggaagcgatgcggaacgccatcgacggcatgaacggcaaggagctggacggccgcaacatcaccgtcaacgaggcccagtcccgcggcggccgtggatgccgcggccgcgggtactgtggcggccgtagaagcggccgatacagcagccgtcggcgccgtcaaggccgt

SEQ ID NO: 317893 - DNA, 428 bp, Zea mays
  unsure (1)..(428): unsure at all n locations
gggttggcttctcctccccctccggttcgggttcgggttcgtgagggtcttccgggttgggggtcctgggtgaacggatcgagatggccgcgtcggatgttgagtaccgctggttcgtcggcggcctcgcctgggccacggacgaccactccctccacaacgccttcagcacctacggcgaggtcctcgagtccaagatcatcctcgatcgggagacgcagaggtcccgcggcttcggcttcgtcaccttctccacggaggaggcgatgcggaacgccatcgagggcatgaacggcaaggagctggacggncgcaacatcaccgtcaacgaggcccagtcccgcggcggccgtggaggcggcggcggtgggtacggtggtggccgtggaggcggcggctacggcggtggcgggcgccgtgatggcggt

SEQ ID NO: 317894 - DNA, 419 bp, Zea mays
gaaagtggaatccagtagcaacaacagatcaacaatggcgaccaagatattttccctcgttatgctccttgctctttctgcatgtgttgctaacgcgacaattttccctcaatgctcacaagctcctatagcttcccttcttcccccataccttccatcaatgatagcttcagtatgtgaaaacccagctcttcagccctataggctccaacaagcaatcgcagcaagcaacatacctttatcacccttgttgtttcaacaatcgccagccctatctttggtgcagtcattggtacaaaccatcagggcacagcagctgcagcaactcgtgctacctgtgatcaaccaagtagctctggcaaacctttctccctactctcagcaacaacaatttcttccattcaaccaactgtctacac

SEQ ID NO: 317895 - DNA, 424 bp, Zea mays
cccacgcgtccggtaggtttgatgggaagcctgaagatgttctaaatccaaagaaaagagcagctggacaagattaccccggtacacttcagtggcctgtttgatatgatgtaacatcattgtcatggaatgttcttggctaacataacatactcaattatcagatcctgaattgaaacaccatgtttgtttttatttgatgaatgatgtcgcttattgctatactgtgcaaagtttaccactatggcgctaaccgcgttgtttatgcatccagcatcttcgtaccgacgagaatggaattgcaatgttcaaaggtgttccctttactacatcagctggcccatgtagatcttcgattcacaacggaaatgttaagtgagcagctcattagacatggttgcatagattgacatcaaacttatgc

SEQ ID NO: 317896 - DNA, 405 bp, Zea mays
ctcggttcggattcccggccgcccacgcgtccggggttggcttctcctccccctccggttcgggttcgggttcgtgaggttctccggggttggggttcgtgggtgagcggatcgagatggcggcgtcggatgttgagtaccgctgcttcgtcggcggcctcgcctgggccacggacgaccactccctccacaacgccttcagcacctacggcgaggtcctcgagtccaagatcatcctcgatcgggagacgcagaggtcccgcggcttcggcttcgtcaccttctccacggaggaggcgatgcggaacgccatcgagggcatgaacggcaaggagctggacggccgcaacatcaccgtcaacgaggcccagtcccgcggcggccgtggaggcggcggcggtgggt

SEQ ID NO: 317897 - DNA, 53 bp, Zea mays
tcgggtatgaccaataatatatgcatggtcataataaagttttggttttaatg

SEQ ID NO: 317898 - DNA, 316 bp, Zea mays
gcgcccacgcgtccgctctgggcagcgtgcgcacgtggggtacctagctcgctctggtaggctaccatggctgatcaccaccggggtgcgacgggaggtggcgggggctacggcgacctccagcgcgggggcggcatgcacggcgaggcgcagcagcagcagaagcagggcgccatgatgacggcgctcaaggccgcgacggccgcgaccttcggcgggtcgatgctggtgctgtccgggctgatcctggccggcaccgtgatcgcgctcacggtggccacccccgtgctggtgatcttcagcccggtgctggtgc

SEQ ID NO: 317899 - DNA, 286 bp, Zea mays
  unsure (1)..(286): unsure at all n locations
gcgtgcgtccacgcgtccgccacgcgttcgacaagcacatagaagtggaaccgggtacggcaacagagcaacaatggcgaccaagatattttccctccttatgctccttgctctntctgcatgtgttgctaacgcgacaattttccctcaatgctcacaagctcctatagcttcccttcttcccccataccttccatcaatgatagcttcagtatgtgaaaacccagctcttcagccctataggctccaacaagcaatcgcagcaagcaacatacctttatcaccc

SEQ ID NO: 317900 - DNA, 327 bp, Zea mays
cggtcggattccggctagcgtccggtccgcgtccgggcatctcacattctgccagttcttcttgagcaccatgtggaaggcgtacggggtgttctaagggtgctcttttgtgaagtctgctaggttctggcagcgaggttttattgaattaaactcttgttaaggatatgtttttggacgatcctatatttcgtcctggcgctactatggttcagaatggtggtactactataagtatcctagcgctataagtattgcttgaaaggatcaatataatttgcgtgtcatacccgcaaccttttctgccaaaaaaattaatactataag

SEQ ID NO: 317901 - DNA, 363 bp, Zea mays
  unsure (1)..(363): unsure at all n locations
ntccgtccacgctgtacanttggacaccagacgtactatgtctcgagagcggagatatcatccatctatgggaggacaacatgcgcctagtccgttcaatatcattatgcagctccaagttcctatcgcatgatgttcagactgttagacgaagaaccgctgatattgtgatagtgaattggtcagatgaaaatgataagctattgcaacaacacatcacatatacattgcctattacatgctgctatgaagatgctaactatgagtggatcaacatcagccactgctctgttagagctttcgtagacctgtaagaaacgaaggcagcatcagctgatcatggaccacgactgaaatctctct

SEQ ID NO: 317902 - DNA, 97 bp, Zea mays
aaaaaaaaaaaaaaaaaaaaaatttaaattaaaaaaaaaaaaaaaaaaaaaaaaagaaaaggaaaaaaaaaaaaaaaaaaaaaaaaaaaaaaaaaaa

SEQ ID NO: 317903 - DNA, 441 bp, Zea mays
cccacgcgtccggcagctgcagcaactcgtgctacctgtgatcaaccaagtaggtctggcaaacctttctccctactctcagcaacaacaatttcttccattcaaccaactgtctacactgaaccctgctgcttatttgcagcaacaactattaccattcagccagctagctactgcctactctcagcaacaacaacttcttccatttaaccaattggccgcactgaaccccgctgcttatttgcagcagcaaatactactaccatttagccagctagctgcagcaaaccgtgcttccttcttgacacagcaacagttgctgcctttctaccagcagtttgcggctaaccccgcaaccctcttacaactacaacaattgttgccctttgtccaacttgctttgacagacccagcggccttctaccaacaacacatcattgg

SEQ ID NO: 317904 - DNA, 380 bp, Zea mays
gcaacatagaaagcacaatagtgtaccaacaatggcagccaaaatattttgcttccttatgctccttggtctttctgcaagtgttgctaccgcaaccattttcccacaatgctcacaagctcctatagcttcccttcttcccccatacctctcaccagcggtgtcttcaatgtgtgaaaacccaattgttcaaccctacaggatccaacaggcaatcgcaacaggcatcttaccattatcacccttgttcctccaacaaccgtcagccctattacagcagttacctttggtccatttggtggcacaaaacatcaaggcacaacaactacaacaacttgtgctagcaaaccttgctgcatactctcagcaacatcagtttc

SEQ ID NO: 317905 - DNA, 102 bp, Zea mays
gataaagcgaaacattgtttttctggtgaccagttgaacaaaaaaaaaaaaaaaaaggaaaaaaaaaaaaaaaaaaaaaaaaaaagacaaccactctacaat

SEQ ID NO: 317906 - DNA, 393 bp, Zea mays
  unsure (1)..(393): unsure at all n locations
cccacgcgtccgccgccgccggttcatctgccgccgccaccatgccactaccctactgaaccgccccggcctcagcctcatccccagccacacccatgcccgtgccaacagccgcatccaagcccgtgccagctgcagggaacctgcggcgttggcagcaccccgatcctgggccagtgcgtcgagttcctgaggcatcagtgcagcccgacggcgacgccctactgctcgcctcagtgccagtcgttgcggcagcagtgttgccagcagctcangcaggtggagccgcagcaccggtaccaggcgatcttcggcttggtcctccagtccatcctgcagcagcagccgcaaagcggccaggtcgcggngctgttggcggcgcagatagcgcag

SEQ ID NO: 317907 - DNA, 250 bp, Zea mays
cactcgacccactcatcctcgcacgcatccacccactccttctcattttcctccaatactaaaaaaaaacagtaccgatcctcttccaatttaatataataaccatacacactaaaactacatctcacacaacaaatacacaacataaccaaactacaaacaacccgctactactaaaaaacccactaccatcatccaatcacccataactccaaaacattacctcatccccactattacataattacaa

SEQ ID NO: 317908 - DNA, 420 bp, Zea mays
gaccaactagcaacatacaaagcacaatagtgtaccaacaatggcagccaagatatggtgcctgcttatgctccttggactttctgcaagcgctgctacggcgaccattttaccgcaatgctcgcaagctcctatagcttcccttcttccgccgtacctctcaccagcggtgtcttcagtatgtgaaaacccaattcttcaaccctacaggatccaacaggcaatcgcagctggcatcttacctttatcacccttgttcctgcaacaatcatcagccctattacaacagttaccttcggtgcatttattggcacaaaacatcatggcacaacaactacaacaacttgtgctagcaaaccttgctgcctactctcagcaacagcagtttctttcattcaaccaactaggttcattgaactc

SEQ ID NO: 317909 - DNA, 64 bp, Zea mays
cccacgcgtccgcccacgcgttcgcccacgcgtccgcccacgcgtccgaaaaaaaggagaaggg

SEQ ID NO: 317910 - DNA, 92 bp, Zea mays
  unsure (1)..(92): unsure at all n locations
ntccgaaacacatacgaacacgcgtataaaattttaacggaagaagctaaaaaaaaccacaggggcggtaacgcatccaggttaagtaacca

SEQ ID NO: 317911 - DNA, 404 bp, Zea mays
atgttggcgctcttttaagcatagatgagagcctaatgtgttcatttcagatcctgaagccaactgatatgggtccaccgcatgcaagaaaacaaattccaaataagccaacaagagggtgaagccttggaccagcatccaatacttccagttccagtatcatgatgatcgtcagtcagctcaaagggggtgatctgttgtttggatagttggatccaccagggcctgacattagacatccatcagccaattaatccctttagccaccctttactcgtgtcttgggaggcggcttggctgtaaaggatattctgtacagcatttagttggattcaacacatcatctgttttactggtcttcctgccggcaagggacctcattggcagcatgacatacaatagat

SEQ ID NO: 317912 - DNA, 431 bp, Zea mays
gagaccaactagcaacatagaaagcacaatagtgtaccaacaatggcagccaaaatggtttgcctccttatgctccttggtctttctgcaagtgctgctaccgcgaccattttcccgcaatgctcacaagctcctatagcttcccttcttcccccgtacctctcaccagcggtgtcttcggtatgtgaaaacccaattcttcaaccctataggatccaacaggcaatcgcagctggcatcttacctttatcacccttgttcctccaacaatcatcagccctattacagcagttacctttggtgcatttattggcacaaaacatcagggcacaacaactacaacaacttgtgctagcaaaccttgctgcctactctcagcaacagcagtttcttccattcaaccaactagctgcattgaactctgctgctta

SEQ ID NO: 317913 - DNA, 316 bp, Zea mays
agcgtccgccaccgtccgcccaccgtcgcggaccgtggcgtgcggagcacgacggccagggcagaccacagttccgggcccctgcttcgcggtcaactggccacatctgcaaaacccagggttccccggcggcaggtgccgcggcttacgcgcgatgttctgacacaacactgccactgattcgtcgccagcggcggctgcgtcgcatcatcgcgccgtagcgaccagaccattctcatgcatgaataacaaggcgtgccgttgtgatgccaaatgatactatcgtcagagccgaacggctatcgagctcaactat

SEQ ID NO: 317914 - DNA, 411 bp, Zea mays
agctttatctactccagagcgcagaagaacccgatcgacaccatgagggtgttgctcgttgccgtcgctctcctggctctcgctgcgagcgccacctccacgcatacaagcggcagctgcggctgccagccaccgccgccggttcatctaccgccgccggtgcatctgccacctccggttcacctgccacctcctgtgcatctcccaccgccggtccacctgccgccgccggtccacctgccaccgccggtccatgtgccgccgccggttcatctgccgccgccaccatgccactaccctactcaaccgccccggcctcagcctcatccccagccacacccatgcccgtgccaacagccgcatccaagcccgtgccagctgcagggaacctgcggcgttggcagcaccccg

SEQ ID NO: 317915 - DNA, 435 bp, Zea mays
cccacgcgtccgcccacgcgtccgcttgctgcctactctcagcaacagcagtttcttgcattcaaccaactagctgcattgaactctgctgcttatttgcaacaacaactaccattcagccagctagctgctgcctacccccaacaatttcttccattcaaccaactggcatcattgaactctcctgcttatttacagcagcaacaactactaccattcagccagctagctggtgtgagccctgctgccttcttgacacaacaacagttattgccgttctacctgcacgctgcgcctaacgctggcaccctcttacaactgcaacaattgctgccattcaaccaacttgctttgacaaacccagcagcgttctaccaacaacccatcattggtggtgccctcttttagatttcttatgagttatagttcaataat

SEQ ID NO: 317916 - DNA, 351 bp, Zea mays
cggacccatacgcccacgcgttcactttctgcctactataagcaccacaaggggtccggcattcaaccaactacactgattgaactcatatccttatttgaaacaccaactaccattcagccagctaaacatcaacctacctaaaactaattccttttcatctaacgcaacattgatcaacgaactctactgcttattacactgcagcaacaactactaccatacagcctaatagctgacctgagccctgatacattcatgacacaatatcagctcattgccgctctaccatcacgatctcgactaacgaattgcaccacttttacacactgcaacaattagcttccatta

SEQ ID NO: 317917 - DNA, 118 bp, Zea mays
ttcccgctctacccactcgtccgaaaaaaaaaaaaaaaaaaaaaaaaaatttttattaaaaaaacaaaaaaaaaatcaaaccgcaaaatttcaaacttaacaatacaaacaccccaat

SEQ ID NO: 317918 - DNA, 426 bp, Zea mays
cggacgcgtgggctagcaacatagaaagcacaatagtgtaccaacaatggcagccaaaatattttgcttccttatgctccttggtctttctgcaagtgttgctaccgcaaccattttcccacaatgctcacaagctcctatagcttcccttcttcccccatacctctcaccagcggtgtcttcaatgtgtgaaaacccaattgttcaaccctacaggatccaacaggcaatcgcaacaggcatcttaccattatcacccttgttcctccaacaaccgtcagccctattacagcagttacctttggtccatttggtggcacaaaacatcagggcacaacaactacaacaacttgtgctagcaaaccttgctgcatactctcagcaacatcagtttcttccattcaaccaactggctgcattgaactc

SEQ ID NO: 317919 - DNA, 346 bp, Zea mays
acggggttaacggcgacgggatatgtgcggatcggctaggaaatgatgcgggtgaccgcggaagatctgtggctcaggcgctgcagatgctaggctgatgtcaatgtgccatgtctgatgctactctgccgtagcagccactgcggtaccggtggttgcttcctaggccctatatacattcaatgctcgctataacaggagtatgcgtgcgcgacagtgtattgatgcgaacgacgctgcggaccattgctcggacaatgctacaaggaaacagagtgtattatcatacgatctgatactgccgcccaacacggaacagctgagcctggcggtcattatagagata

SEQ ID NO: 317920 - DNA, 378 bp, Zea mays
tcgcggacgcgtgggtctacacaccaggagggtgcatatgctagtatgctgggcaacctcgcaggggcagacaagaagggcactgtcattcttgtgcacgcaaactttgtccccaatgttgacaccttgcttgaagcaaacatgggcatttcccagacaccttcaagaatggtggtgcctgaaggcctctgtggtgccattatgccggtcacaaatacctgggacaggtagctgcataactcaacaattcgacacggggtggcatcatgccttgggaacttgctttcataaggatcggtggacgccaaggctcaagcggcgacatgcttggcccaactgttacagtacacgattgcgctactcaagttaaaaacgcca

SEQ ID NO: 317921 - DNA, 324 bp, Zea mays
agatgacattatctgactcgatccagcaactatggcataggacttctcaaattctatgcgtgctgcacattaacaattctgaaacctaactgcaaggaatacaatgccatatgtgaaataatcacttagctagggcaatatggaacacatgagcttcattagatatgacctactggctattattggggagtcagcgtatagtgcaagtgctttagtgctcatgtatgatcattttgctagcttatcaactcgttgttcaagaagaaggctcgactttctgcggaaagctggtattatcatgatgatgatcgccacagatcttat

SEQ ID NO: 317922 - DNA, 383 bp, Zea mays
ggtgggttggcttctcctccccctccggttcgggttcgggttcgtgaggttctccggggttcggtttcgtgggtgagcggatcgagatggcggcgtcggatgttgagtaccgctgcttcgtcggcggcctcgcctgggccacggacgaccactccctccacaacgccttcagcacctacggcgaggtcctcgagtccaagatcatcctcgatcgggagacgcagaggtcccgcggcttcggcttcgtcaccttctccacggaggaggcgatgcggaacgccatcgagggcatgaacggcaaggagctggacggccgcaacatcaccgtcaacgaggcccagtcccgcggcggccgtggaggcggcggctgtgggtacggtggt

SEQ ID NO: 317923 - DNA, 383 bp, Zea mays
ggtgggttggcttctcctccccctccggttcgggttcgggttcgtgaggttctccggggttcgggttcgtgggtgagcggatcgagatggcggcgtcggatgttgagtaccgctgcttcgtcggcggcctcgcctgggccacggacgaccactccctccacaacgccttcagcacctacggcgaggtcctcgagtccaagatcatcctcgatcgggagacgcagaggtcccgcggcttcggcttcgtcaccttctccacggaggaggcgatgcggaacgccatcgagggcatgaacggcaaggagctggacggccgcaacatcaccgtcaacgaggcccagtcccgcggcggccgtggaggctgcggcggtgggtacggtggt

SEQ ID NO: 317924 - DNA, 303 bp, Zea mays
gcctgcagcagtagcggaacaattccaaagcatccagagcatccccttctgacacatgttgacctcattgagaagttgctcaactacaacaccctagagaagaccgagacaagttaagcgagcacatcatgctccaaaaacactactgtttggcagtatcatagagcttaggtagtatgttgtctcttctctatcagtagaaatgggttgtgagtgtgaacatgcttttcaaggacttttcatgcgacagtgcttgttgccacctatgcaacgatgttggatattttaagtgatataattgct

SEQ ID NO: 317925 - DNA, 188 bp, Zea mays
aaaacaaaaaaaaaaaaaaaaaaaagaaaaaaaaaaaagaaaaaaaaataaaaaaaaaaaaaagaaacaaaaaaaaaaaacaaaataagaaaaaaaaaataaaaaaaaaaaaaaaaaaaaaatcactaaaaaatcaaaatacaacataaaatcacataaaaaccctgtacactatcaaaaacaatgtc

SEQ ID NO: 317926 - DNA, 403 bp, Zea mays
cggattcccgctcgaccagcgtacggaggctatgaacaagcgctgaaggctctgatcgtattatgctgcacgtagttgggacgggcatccgatgtttggtccactctaaggcgttgttacgtgactatagtcgtgatcttagatctgcacctaaagttcctgttgacacaaccgtagctcgtgtaaagccagggagagtctttggctactgccttagcattctcgtggactcccctttgtgacctctacagcttgagtacgcctttaatgataggcaatcacgcatatttcactttgctgttgtctacccacatatgacatcatattgcacacattctgattcaatcttgttcttctgagcattttggtctgattgaaaatcatgacataccttacatttttt

SEQ ID NO: 317927 - DNA, 146 bp, Zea mays
ctttgacaaacccagcagcgttctaccaacaacccatcattggtggtgccctcttttagattgcttatgagttatagttcaataataaagttttttgtctgatgtttgtggcttcccagaaataagaaagtacatttctagattct

SEQ ID NO: 317928 - DNA, 385 bp, Zea mays
atgagcatgtgctgcttaagtaaccattggcaatatgctttcctttttttggctccctgtgggggaatgtttccgcaaacaatgtgggctgctgagttcgaaggcatatctggtgcacattgaacattggtgcacatggtgatgactgaatatgtgcagcatgtgcaccaatcttgcatgtgcattacatatgttctcgctgagtaatccacctgtggcgaatatataaagcagtcatttctcagtcactggagaaatcatggagaaaatcaacgtgcaaacgaggctgaaaactattttaggccacattgcttgtatctgaccactggcgaaacaatcgctttactttctgcacttgccaagatgacaaaaccctaaatggatt

SEQ ID NO: 317929 - DNA, 409 bp, Zea mays
cgcaattccgggctacgcgtacgagctgttgcagatcctattgacacaaccatctgactctctaccttcatttttttgcggtttttgggttgcctgtgaggtgttgttgttcctgagtatcttgtcaggtaacatgatatttcatatttactcttggaaataatagcttttgtatatggtgaaccatgcacaattaaacatagtggctgggggaggtgttcttatttctgaattgattcaagacatcgatactcccttagccaagggtgaaagggctataaagccaagaagacgaagaagggtgaagaattcaggttttcggaagcaatagtgaagactattttttggcttctctttgcaatatgctttattgggattggatcctcgatcactgctattaataatctaa

SEQ ID NO: 317930 - DNA, 231 bp, Zea mays
tctacctcattccaaaaacgggttctgtaaccattgacatttctccttatcaccgactctcgaacaaattcacataatacttcaaatccactctcagaaacttaagacatacaataccaagcaccatacacaaccaaaccatactcccaaagtcaagcctccctactctactatggactcactaaccactgatacccatatacaatgacactacatcccaattactcaaca

SEQ ID NO: 317931 - DNA, 417 bp, Zea mays
agaccaactagcaacatagaaagcacaatagtgtaccaacaatggcagccaaaatatggtgcctccttatgctccttggtctttctgcaagtgctgctacggcgaccattttcccgcaatgctcgcaagctcctatagcttcccttcttcccccgtacctctcaccagcggtgtcttcggtatgtgaaaacccaattcttcaaccctacaggatccaacaggcaatcgcagctggcatcttacctttatcacccttgttcctccaacaatcatcagccctattacaacagttacctttggtgcatttattggcacaaaacatcagggcacaacaactacaacaacttgtgctagcaaaccttgctgcctactctcagcaacagcagtttcttccattcaaccaactaggttcattga

SEQ ID NO: 317932 - DNA, 213 bp, Zea mays
atgcgggaggctatacgcccagccacgcctatgatctgcaggacgctcagcgccagctcggtggcaggttgccgggggctgtgcctttctgtccaagatggtcattattgaccatggagacttctagcagcaattggcaccttgcattgttagctatgccttttctgatgctgttgctaacaaggaaggcatcccatcccaattggattgtac

SEQ ID NO: 317933 - DNA, 299 bp, Zea mays
cgacccacgcgttcgatgaagatagattggtagtgaggaacattacacgattagtggcacaagattatatttgaatagaaggattgtattttggtgagacaattctcatgttgcaagattagaggcaatatgggttcttcttgcttatgcttgtgcttacaacattaaactctaccaaatggatgtaaatgacgttttttctaaatgctaagattagtgaactagtgtatgtggagcaacctctcggttctgaggacccccaaagcatttccacatgttcaagctttctaaaccttcta

SEQ ID NO: 317934 - DNA, 89 bp, Zea mays
aaaaaaaaaaaaaaaaaaaaaaaaaaattaaaaaaaaaaaaaaaaaaaaaaaaaaaaaagaaaaaaaaaaaaaaaaaaaaaaaaaaaaa

SEQ ID NO: 317935 - DNA, 213 bp, Zea mays
cccactcgttcgcagactcattagaaaaaaaaaaaaaattaaaaattaaaaaaaaaaaaaaaaaaaaaaaagaaaagaaaaaaaaaaaaaaaaaaaaaaaaaataaaaaaaaaaaaaaaaaaaaataaaaaaaaaaacaaaaaaaaacaacacaaaaaaaaaaaacataaaaaaaaaaaaaaaaaacctaaacaaataaaaaaaaacaataat

SEQ ID NO: 317936 - DNA, 313 bp, Zea mays
gctgcattgaactctgtttcttttttgcaacaacaactaccattcagggatcggtctactgtctaccccgagcaactacttccattcaaccaactggcagcattgaactctgctgcttatttacaacaacagcaactaccaccattcagccagctagctgatgtgagccctgctgccttcttgacacagcaacagttgttgtccttctactcgcacgcttctcctaacgctagcaccctcttacaactgcaacaattgctaccattcaaccaacttgctttgacaaacccagcaggcgtctaccaacaaccca

SEQ ID NO: 317937 - DNA, 407 bp, Zea mays
gttctagatcgcgagcggcgcccttttttttttttttttttttttactcgtaagtcgtgacacagttattcgtggatatatatacctcatatatactcgtagagcagatgttgctacgcgttagcacctgtactctcagtccggtaggagtaggacgtaggacctcacccgacatactcgatcccgacgccaccaacagttaccatgtccccggcgcacctcggcacgagcgacacgatgatcgtcttgtccccgtcagcaccgatgtcgtcgagcaggtcgcatatgccgaacctcgccacggtcttcaccgtgcccttgcccttcccaggccggaccgcgtgcggcgtcagcgccacgctccccgcgcactgcgccgccgccggcattgccgccccgctctggga

SEQ ID NO: 317938 - DNA, 206 bp, Zea mays
atgacacaaagccttgactgaagctgtcttgttcaactgaaaatgtacacattgttaagatctgttgaatctgtttcttgacctcccaccataatcaagatcatcactgaattttttactaaagagccaaggcaaaccatgaatgcaactgagtgtgttgcacaacgatgtgctcttcaatatgctattctcagtcccactttcaa

SEQ ID NO: 317939 - DNA, 314 bp, Zea mays
cggacgcgtgggaaaaaaaaaaaaaaataaaaaaaaaaaaaaaaaaaaaaaaaaaaaagaaaaaaaaaaaaaaaaaaaaaaaaaaaaaaaaaaaaaaaaaaaaaaaaaaaaaaaaaaaaaaaaaaaaaaaaaaaaaaaaaaaaaaaaaaaaaaaaaaaaaaaaaaaaaaaaaaaaaaaaaaaaaaaaaaaaaaaaaaaaaaaaaataaaaaaaaataaaaaaaataaaaaatatagaaaaaaaataaaaataataaaatttaatgatattaaaaaaaaataattttttaaaaatttaaaaaaagagggaggggg

SEQ ID NO: 317940 - DNA, 419 bp, Zea mays
cccttgttgattcaacaatcgccagccctatctttggtgcagtcattggtacaaaccagcaaggcacaacagctgcagcaactcgtgctacctctgatcaaccaagtagctctggcaaacctttctccctactctcagcaacaacaatttcttccattcaaccaactgtctacactgaaccctgctgcttatttgcagcaacaactattaccatttagccagctagctactgcctactctcagcaacaacaacttcttccatttaaccaattggccgcactgaaccccgctgcttatttgcagcagcaaatactactaccatttagccagctagctgcagcaaaccgtgcttacttcttgacacagcaacagttgctgcctttctaccagcagtttgcggctaaccccgcaaccctctt

SEQ ID NO: 317941 - DNA, 415 bp, Zea mays
atcagtttcttccattcaaccaactggctgcattgaactctgctgcttatttgcaagggcaattaccattcagccagctagttgctgcctacccccagcaatttcttccattcaaccaactagcagcattgaactctgctgcttatttacagcagcaacaactactaccattcagccagctagctgatgtgagccctgctgccttcttgacacaacaacagttgttgccgttctacctgcacgctatgcctaacgctggcaccctcttacaactgcaacaattgctgccattcaaccaacttgctttgacaaactcaacagtgttctaccaacaacccatcattggtggtgccctcttttagattgcttatgagttatagttcaataatgaagttttttggatgatgtttgtggc

SEQ ID NO: 317942 - DNA, 252 bp, Zea mays
gactgacaagcacagcaaggctcgtgagttcgcacacaccaagcaagcaggccagtagggcgcattcgggtcacagggtctccgtcgtttcccaacgcgctttccccggcgccatggccaggctggcgctagcgctcctactgctgctggccgtggcggcatccgcgtgggccggcgccggcgcgagccacctcgatctgggcctgggctttctatgctccggggaccgccggcgggaatgccgaggcacgg

SEQ ID NO: 317943 - DNA, 299 bp, Zea mays
ggcagccaaaatattttttctttttatgctccttggtatttctgcaagtgctggtacttcgaccattttgccgcactgctcacaagctcctatagcttcccttcttcccccgtacctctcaccagcggtgtcttcggtatgtgaaaacccaattcttcaaccctacaggatccaacaggcaatcgcagctggcatcttacctttatcacccttgttcctccaacaatcatcagccctattacagcagctacctttggtgcatttattggcacaaaacatcacgtcacagcgactacaac

SEQ ID NO: 317944 - DNA, 337 bp, Zea mays
  unsure (1)..(337): unsure at all n locations
acaatagtgtaccaactatgtttacncaaaatattttgcttccttatgctaagtggtctttctggaggtgctgctaccgcaaccattttcccacaatgctcacaagctcctatagcttcctttcttcccccatacctctcaccagcggtgtcttcagtatgtgaaaacccaattcttcaaccctacaggatccaacaggcaatcgcagcaggcatcttacctttatcacccttgttcctccaacaaccgtcagccctattacagcagttacctttggtgcatctgttggcacaaaacatcaaggcacaacaactacaacaacttgcgctaagaaacc

SEQ ID NO: 317945 - DNA, 83 bp, Zea mays
accatcttacaactacaacaattattaacctttacacaacttactctgacaaacccaacaacctcctaccaacaacacattat

SEQ ID NO: 317946 - DNA, 424 bp, Zea mays
gcacaatagtgtaccaacaatggcagccaaaatattttgcttccttatgctccttggggtttctgcaagtgttgctaccgcaaccattttcccacaatgctcacaagctcctatagcttcccttcttcccccatacctctcaccagcggtgtcttcaatgtgtgaaaacccaattgttcaaccctacaggatccaacaggcaatcgcaacaggcatcttaccattatcacccttgttcctccaacaaccgtcagccctattacagcagttacctttggtccatttggtggcacaaaacatcagggcacaacaactacaacaacttgtgctagcaaaccttgctgcatactctcagcaacatcagtttcttccattcaaccaactggctgcattgaactctgctgcttatttgcaacaacaatta

SEQ ID NO: 317947 - DNA, 183 bp, Zea mays
tagaatgtgactgatgtcgcttactacttttacacggacaccagtatcggtcccgtggtattaaacgccagggttagcctcaccactttactgtcgcccaacgacctgcttaacatgttccttatgtcataatgcaatagaatactcacatgaacacttctactcattagcacatatatcact

SEQ ID NO: 317948 - DNA, 418 bp, Zea mays
gacgccacgcgttcgcggacgcgtgggcaactagcaacatataaagctcaatagtgtaccaacaatggcaggcaaaagattttgcctccttatgctccttggtctttctgcaagtgctgctacggcgaccattttcccgcaatgctcgcaagctcctatagcttcccttcttcccccgtacctctcaccagcggtgtcttcggtatgtgaaaacccaattcttcaaccctacaggatccaacaggcaatcgcagctggcatcttacctttatcacccttgttcctccaacaatcatcaaccctattacaacagttacctttggtgcatttattggcacaaaacatcaaggcacaacaactacaacaacttgtgctaacaaaccttggtgcctactctcagcaacagcagtttctttca

SEQ ID NO: 317949 - DNA, 180 bp, Zea mays
cacgcattctaggtaagttagaccattcataaacagatcatttttactgaaagccaacgcaatgcacgaagggtttcaacagatagggtgcaaggactacgatgtactctatatggacaagctttacagatagcactgcaagaataagtcgcacaaacacaactacacacaccacattaa

SEQ ID NO: 317950 - DNA, 376 bp, Zea mays
tcgagaccaactagcaacatataaagcacattagtttaccaacaatggcagccaaaatagtttgggtccttatgctccttggtctttctgcaagtgttgctaccgcaaccattttcccacaatgctcacaagctcctatagcttcccttcttcccccatacctctcaccagcggtgtcttcagtgtgtgaaaacccaattgttcaaccctacaggatccaacaggcaatcgcaacaggcatcttaccattatcacccttgttcctccaacaaccgtcagccctattacaagagttacctttggtccatttggtggcacataacatcaaggcacaacaactacaacaacttgtgctagcaaaccttgctgcatactc

SEQ ID NO: 317951 - DNA, 349 bp, Zea mays
aaacacaccaagcgaagctacctatcaacgacttaacaacaatggctacgaagagattagccctccttgcgcttcttgccctttttgtgagcgcaacaaatgcgttcattattccacaatgctcacttgctcctagtgccattataccacagttcctccgaccagttacttcaatgggcttcgaacacctagctgtgcaagcctacaggctacaacaagcgcttgcggcgagcgtcttacaacaaccaattaaccaattgcaacaacaatccttggcacatctaaccatacaaaccatcgcaacacaccagcaacaacagttcctaccagcactgagccaactagatgt

SEQ ID NO: 317952 - DNA, 268 bp, Zea mays
tcgagcaagtcaacttgtggagggtgctttgaccacggcacatgcgatcactgatgcgcggaagcactatacctggtccgatctatctcgactatacctatgtatggcactactagtttgaacctcatgcccagctactgtagatctgatccagcattccttattctgcattgtctcctcattctacaagtgacttgtatgaatctcacggtcctaactgagaatctttgtgagcttgatccagatcctaagatcttgatcctaaaca

SEQ ID NO: 317953 - DNA, 396 bp, Zea mays
cccacgcgttcgcccacgcgttcggctgtatgctctctgcaagtatgcgcagagacggcagatagagaatccagtatataaatcgactcaattcactgaaaaaaaagcaagatgaattcattagctgacgacacaaaaacagctaaaaaaagaaaagctcttactcctctacaaggaccaacgtgctcgcccgcgctgccatcaccaagccaggtggaggacatcaacgaaacttctgaaaagcattatgcagccctaaataacaagatatcagcactggaaagcagaagagaaccaggaactatcacagatgcatcagattaattctgagttgggcttatgtcatggttacatctgcccatgtgtccctgaatgctgcatgccatataaactgca

SEQ ID NO: 317954 - DNA, 426 bp, Zea mays
gtgaaaacccaattcttcaaccctacttgatccaacaggcaatcacagcaggcatcggacctttatcacccttgttcctccaacaatcatcagccctattacatcaattacctttggtgcatttattggcacaaaacatcatggcacaacatctacaacatctcgtgctagcaaaccttgctgcctacgctcagcaacagcagttacctttggtgcaattgttggcacataacatcatggcacatcaactacaacaactcgtgctagcaaaccttgctgcctactctcagcaacagcagtttctgccattcaaccaactagctgcattgaactctgctgcttatttgcaacatcaacatctactaccattcagccagctagctgctgcctaccaccagcaatttcttccattcaaccaactggcag

SEQ ID NO: 317955 - DNA, 213 bp, Zea mays
tgtgcatctttatgaatagagtattctgctcagcataattttttaacccgctcgatacgatccattgaagaggtgacttttccaggattcatctactgcttctacataggtgcaccaagtgaactcatactggacattggaataggtgacataaaagccaattcatacttaaagtatatggagatctggaacaaattatgactccgaccgaca

SEQ ID NO: 317956 - DNA, 396 bp, Zea mays
gcaacatagaaagcacaatagtgtaccaacaatggcagccaaaatattttgcctccggatgctccttggtctttctgcaagtgctgctaccgcgaccattttcccgcaatgctcacaagctcctatagcttcccttcttcccccgtacctctcaccagcggtgtcttcggtatgtgaaaacccaattcttcaaccctataggatccaacaggcaatcgcagctggcatcttacctttatcacccttgttcctccaacaatcatcagccctattacagcagttacctttggtgcatttattggcacaaaacatcagggcacaacaactacaacaacttgtgctagcaaaccttgctgcctactctcagcaacagcagtttcttccattcaaccaact

SEQ ID NO: 317957 - DNA, 223 bp, Zea mays
ttaaaatctaaagcacttctacccatactgatctatatcttactacaatttcttaattgtcttaactacttataataagaacacattgtatttacatacatttctacttcatcttcaccaatatcagtaaccacctatatcatactcactatctatagcacgcaatactacttacactccctttcaacctcataattataatatacctttacataaattcaat

SEQ ID NO: 317958 - DNA, 192 bp, Zea mays
gtcagagtgagcaatgacctgaatgaacaattgaaatgaaaagaaaaaagtgttgtgccaaattaaaaaaaaaaaaaaaaaaaaaaaaaaaaaaaaaaaaaaaaaaaaaaaaataaaaaataaaaagaatccaaactcaaaaaaacgaacaaataactaaataatatatgaaatcaaaatacataaaactaa

SEQ ID NO: 317959 - DNA, 166 bp, Zea mays
ctgccattcaaccaacttgctttgacaaacctagcagtgttctaccaacaacccatgattggtggtgccctcttttagatttcttatgagttatagttcaataataaagttttttgtctgatgtttgtggcttcccagaaataagaaagtacatttctagattctg

SEQ ID NO: 317960 - DNA, 71 bp, Zea mays
ttccctctctacccactcttcctgctacattttccttgacatttttatttaacagcttacccctactataa

SEQ ID NO: 317961 - DNA, 199 bp, Zea mays
gttggtcaccaatctggttttgcagcatacattcatgaccgccttgcatgccagctgtctaggaggtcactctggtttaccagtaacataccatcgtctaaaagctatttttgcttgccctggtatgaagattcacataaatgaatatgtgcattcctatattatatgtcaacatgccaaacctgactccgttatatat

SEQ ID NO: 317962 - DNA, 260 bp, Zea mays
ctgagaaggaactaacattttatttagtgcagacaatccacagtatcaaaaggcatggcaaaatggacagtatcatcagcagaagtatccaaatgggcacggtagtgtacatcttcaaactgaactttcttcataaacagagattaatgactatatagctttgctataccagtcatctcatctttatcatggccctggaagagaaattcaaatcctagatacctgataatgaacatgatatgattgactcacttaaaatt

SEQ ID NO: 317963 - DNA, 122 bp, Zea mays
tcgcggactcctcggcggacgcatctgctgacgcttctgccgtcgcttaggaacccatcgttgctggtgccctctcttagattgcttatgagccatagctcaatcttaaagatttgctgctg

SEQ ID NO: 317964 - DNA, 206 bp, Zea mays
ttggtacagttatccttttcgtcttttagagggtgaacctcaaggagtgtgatgagttctcaagttctgttgcctgtggcttgatctgtggtgattgtatcttcactgtttattttttcattctgttaaaatttatttttttttttttttctttatttttactattaatctatttattactattaatatttatttatcttatttta

SEQ ID NO: 317965 - DNA, 222 bp, Zea mays
tcccactctacccatcttcctagcactcttcactctattcttctgatttacattttactcaatcatatcaactttaagactagcttaactattctcaatttcattataaactacatatcaatacataactacctctcctacctctacaatcataataaaatttccaacatatatacaatcctcaatcttactctctcatacatcctactatattaacattct

SEQ ID NO: 317966 - DNA, 392 bp, Zea mays
accttctgaaaccgtgtccgagaaattcccagtctcgaccaccgaagtggaaatgggggacaagtcagtggttgaggaagagctgactgtggcaaatgagagcaagatctcaccggtgaagtccaagcttccctacgaggctgatgaagaggaggaagtcgacgagtggcccgatgacgatgacgaccccaccgatgaggctggccaggcggcgggtgacaggactttgctagggcgggaggaggaggacgtatcgttcagtgatctggaggacgacgaggacgatgataggaggtagaaggggatgatgggcagtagccaagttggctaggggaagctcgtactatggtcccggcgcaaccacatgctggcttcattggagtaaggccgag

SEQ ID NO: 317967 - DNA, 115 bp, Zea mays
tcccactcttcctcccactctttcgaattaaaaaaaaaaaaaaaaaaaaaaagggaaaattaaaaaaaaaaaataaaaaaaaaaaaaaaaataaaaaaaaattttttaattaaaa

SEQ ID NO: 317968 - DNA, 243 bp, Zea mays
tctacccactcttcctactacttctagatctcgagcttccgcttttctttttctttccatttcttacttttcggcttggttctttttttggttttatatctccatcctatacatatatatctaaattctacattacaatgttccaaaaaaaatattaaaactttcaaattttaataaaatataattaacaaataataaaataattataaaaaattttaaaaaaatattaaactaaaaataata

SEQ ID NO: 317969 - DNA, 345 bp, Zea mays
tcaacaacttacaatccatgttatcataacaagccttctaacacttaggtgtagaactcttttcgtcatgagctccaacctgacatatatatttaaactctaattccaatgtcccaaacaacaaaacaaacatattaaacaaaaatacaaactaaaacactaacattaataaaaaaaacaataaaacaacaaaaaaatacaatattaaaaccaaaaaattaaacctacaaaaaccactaacaatccacctatcataatacctctatcaccctcaatcctgcaacaaacataacatcttataaataaactacctaactttaatttacatcccctctttattaaaac

SEQ ID NO: 317970 - DNA, 411 bp, Zea mays
caagaagtggacaattcatggcatcagagggatggcctttgaagaggttggctgtgggatctctttctggtcatgagctccaacctgtacatatatatgtaaattctagattccaatgtcccaaaaaaaaaaaaaaaaaaaaaaaaaaaaaaaaaaaaaaaaaaaaaaaaaaaaaaaaaaaaaaaaaaaaaaaaaaaaaaaaaaaaaaaaaaaaaaaaaaaaaaaaaaaaaaaaaaaaaaaaaaaaaaaaaaaaaaaaaaaggggggccctttttaaaggccccatctttactacccctggctggcaaatcaaaactttttttatagggcccccaaattacattcattggcccgctttttaaaaatgtcaaaatgggaaaaaccttggggtacccaacttaaatgccttgg

SEQ ID NO: 317971 - DNA, 388 bp, Zea mays
cccacgcgtccggcaacatataaagcacaatagtgtaccaacaatggcagccaaaggattttgcctccttatgctccttggtctttctgcaagtgctgctacggcgaccattttcccgcaatgctcgcaagctcctatagcttcccttcttcccccgtacctctcaccagcggtgtcttcggtatgtgaaaacccaattcttcaaccctacaggatccaacaggcaatcgcagctggcatcttacctttatcacccttgttcctccaacaatcatcagccctattacaacagttacctttggtgcatttattggcacaaaacatcagggcacaacaactacaacaacttgtgctagcaaaccttgctgcctactctcagcaacagcag

SEQ ID NO: 317972 - DNA, 321 bp, Zea mays
agatcacattatctgactcgctccatctactatggcaatagcctcctcaattctatgcatagtgcacattaaaaattatgaagctaactacaaagaatacaatgccatatgtcaaataatcacttttctagggcaatatagaacacatgagcttcatacatatgacctactggctattattggacagtcagttgaaagcgaaagtgcttcaatgctaatgtaggatcattttgctagcttatcaacttgttatttaagaagacggctcgactctctgcagaaagcttgtattatcataatgattatcgacacatatcttat

SEQ ID NO: 317973 - DNA, 108 bp, Zea mays
tggtatgcgtacacggtctccctctttctggctttagtagagtgagagtgattcatgtattagtagacaaggggaaatggtgaatgttgctcaagggatcgatgcggc

SEQ ID NO: 317974 - DNA, 406 bp, Zea mays
gaccgcttcagtatgtgaaaacccagcccttcaaccctacaggctccaacaagcaatggcaacaagcaacttacctttatcacccctgttctttcaacaatcgccagccctatctttggtgcagtcattggtacaaaccatcagggcacaacagctgcagcaactcgtgctaccagtgatcagccaagtagctctggcaaacctttctccctactctcagcaacaacaatttcttccattcaaccaactgtctacactgaaccctgctgcttatttgcagcaacaacaactactaccattcagccagctagctactgcctactctcagcagcaacaatttcttccatttaaccaattcgccgcactgaacccctctgcttatttccagcagcaaatactactacca

SEQ ID NO: 317975 - DNA, 395 bp, Zea mays
taaccaattaaaaataaaaaaaacaccattcctacaaccctacaaactccaacaagcaatgtcaacatgcaacttacctttatcacccctgttctttcaacaatcgccagccctatctttggtgcagtcattggtacaaaccatcagggcacaacagctgcagcaactcgtgctaccagtgatcagccaagtatctctggcaaacctttctccctactctcagcaacaacaatttcttccattcaaccaactgtctacactgaaccctgctgcttatttgcatcaacaacaactactaccattcagccagctagctactgcctactctcagcaacaacaatttcttccatttaaccaattcgccgcactgaacccctattcttatttccagcatc

SEQ ID NO: 317976 - DNA, 377 bp, Zea mays
  unsure (1)..(377): unsure at all n locations
attggaccaactagcaacatagaaagcacattagtgtaccaacaatggcagccaaagtattgtgcctccttatgctccttggtctttctgcaagtgctgctacggcgaccattttcccgcaatgctcacaagctcctatagcttcccttcttcccccgtacctctcaccagtgttgtcttcagtatgtgaaaacccaattcttcaaccctacaggatccaacatgcaattgcatcaggcatcttacctttatcacccttgttcctccaacaatcatcagccctattacagcagttacctttggtgcanttattggcacataacatcagggcacaacaactcgtgctagcaaaccttgctgcctactctcagcaacaa

SEQ ID NO: 317977 - DNA, 422 bp, Zea mays
ccgataccttccatcaatgatagcttcagtatgtgaaaacccatctcttcaaccctggaggcgccaacaagcaatcgcatcatgcaacatacctttatcacccttgtttcaacaatcgccagccctatctttggtgcagtcattggttcaaaccatcagggcacagcagctgcagcaactcgtgctacctgtgatcaaccaagtagctctggcaaacctatctgcctactctcagcatcaacaatttcttccattcaaccaactgtctacattgaaccgtgctgcttatttgcagcaacaactattaccattcagccagctagctactgcctactctcagcaacaacaacttcttccatttaaccaattggccgcactgaaccccgctgcttatttgcagcagcaaatactactaccattta

SEQ ID NO: 317978 - DNA, 331 bp, Zea mays
agcaacatagaaagcacaatagtgtaccaacattggctgccaaaatattttgcctgcgtatgctccttggtctttctgcaagtgctgctacggcgaccattttcccgcaatgctcgcaagctcctatagcttccattcttcccccgtacctgtcaccagcggagtcttcggtatgtgaaaacccaattcttgaaccctacaggatccaacaggcaatcgcagctggcatcttaccttgatcacacttgttcctccaacaatcatcagccctattacaacagttacctttggtgcatttattggcacaatacatcatggcatcatcaactac

SEQ ID NO: 317979 - DNA, 387 bp, Zea mays
cccacgcgttcgcccacgcgttcggccacgcgtccgattgagaccaacaagcgacatagaaagtggaatccagtagcaacaatagagcaacaatggcgaccaagatattttccctccttatgctacttgctctttctgcatgtgttgctaacgcgacaattttgcctcaatgctcacaagctcctatagcttaccttcttccaccataccttacatcaatgatagcttcagtatgtgaaaacccagctcttcaaccctataggctccaacaagcaatcgcagcaagcaacatacctttatcacccttgtttcaacaatcgccagccctatcttttgtgcaatcattggtacaaaccatcagggcacagcagctgcagcaactcgtgc

SEQ ID NO: 317980 - DNA, 58 bp, Zea mays
aaaaaaaaaaaaaaaacaaaaaaaaataaaaaataaaaaaaaaaaaaaaaaaaaaaag

SEQ ID NO: 317981 - DNA, 312 bp, Zea mays
gtcaacgtccgcaaatacctccagcctcgcatggaacatcatagaaactcaaaactggtagggccaacagattaacattcttcatcaacatatttttcgtctttaatctcatagctatttctgcatgcgttgcttacgctacaaatcagccttaatgctcacaacctcatatagcttacctaatagcgagatacctcttatcaatgatagcttacattattctaaaacccagcttttcatccatataggctacatccatccacttcatcacgcaacatacctatatcacccttcttgactcaactataatca

SEQ ID NO: 317982 - DNA, 378 bp, Zea mays
agctactgcctactctcagcaacaacaacttcttccatttaaccaattggccgcactgaaccccgctgcttatttgcagcagcaaatactactaccatttagccagctagctgcagcaaaccgtgcttccttcttgacacagcaacagttgctgcctttctaccagcagtttgcggctaaccccgcaaccctcttacaactacaacaattgttgccctttgtccaacttgctttgacagacccagcggcctcctaccaacaacacatcattggtggtgccctcttttagattgcttattagttgtaattcaataataaagttttttggatgatgtatgtggccaaccagaaataagaagttacatttccagattctat

SEQ ID NO: 317983 - DNA, 423 bp, Zea mays
gcgatacaaatcaaatatattgaagacggtgatgaaatcagaaagtactttgctgcgttggaccttcttgacgacttctccgttgcagtcattgttgatgattttgcagatttcttctccgacaggtgttatttccattctgtcttgtgatgctaatgacacttatccacaacttgttgacttcatgccatggcatgcaaatcaggttcagcattttgttacttaaataaacacactaatgggagcaaccttcaaatgcgccctttcttcttctggctaacttcagatgatggatttgagatagctgaaaatagagattctgatctgcaactgccatgagttgatgatgctatataatcggtcatttgcacagattacttgagtcaaatattgtctcatggctcaccatatttcatttacgat

SEQ ID NO: 317984 - DNA, 385 bp, Zea mays
agttcttcgcatcagctggtgtttcgctaccttatcgccctccgactgctggtgggctgtcggcaccggcgcctccaaactccatgtgctgaggcctacgccagtgtcttctacgactacgagcacgttctatcaccaaacatgatgtctgaaagaagtcaacatgctgaaccatagatcgataacctcagtaaatgttaccatgcagtcctcataggaaggatccacgatgatgacctggatgtctcaaatttggaattcgttaaaacagcttttaccttgaccatgtgaaagctggtaacttgaatggttacacgtaccttttctttgagactagggtagctattatagaatcttccttatgctcatacttctgcgccttttc

SEQ ID NO: 317985 - DNA, 345 bp, Zea mays
  unsure (1)..(345): unsure at all n locations
accggttctcggaannntcccggcgtcgacccaacgcgtcgcgccgcacgccgtctcgtcccccgcgaatccaatttcagctctngccgccgctgccgtcagcaaggcaggggagcgagcaaggggatgccgtngctggccacgngtngctgcgcnntcgcggacccgcgcgacnnctgttcgcgccgcnctccttccgcaagaaagggggctacatnncccgctcaaccaacctaacctnnccgcacctaccaagaatcggcgaactacgtnncgacgtcaaagggtgaaccggcnngccgtccccacaagggggaatnngccgcacannagttctaaaccacg

SEQ ID NO: 317986 - DNA, 412 bp, Zea mays
aacacaccaagcgaagcgcactagcaacgacctaacaccaatggctaccaagatatgagccctccttgcgcttcttgcccttttagtgagcgcaacaaatgcgttcattattccacagtgctcacttgctcctagtgccattattccacagttcctcccaccagttacttcaatgggcttcgaacatccagccgtgcaagcctacaggctacaactagcgcttgcggcgagcgccttacaacaaccaattgcccaattgcaacaacaatccttggcacatctaaccctacaaaccattgcaacgcaacaacaacaacaacagtttctgccatcactgagccacctagccgtggtgaaccctgtcacctacttgcaacagcagctgcttgcatccaacccacttgctctggcg

SEQ ID NO: 317987 - DNA, 342 bp, Zea mays
gcatagccatcttcttcgtcgacaagcttgggagttaggtctcacatgcatgcttcagcacagtgttgactgcataacgaaacacattgtcgtcggatcggagatgatgagttctgtcgtctgtgatgcttatgccttcaattgggcttttctttgcttcggtgttctggtctcgtctgggtttcagactccagatttggagcataagacaccggtccttggtttccttgccgccttgccggctgcaatgttatggcgcttgcggtgttatgtatagcctgaattctgtgatgacggtgaagttctcgttgttgggaaattttttctgtgctttctcttttc

SEQ ID NO: 317988 - DNA, 434 bp, Zea mays
agtgagaccaactagcacatagaaagcacaatagtgtaccaacaatggtagccaaatattgtgcctccttatgctccttggtctttctgcaagtgctgctacgacgaccattttcccgcaatgctcacaagctcctatagcttctcttcttcccccatacctctcaccagcgttgtcttcagtatgtgaaaacccaattcttcaaccctacaggatccaacaggcaatcacagcaggcatcttacctttatcacccttgttcctccaacaatcatcagccctattacatcaattacctttggtgcatttattggcacaaaacatcagggcacaacaactacaacaactcgtgctagcaaaacctgctgcctacgctcatcaacaagcagtacctttggtgcatttgttggcacaaaacattatggcacaacaac

SEQ ID NO: 317989 - DNA, 379 bp, Zea mays
  unsure (1)..(379): unsure at all n locations
ccgcacgcgtccgccagagcgcagaagaacccgatcgacaccatgagggtgttgctcggtgggctcgctctcctggctctcgctgcgagcgccacctccacgcatacaagcggcggctgcggctgccagccaccgtcgccggttcatctaccgccgccggtgcatctgccacctccggttcacctgccacctccggtgcatcttccaccgccggtccacctgccgccgccggtccacctgccaccgacggtccatgtgccgccgccggttcatctgccgacgccaccatgccactaccctactcaaccgtcccggcctcagtctcatccncagccacacccatgcccgtgccaacagccggattccagcccgtgccagc

SEQ ID NO: 317990 - DNA, 405 bp, Zea mays
cccacgcgtacgcccacgcgttcgcccacgcgtccgcaactagcaacatagagagcagaatagtgtaccaacaatggcagccaaaatattttgcctccttatgctccttggtctttctgcaagtgctgctactgcgaccattttcccgcaatgctcgcaagctcctatagcttcccttcttcccccgtacctctcaccagcggtgtcttcggtatgtgaaaacccaattcttcaaccctacaggatccaacaggcaatcgcagctggcatcttacctttatcacccttgttcctccaacaatcatcagccctattacaacagttacctttggtgcatttattggcacaaaacatcatggcacaacaactacaacaacttgtgctagcaaaccttgctgcctactc

SEQ ID NO: 317991 - DNA, 407 bp, Zea mays
cggacgcgtgggcggacgcgtgggtagcaacatagaaagcacaatagtgtacgaacgagtggcagccaaaatattttgcttccttatgctccttggtctttctgcaagtgttgctaccgcaaccattttcccacaatgctcacaagctcctatagcttcccttcttcccccatacctctcaccagcggtgtcttcaatgtgtgaaaacccaattgttcaaccctacaggatccaacaggcaatcgcaacaggcatcttaccattatcacccttgttcctccaacaaccgtcagccctattacagcagttacctttggtccatttggtggcacaaaacatcagggcacaacaactacaacaacttgtgctagcaaaccttgctgcatactctcagcaacatcagtttc

SEQ ID NO: 317992 - DNA, 423 bp, Zea mays
ccgacgcgtccgattaagaccaactagcaacatagaaagcacaatagtgtaccaacagtggcagccaaaatattttgcttccttatgctccttggtctttctgcaagtgctgctaccgcaaccattttcccacaatgctcacaagctcctatagcttcctttcttcccccatacctctcaccagcggtgtcttcagtatgtgaaaacccaattcttcaaccctacaggatccaacaggcaatcgcagcaggcatcttacctttatcacccttgttcctccaacaaccgtcagccctattacagcagttacctttggtgcatttgttggcacaaaacatcaaggcacaacaactacaacaacttgtgctaggaaaccttgctgcctactctcagcaacagccagttcttccattcaaccaactg

SEQ ID NO: 317993 - DNA, 358 bp, Zea mays
ccatgcagccttctcctaccactgaacatcataatctctttcgagagcatctaccaagagcgcggtcttcctagtgcaagctccatatagtattgacaactgtcgaccaccgatgattatgtcctcagactgcacacatccaactcaaccacttcatcgaccactacttcgacaaccaaccataagtccttcattgcaaaatcatcctgtatcctgacacgcaaatgatccgcatcttaggctttactaccatctgcacatatgatgtgattcaggacgctatccaggtcattaaccccactgaactgaacagtctcatcatcaacgttgacatggcccacatccgcctttatcatct

SEQ ID NO: 317994 - DNA, 231 bp, Zea mays
gcgcccactcttcacgaccacgcgttcgatggtcttgccgagcatgatgttgcataggatggtgccacatatgtcactgccactccttcttgcagatcatgctgcaacaataattaccatctatgaataaccaaattgccatgactaatctacccatgctcttacaggaacatttaccattagctgcatattagatagatatatttgtgtcgtaccaaataatagatttga

SEQ ID NO: 317995 - DNA, 421 bp, Zea mays
cccacgcgtccgtcttcccacaggtctgttcacaaattgcagctcagcgtgcagccgatcctgaccttgataaactatatattacaaaagtgagtagctctataggtcctgcttatgagatttttatggatattttttattacactcgtaatggttgtttccatttggcttttttgtcaaagttcatgaagaaattgtttcttatgcctagcaaacgcttcaaatgcaaggaaatggttagttgagggtcataccgatggtgctcttttaagttatgcagttgctgcctcaagctttctgcctccctttgccagagctagtaagattggaaaagctttcaattaattaacataaatgagagtgactggacaaccatatgatctctactttagagtagggactacaactacaacgaaaagaa

SEQ ID NO: 317996 - DNA, 424 bp, Zea mays
tgagaccaactagcaacatagaaagcacaatagtgtaccaacaatggcagccaaagagattgtgcttccttatgctccttggtctttctgcaagtgctgctaccgcaaccattttcccacaatgctcacaagctcctatagcttcctttcttcccccatacctctcaccagcggtgtcttcagtatgtgaaaacccaattcttcaaccctacaggatccaacaggcaatcgcagcaggcatcttacctttatcacccttgttcctccaacaaccgtcagccctattacagcagttacctttggtgcatttgttggcacaaaacatcaaggcacaacaactacaacaacttgtgctaggaaaccttgctgcctactctcagcaacagcagtttcttccattcaaccaactggctgcattgaactc

SEQ ID NO: 317997 - DNA, 406 bp, Zea mays
aatattttgagcattcagaaacacactaagcgaagcgcactagcaacgacctaacaggaatggctaccaagatattagccctccttgcgcttcttgccctttttgtgagcgcaacaaatgcgttcattattccacaatgctcacttgctcctagtgccattattccacagttcctcccaccagttacttcaatgggcttcgaacacctagctgtgcaagccaacatgcaacaacaagcgcttgcggcgagcgtcttacaacaaccaattgcccaattgcaacaacaatccttgccacatctaacaatacaagccatcacaacgcaacagcaacaacagtttctaccagcactgagccacctagccatggtgaaccctgccgtctacttgcaagagcagctgcttgc

SEQ ID NO: 317998 - DNA, 384 bp, Zea mays
caccaagcgaagcacattagcaacaacctaacaacaatggctaccaagatattatccgtccttgcgcttcttgcgctttttgcgagcgcaacaaatgcgttcattattccacaatgctcacttgctccaagttccattattacacagttcctcccaccagttacttcaatgggcttcgaacacccagctgtgcaagcctataggctacaacaagcaattgcggcgagcgtcttacaacaaccaatttcccagttgcaacaacaatccttggcacatctaacaatacaaaccatcgcaacgcaacagcaacaacaattcctaccagcactgagccacctagccatggtgaaccctgccgcctacttgcaacagcagttgcttgca

SEQ ID NO: 317999 - DNA, 199 bp, Zea mays
ctgctatactatactctaggaagcaaggacaccaccgccatggcagccaagatgcttgcattgttcgctctcctagctctttgtgcaagcgccactagtgcgacccatattccagggcacttgccaccagtcatgccattgggtaccatgaacccatgcatgcagtactgcatgatgcaacaggggcttgccagcttga

SEQ ID NO: 318000 - DNA, 405 bp, Zea mays
  unsure (1)..(405): unsure at all n locations
cggacgcgtgggcggacgcgtgggaatctttgcgcgctnccctgctaccgggccgcgcttggcactccccatccccggctttcttcttgcaacagaacccagcattttcacacgttggcattgacacgtaccccagtgccacgcccgaggtcgaccgagcaagcttggcagaagccgttcgagcaccggcggcgcccgcgttccacagtgcatcttcggctgtggcgaaccggaccatgggcgcggaccgcgtgggtcaaggtctctagtcaggttgactcgatagataaagattctttctcttctgactcgagaccaagatcaggttgattcgagagacaaagatttttttctcctctgacgagacaaagattctttctcctcgtccagatagtgatgtctgga

SEQ ID NO: 318001 - DNA, 249 bp, Zea mays
tcgggtctcgctcaccaagccaccactacttcacttcacaccacaccaccgtcagcatccgctcgctagccaagtacactaaggccttttctacagcgctgaaccgtgcgctccaacttctcgccgcctgcgccgatgcgttcaagccagcttctcgtgtattccatgccaacggcctcaatacaatgcaatggcatggccactaggagccatactacatccatgccaagcacatgcataactcgcaca

SEQ ID NO: 318002 - DNA, 422 bp, Zea mays
cccacgcgtccgcccacgcgtccgcccacgcgtccgcccacgcgtccgcccacgcgtgcgggagagttctggtgctatttgcacatatatcctctctatacacttgtaaaacactgacaattctgtatttgtatgaagtatatcataacttacaaacgttgttattccccagctacactacttgtctgttgtatattttttttttttctcgaaagcgcaggagaactgcgcgatattatattaagcatataggggtttctttttgggatcttctgagtttgagccttttcatagaatatggaaatcttgggctcctccaaaaaccaagttttttatgtggttggtcgcacacaggaaggtttggacggcagatagactgcagaaaaggggtatggaccatccaaagagatgtccactatgtg

SEQ ID NO: 318003 - DNA, 233 bp, Zea mays
aacctatagcctactatcaacaacagctccttgcatgcaaatcactcaccatgacaaactttcctatatcccaacatcaacaacagttataacaaattctaccacagatcactcactttgtcatccacaaccctattgactacctacaacagcatcaacaccttctatctacccaactcgatatcaacaatatacctacaaacatacaacaactgttcttacaacaacacctt

SEQ ID NO: 318004 - DNA, 394 bp, Zea mays
ccgacgcgtccgcggacgcgtggggccctcagtcctccagccacttgagcctcctaagacagtcgcatttcacccgttcatcttctcggagcttctcaacaagatggtgcgtcaccgcaatcctttggtggtggagttcatcagtgactccgacgaaatctaggaggaatcgcctgttccttctcctgcgtctcatcgatctctctccaagagaggactaggctctggccgtttggaaggggagggaccctcgatgccctcgcaacccgcgcgccaggggcgtcaaaaggttggcgccactcgttctcgccaaagcaccttctccgcttgatacccttcatgccaggaggaggatggagcgttcgacgactaggtctaacttccatctttcgac

SEQ ID NO: 318005 - DNA, 435 bp, Zea mays
  unsure (1)..(435): unsure at all n locations
gcaacatagaaagtggaatccagtagcaacaacagagcaacaatggcgaccaagatagtgttccctccttatgctccttgctctttctgcatgtgttgctaacgcgacaattttccctcaatgctcacaagctcctatagcttcccttcttcccccataccttccatcaatgatagcttcagtatgtgaaaacccagctcttcagccctataggctccaacaagcaatcgcagcaagcaacatacctttatcacccttgttgtttcaacaatcgccagccctatctttggtgcagtcattggtacaaaccatcagggcacagcagctgcagcaactcgtgctacctgtgatcaaccaagtagctctggcaaacctttctccctactctcagcaacaacaatntcttccattcaaccaactgtctacactgaaccc

SEQ ID NO: 318006 - DNA, 437 bp, Zea mays
catataaagtggaatccattagctacaacagagcaacaatggctaccaggatagtttccctccttatgctccttgctctttctgcatgtgttgctaacgcgacaattttccctcaatgctcacaagctcctatagcttcccttcttcccccataccttccatcaatgatagcttcagtatgtgaaaacccagctcttcagccctataggctccaacaagcaatcgcagcaagcaacatacctttatcacccttgttgtttcaacaatcgccagccctatctttggtgcagtcattggtacaaaccatcatggcacagcatctgcagcaactcgtgctacctgtgatcaaccaagtagctctggcaaacctttctccctactctcagcaacaacaatttcttccattcaaccaactgtctacactgaaccctgcttct

SEQ ID NO: 318007 - DNA, 388 bp, Zea mays
gatcagcaaagcggcagtgcgtagagaggatcgtcgaacagaacagcatgaagatgggcatcgttctcgtcgtgtgcctggctctgtcagctgccagcgcctctgcaatgcagatgccctgcccctgcgcggggctgcagggcttgtacggcgctggcgccggcctgacgacgatgatgggcgccggcgggctgtacccctacgcggagtacctgaggcagccgcagtgcagcccgctggctgctgcgccctactacgccgggtgtgggcagccgagcgccatgttccagccgctccggcaacagtgctgccagcagcagatgaggatgatggacgtgcagtccgtcgcgcagcagctgcagatgatgatgcagcttgagcgtgccgc

SEQ ID NO: 318008 - DNA, 421 bp, Zea mays
  unsure (1)..(421): unsure at all n locations
gcggcagtgcgtagagaggatcgtcgaacagaacagcatgaagatggtcatcgttcgcgtcgtgtgcctggctctgtcagctgccagcgcctctgcaatgcagatgccctgcccctgcgcggggctgcagggcttgtacggcgctggcgccggcctgacgacgatgatgggcgccggcgggctgtacccctacgcggagtacctgaggcagccgcagtgcagcccgctggcggcggcgccctactacgccgggtgtgggcagacgagcgccatgtaccagccgctccggcaacagtgctgccagcagcagatgaggatgatggacgtgcagtccgtcgcgcagcagctgcagatgatgatgcagcttgagcgtgccgctgncgncagcagcagcctgtacgagccagctctgatgcagcag

SEQ ID NO: 318009 - DNA, 251 bp, Zea mays
aaaaaaaaaaaaaaaaaaaaaataaaataaaaaaacaaataaaaaaaaaaaaaaggaagaaaaatacaacatctttcaaaattccaaaaaataaaaaaacaacaaaaaaaggtcttccattttatatgatccaaccttcattactcttacatccactttattacctaccttatatcttcaccaaactcaaattcatttccccttatttaacaatttcctcattgacaaaacccttgatttccccaactaaa

SEQ ID NO: 318010 - DNA, 372 bp, Zea mays
cccacgcgtccgcccacgcgtccgctcgtagagagaaggaaaaatatccccagaccctagctcccgatctcgatggcgaaccctcgcgtcttcttcgacatgaccgtcggcggcgccccggcgggccggatcgtgatggagctgtacgccaacgaggtgcccaagaccgcggagaacttccgcgcgctgtgcacgggcgagaagggcgtgggcaagtccgggaagccgctccactacaagggctccaccttccaccgcgtcatccccgagttcatgtgccagggcggcgacttcacccgcggcaacggcaccggcggcgagtccatctacggcgagaagttccccgacgagaagttcgtgcgcaagcacacc

SEQ ID NO: 318011 - DNA, 401 bp, Zea mays
  unsure (1)..(401): unsure at all n locations
cagctcttcaaccctataggctccaacaagcaatcgcagcaagcaacatacctttaggacccgggtttcaacaatcgccagccctatctttggtgcagtcattggtacaaaccatcagggcacagcagctgcagcaactcgtgctacctgtgatcaaccaagtagctctggcaaacctttctccctactctcagcaacaacaatttcttccattcaaccaactgtctacattgaaccgtgctgcttatttgcagcaacaactattaccattcagccagctagctactgcctactctcagcaacaacaacttcttccatttaaccaattggccgcactgaaccccgctgcttatttgcagcagcaaatactactaccatntaaccagctagctgcagcaagc

SEQ ID NO: 318012 - DNA, 392 bp, Zea mays
cggacgcgtggggcaacatagaaagcacaatagtgtaccaacaatggcagccaaaatggtttgcttccttatgctccttggtctttctgcaagtgctgctaccgcaaccattttcccacaatgctcacaagctcctatagcttcctttcttcccccatacctctcaccagcggtgtcttcagtatgtgaaaacccaattcttcaaccctacaggatccaacaggcaatcgcagcaggcatcttacctttatcacccttgttccttcaacaaccgtcagccctattacagcagttacctttggtgcatttgttggcacaaaacatcaaagcacaacaactacaacaacttgtgctaggaaaccttgctgcctactctcagcacagcagtttct

SEQ ID NO: 318013 - DNA, 372 bp, Zea mays
gcgaatactactaccatttagccagctagctacagcaagccgtgcttccttcttgacgcaacgacagttgctgccgttctaccagcagtttgcggctaaccccgcaaccctcttacaactacaacaattgttgccctttgtccaacttgctttgacaaacccagcagcctcctaccaacaacacatcattggtggtgccctcttttagattgcttattagatgtaattcaataataaagttttttggatgatgtatgtggccaaccagaaataaaaagttacatttccaaaaaaaaaaaaaaaaaaaaaaaaaaaaaaaaaaaaaaaaaaaaaaaaaaaaaaaaaaaaaaaaaaaaaaaaaaaaaagggcgg

SEQ ID NO: 318014 - DNA, 439 bp, Zea mays
  unsure (1)..(439): unsure at all n locations
cccacgcgtccgcccacgcgtccgcggacgcgtgggctcgagtccaagatcagcctggatcgggagacgcagaggtcccgcggcttcggcttcgtcaccttctccacggaggaggcgatgcggaacgccatcgagggcatgaacggcaaggagctggacggccgcaacatcaccgtcaacgaggcccagtcccgcggcggccgtggaggcggcggcggcggctacggtggtggccgtggaggcggcggctacggcggtggcgggcgccgtgatggcggcggcggctacggcggtggcggcggcggctacggtggcggcggtggctacggtggtggtggtggcggctacggcggtggcaaccgtggcggcggctacggcaactncgacgggaactggaagaactgagcggtggggcccgcgctggcaagttatcctgttc

SEQ ID NO: 318015 - DNA, 97 bp, Zea mays
aagttaagtttcatttttagtttttttttttaatctattttttttttttttattttataattctcaacatctactataccattttttcccttttttt

SEQ ID NO: 318016 - DNA, 505 bp, Zea mays
  unsure (1)..(505): unsure at all n locations
cgtnctcgagcgcagctanngctactgcnctnnactctcaactnnnacaacaacntntgcttcccatttttaacnncagattggggcnnngcactgannnaccccgnnctgcttaaatttgcagcnanngcaaatacctttactaccanntttagccagcttanngctacagcaannngccgtgccttnnccttctnntgacacnnaacaacangnnttgctgcnncgttctaaaccagcagtnnttgcggctttaaccccnnngcaaccctttcttacccaactacccaacaattnnngttgcccttttggtcnccaacttggcnntttgacanannacccagnncagcctcctttaccaaccaacccacatcattgnngtggtgcccttcttttagaattggcttaattagatgtnaattcaatananntaaagttttttgggatgaaatgtatgtggccatannncagaaataaaaaggttacaaatttccagaattcttaa

SEQ ID NO: 318017 - DNA, 444 bp, Zea mays
accaactagcaacatagaaagcacaatagtgtaccaacaatggcagccaaaatattttgcttccttatgctccttggtctttctgcaagtgctgctaccgcaaccattttcccacaatgctcacaagctcctatagcttcctttcttcccccatacctctcaccagcggtgtcttcagtatgtgaaaacccaattcttcaaccctacaggatccaacaggcaatcgcagcaggcatcttacctttatcacccttgttcctccaacaaccgtcagccctattacagcagttacctttggtgcatttgttggcacaaaacatcaaggcacaacaactacaacaacttgtgctaggaaaccttgctgcctactctcagcaacagcagtttcttccattcaaccaactggctgcattgaactctgctgcttatttgcaacaacaacta

SEQ ID NO: 318018 - DNA, 400 bp, Zea mays
cggacgcgtgggttcttttttcctatttatttttatgagcgatttttctctttttggggtgttttaatttctttttttttgcccccaaaacaaaatcaattgtttcaattatatcgactctaccaaaacatttgccttcacgatataaaaataactaaattgtatttcctaataacccattaagtcttctaaaaacttgatgggaacacatctgagactccggccaccattttatggaaagagaccgctaaaaccatttcttataacaacccattgtgcaaaacgtcccttaaaaacttgaccaagaactacttgtttaaacgcaccaagcttaattacctactcatgcgaactgacaacttttacataggcgtccataaactcaattacttggacattg

SEQ ID NO: 318019 - DNA, 434 bp, Zea mays
ctccttggtctttctgcaagtgctgctacgacgaccattttcccgcaatgctcacaagctcctatagcttctcttcttcccccatacctctcaccagcgttgtcttcagtatgtgaaaacccaattcttcaaccctacaggatccaacaggcaatcacagcaggcatcttacctttatcacccttgttcctccaacaatcatcagccctattacatcaattacctttggtgcatttattggcacaaaacatcagggcacaacaactacaacaactcgtgctagcaaaccttgctgcctacgctcagcaacagcagttacctttggtgcaattgttggcacaaaacatcagggcacaacaactacaacaactcgtgctagcaaaccttgctgcctactctcagcaacagcagtttctgccattcaaccaactagc

SEQ ID NO: 318020 - DNA, 103 bp, Zea mays
aaaaaaaaaaaaaaaaaaaaaaaaaaataaaaaaaaaaaaaaacaatataaaaaagggcgagcttaaaaacacaaacatacaacataataaaatcaactatga

SEQ ID NO: 318021 - DNA, 345 bp, Zea mays
aaaaaaaataaataaatataaaagtaattaaaaaacaaaaaaacaaaaaaaaaaaaaaagaaaaaaaaaaaaataaaaaaaaataaaaaacaaaaaaaacaaaaataaaaaaggggccgccctttttaaggttccaatctttctaacgcaattgttcaaagtcttaattttcctattggtgaacctaatttcaattccctggtccttttttaaaaacttggttactggaaaaaccttggcattaccaatttaaacttccttccagaaaatacccttttaaacatttggcttaatatctacaaggccctacccgatctcctttacaacaagtatcccatcctgaat

SEQ ID NO: 318022 - DNA, 85 bp, Zea mays
ccacgcgtacgctttccaaaaattaataaagtacatttctagaaaaaaataccaagagataaggcctacttgaacttcttagagc

SEQ ID NO: 318023 - DNA, 359 bp, Zea mays
ccagaaagtaactgaggagtgataaaacgacaattttgagcttcaacgctttgctaggttggcaaaaaacttaaagcaacagagtgttcaagctaatgttttggtgctagaaaaggctttaatgcatcaggcttgtgttcctgtgttggataatgcttagagaagtttagcagtgataatgcttcactattcgaaaatcagtaaaaagtttagaccatttatgtgacatttttggatagttcctatgttgtgttgcaaccattaactatattaactgtatattttcacatggtgggacagatagaggacttcatagtgttcattcgaaaaaaaaaaaaataaatatgaacaattaatat

SEQ ID NO: 318024 - DNA, 378 bp, Zea mays
ggcaattgcaacttgccttttaaccttttcacccttgttcctccaacaatcatcaggcctagtacagcagttacctttggtgcatttattggcacaaaacatcagggcacaacaactacaacaacttgtgctagcaaaccttgctgcctactctcagcaacagcagtttcttccattcaaccaactagctgcattgaactctgcttcttatttgcaacaacaacaactaccattcagccagctatctgctgcctaccctcagcaatttcttccattcaaccaactgacagcattgaactctcctgcttatttacagcagcaacaactactaccattcagccagctagctggtgtgagccctggtaccttattgacaca

SEQ ID NO: 318025 - DNA, 378 bp, Zea mays
caaagcggcagtgcgtagagaggatcgtcgaacagaacagcatgaagatggtcatcgggctcgtcgtgtgcctggctctgtcagctgccagcgcctctgcaatgcagatgccctgcccctgcgcggggcttgcaggcttgtacggcgctggcgccggcctgacgacgatgatgggcgccggcgggctgtacccctacgcggagtacctgaggcagccgcagtgcagcccgctggcggcggcgccctactacgccgggtgtgggcagccgagcgccatgttccagccgctccggcaacagtgctgccagcagcagatgaggatgatggacgtgcagtccgtcgcgcagcagctgcagatgatgatgcaacttgagcgtg

SEQ ID NO: 318026 - DNA, 325 bp, Zea mays
caattaaatggttgcattcaaaaaaaaaaaaaaaaaaaaaaaaaaaacttaaagcgagggtacaaaaaaaaaaaaaaaaaaacaaataaaaaacataaacaaaaaaaaaggccgaccaatcacgcggatccaatccttccttatcgcttagtgcatacgtcctagctctcatttgttaccgcctactttctgtgaactacaggtactttctcatcaagggcactgttaatcccctggagtatcccaccttacttgctttcacgctaatccccttcattccatctgttttaatatctaataggcccctcccttttatcattcctaa

SEQ ID NO: 318027 - DNA, 168 bp, Zea mays
gttcttgtgatataattaacgattcctgttatacttggaaataactaagctcgtcccgatgcaatgcaagcaaagatctgatcaaaaaaaaaaaaaaaaaaaaaaaaaaaaaaaaaaaaaaaaaaaaaaaaaaaaaaaaaaaaaagaggaaccaaaaacaataataac

SEQ ID NO: 318028 - DNA, 68 bp, Zea mays
aaaaaaaaaaaaaaaaaaaaaaaaaaaaaaaaaaaaaaaaaaaaaaaaaaaaaaagaggagaaaaaag

SEQ ID NO: 318029 - DNA, 428 bp, Zea mays
cccacgcgtccgcccacgcgtccgtttgagcattcagaaacacaccaagcgaagctagctagcaacgacttaacaacaatggctaccaagatattagccctccttgcgcttcttgccctttttgtgagcgcaacaaatgcgttcattattccacaatgctcacttgctcctagtgccattataccacagttcctccgaccagttacttcaatgggcttcgaacacctagctgtgcaagcctacaggctacaacaagcgcttgcggcgagcgtcttacaacaaccaattaaccaattgcaacaacaatccttggcacatctaaccatacaaaccatcgcaacacaacagcaacaacagttcctaccagcactgagccaactagatgtggtgaaccctgtcgcctacttgcaacagcaggtgcttgcatc

SEQ ID NO: 318030 - DNA, 326 bp, Zea mays
cggacgcgtgggaaaaaaaaaaaaaattaaaaaaaaaaaaaaaaaaaaaaaaaaaaaagaaaaaacaaaaaatttaaaaaataactaactaaaaaaaacatgcatcctccttcttaatttttcttttttccttcctcattcttactacctcttagtttttatataacgttccttactttaaattccctggccttactttactaacttggcttctggtaaatccttctttttcccccttttattctccttgcaacgcatccacctttcttcatttcaattatttgcccagattccttaaccattcgcactttccatcatttgcccaa

SEQ ID NO: 318031 - DNA, 444 bp, Zea mays
  unsure (1)..(444): unsure at all n locations
ctctttgcgcttcttgccctttttgtgagcgcaacaaatgcgttcattattccggagggctcacttgctcctagtgccattattccacagttcctccctccagttacttcaatgggcttcgaacacccagctgtgcaagcctacaggctacaacaagcgcttgcggcgagcgtcttacaacaaccaattgcccaattacaacaacaatccttggcacatctaaccatacaaaccatcgcaacgcaacagcaacaacaatttctaccagcactaagccaactagctgtggtgaaccctgtcgcctacttgcaacagcagttgcttgcatccaacccacttgctctggcaaacatagttgcataccaacaacaacaacaattgcaacagtttctaccagcgctcagtcaactagccatggtgaaccctgccgnctacctacaacag

SEQ ID NO: 318032 - DNA, 430 bp, Zea mays
ccagttttccaggccttcgacggttcttccctggccttcgtcgcgttcgccagaaaaggcatggagggggctgatggcaagcaagagtcagaaactacatgtataatcaaagttcctaaagagcctgccatcattatcaatggcgttccagattttccttttgattgcacaactggttctcaatctgcagtaaaaaatgacgcagaatctcatgttgatcctcgttttggtgaatggttagaagggaggaaagtgcgtaagctttttggagacacatatttcgtcgggaaagtggccaagtatgacattgaaagcaactggtacaccgtcatttatgatgatggagaccaggaagatcttgaatggcgtgaacttgagaaagttctactgccattggacataactgttccacttaaaaacactgttatcg

SEQ ID NO: 318033 - DNA, 438 bp, Zea mays
cctccagcctcttgagcctcctcaaacactcacatttcaaccggtcatcttcttggaggtggttaacaagatggtgcgtcgtcgcaacccttcggtggtggagttcaacagtgactccgacgaaatccaagaggaatcgcgtgttccttctcctccgcctcggcgttctctctccaagtgaggacgaggctctggccgtttggaaaggggaggaccctcgatgcccttgcaacctgggcgccaagggcgtcaaaaggttggcgccactcgtccccgtcgaagcaccttcttcgctgtatacgctccttgccaggaggaggatggagcttttgacgacgaggtcgaaccttcgtcatccgacactcccctcgtcatcggactccacatgcatccggcgactgtgtcccatgggccgaatgaaccttcagtcgacttctc

SEQ ID NO: 318034 - DNA, 449 bp, Zea mays
ctgacactgctttactatcaagagttattagtacacataccagcagctgatgctgtggtgatcatcataaacatcttcaggatcctcatctacaacaacatcattcaccaaggcacacatcatacaacacagacacacacatcatcactatcagcagtgacacaaacaactacatgttaccatgcgatcacaaaaacattaacaacaacatgaagtacatgtacagacaacaacaacaatgactgtagcatcagcagaacatacaacaacggcaccagctacaacatcatgaatgtgaaagtcatcaactcatgaccatcaatctacaggccatgtgcaacaatacgaacagagccatgtacatcactaagacagagccatgagcaactacatcgacaacaatatcagcgtcatgacaagcacgaacatccacgacatgcttatgaata

SEQ ID NO: 318035 - DNA, 53 bp, Zea mays
cccacgcgtccgagcatgtgcacttttatctatttatttggtaccatcttgct

SEQ ID NO: 318036 - DNA, 294 bp, Zea mays
attccatcagcttccatcgaccaaagtatgtatgaccctcactcaatttggatatggaagctctttaattagatttactatgctaccaacatattcatgtcttaacactcaaccatgctcattcttccattgcggggcatgtaaatgtggtattcatttgaaaaactatcaacatactcatgtgcatcccactgtatcaaacattcaaacattatgattgatatgattccatgatacacgtgaaattagtgcttttaaacctgtcataggagacatactcctttcacaatttag

SEQ ID NO: 318037 - DNA, 428 bp, Zea mays
  unsure (1)..(428): unsure at all n locations
gcggcagtgcgtagagaggatcgtcgaacagaacagcatgaagatggtcatcgttctggtcgtgtgcctggctctgtcagctgccagcgcctctgcaatgcagatgccctgcccctgcgcggggctgcagggcttgtacggcgctggcgccggcctgacgacgatgatgggcgccggcgggctgtacccctacgcggagtacctgaggcagccgcagtgcagcccgctggcggcggcgccctactacgccgggtgtgggcagacgagcgccatgtaccagccgctccggcaacagtgctgccagcagcagatgaggatgatggacgtgcagtccgtcgcgcagcagctgcagatgatgatgcagcttgagcgtgccgctgccgncagcagcagcctgtacgagccagctctgatgcagcagcaacagc

SEQ ID NO: 318038 - DNA, 442 bp, Zea mays
gttctagatcgcgagcggccgcccttttttttttttttttaatctcatcaattttcttgtaaaaattcctatggattgctttcctccgtacaagttagagaaaaataacaaaaggattgcaattcacagccacctctaattcgagtacggaagaagccacctgcagctgcagagatcctgaagctcaactgcgatgcttcacaatcggcgtgattggttcctacacccataagagccgggctcgcgccgacctgcaccccagtcaatgcttccactaagcctgcgcacagctagccaagctatcaatcatgcgatatatgcgttcattacaacataacactgttcattacaacataacactctgaacatatgcaagccatcagttttcaccgtttcaccatcctaatgtgggtctttattgacccgagtgtactggactaag

SEQ ID NO: 318039 - DNA, 364 bp, Zea mays
acgatgacatacaaatccctggtatgataaattcttcgactagcagcgcagagttcctgcgcacggtgacagtgaattattggagctgctaatactgtgaagggcattatctgaactgacatggccagcaactctgaataagagagacatattcagggaagtactcatggatattgacccattatcactctcaaaattaagtgacaataagattatagtacctggaagccatatcataccattgatatccgtacataatctgagccgtgttattgatatcgcacacccactactgatgatcatatacgaatacgcatcgcctgacacatactgccgtatcctactgaatcacatgcttatattg

SEQ ID NO: 318040 - DNA, 86 bp, Zea mays
taaagcatggcagaacaaaaaaaaaggccggcccatctacaggacccaaccttacctacccttccatacaacataaacatactcca

SEQ ID NO: 318041 - DNA, 241 bp, Zea mays
aaaaaaaataaatacctaactataaaataaattaaaaacaataacaactaaaataaaaggaaagcacacatcaaacattcactcaccaaaaaaaaaaaaccaaaaaccataacaaaaccaactaaccaacaaccagatcgcctatttcaaggacacctttaacctcttcgacaatgaccgctacaatttcattacaaccaaagatcaattaactttcattccatcactttttcaaaaccca

SEQ ID NO: 318042 - DNA, 455 bp, Zea mays
ccacgcgtgcgaggcttcaaccctataggatccaacaggcaatcgcagctggcatcttaccttggtcagccttgttcctccaacaatcatcagccctattacagcagttacctttggtgcatttattggcacaaaacatcagggcacaacaactacaacaacttgtgctagcaaaccttgctgcctactctcagcaacagcagtttcttccattcaaccaactagctgcattgaactctgctgcttatttgcaacaacaactaccattcagccagctagctgctgcctacccccaacaatttcttccattcaaccaactggcatcattgaactctcctgcttatttacagcagcaacaactactaccattcagccagctagctggtgtgagccctgctgccttcttgacacaacaacagttattgccgttctacctgcacgctgcgcctaacgct

SEQ ID NO: 318043 - DNA, 413 bp, Zea mays
gaaagcacaatagtgtaccaacaatggcagccaaaatattttgcctccttatgctgcttggtctttctgcaagtgctgctacggcgaccattttcccgcaatgctcgcaagctcctatagcttcccttcttcccccgtacctctcaccagcggtgtcttcggtatgtgaaaacccaattcttcaaccctacaggatccaacaggcaatcacagctggcatcttacctttatcacccttgttcctccaacaatcatcagccctattacatcagttacctttggtgcatttattggcacaaaacatcagggcacaacaactacaacaacttgtgctagcaaaccttgctgcctactctcagcaacagcagtttcttccattcaaccaactagctgcattgaactctgcttcttat

SEQ ID NO: 318044 - DNA, 415 bp, Zea mays
  unsure (1)..(415): unsure at all n locations
agcaacatagaaagtggaatacagtatcaacaatagagcaacaatggcggccaagatgttttccatccttatgctccttgctctttctgcatgtgttgctaacgcgaccatttttcctcaatactcacaagctcctatagctgcccttcttcccccataccttccatcaatgaccgcttcagtatgtgaaaacccagcccttcaaccctacaggctccaacaagcaatcgcaacaagcaacttacctttatcacccctgttctttcaacaatcgccagccctatctttggtgcagtcattggtacaaaccatcagggcacaacagctgcagcaactcgtgctaccagtgatcagccaagtagctctggcaaacctttctccctactctcagcaacaacaatntcttccattcaac

SEQ ID NO: 318045 - DNA, 347 bp, Zea mays
gaccaaggagatgaaaagatagaatcacgaggcctgcgcagagtcctgagccgctgcgaccgtacgtgactgtactacggtcttgcatcggacggagctggcatgcactggctgcctatactactctggaccgctaacgtcccacggttacaatcgatttttcgtttggatacgtggatgcatccgtcagagtctctaactacttagacgtatgaacctactgacgaggctactgagcacactcattaccgcaggcatttcaggtacgcatgtactacatactgcatgtacttagacacatatgacagtcactatcttgagagcgagggctatactgtgctgacata

SEQ ID NO: 318046 - DNA, 410 bp, Zea mays
cggacgcgtgggaccatacaaaccatcgcaacgcaacagcaacaacaatttctaccagcactgagccaactagctgtggtgaaccctgtcgcctacttgcaacagcagttgcttgcatccaacccacttgctctggcaaacatagttgcataccaacaacaacaacaattgcaacagtttctaccagcgctcagtcaactagccatggtgaaccctgccgcctacctacaacagcaacaactgatttcatctagccctctcgctgtggttaatgcacctacatacctgcaacaacagttgctgcaacagattgtaccagctctgactcagctagctgtggcaaaccctgctgcctacttgcaacagctgcttccattcaaccaactgactgtgtcgaactcttctgcgta

SEQ ID NO: 318047 - DNA, 407 bp, Zea mays
cccacgcgtccgagttcgcaaagcatgctcaagcttccttaaagcttagcaaggtgtgcatgggaatttctttctcaactggaagccgacgagaattattaacagctgacatgcaccttaaaagtaccttgaaacagacgatggacttctcatacactgaggagtacaaagctcttgctaactgtcttgaagatatgaagaacctgattgccgatactgcctaggttgatgcatgcaagttttggacgctggatatgataatgtattggccgtttctaattaagcattgctattgttgtcttgttgggaatcaagatcacattatcggactctgttaacacacacagagatgccaagacaagtgaacctgcgccagagactgtaagcgaatatggtgtgctgctaca

SEQ ID NO: 318048 - DNA, 442 bp, Zea mays
  unsure (1)..(442): unsure at all n locations
caatagtgtaccaacaatggtagccaaaatattttgcctccttatgctccttggtctttctgcaagtgctgctacgacgaccattttcccgcaatgctcacaagctcctatagcttctcttcttcccccatacctctcaccagcgttgtcttcagtatgtgaaaacccaattcttcaaccctacaggatccaacaggcaatcacagcaggcatcttacctttatcacccttgttcctccaacaatcatcagccctattacatcaattacctttggtgcatttattggcacaaaacatcagggcacaacaactacaacaactcgtgctagcaaaccttgctgcctacgctcagcaacagcagttacctttggtgcaattgttggcacanaacatcagggcacaacaactacaacaactcgtgctagcaaaccttgctgcctac

SEQ ID NO: 318049 - DNA, 453 bp, Zea mays
ctataggatccaacaggcaatcgcagctggcatcttacctttatcacccttgttgctgcaacaatcatcagccctattacagcagttacctttggtgcatttattggcacaaaacatcagggcacaacaactacaacaacttgtgctagcaaaccttgctgcctactctcagcaacaacagtttcttccattcaaccaactagctgcattgaactctgcttcttatttgcaacaacaacaactaccattcagccagctatctgctgcctacccccagcaatttcttccattcaaccaactgacagctttgaactctcctgcttatttacagcagcaacaactactaccattcagccagctagctggtgtgagccctgctaccttcttgacacaaccacaattgttgccgttctaccagcacgctgcgcctaacgctggcaccctcttacaact

SEQ ID NO: 318050 - DNA, 451 bp, Zea mays
cccacgcgtccggagaccaacaagcaacatagaaagtggaatccagtagcaacaacagagcagcaatggcgaccaagatattttccctccttatgctccttgctctttctgcatgtgttgctaacgcgacaattttccctcaatgctcacaagctcctatagcttcccttcttcccccataccttccatcaatgatagcttcagtatgtgaaaacccagctcttcagccctataggctccaacaagcaatcgcagcaagcaacatacctttatcacccttgttgtttcaacaatcgccagccctatctttggtgcagtcattggtacaaaccatcagggcacagcagctgcagcaactcgtgctacctgtgatcaaccaagtagctctggcaaacctttctccctactctcagcaacaacaatttcttccattcaaccaactgtctacact

SEQ ID NO: 318051 - DNA, 384 bp, Zea mays
cgcgccggaatggctggaccgacgcagctgccgtgcggctagtcgtcgccctcccgttcgggttcggggtcgagaggttctacggcgttcgggggcgtgggtgagcggatcgagatggcggcgtcggatgttgagtaccgctgcttcgtcggcggcctcgcctgggccacggacgaccactccctccacaacgccttcagcacctacggcgaggtcctcgagtccaagatcatcctcgatcgggagacgcagaggtcccgcggcttcggcttcgtcaccttctccacggaggaggcgatgcggaacgccatcgagggcatgaacggcaaggagctggacggccgcaacatcaccgtcaacgaggcccagtcccgcggcggtcgt

SEQ ID NO: 318052 - DNA, 455 bp, Zea mays
cggacgcgtggggcacaatagtgtaccaacaatggcagccaaaatattttgcctcctgtgggctccttggtctttctgcaagtgctgctacggcgaccattttcccgcaatgctcgcaagctcctatagcttcccttcttcccccgtacctctcaccagcggtgtcttcggtatgtgaaaacccaattcttcaaccctacaggatccaacaggcaatcacagctggcatcttacctttatcacccttgttcctccaacaatcatcagccctattacatcagttacctttggtgcatttattggcacaaaacatcacggcacaacaactacaacaacttgtgctagcaaaccttgctgcctactctcagcaacagcagtttcttccattcaaccaactagctgcattgaactctgcttcttatttgcaacaacaacaactaccattcagccagcta

SEQ ID NO: 318053 - DNA, 438 bp, Zea mays
cggacgcgtgggcggacgcgtgggcggacgcgtgggtttgcaacaacaacaactaccgttcagccagctacctgttgcctacccccagcaatttcttccattcaaccaactggcagcattgaactctcctgcttatttacagcagcaacaactactaccattcagccagctagctggtgtgagccctgctaccttcttgacacaaccacagttgttgccgttctaccagcacgctgcgcctaacgctggcaccctcttacaactgcaacaattgctgccattcaaccaacttgctttgacaaacctagcagtgttctaccaacaacccatcattggtggtgccctcttttagatttcttatgagttatagttcaataataaaagtttttgtctgatgtttgtggcttcccagaaataagaaagtacatttctagattc

SEQ ID NO: 318054 - DNA, 407 bp, Zea mays
  unsure (1)..(407): unsure at all n locations
cggactcgtgggggattggcagttggatcttactgggattgcactagcttttgtacggtgatgtgctcttagcatgtttgcaatgaatatactggaattcataccattttagttgtgtcatgctacagggccatttttgtacttttcctcatggagcatctagcaatcacagccggctatgtgttcaacatcaaaggtgttctcgcagctccacccagaactatgctctttctaggaaggatttttctcctataactcaagatgtggaaggcttccttcacaatgttgttaacatgggttttcttgaccgtctgaaattagcgtggaagataatgttttctgcaccaaccacaaaggatacctccaatgcaaacatcgcanaacagaggcttaagatgatcctgttc

SEQ ID NO: 318055 - DNA, 299 bp, Zea mays
cccactcatacgctcacacatcctcccatgcatgcgcggacacttgtaatcaaaattgggggtaaatcttcttcaaatgttgcatctgatactcataaatgagcatcagataaaaacgccaacatcactacacttctaaatgtaacttatcatccaagtccaacgctatctcactacttagattcatcacctaccgatccacttttgccaggtacaattaataacacatagcacgtaatttatatatccaaacctgattattacgacgtctaccaactgaatactcctcatacaccgac

SEQ ID NO: 318056 - DNA, 454 bp, Zea mays
gattgaggatcgggttgaggaggaatgttacagtgaggcttcagaaggagatgatgaggcagatgatgcttataggcagtaggaggccatgggaatgcagtgttgttagtggctcttctgcttgtagttccatttgtccctggtcaagtgttgcctggagaactggcagagaaatttggttgacatcgaacaatctgacttcgtgcggctcctgaccctggttggaagtgttcgcttcagctaaaacagctccagctgcggcctctctctgcagatcattgtagcatcagcagcgctgccaagggattagttgttgcatcctatgatgcaaccataatatgttcatgcagcaactcagttcagttgtactgtttgactcgagaaatgtaacacgctgtactgttaaaccaggtgatcctattggtgtctcggcgtcccaagttctgtgacactg

SEQ ID NO: 318057 - DNA, 411 bp, Zea mays
gaccaactagcaacatagaaagcacaatagtgtaccaacaatggcagccaaaataggttgcctccttatgctccttggtctttctgcaagtgctgctaccgcgaccattttcccgcaatgctcacaagctcctatagcttcccttcttcccccgtacctctcaccagcggtgtcttcggtatgtgaaaacccaattcttcaaccctataggatccaacaggcaatcgcagctggcatcttacctttatcacccttgttcctccaacaatcatcagccctattacagcagttacctttggtgcatttattggcacaaaacatcagggcacaacaactacaacaacttgtgctagcaaaccttgctgcctactctcagcaacagcagtttcttccattcaaccaactagctgc

SEQ ID NO: 318058 - DNA, 427 bp, Zea mays
cccacgcgtccgcccacgcgtccgccactgcaagctctgtgaaacaagccattgagtggtggaatgatttccatcttttgaatactgaaaagctttgtcaaatgatggaaatcatttcaccactgcaagctctgtgaaacaagccattgagtatcctaatcatttttttttacaatagatatattagaactcgcatcttatttgagagttatactattttacttaccagtacagttccttaactggttgctgcagacctcttaaaaaatgtggggtcagtgatggagagatatgcatgatagcaaacattgtgcctgagaccgttgaagaggtttacgcactaatgccatctctcaaggctaataggtcagctatcgaaagttcagtcaccgaggttcttaccgtcctcgcaaacatattagcttgc

SEQ ID NO: 318059 - DNA, 210 bp, Zea mays
cgagagcgtacgctgacctttttgcatgcactgtacgtggacgtgcccattcccgtcgcgggcgaaccaacgcgacacctacacctcgctcgtccgtagccatcgttgctcttcgctcgcatgtcaccgttaacgcgcgtaattctgcactctaagctgatatgctgctatcgctaaccagctcaacacgctccacggatgaacgatagc

SEQ ID NO: 318060 - DNA, 174 bp, Zea mays
cccgcgcgtgcgcagactccaactgcattcttctacctcatgtaaccaacagcaatactgcccataatcagattctgtatgagcaggcacttaactcatcattggtcttagctggcgaaatcatcatgcaccatactcgtatctccattcttcaagtacttgctcttcttctta

SEQ ID NO: 318061 - DNA, 407 bp, Zea mays
  unsure (1)..(407): unsure at all n locations
cccacgcgtccgcccacgcgtccgcccacgcgtccgcagttacttcaatgggcttcggacacctagctgtgcaagcctacaggctacaacaagcgcttgcggcgagcgtcttacaacaaccaattaaccaattgcaacaacaatccttggcacatctaaccatacaaaccatcgcaacacaacagcaacaacagttcctaccagcactgagccaactagatgtggtgaaccctgtcgcctacttgcaacagcaggtgcttgcatccaacccacttgctctggcaaacgtagctgcataccaacaacaacaacaattgcaacagtttctgccagcgctcagtcaactagccatggtgaaccctgccgnctacctacaacagcaacaactgctttcatctagccctctc

SEQ ID NO: 318062 - DNA, 117 bp, Zea mays
ggtaaagccttggcatatcgatgagatgaggttcgtctctaggtctaggttgtttgtgtctgtaccattgatggtttaccgttgcatttggtagcggacatatcatttgagtttctg

SEQ ID NO: 318063 - DNA, 252 bp, Zea mays
cccacgcgtccgtctggacatcgagacccttctgcttcaccactgactgcatcctgctgttgaactagctcagtttgagcacaggattacatttcatacactttaccagctcttctaagaagccctcaggataaccgaaatggccaggctgtataaagtgtgcatcctgacatactcgtgaatgtcagatctaagatgtaagatacggtgatttaagaccgacgcattgacagtcgcttataacgtcacgac

SEQ ID NO: 318064 - DNA, 109 bp, Zea mays
accacacatacgaaaacacataaaaattttaaaacgcaagcaaaacaatatagagaaggcgagcttacaaacgacaggcatgcaacacaatacactataatataacgaa

SEQ ID NO: 318065 - DNA, 406 bp, Zea mays
gcagagagctatgttttccccattgtcgacccacactattgcatactgagccccagggtcgcccagcagccatggcgcccaaactctctgctcccatcgtactccttggcgcagtgggagaagctaccatgggcgccacccgacctgcagcttcgccttgccgacgcccagaaattgcagcatcagctcctaccctctctacatggccgacgctcatagctccagcagacgctcctccatacttcccatggcgtactgcatcagacgccttgaagcaaccacgccatggcttgcgactcggagtcctacctgcttgcatgctgatgctcagtgcccatggtgcttgataggtgctcgacgaaatgtgcggcaaccacgtcggcttcgtgcactgtcgactcgctgg

SEQ ID NO: 318066 - DNA, 409 bp, Zea mays
gcaacatagaaagcacaatagtgtaccaacaatggtagccaaaatattttgcctccgtatgctccttggtctttctgcaagtgctgctacgacgaccattttcccgcaatgctcacaagctcctatagcttctcttcttcccccatacctctcaccagcgttgtcttcagtatgtgaaaacccaattcttcaaccctacaggatccaacaggcaatcacagcaggcatcttacctttatcacccttgttcctccaacaatcatcagccctattacatcaattacctttggtgcatttattggcacaaaacatcagggcacaacaactacaacaactcgtgctagcaaaccttgctgcctacgctcagcaacagcagttacctttggtgcaattgttggcacaaaacatc

SEQ ID NO: 318067 - DNA, 433 bp, Zea mays
gcattcagaaacacacctagcgaagcgcactagcaacgacctaacaacaatggcttccgagacattatccctccttgcgcttcttgccctttttgtgagtgcaacaaatgcgttcattattccacaatgctcacttgctccgagtgccattattccacagttcctccctccagttacttcaatgggcttcgaacacccagctgtgcaagcctataggctacaacaagcgcttgcggcgagcgtcttagaacaaccaattgcccaattacaacaacaatccttggcacatctaaccatacaaaccatcgcaacgcagcagcaacaagcactgagccacctagccgtggtgaaccctatcgcctacttgcaacaacagctgcttgcattcaacccacttgctttggcaaacgtagctgcattaccaacacaacca

SEQ ID NO: 318068 - DNA, 442 bp, Zea mays
taccggttcggactggctggagccacgcgtccgccatcagggcacagcagctgcagcaactcgtgctacctgtgatcaaccaagtagctcgtggcgaacctttctccctactctcagcaacaacaatttcttccattcaaccaactgtctacactgaaccctgctgcttatttgcagcaacaactattaccattcagccagctagctactgcctactctcagcaacaacaacttcttccatttaaccaattggccgcactgaaccccgctgcttatttgcagcagcaaatactactaccatttagccagctagctgcagcaaaccgtgcttccttcttgacacagcaacagttgctgcctttctaccagcagtttgcggctaaccccgcaaccctcttacaactacaacaattgttgccctttgtccaacttgctttgacag

SEQ ID NO: 318069 - DNA, 421 bp, Zea mays
  unsure (1)..(421): unsure at all n locations
ctggcgggacccacgcgtccgcggacgcgtgggcggacgcgtgggttacaacaaccaatttcccagttgcaacagcaagccttggcacatctaacaatacaaaccatcgcaacgcaacagcaacaacaattcctaccagcactgagccacctagccatggtgaaccctgccgcctacttgcaacagcagttgcttgcatcaaacccacttgctctggcaaacgtagttgcaaaccagccacaacaacagctgcaacagtttctgccagcgctcagtcaactagccatggtgaaccctgccgnctacctacaacagcaacaactgctttcatctagcccgctcgctgtggccaatgcacctacatacctgcaacaacaattgttgcaacagattgtaccagctctgactcagctagttgtgc

SEQ ID NO: 318070 - DNA, 112 bp, Zea mays
  unsure (1)..(112): unsure at all n locations
tgccttatgttggaattatacataaaaacaaatacattaaanaaaaataaaaaaacaaaaaaataaaaaggaagaaacaaaataaaataaagaaaagaaaaataacaaataa

SEQ ID NO: 318071 - DNA, 316 bp, Zea mays
ctcctgagaagtcctagacagtcaaacaacgcagcagcaatgctttagaagctccggtgaaacgacgagactacttatcgctagtctcccataccattggattacgggaagatcatatgaaggcaattagaatggacgaacagagcagcatatgtagcccatctacaatgcaagaagactggaaacgctccgatagtaacgggaactcatgtaccagatcattgtcctgatgcatcatctgtttgcctccatcaatatggagatgctgctcgattgctcctcatggagttgttttccttagaccatattgaaaatg

SEQ ID NO: 318072 - DNA, 414 bp, Zea mays
cagcagggcacaacaactacaacaacttgtgctagcaaaccttgctgcctactctcagcaacagcagtttcttccattcaaccaactagctgcattgaactctgcttcttatttgcaacaacaacaactaccattcagccagctacctgttgcctacccccagcaatttcttccattcaaccaactggcagcattgaactctcctgcttatttacagcagcaacaactactaccattcagccagctagctggtgtgagccctgctaccttcttgacacaaccacagttgttgccgttctaccagcacgctgcgcctaacgctggcaccctcttacaactgcaacaattgctgccattcaaccaacttgctttgacaaacctagcagtgttctaccaacaacccatcattggtgg

SEQ ID NO: 318073 - DNA, 401 bp, Zea mays
cccacgcgtccgcagatagcagcatagactgcacaatgccgcaaccaacaatggcgtgacggaatatcgcgcctgccttattctcgtaggtcttactgcacgtgctggtaccgggaccagtttaccgtagtgtacacaagctattatagcatcagttctatgcacgcgtacatatgaccagcgacgccttgtgtatgatggcacccatgtactactgcgtatgcgatccaacacgcaatggctactggacatataccgctatcagcttaggctctacgacaatcatggtgcttacgacagagactacctttgctgcattgattgactccaaatataccaggcacaacaactacgacaacacgtgcgtagcacaccttgatgactactatcagcaacagata

SEQ ID NO: 318074 - DNA, 425 bp, Zea mays
ccacattcattggtggcccatcaaattggtagtgattggtctgatgttttgtttcccagtttctagatatttagcataaacatttgctcgacacaagttttttttgccaactggtccttttttttttgccatgtagggacccatattctaaaggagttacattaagatccctcaaaatttctgatttgccgggtactgttaacattgtttacatgttatgggttttcttcttgcatgctaactctcagtaacacctctgtgatgtacttgcagtcatttttttggttggcatttttggtgctcattgatgattaaaatatggcatgccattctccactgtttctgctttatagccatgtttttaggagggcagacctagtgccggagaggctcccacatgaagtgggtctggagaagggataaac

SEQ ID NO: 318075 - DNA, 444 bp, Zea mays
gcaacatagaaagcacaatagtgtaccaacaatggcagccaaaatattttgcttccgtatgctccttggtctttctgcaagtgctgctaccgcaaccattttcccacaatgctcacaagctcctatagcttcctttcttcccccatacctctcaccagcggtgtcttcagtatgtgaaaacccaattcttcaaccctacaggatccaacaggcaatcgcagcaggcatcttacctttatcacccttgttcctccaacaaccgtcagccctattacagcagttacctttggtgcatttgttggcacaaaacatcaaggcacaacaactacaacaacttgtgctaggaaaccttgctgcctactctcagcaacagcagtttcttccattcaaccaactggctgcattgaactctgctgcttatttgcaacaacaactaccattcag

SEQ ID NO: 318076 - DNA, 444 bp, Zea mays
cccacgcgtccggcaagtgctgctaccgcgaccattttcccgcaatgctcacaagctcctatagcttcccttcttcccccgtacctctcaccagcggtgtcttcggtatgtgaaaacccaattcttcaaccctataggatccaacaggcaatcgcagctggcatcttacctttatcacccttgttcctccaacaatcatcagccctattacagcagttacctttggtgcatttattggcacaaaacatcagggcacaacaactacaacaacttgtgctagcaaaccttgctgcctactctcagcaacagcagtttcttccattcaaccaactagctgcattgaactctgctgcttatttgcaacaacaactaccattcagccagctagctgctgcctacccccaacaatttcttccattcaaccaactggcatcattgaactct

SEQ ID NO: 318077 - DNA, 435 bp, Zea mays
acatagaaagtggaatccagtatcaacaatagagcaacaatggagaccaagatgttttccctccttatgctccttgctctttctacatgtgttgctaacgcgacaattttccctcaatgctcacaagctcctatagcttccctttttcccccataccttccatcaattatagcttcagtatgtgaaaacccagctcttcaaccatataggcttcaacaagcaatcgcagcaagcaacatacctttatcgcccttgttgtgtcaacaatcgccagccctatctttggtgcagtcattggtacaaaccatcagggcacaacagctgcagcaactcgtgctacctgtgatcaaccaagtagctctggcaaacctttctccctactctccgcaacaacaatttcttccattcaaccaactgtctacactgaaccctgct

SEQ ID NO: 318078 - DNA, 441 bp, Zea mays
cgcaacgcaacagcaacaacagttcctaccagcactgagccacctagccatggtgaacgctgtcgcctacttgcaacagcagctgcttgcatccaacccacttgctctagcaaacgtagttgcaaaccagcaacaacaacaactgcaacagtttctgccagcgcttagtcaactagccatggtgaaccctgccgcctacctacaacagcaacaactgctttcatctagcccgctcgctgtggccaatgcacctacatacctgcaacaagaattgttgcaacagattgtaccagctctaactcagctagctgtggcaaaccctgttgcctacttgcaacagctgcttccattcaaccaactaactatgtcgaactctgttgcgtacctacaacagcgacaacagttacttaatccattggcagtggctaacccattggtcgc

SEQ ID NO: 318079 - DNA, 414 bp, Zea mays
agtagcaacaaaagtacaacaatggcggccaagatattttccctgcttatgctccttgctctttctgcatgtgttgctaacgcgaccattttccctcaatgctcacaagctcctatgtgaaaacccagctcttgaacctacaggctccaacaagcaatcgcggcaaacaacttaccattatcacccttgttctttcaacaatcgacatccctatctttggtgcagtcattggtacaaaccatcaaggtacaacagctacaaaatctcgtgctacctgtgatcagccaagtagctctagcaaacctttctccctactctcagcaacaacagtttcttccattcaaccaattgtctacactgaaccctgctgcttatttgcagcaacaacaactactaccattcaactagctagct

SEQ ID NO: 318080 - DNA, 432 bp, Zea mays
cagcaaagcggcagtgcgtagagaggatcgtcgaacagaacagcatgaagatggtcatggttctcgtcgtgtgcctggctctgtcagctgccagcgcctctgcaatgcagatgccctgcccctgcgcggggctgcagggcttgtacggcgctggcgccggcctgacgacgatgatgggcgccggcgggctgtacccctacgcggagtacctgaggcagccgcagtgcagcccgctggcggcggcgccctactacgccgggtgtgggcagacgagcgccatgtaccagccgctccggcaacagtgctgccagcagcagatgaggatgatggacgtgcagtccgtcgcgcagcagctgcagatgatgatgcagcttgagcgtgccgctgccgccagcagcagcctgtacgagccagctctgatgcagcagcagc

SEQ ID NO: 318081 - DNA, 444 bp, Zea mays
cagaccattagctttatctactccagagcgcagaagaacccgatcgacaccatgagggggttgctcgttgccctcgctctcctggctctcgctgcgagcgccacctccacgcatacaagcggcggctgcggctgccagccaccgccgccggttcatctaccgccgccggtgcatctgccacctccggttcacctgccacctccggtgcatctcccaccgccggtccacctgccgccgccggtccacctgccaccgccggtccatgtgccgccgccggttcatctgccgccgccaccatgccactaccctactcaaccgccccggcctcagcctcatccccagccacacccatgcccgtgccaacagccgcatccaagcccgtgccagctgcagggaacctgcggcgttggcagcaccccgatcctgggccagtgcgtcgagttt

SEQ ID NO: 318082 - DNA, 405 bp, Zea mays
cggacgcgtgggcggacgcgtgggtttgaatccaccgaaactcccagaactgatagatgagttctaaagaacttggagttcggcctggcagcactaggtggcgagaaaggagcagcctacgaccggatagttctgaacgcagcattggctgaccactggttaggctgcagcggagccgagcacttcaacgttgcgctagaccgcgcgagggaagccatggatcgcggagactctgtgagaacgctcgtgagctacataaagatctcgcacagagtcttctaggctagctctcaccccgggtctcagtgagagatcgcacaattgggtcttagagccaaaactgggatatctttttcgcggagccagagggcctttgccactgcgtgtcggtgtttacgacccagc

SEQ ID NO: 318083 - DNA, 427 bp, Zea mays
agaccaactagcaacatagaaagcacaatagtgtaccaacaatggcagccaaaatattgggcctccttatgctccttggtctttctgcaagtgctgctaccgcgaccattttcccgcaatgctcacaagctcctatagcttcccttcttcccccgtacctctcaccagcggtgtcttcggtatgtgaaaacccaattcttcaaccctataggatccaacaggcaatcgcagctggcatcttacctttatcacccttgttcctccaacaatcatcagccctattacagcagttacctttggtgcatttattggcacaaaacatcagggcacaacaactacaacaacttgtgctagcaaaccttgctgcctactctcagcaacagcagtttcttccattcaaccaactagctgcattgaactctgctgc

SEQ ID NO: 318084 - DNA, 441 bp, Zea mays
cccacgcgtccgaaaaaaaaaaaaaaattaaaaaaaaaaaaaaaaaaaaaaaaaaaaaagaaaaaataaaaaaaaaaaaaaaaaaaaaaaaaaaaaaaaaaaaaaaaaaaaaaaaaaaaaaaaaaaaaaaaaaaaaaaaaaaaaaaaaaggccgccctttttaaagatcccaattttacttccccttccttccaacttaatactttttttttaggtcccccaaaattaatttaattgccccttttttaaaaacttcttaattgaaaaacccttggctttcccaaattaaatccctttgcaaaaaatccctttttcccaacttggcttaataccaaaaagccccgaacaaatcccctttccaaaaatttccccaccttaattggcaattggaaccccccttttaccggcacttaaaccccggctgttttggggtttacccca

SEQ ID NO: 318085 - DNA, 438 bp, Zea mays
cggacgcgtggggcaacatagaaagtggaatccagtagcaacaatagagcaacaatggggaccaagatattttccctccttatgctccttgctctttctgcatgtgttgctaacgcgacaattttccctcaatgctcacaagctcctatagcttcccttcttcccccataccttccatcaatgatagcttcagtatgtgaaaacccagctcttcaaccctataggctccaacaagcaatcgcagcaagcaacatacctttatcacccttgtttcaacaatcgccagccctatctttggtgcagtcattggtacaaaccatcagggcacagcagctgcagcaactcgtgctacctgtgatcaaccaagtagctctggcaaacctttctccctactctcagcaacaacaatttcttccattcaaccaactgtctacattg

SEQ ID NO: 318086 - DNA, 427 bp, Zea mays
gagaccaactagcaacatagaaagcacaatagtgtaccaacaatggtagccaaaatattttgcctccttatgctccttggtctttctgcaagtgctgctacgacgaccattttcccgcaatgctcacaagctcctatagcttctcttcttcccccatacctctcaccagcgttgtcttcagtatgtgaaaacccaattcttcaaccctacaggatccaacaggcaatcacagcaggcatcttacctttatcacccttgttcctccaacaatcatcagccctattacatcaattacctttggtgcatttattggcacaaaacatcagggcacaacaactacaacaactcgtgctagcaaaccttgctgcctacgctcagcaacagcagttacctttggtgcaattgttggcacataacatcagggcac

SEQ ID NO: 318087 - DNA, 444 bp, Zea mays
cccacgcgtccggaccaactagcaacatagaaagcacaatagtgtaccaacaatgggggccaaaatattttgcttccttatgctccttggtctttctgcaagtgctgctaccgcgaccattttcccgcaatgctcacaagctcctatagcttcccttcttcccccatacctctcatcagcggtgtcttcagtatgtgaaaacccaattcttcaaccctacaggatccaacaggcaatcgcagcaggcatcttacctttatcacccttgttcctccaacaaccgtcatccctattacagcagttacctttggtgcatttgttggcacaaaacatcagggcacaacaactacaacaacttgtgctagcaaaccttgctgcctactctcagcaacagcagtttcttccattcaaccaactggctgcattgaactctgctgcttattt

SEQ ID NO: 318088 - DNA, 444 bp, Zea mays
cccacgcgtccgcccacgcgtccggaaaacccaattcttcaaccctacaggatccaacgtgcaattgcatcaggcatcttacctttatcacccttgttcctccaacaatcatcagccctattacagcagttacctttggtgcatttattggcacaaaacatcagggcacaacaactcgtgctagcaaaccttgctgcctactctcagcaacaacagttacctttggtgcatttgttggcacaaaacatcagggcacaacaactacaacaactcgtgctagcaaaccttgctgcctactctcagcaacaacagtttctgccattcaaccaactagctgcattgaactctgctgcttatttgcaacaacaactagtactaccattcagccagccagctgctgcctacccccagcaatttcttccattcaaccaactagcagcattg

SEQ ID NO: 318089 - DNA, 381 bp, Zea mays
caactagcaacatagaaagcacaatagtgtaccaacaatggcagccaaaatattttgctgccttatgctccttggtctttctgcaagtgttgctaccgcaaccattttcccacaatgctcacaagctcctatagcttcccttcttcccccatacctctcaccagcggtgtcttcaatgtgtgaaaacccaattgttcaaccctacaggatccaacaggcaatcgcaacaggcatcttaccattatcacccttgttccttcaacaaccgtcagccctattacagcagttaccttttggtccatttgggggccacaaaaccatcaagggaccaaccacctaccacaaccttgtgctagcaaaccttggctgcatactctcagc

SEQ ID NO: 318090 - DNA, 298 bp, Zea mays
cccactcattccaaagaaaataaaaaaattaaaaaaaaatataataaaaccaaaaaaaaccctaccactcaagagcatctcaaactttcttacacgtccatccaacgtcatatctctactatcatatcacctaaatacaattcactcaccatctttttacaacatacctacttaaaaaacctcaacattacccaacttaatcatcttccaacacattccattttcctcaactaccttaataccaaaaataccaccacccatccacctacctaacatttacccacactaaatacttaaa

SEQ ID NO: 318091 - DNA, 431 bp, Zea mays
ggttggcttctcctccccctccggttcgggttcgggttcgtgagggtcttccgggttggggttcctgggtgaacggatcgaaatggcggcgtcggatgttgagtaccgctgcttcgtcggcggcctcgcctgggccacggacgaccactccctccacaacgccttcagcacctacggcgaggtcctcgagtccaagatcatcctcgatcgggagacgcagaggtcccgcggcttcggcttcgtcaccttctccacggaggaggcgatgcggaacgccatcgagggcatgaacggcaaggagctggacggccgcaacatcaccgtcaacgaggcccagtcccgcggcggccgtggaagcggcggcggtgggtacggtggtggccgtggaagcggcggctacggcggtggcgggcgccgtgatggcggcggcg

SEQ ID NO: 318092 - DNA, 397 bp, Zea mays
cgggcatgcttcatcacattgttgacttcataacgaaacacatcgtcttcggatcttgcatgattagttccgtcgtgcggggatgctgctgctaccagcagcatccagaagaagacgtcgtggccggaggtggtccgcatgtgcataatggatgcgacggatactattctcaaggacatgcgcaacgcgtacatccatctgctatcctgctggataccccgtgacgctgaaccttcggccttaccgcgttcgtatcttcgtagacacagatgacctgactcctacagttgaacgatacataccatgggcaatctacataccctactttccattgcatgtttccacttaatactaaacaacgccttaacttcttacttgtgcttacttggaaggcgtt

SEQ ID NO: 318093 - DNA, 285 bp, Zea mays
gccatggaagaagggcacctagcgtggtggtgccttttttcctgtttgtgtaatatgggtgcagttttttttgtgggtgattcgtgatttgttgttgtacctatagtcgacgcaacaggagctctggcatttcgattcattctgtctagtgaaaggacactgccatcatatgccgataaaaataacgcttcgtatcaaaaaaaaaaaaaaaaaaaaaaaaaaaaaaaaaaaaaaaaaaaaaaaaaaaaaaaaaaaaaaaaaaaaaaaaaaaaaaagtaaaaaaga

SEQ ID NO: 318094 - DNA, 427 bp, Zea mays
ggttgacaatattacatgtgcaccgaccacaaaccaaataatcagcaaaatggatttcgagtggcatctcaacatgcacaaccttaggtaaaagcttgagatggagaaactaaaagtttccaacagcgaacacaaagagtggctggggctggcctaggaggggaggaagaagagtgccatcacacgaaaaccatgacctcacagcattggtgcagtaacatttcactatttagagcctatgatcaggctttaaagagtggctggggctggcctaggaggggaggaagaagagtgccatcactaacaaaacagcccctcgaaccatggttgttttgcgacctctaaaggtggtaataactaacttggaagaaggaaaagtactagaccttgatggcaaaatgtggcctgatgcttctgatactgatgc

SEQ ID NO: 318095 - DNA, 425 bp, Zea mays
cactcgtagagagaaggaaaaatatccccaaaccctagctcccgatctcgatggcgaacgctcgcgtcttcttcgacatgaccgtcggcggcgccccggcgggccggatcgtgatggagctgtacgccaacgaggtgcccaagaccgcggagaacttccgcgcgctgtgcacgggcgagaagggcgtgggcaagtccgggaagccgctccactacaagggctccaccttccaccgcgtcatccccgagttcatgtgccagggcggcgacttcacccgcggcaacggcaccggcggcgagtccatctacggcgagaagttccccgacgagaagttcgtgcgcaagcacaccgcccccggtgtgctctccatggccaacgccgggcccaacaccaacggctcccagttcttcatctgcaccgtcgcg

SEQ ID NO: 318096 - DNA, 185 bp, Zea mays
acttaccacactttatcattctcctgccatatttataacttttaaaacccaatccaacatttccaattccctaccgatttcaacattcccatctacactactaatcattctatcattcactctacacctccttcacacttccacataaccttccccattaacacatcttctcttaacttcccaac

SEQ ID NO: 318097 - DNA, 342 bp, Zea mays
gttaatgtgctccatgctaaaactggatcacgtttgggtacatcctcatctcattgtgcgagattcaaaatctcgatcacttccatccaactcgctacttcttcaatggctaccactctttcaaatataatttccctgtctacacaacgtcttcacttgcaaactcctgcaattacctaacttaatcaccttgcatcaaatacatctttgcgctcctgacgctttacctaataactccatacctacaaaccttccaaacagattcgcaagctgaatcttaaatgaaaactgcccttaatgctaacatacagcccatcacatataatgattacgaccacgatg

SEQ ID NO: 318098 - DNA, 425 bp, Zea mays
cccacgcgttcgattcttcaacccttcctgatccaaccgggcattcggaacaaggccttctgccttttatcacccttgttcctgcaacaaccgtcagccctattacagcagttacctttggtgcatttgttggcacaaaacatcaaggcacaacaactacaacaacttgtgctaggaaaccttgctgcctactctcagcaacagcagtttcttccattcaaccaactggctgcattgaactctgctgcttatttgcaacaacaactaccattcagtcagctagctgctgcctacccccagcaatttcttccattcaaccaactggcagcattgaactctgctgcttatttacaacagcaacaactaccaccattcagccagctagctgatgtgagccctattgccttcttgacacagcaacagtt

SEQ ID NO: 318099 - DNA, 283 bp, Zea mays
aaaaaaaaaaaaaaaaaaaaaaaaaaaaattaaaaaaaaaaaaaaacaaaaaaaaaaaaacggaaacttaaacaatatgatcccaacttacaaacacatacatccaacttcaaccctcttctatacctaaacctaaatccaatcaacttccccacttttaccaacatcataactcataaaaccattacctttctcaacttactacttcattccacaacatctccacttatctccacctatattcaatactgacaaacaccctcattccttcacctttcccaac

SEQ ID NO: 318100 - DNA, 443 bp, Zea mays
ccgatcgacaccatgagggtgttgctcgttgccctcgctctcctggctctcgctgcgagcgccacctccacgcatacaagcggcagctgcggctgccagccaccgccgccggttcatctaccgccgccggtgcatctgccacctccggttcacctgccacctcctgtgcatctcccaccgccggtccacctgccgccgccggtccacctgccaccgccggtccatgtgccgccgccggttcatctgccgccgccaccatgccactaccctactcaaccgccccggcctcagcctcatccccagccacacccatgcccgtgccaacagccgcatccaagcccgtgccagctgcagggaacctgcggcgttggcagcaccccgatcctgggccagtgcgtcgagttcctgaggcatcagtgcagcccgacggcgacgccctactg

SEQ ID NO: 318101 - DNA, 317 bp, Zea mays
  unsure (1)..(317): unsure at all n locations
ggtgcagcgcggcggtcgccccgagtcgtccactttggccccgacaggctgtccaccgtggcgcgaactggccctcgcccgtttcggcccggccggccgtagcagctcaacagagaactagcctctcgtcggcctttcccaggtctgcgcgtggcgcggcgccgcagcaaagctccacgcgtgcgtgtccgccacccgncgtaccggcccggcccgtcgtcagtgcttcggtcggtgaacgacgtctcgcttgggtatcagcgcgttcttcgaagcgcacgaacgacaaacgggagaaggaagagaactcgtgggga

SEQ ID NO: 318102 - DNA, 428 bp, Zea mays
cccacgcgtccgcccacgcgtccgcggtcgcgtgggttcggggcggcgccatcgggcgggtgcccgagttcgacgggggccgcgacaacacgtttgctctggcggcgacggcgaggcgggccgtggggtgctcgacgttctccacggcgaagcggggggcgccgacgagggcgaacgtgggggcggcgcctcccgtcccgccggagccgtcgtgcgacctcgggctgtggctcagccccgggtcgtgcccggcgccgggcgagcggcggcggcggcggcccggcacgccgtccatgacctccgaggagtccgtgacgacgacgagcggcggcggcggcggtggagggagggagcccgagctgctgaacctttttgtctgagactttagctacaccgacggccatgctaataggccagcggccgatcat

SEQ ID NO: 318103 - DNA, 421 bp, Zea mays
  unsure (1)..(421): unsure at all n locations
gcaaagcggcagtgcgtacagaggatcgtcgaacagaacagcatgaagatggtcatcggtctcgtcgtgtgcctggctctgtcagctgccagcgcctctgcaatgcagatgccctgcccctgcgcggggctgcagggcttgtacggcgctggcgccggcctgacgacgatgatgggcgccggcgggctgtacccctacgcggagtacctgaggcagccgcagtgcagcccgctggcggcggcgccctactacgccgggtgtgggcagccgagcgccatgttccagccgctccggcaacagtgctgccagcagcagatgaggatgatggacgtgcagtccgtcgcgcagcagctgcagatgatgatgcagcttgagcgtgccgctgccgncagcagcagcctgtacgagccagctctgatgc

SEQ ID NO: 318104 - DNA, 445 bp, Zea mays
caacttgtgctaggaaaccttgctgcctactctcagcaacagcagtttcttccattcaggcaactggctgcattgaactctgctgcttatttgcaacaacaactaccattcagtcagctagctgctgcctacccccagcaatttcttccattcaaccaactggcagcattgaactctgctgcttatttacaacagcaacaactaccaccattcagccagctagctgatgtgagccctattgccttcttgacacagcaacagttgttgccgttctacctgcacgctgcgcctaacgctggcaccctcttacaactgcaacaattgctgccattcaaccaacttgctttgacaaacccaacagcgttctaccaacaacccatcattggtggtgccctcttttagattgcttatgagttatagttcaataatgaagttttttggatga

SEQ ID NO: 318105 - DNA, 329 bp, Zea mays
caaaaacacaccaagcgaagcgcactagcaacgacctaacaccaatggctaccaagatattagccctccttgcgcttcttgcccttttagtgagcgcaacaaatgcgttcattattccacagtgctcacttgctcctagtgccattattccacagttgctcccaccagttacttcaatgggcttcgaacatccagccgtgcaagcctacaggctacaactagcgcttgcggcgagcgccttacaacaaccaattgcccaattgcaacaacaatccttggcacatctaaccctacaaaccattgcaacgcaacaacaacaacaacagttt

SEQ ID NO: 318106 - DNA, 437 bp, Zea mays
ctgtttttttttttttttttttttcttttttctatttattttttttttttattatgagcttatgtcctttccggtggacatccttgtaaatatcgtgggggcccccaattaggccaccccggatctctgatttatcgggaaggaatccgacaaaggcccggaggagcaaattggattggctcttaatatcgggccgggcattgacggagcgtaaatttaacaagggaacggagcggtttaaaacctccaaccggctgagtgtgtcaacacaccttggcccttgtaacgttacttactattagcgcgatgctccaacccggaccctttgttgcacctgtaagccccctacccgttgtttacatggggacatactcgcaacagctggtggtgctaccttacctagttcctaaagcaaacttgattggataaaattaact

SEQ ID NO: 318107 - DNA, 442 bp, Zea mays
ttgagaccaacaagcaacatagaatgtggaatccagtagcaacaacagagcaacgggggcgaccaagatattttccctccttatgctccttgctctttctgcatgtgttgctaacgcgacaattttccctcaatgctcacaagctcctatagcttcccttcttcccccataccttccatcaatgatagcttcagtatgtgaaaacccagctcttcagccctataggctccaacaagcaatcgcagcaagcaacatacctttatcacccttgttgtttcaacaatcgccagccctatctttggtgcagtcattggtacaaaccatcagggcacagcagctgcagcaactcgtgctacctgtgatcaaccaagtagctctggcaaacctttctccctactctcagcaacaacaatttcttccattcaaccaactgtctacactg

SEQ ID NO: 318108 - DNA, 442 bp, Zea mays
agaccaactagcaacatagaaagcacaatagtgtaccaacaatggcagccaaaatatgggggcctccttatgctccttggtctttctgcaagtgctgctaccgcgaccattttcccgcaatgctcacaagctcctatagcttcccttcttcccccgtacctctcaccagcggcgtcttcggtatgtgaaaacccaattcttcaaccctataggatccaacaggcaatcgcagctggcatcttacctttatcacccttgttcctccaacaatcatcagccctattacagcagttacctttggtgcatttattggcacaaaacatcagggcacaacaactacaacaacttgtgctagcaaaccttgctgcctactctcagcaacagcagtttcttccattcaaccaactagctgcattgaactctgctgcttatttgcaacaac

SEQ ID NO: 318109 - DNA, 443 bp, Zea mays
gaccaactagcaacatagaaagcacaatagtgtaccaacaatggcagccaaaatatttggcttccttatgctccttggtctttctgcaagtgctgctaccgcaaccattttcccacaatgctcacaagctcctatagcttcctttcttcccccatacctctcaccagcggtgtcttcaatatgtgaaaacccaattcttcaaccctacaggatccaacaggcaatcgcagcacgcatcttacctttatcacccttgttcctgcaacaaccgtcagccctattacagcagttacctttggtgcattcggtggcacaaaacatcaaggcacaacaactacaacaacttgtgctaggaaaccttgcttgctactctcagcaacagcagtttcttccattcaaccaactggctgcattgaactctgctgcttatttgcaacaacaac

SEQ ID NO: 318110 - DNA, 426 bp, Zea mays
cgcgaccattttcccgcaatgctcacaagctcctatagcttcccttcttcccccgtgacctctcaccagcggtgtcttcggtatgtgaaaacccaattcttcaaccctataggatccaacaggcaatcgcagctggcatcttacctttatcacccttgttcctccaacaatcatcagccctattacagcagttacctttggtgcatttattggcacaaaacatcagggcacaacaactacaacaacttgtgctagcaaaccttgctgcctactctcagcagcagcagtttcttccattcaaccaactagctgcattgaactctgctgcttatttgcaacaacaactaccattcagccagctagctgctgcctacccccaacaatttcttccattcaaccaactggcatcattgaactctcctgctt

SEQ ID NO: 318111 - DNA, 259 bp, Zea mays
acccaccactcacccctctccacaaccttacatcaactactaactacccacacacccacacaacaacacatggtcacattcaaacattttatgccctctctaaaacctcttaccaccaccatatttccaaaccattaccacaaacccatactaaccatcattaacaacacatacaacctgaacattaacaatactactaacaatattactcaccttctctcatcaataccaataacaaaccaaacaaaaaattctatca

SEQ ID NO: 318112 - DNA, 350 bp, Zea mays
cctgggtcgtcctagggtggctgctcatattgccactggaactccatccagatagggggcacatgcaaattgttagggcactactctaaaatcagtcaccgaacactaaatctgaaagccatcgtgatgctctcctagctatattctgccagcacctgtacctggacatcatgattaccaatgtgggacataccgtacaactagcttcttaactgccgatagttcatgaccagacgtacttgaagcattgcgactcaccacccgagtgcgtagcctaagagaacatactgaccatagctggcggacattctcgcgtactgctcgttccacggatctgtgcatcctcatgt

SEQ ID NO: 318113 - DNA, 419 bp, Zea mays
gcattcattggcacacaccatcagggcacacaactacaacaactagtgctagcggccttgctgcctactctcagcaacagcagtttcttccattcaaccaactagctgcattgaactctgctgcttatttgcaacaacaactaccattcagccagctagctgctgcctacccccaacaatttcttccattcaaccaactggcatcattgaactctcctgcttatttacagcagcaacaactactaccattcagccagctagctggtgtgagccctgctgccttcttgacacaacaacagttattgccgttctacctgcacgctgcgcctaacgctggcaccctcttacaactgcaacaattgctgccattcaaccaacttgctatgacaaacccagcagcgttctaccaacaacccatc

SEQ ID NO: 318114 - DNA, 334 bp, Zea mays
ggcttctcctccccctccggttcgggttcgggttcgcgaggttctccggggttcgctggggtgggtgagcggatcgagatggcggcgtcggatgttgagtaccgctgcttcgtcggcggcctcgcctgggccacggacgaccactccctccacaacgccttcagcacctacggcgaggtcctcgagtccaagatcatgctggatcgggagacgcagaggtcccgcggcttcggcttcgtcaccttctccacggacgacgcgatgcggaacgctctcgagggcatgaacggcaaggagctggacggacagcacatcacgcgtaacgaggcccagt

SEQ ID NO: 318115 - DNA, 440 bp, Zea mays
cccgatcgacaccatgagggtgttgctcgttgccctcgctctcctggctctcgctgggagcgccacctccacgcatacaagcggcagctgcggctgccagccaccgccgccggttcatctaccgccgccggtgcatctgccacctccggttcacctgccacctcctgtgcatctcccaccgccggtccacctgccgccgccggtccacctgccaccgccggtccatgtgccgccgccggttcatctgccgccgccaccatgccactaccctactcaaccgccccggcctcagcctcatccccagccacacccatgcccgtgccaacagccgcatccaagcccgtgccagctgcagggaacctgcggcgttggcagcaccccgatcctgggccagtgcgtcgagttcctgaggcatcagtgcagcccgacggcgacgccct

SEQ ID NO: 318116 - DNA, 442 bp, Zea mays
cccacgcgtccgagctggcatcttacctttatcacccttgttcctccaacaatcatgaggcctattacatcagttacctttggtgcatttattggcacaaaacatcagggcacaacaactacaacaacttgtgctagcaaaccttgctgcctactctcagcaacagcagtttcttccattcaaccaactagctgcattgaactctgcttcttatttgcaacaacaacaactaccattcagccagctacctgctgcctacccccagcaatttcttccattcaaccaactggcagcattgaactctcctgcttatttacagcagcaacaactactaccattcagccagctagctggtgtgagccctgctaccttcttgatacaaccacagttgttgccgttctaccagcacgctgcgcctaacgctggcaccctcttacaactg

SEQ ID NO: 318117 - DNA, 264 bp, Zea mays
aatcaaaggatgcgccaaatgcttgcagactccagtgagcaggactgcagtatacactgacattgaggcagtaatattaatgttgatagagagaattaaatacatctctttgtttttgaactaaaaaaaaaaaaaaaaaaaaaaaaaaaaaaaaaaaaaaaaaaaaaaaaaaaaaaggaaaaaaaaaaaaaaaaaaaaaaaaaaaaaaaaaaaaaaaaaaaaaaaaggttggccgttcgcaatttaaaacgttttaaatcgcaa

SEQ ID NO: 318118 - DNA, 430 bp, Zea mays
acaggatccaacaggcaatcgcagcatgtcatcttacctttatcacccttgttcctccagcaccgtcatccctattacagcagttacctttggtgcatttgttggcacaaaacatcagggcacaacaactacaacaacttgtgctagcaaaccttgctgcctactctcagcaacagcagtttcttccattcaaccaactggctgcattgaactctgctgcttatttgcaacaacaactaccattcagccagctagctgctgcctacccccagcaattacttccattcaaccaactggcagcattgaactctgctgcttatttacaacaacagcagctaccaccattcagccagctagctgatgtgagccctgctgccttcttgacacagcaacagttgttgtcgttctactcgcacgctgcgcctaacgc

SEQ ID NO: 318119 - DNA, 173 bp, Zea mays
aaaaaaaaaaaaaaaaaaaaaaaaaaaatttaaaaaaaaaaaaaaaaaaaaaaaaaaaaaaaaaaaaaacaaaaataaacatacatacaaaactaaaaaataaaatataaaatccccctacttcaaattactccacccttttttaccaccccttcaattttaaaacccttctt

SEQ ID NO: 318120 - DNA, 291 bp, Zea mays
ggctaggcatcaccaggagcaccacattcagcgatgccggcaaacgtacgaaccgtgggggacggtcttcgtggagatggtcgtgtcgctgaccgggatcaacatgttcatggatacatgcgctcgcttgcagcacatcatgcacgatcagaacatgcaaggccaaatggatgaactacatgggttacgtactgtggcatatgccactgcaactgacactggttgctgtaccgacccggccgccacaggcacctgtgctgaagatacgacgcacatgctaggactacaccg

SEQ ID NO: 318121 - DNA, 428 bp, Zea mays
tggcttctcctccccctccggttcgggttcgggttcgtgaggttctccggggttcgggttcgtgggtgagcggatcgagatggcggcgtcggatgttgagtaccgctgcttcgtcggcggcctcgcctgggccacggacgaccactccctccacaacgccttcagcacctacggcgaggtcctcgagtccaagatcatcctcgatcgggagacgcagaggtcccgcggcttcggcttcgtcaccttctccacggaggaggcgatgcggaacgccatcgagggcatgaacggcaaggagctggacggccgcaacatcaccgtcaacgaggcccagtcccgcggcggccgtggaggcggcggcggtgggtacggtggtggccgtggaggcggcggctacggcggtggcaggcgccgtgatggcggtggct

SEQ ID NO: 318122 - DNA, 225 bp, Zea mays
gtgtcgaaaaggtcctagggagatcagtgcagtgaaggagaaagttcttagcgagaacgaacatttcaaattttctaggggccacatatattattggtccatccttattcaacagtttcacaattttattttatacacactacacaatgccttcgatacaaaatattacttttccaagttgatacatcctattcatttcctgtccaattgacctctccattctct

SEQ ID NO: 318123 - DNA, 429 bp, Zea mays
attgagaccaacaagcaacatagaaagtggaatccagtagcaacaatagagcaacaatggcgaccaagatattttccctccttatgctccttgctctttctacatgtgttgctaacgcgacaattttccctcaatgctcacaagctcctatagcttcccttcttcccccataccttccatcaattatagcttcaatatgtgaaaacccagctcttcaaccatataggcttcaacaagcaatcgcagcaagcaacatacctttatcgcccttgttgtttcaacaatcgccagccctatctttggtgcagtcattggtacaaaccatcagggcacaacagctgcagcaactcgtgctacctctgatcaaccaagtagctctggcaaacctttctccctactctcagcaacaacaatttcttccattcaacc

SEQ ID NO: 318124 - DNA, 390 bp, Zea mays
  unsure (1)..(390): unsure at all n locations
ctgcccgtctaattatggttttcttggatagcagacatgcaaatatcgacatggattggggaagaaagaattatctccccttgttaaggatttagaacctggaaatcctgaagaggaggctcctataccgttcatgatggcaggtgatggtgttaaacaaagacatactctgcaagaggtaacttcagaaataactggtccaatggttgtggaagatgttgtctatgaaaatgctgatggagatcaaggttccatgtctgagaaaatgttccgtcgtcttatttttgaaagaagnntctgttaagtgcaatctgaaccgttgttaatcaaagatcctccaatggattaggttgccaaaaggaacaaaagtccagctgcaacatttaaaaa

SEQ ID NO: 318125 - DNA, 358 bp, Zea mays
agaaagcacaatagtgtaccaacaatggcagccaaaatatttcgcctacttatgctccgtggtctttctgcaagtgctgctaccgcgaccatgttcccgcaatgctcacaagctcctatagcttcccttcttcccgcgtacctctcaccagcggtgtcttcggtatgtgaaaacccaattcttcaaccctataggatccaacaggcaatcgcagctggcatcttacctttatcacccttgttcctccaacaatcatcagccctattacagcagttacctttggtgcatttattggcacataacatcagggcacaacaactacgacaacttgtgctagcaaaccttgcttgctactctc

SEQ ID NO: 318126 - DNA, 119 bp, Zea mays
attttactactgttttgacactcgttgtatttctgtatatcgcgtcagactgttaaatggaagcactacactgtgtttcttgcaaacaaaacacaacaaacaaaaacataacactacaa

SEQ ID NO: 318127 - DNA, 203 bp, Zea mays
gtttcgaaaggtcctagggagatcagtgcagtgaaggagaaagttcttagcgagaacgaacaggtttacattttttgaggagttctatgtttttggatcatggatatttgtctcgaagatatgcctctggtttcctttaaacttaatgcctttgtaatcatttcgttcttagtatggttggacctttcttgtctgtttatcta

SEQ ID NO: 318128 - DNA, 364 bp, Zea mays
  unsure (1)..(364): unsure at all n locations
tcgtctcgtaatgcgcatcgagaaagggccgtcgacaggggggatattaatgggtcgtcgnntcgtctagccagtcagctcacgcgtccgcgctgcaaatcctcgtcagctcgtccgtccctggctcnttccgtgccctcgtcggctggtccatgcgtccatgcgtccgggacccctcctggtcgtgtccggggtggggccccatcccgcatcaactctcgtctcccgagtctgccccgctggtacccgtgactcagccccggaccctgcgntngcatcgggcccgtcgccctttcccgtggccccggagccctgaagaaggagatgcnttngccgggagcctgtngcggacatcnnccggcgt

SEQ ID NO: 318129 - DNA, 437 bp, Zea mays
acacacctagcgaagcgcactagcaacgacctaacaacaatggcttccaagacattaggcctccttgcgcttcttgccctttttgtgagtgcaacaaatgcgttcattattccacaatgctcacttgctccgagtgccattattccacagttcctccctccagttacttcaatgggcttcgaacacccagctgtgcaagcctataggctacaacaagcgcttgcggcgagcgtcttagaacaaccaattgcccaattacaacaacaatccttggcacatctaaccatacaaaccatcgcaacgcagcagcaacaagcactgagccacctagccgtggtgaaccctatcgcctacttgcaacaacagctgcttgcatccaacccacttgctttggcaaacgtagctgcataccaacaacaacaacagttgcaacagtt

SEQ ID NO: 318130 - DNA, 261 bp, Zea mays
gttctagatcgcgagcggctgccctttttttttttttttttttttagtccacaacagggtgcggcattagatcactaaccatcccttatctgataatacagccgaattgcaaatagttcatgacatatgctacataattgacatctaacattaaaagtgcctaaaacacaaatagcctacctttgaaatggcaaccttagaaaagaactcttattgacctgataggaaaagttcccaatagttaacactataggcaaaagg

SEQ ID NO: 318131 - DNA, 418 bp, Zea mays
agcgttcgatccgcacctataatatctgggctttaaaaaccccactaaccgaacgcactagcggcgcccgtacaacaatggctaccaagatattatccctccttgcgattcttgcccttttagtgagcgcaacaaatgcgttcattattccacaatgctcacttgctcctagtgccattattccacagttactaccaccagttacttcaatgggcttcgaacacccagttgtgcaagcctacaggctacaacaagcgcttgcggcgagcgtcttacaacaaccaattgcccaattacaacaacaatccttggcacatctaacaatacataccaatcgaacgcaacagcaacaacagttcctaccaacactgagccacctagccatggtgaaccctgccgcctacttgcaacaacaact

SEQ ID NO: 318132 - DNA, 423 bp, Zea mays
cccactcgtccgagaccaacaagcaacatagaaagtggaatccagtagcaacaatagagcaacaatggcgaccaagatattttccctccttatgctccttgctctttctacatgtgttgctaacgcgacaattttccctcaatgctcacaagctcctatagcttcccttcttcccccataccttccatcaattatagcttcaatatgtgaaaacccagctcttcaaccatataggcttcaacaagcaatcgcagcaagcaacatacctttatcgcccttgttgtttcaacaatcgccagccctatctttggtgcagtcattggtacaaaccatcatggcacaacagctgcagcaactcgtgctacctctgatcaaccaagtagctctggcaaacctttctccctactctcagcaacaacaatt

SEQ ID NO: 318133 - DNA, 203 bp, Zea mays
aaagaaacaactaaaaagagaaaacagttttacctaaaaacgaagagatctacctaccgggatcgtgctaaacgagcaccagatgatcaaagaccatcgatccggagactaaagtcgaggtgatgaacatcactcccgttcagaagccgacccgctccgcacagcgcacccgcttcaaggcctttgtcatcataagctactgc

SEQ ID NO: 318134 - DNA, 344 bp, Zea mays
cccacgcgtccgtctacatctccggcttcccctcttaataaatattttttatggttggtgtttatttaaaaaggtttgccgttttatatgatccaaacttacataaacatgcattcgaggtaataattattctataatgacacctaaatttaattcactgaccatttaattacaatgccataactgaaaaaactctcaccttaccaatgttaatcgcattccatcacatgcccctttctaaatctgcagtaatactctaaaggatggtaccaattatccttaccaatagttccccaacctgaatcctaaatgggactcgcattgtataagaacattaacaactt

SEQ ID NO: 318135 - DNA, 403 bp, Zea mays
  unsure (1)..(403): unsure at all n locations
ctctgctcctccatctccatggctgtcgccggcttgccgtgcttnccgctctctgccggcggcgccgccccagctgtgcggctggccgcgaggccaaaccggcagcgaccaccccgacgatggacgggtgccgcaccgtcagcagaccgtggggagatgggcaacgacgacagtggtggtgaggcgttgccgccaggtcggtccgtcgtcgtgacgactacaaagcccgccgcagcagaactttctgtgaaggaggatgtcagattgtcagtattctagtttgaggatatgatgatattcccaagtgagcatggtggggtgtttcctcatcaacaagcactccaaggtataattgatgttgctccaataccgggtgtgagaagagccacaactgatgttacta

SEQ ID NO: 318136 - DNA, 426 bp, Zea mays
acatagaaagtcgaatacagtatcaacaatcgagcaacaatggcggccgagatattttccatccttatgctccttgctctttctgcatgtgttgctaacgcgaccatttttcctcaatactcacaagctcctatagctgcccttcttaccccataccttccatcaatgaccgcttcactatgtgaaaacccagcaccttcaaccctacaggctccaacaagcaatcgcaacaggcaacttacctttatcacccctgttctttcaacaatcgccagccctatctttggtgcagtcattggtacaaaccatcacggcacaacagctgcagcaactcgtgctaccagtgatcagccaagtagctctggcaaacccttctaactactctcagcagcaacaatttcttccattcaaccaactgtctacact

SEQ ID NO: 318137 - DNA, 385 bp, Zea mays
ccgacacatagtgaggctactcctaggcatctaatctatcgagattgtacatggcgagggacgtatggaagctgatatagctgatagtgatcaagaacaacttcttgctggtgtatcactcaggcaacatcgatgccaacgacaatcaataccaacgagcgtataaactgtacagtgtacactcgtactgatactatgcataagcacacaaagaagctgtaacgaatcatctaggttgatgcaaggaatggcattgggagcactatactaacaatacctagatgcacagcaggcgatcaatgtagaaccacaagtataatatggacaagtagtaaatcatgatggacactgggagcaacaaccaaatctgctacaactattacag

SEQ ID NO: 318138 - DNA, 346 bp, Zea mays
cagccagctagctgctgcctacccccagcaatttcttccattcaaccaactagcagcattgaactctgctgcttatttacagcagcaacaactactaccattcagccagctagctgatgtgagccctgctgccttcttgacacaacaacagttgttgccgttctacctacacgctatgcctaacgctggcaccctcttacaactgcaacaattgctgccattcaaccaacttgctttgacaaacccagcagtgttctaccaacaacccatcattggtggtgccctcttttagattgcttatgagttatagttcaataatgaagttttttggatgatgtttgtggct

SEQ ID NO: 318139 - DNA, 401 bp, Zea mays
cccacgcgtccgcccacgcgtccgcggacgcgtgggttcagaaacacacctagcgaagcgcacgagcaacgacctaacaacaatggctaccaagatattatccctctttgcgcttcttgccctttttgtgagcgcaacaaatgcgttcattattccccaatgctcacttgctcctagtgccattattccacagttcctccctccagttacttcaatgggcttcgaacacccagctgtgcaagcctacaggctacaacaagcgcttgcggcgagcgtcttacaacaaccaattgcccaattacaacaacaatccttggcacatctaaccatacaaaccatcgcaacgcaacagcaacaacaatttctaccagcactaagccaactagctgtggtgaaccctg

SEQ ID NO: 318140 - DNA, 178 bp, Zea mays
gcgcttgcggcgaacgtcttagaacaaccaattgcccaattactacaacaatccttggcacatctaaccatacaaaccatggcatcgcagcagcaacaagcactgagccacctaaccgtggtgaaccctatcgcctacttgcaacaacagctgcttgcatccaacccattgcttggca

SEQ ID NO: 318141 - DNA, 153 bp, Zea mays
  unsure (1)..(153): unsure at all n locations
tcgcccacgcgtgcgtccacgcgtncgactggaccctggtggttatttgcagcaacaactattaccatgtaaccaggtaggtactggctaattttaagaacaaccacttgttgcatttaacccattgggcggaatggaacccggtggttattt

SEQ ID NO: 318142 - DNA, 382 bp, Zea mays
acggcaaagcggcagtgcgtagagaggatcgtcgatcagaacagcatgaagatggtcatcgagctcgtcgtgtgcctggctctgtcagctgccagcgcctctgcaatgcagatgccctgcccctgcgcggggctgcatggctagtacggcgctggcgccggcctgacgacgatgatgggcgccggcgggctgtacccctacgcggagtacctgaggcagccgcagtgcagcccgctggcggcggcgccctactacgccgggtgtgggcagacgagcgccatgtaccagccgctccggcaacagtgctgccagcagcagatgaggatgatggacgtgcagtccgtcgcgcagcagctgcagatgatgatgcagcttgagcgtg

SEQ ID NO: 318143 - DNA, 417 bp, Zea mays
ctctcagcaacagcagtttcttccattcaaccaactggctgcattgaactctgctgcgtatttgcaacaacaactaccattcagtcagctagctgctgcctacccccagcaatttcttccattcaaccaactggcagcattgaactctgctgcttatttacaacagcaacagctaccaccattcagtcagctagctgatgtgagccctgttgccttcttgacacaacaacagttgttgccgttctacctgcacgctgcgcctaacgctggcaccctactacaactgcaacaattgctgccattcaaccaacttgctttgacaaacccaacaacgttctaccaacaacccatcattggcggtgccctcttttagattgcttatgagttatagttcaataatgaagttatttggatgat

SEQ ID NO: 318144 - DNA, 441 bp, Zea mays
caactagcaacatagaaagcacaattgtgtaccaacaatggccgccaaaatatttagcgctacttatgctccttggactttctgcaagtgctgctactgcgaccatcttgccgcaatgctcacaagctcctatagctccccttctttccacgtacctctcaccagcggtgtcttacgtatgtgaaaacccaattattcaaccctacaggatccaacaggcaatcacagctggcatcttacctttatcacccttgttcctgcaacaatcatcagccctattacatcagttacctttggtgcatttattggcacaaaacatcagggcacaacaactacaacaactagtgctagcaaaccttgctgcctactctcagcaacagcagtttcttccattcaaccaactagctgcattgaactctgcttcttatttgcaacaacaac

SEQ ID NO: 318145 - DNA, 312 bp, Zea mays
agaacacttacgtcaccgcgtaacggttgacattgccttcatggctagaactgttgtgggcatcacactccttaacgacttgtgctagccatctacttgctagtcgcaatgaatgttatcgattgtgcacacagcgtgagaccaatccagctgctttgtgtaactataggagaccaagtgatcattccacctaccgtgtaatccagataatgcgtacatcgtatcatgactttgagatggtgccctagatatgatgatatactgcgatgtcagcgactgcacaacttatgtaatcaatatagcaaggattag

SEQ ID NO: 318146 - DNA, 417 bp, Zea mays
cagacagagtgaaagaagagactgaaagactcgatagtctttattaggaagatttagagatggacgatgatgagcggtataaccgaaaactcgaagctgggctttacacactgcagttaattgcgcttattctgggacacatatggcactctgggaattcccagatgagagcaagagtagaattacttcttaagcagaacatacttacaaagcaagatgtgaagagcatacttgaggagtaccatgacaacattggagatttggatggacctgaagagaaggatagagcacaagtgctgaccatggaaattattgacgcgtcgtgatgtgcatgggcctagggtagttggttgtggagcaagacagaggctggtagatattttgagtatgttgagtgaatttatatgcacagtcagc

SEQ ID NO: 318147 - DNA, 54 bp, Zea mays
  unsure (1)..(54): unsure at all n locations
cccacgcgtnccgaaaaaaaaaagaaaatttaaaataaagggccggcggtttaa

SEQ ID NO: 318148 - DNA, 180 bp, Zea mays
gtgggacctgagcgtaattggaacccgtagcccttttcggcctccttcccggccgaacagcctcgacagcccgaaaccttggccgccgatcggtttcggagaagagaaccaaatcaggatgtttctcggttcgttcccgcggggcccgaccaaggaggctgcttacaagcagctgcggtc

SEQ ID NO: 318149 - DNA, 357 bp, Zea mays
cacgcgtacgcgggcacgtttctagatctagaacgctatcgtttgatctcatagatccaagcctgcgtgctcgggccagcgatgtcataggtcttctatagcgtcaactgcattcaatatagtggccgtcacagtacatcgtcgatactgctaaaacacttatactacccaactgaaccaccttgcaccacatgcatatttatgcagctggcactatagcgactaggccctctccactcgatcttcccaacacttgaacagcctcaatagctaatgtgacgcgcactcttacagaaccttcagcaactgcttcgaagaagatccctgcaacgtgaccattacactctgcagcaccat

SEQ ID NO: 318150 - DNA, 68 bp, Zea mays
ccgtccggtctacagcttacagtgcctatcacgcaccaagtgggcctacatggagaagggctctcgca

SEQ ID NO: 318151 - DNA, 198 bp, Zea mays
  unsure (1)..(198): unsure at all n locations
gggcccaccagccaccttgaaagggggattcaattgccaccattgaaccaccattggggaccaggattttttccctcctaatgctcctggctctttcggcatgtgtggctaacgcgacaattttccctcaatgctcacaagctcctatagcttcctttcttcccccataccttncatcaatgatagcttcagtatgtg

SEQ ID NO: 318152 - DNA, 305 bp, Zea mays
caggcacacagcaacagagactcgaactttgaaggatcctccataacaagcagccttggatccacctaaatgggtgctcatgcaaactcaatacagccaggcttctttcctattccaaccacttatattaaccattacttgatctctgatgctacaactggaatagcgtatggacttgcccacatagaatatgcctatacacctgccactatcacctgcaaatttaaccattcaagatccacagatatacacaatgttggtcctcatgaatatcagaatggtccttcaacgatctgtcgacgacc

SEQ ID NO: 318153 - DNA, 77 bp, Zea mays
cccacacgtacgagaaaaaaacaaaggttaactttaacgctaggaactcacacactgagaacgagcaggcctggctg

SEQ ID NO: 318154 - DNA, 434 bp, Zea mays
tcggagaccaactagcaacatagaaagcacattagtgtaccaacaatggcagccaaaataggttgcttccttatgctccttggtctttctgcaagtgctgctaccgcaaccattttcccacaatgctcacaagctcctatagcttcctttcttcccccatacctctcaccagcggtgtcttcagtatgtgaaaacccaattcttcaaccctacaggatccaacaggcaatcgcagcaagcatcttacctttatcacccttgttccttcaacaaccgtcagccctattacagcagttacctttggtgcatttgttggcacaaaacatcaaggcacaacaactacaacaacttgtgctaagaaaccttgctgcctactctcagcaacagcagtttcttacattcaaccaactggctgcattgaactctgctgctta

SEQ ID NO: 318155 - DNA, 204 bp, Zea mays
gccgacgcgtacgatcgtatgccaaatcttactgctacaacgctcaccaatacacaaagggtgcatggccacgcgccgccactgtcaaccactgctactgctaccatccgtcgccattgccgacaaccctgcttacgcggcgctgttccgccatacctgtcatcagctgagcgtttagaacctgaaaaccgacttgatcaactc

SEQ ID NO: 318156 - DNA, 433 bp, Zea mays
cagttgttcaaccctacaggatccaactggcaatcgcaacaggcatcttacgattatgacccttgttcctccaacaaccgtcagccctattacagcagttacctttggtccatttggtggcacaaaacatcagggcacaacaactacaacaacttgtgctagcaaaccttgctgcatactctcagcaacatcagtttcttccattcaaccaactggctgcattgaactctgctgcttatttgcaacaacaattaccattcagccagctagttgctgcctacccccagcaatttcttccattcaaccaactagcagcattgaactctgctgcttatttacagcagcaacaactactaccattcagccagctagctgatgtgagccctgctgccttcttgacacaacaacagttgttgccgttctacctgcacgc

SEQ ID NO: 318157 - DNA, 393 bp, Zea mays
gagaccaactagcaacatagaaagcacaatagtgtaccaacaatggcagccaaaatatggggcttccttatgctccttggtctttctgcaagtgttgctaccgcaaccattttcccacaatgctcacaagctcctatagcttcccttcttcccccatacctctcaccagcggtgtcttcagtgtgtgaaaacccaattgttcaaccctacaggatccaacaggcaatcgcaacaggcatcttaccattatcacccttgttcctccaacaaccgtcagccctattacaagagttacctttggtccatttggtggcacaaaacatcagggcacaacaactacaacaacttgtgctagcaaaccttgcttgatactctcaagcacatcagtttctt

SEQ ID NO: 318158 - DNA, 345 bp, Zea mays
gcatggtcccagtcaaccctcaggcaacccggtgttaagggacgcgctggctcctggagctcctgcgtccatgagaggtcactctgcagtccgacatgaccgtggcctactcgcaggacacaccctagatcgagctactcaccctagacgagcagactcacaacatgtaccagtgtgagactatctgcctcaccaatcacttacatcagacctgtgccaagcaccgtcccaagttcacactgatgcacgcactgctcctggatcatcagccggagctcgttgatgaagaccctcttatggacctctagaacatggacgtgcacaacgatgactaagcaatttcag

SEQ ID NO: 318159 - DNA, 367 bp, Zea mays
gacgagtccattgttaactgaaaacattatcaactttctctaagcgtcacaagccctgccatggaaagaaacggtcaagcttttcctcacttgtccacctttcttcctgtgaccacacaatcaaacagctctcctgaaccatgatgttcgaacagcttgccggatgtggcgctcgttcttctgcaacagttcatcgaccttgtgcgactgggacaacaaaaggcccgagtactcgaccttctcttcttgaccatgaccggccttgaagccattcttcgatgaaaaaatacccccaaagaacatggcgttcgaaaagttatgggaatggtaagtgtcgcaagaatcgaacgaatctgggcgctctaac

SEQ ID NO: 318160 - DNA, 422 bp, Zea mays
cagaaacacacctagcgaagcgcactatcaacgacctaacaacaatggcttggaagagattatccctccttgcgcttcttgccctttttgtgagtgcaacaaatgcgttcattattccacaatgctcacttgctccgagtgccattattccacagttcctccctccagttacttcaatgggcttcgaacacccagctgtgcaagcctataggctacaacaagcgcttgcggcgagcgtcttagaacaaccaattgcccaattacaacaacaatccttggcacatctaaccatacaaaccatcgcaacgcagcagcaacaagcactgagccacctagccgtggtgaaccctatcgcctacttgcaacaacagctgcttgcatccaacccacttgctttggcaaacgtagctgcttaccaacaa

SEQ ID NO: 318161 - DNA, 243 bp, Zea mays
cggacgcgtgtgctgacgccttggcggtacgcttggtgaagaaacagacactgcaactagggccaaataactaccacccggtttagccggctccgctgacaccgacgaaactgccctctgtctacaggatgcacaattacaaggccatgaaggcccacgagctggtctgccatgagtgctgaagtggaaggaagtggacgtcgttgaacaccgtgaaggcgagatacacattaggaccaccga

SEQ ID NO: 318162 - DNA, 379 bp, Zea mays
agcaaatcgagttaagatgttgccggttgtcattatatagcaagaattccatgacaaagattgcttggcacttgattgctgctttggttgcaaaaaaaaacaaaaaaaaaaataaaaaaaaaaaaaaaaagaacaaataaaaaaatagaaaaaaaagaaaaatattacaaaaccctgaaaaaaaaaaaaaaaaaaaaaaaaaaaaaaaaaaaaagggcggcccttttaaagaacccaagtttacaaacccttgattgcaacaaaatagattttttatagggccaccaaaatcaaataaactggccgcgttttaaaaaagtcttaactggaaaaaccctggggttaccaaattaaatcgctttgaaaaaaatcccccttt

SEQ ID NO: 318163 - DNA, 87 bp, Zea mays
gggctggaaagctgccttttgttgtttcactaagatgaaggttgtatgatctctgtcggttcgtagtggaagttgttacaccagatg

SEQ ID NO: 318164 - DNA, 310 bp, Zea mays
tcccgctcgacccactctctctcccatcgtcctcttacgcttttcttctcgtgtgctgcattattacacatgtacagcgtacatggattgatagaggagtcagactacacacattatcatgtacattcttaccaataatatatgcatgatcataataaacttttagttttaatgaatcaatataaacaactaatatcttcactcttaaaattaataacaatcttcactataattcttatttatatatataactattttaaagcaaataatttttttaacaattatattataaatactttcactttaatat

SEQ ID NO: 318165 - DNA, 138 bp, Zea mays
gcaatacgtctaatcagtcatcattatacgatggtttatacggtatatatacgactgcgttggtagcaagctgaaagattactttgtatcgtactattttaattatattttgtggagataaagaaattattatgagct

SEQ ID NO: 318166 - DNA, 429 bp, Zea mays
  unsure (1)..(429): unsure at all n locations
agcgaagcacattagcaacaacctaacaacaatggctaccaagatattatccctccttgcgcttcttgcgctttttgcgagcgcaacaaatgcgttcattattccacaatgctcacttgctccaagttccattattacacagttcctcccaccagttacttcaatgggcttcgaacacccagctgtgcaagcctataggctacaacaagcaattgcggcgagcgtcttacaacaaccaatttcccagttgcaacaacaatccttggcacatctaacaatacaaaccatcgcaacgcaacagcaacaacaattcctaccagcactgagccacctagccatggtgaaccctgccgnctacttgcaacagcagttgcttgcatcaaacccacttgctctggcaaacgtagttgcaaaccagccacaacaaca

SEQ ID NO: 318167 - DNA, 405 bp, Zea mays
gcgagggaacctcattagcaacattttaacttcaatggctaccaagatattatgcgtccttgcgcttcttgcactttttgcgagcgcaacaaatgcgttcattattccacaatgctcacttgctccaagttccattattacacagttcctcccaccagttacttcaatgggcttcgaacacccagctgtgcaagcctataggctacaacaagcaattgcggcgagcgtcttacaacaaccaatttaccagttgcaacaacaatccttggcacatctaacaatacaaaccatcgcaacgcaacagcaacatcaattactaccaacactgagccacctagccatggtgaaccctgccgtctacttgcaacagcaattgcttgcatcaaacccacttgctctggcaaa

SEQ ID NO: 318168 - DNA, 335 bp, Zea mays
gggttggcttctcctccccctccggttcgggttcgggttcgtgaggttctccggggtgcgggttcgtgggtgagcggatcgagatggcggcgtcggatgttgagtaccgctgcttcgtcggcggcctcgcctgggccacggacgaccactcccttcacaacgccttcagcacctacggcgaggtcctcgagtccaagatcatcctcgatcgggagacgcataggtcccgcggcttcggcttcgtcaccttctccacggatgatgcgatgcggaacgccatcgagggcatgaacggcaaggagctggacggccgcaacatacccgtcaacgaggcc

SEQ ID NO: 318169 - DNA, 431 bp, Zea mays
cagctagcaacatagaaagcacaatagtgtaccaacaatggcagccaaaatattttgcgtccttatgctccttggtctttctgcaagtgttgctaccgcaaccattttcccacaatgctcacaagctcctatagcttcccttcttcccccatacctctcaccagcggtgtcttcaatgtgtgaaaacccaattgttcaaccctacaagatccaacaggcaatcgcaacaagcatcttaccattatcacccttgttcctccaacaaccgtcagccctattacagcagttacctttggtccatttggtggcacaaaacatcaaggcacaacaactacaacaacttgtgctagcaaaccttgctgcatactctcagcaacatcaagttcttccattcaaccaactggctgcattgaactctgctgcttatttgc

SEQ ID NO: 318170 - DNA, 373 bp, Zea mays
aaagcattgtgaagcccgggtgctcgcaggatgtccttaaagcagcggtaagcgccatggcttctgtgacggagatgttgaccatcatgtcttccctttcatttagtggacaggcgaccatctgaaggccaagctgaagatgtcatatgctgttgcgctgtcatgtcccgaacatatttgtgtttttttgggaaagaaacatacaattttttgttctcattctagtatcgtctacctatgtcaaactacaatatgataggacccttgctaaataattgtttcgtttgctggtatttctcatctttgatgctaggcatgttggaaagttaaaaaaaaaaaaaaaaaaaaaaaaaaaaaaaaaataaaaataaaa

SEQ ID NO: 318171 - DNA, 424 bp, Zea mays
caatagtgtaccaacaatggcagccaaaatattttgcctccttatgctccttggtctgtctgcaagtgctgctaccgcgaccattttcccgcaatgctcacaagctcctatagcttcccttcttcccccgtacctctcaccagcggtgtcttcggtatgtgaaaacccaattcttcaaccctataggatccaacaggcaatcgcagctggcatcttacctttatcacccttgttcctccaacaatcatcagccctattacagcagttacctttggtgcatttattggcacaaaacatcagggcacaacaactacaacaacttgtgctagcaaaccttgctgcctactctcagcaacagcagtttcttccattcaaccaactagctgcattgaactctgctgcttatttgcaacaacaactacca

SEQ ID NO: 318172 - DNA, 218 bp, Zea mays
  unsure (1)..(218): unsure at all n locations
ccggtttcgtgaattacccggggctcgacgccacgtcgtctcgtcccacgtcgtctcgggctcgtccctttttttgttttttttttacaagaatgtcaaaagtcgctgcgtaatgtgtaacgtgaaactatttgtgggcatcggaggaatcgtttactagtactatatngcagttggaacactatctcaaacgtcagggaagattatagtctgtccca

SEQ ID NO: 318173 - DNA, 61 bp, Zea mays
aaaaaaaaaaaaaaaaaaaaaaaaaaataaaaaaaaaaaaaaaaaaaaaaaaggaaaaaag

SEQ ID NO: 318174 - DNA, 418 bp, Zea mays
gcgcttcttgccctttttgtgagtgcatcaaatgcgttcattattccacaatgctcactggctccgagtgccattattccacagttcctccctccagttacttcaatgggcttcgaacacccagctgtgcaagcctataggctacaacaagcgcttgcggcgagcgtcttagaacaaccaattgcccaattacaacaacaatccttagcacatctaaccatacaaaccatcgcaacgcagcagcaacaagcactgagccacctagccgtggtgaaccctatcgcctacttgcaacaacagctgcttgcatccaacccacttgctttggcaaacgtagctgcataccatcaacaacaacagttgcaacagtttctgccagcgctcagtcaactagccatggtgaaccctatcgtctacc

SEQ ID NO: 318175 - DNA, 417 bp, Zea mays
aggcacgcgggggcgcaaggcgcgacggctcagcgcggtctcgactgcccgtgtacggggcagccaccccgtggcgggcggctcccgacctcaacggctcgggcgcgggtccggctgctcggccatggcggcacaagtgcgcggccccctgagcgggcgagcgcgcagtcccgcggctctggcagtgcgggcgctaaccaggcgcagccagtgtgggttcgtcccggcgggcgcatggtaccggccatggtgccccgttgaggcgcgtgcgcgcacatggtattctcacggaggcaaccagacggtcgaacggatcatcatggtacagaacactccatgcataggagtgggcagaaaggtaaatctggttgttgaaacaaattaacatacgatctttgaaaacctgttgctgagtaa

SEQ ID NO: 318176 - DNA, 437 bp, Zea mays
cattcaaccaactagctgcattgaactctgcttcttatttgcaacaacatcaactacgattcagccagctacctgctgcctacccccagcaatttcttccattcaaccaactggcagcattgaactctcctgcttatttacagcagcaacaactactaccattcagccagctagctggtgtgagccctgctaccttcttgatacaaccacagttgttgccgttctaccagcacgctgcgcctaacgctggcaccctcttacaactgcaacaattgctgccattcaaccaacttgctttgacaaacccagcagcgttctaccaacaacccatcattggtggtgccctcttttagatttcttatgagttatagttcaataataaagttttttgtctgatgtttgtggcttcccagaaataagaaagtacatttctaaaa

SEQ ID NO: 318177 - DNA, 102 bp, Zea mays
gcagtggctgggctgcttttttagctgggagcttacataccttgtctgggccagaccatctgggtgccctggcgccactgtcaatggccagatccagacttg

SEQ ID NO: 318178 - DNA, 421 bp, Zea mays
caactagcaacatataaagcacaatagtgtaccaacaatggccgccaaaatatgttgcgtccttatgctccttggtctctctgcaagtgttgctaccgcaaccattttcccacaatgctcacaagctcctatagcttcccttcttcccccatacctctcaccagctgtgtcttcagtgtgtgaaaacccaattgttcaaccctacaggatccaactggcaatcgcaacacgcatgttaccattatcacccttgttcctacaacaaccgtcagccctattacaagagttaccttaggtccatttggtggcacaaaacatcatggcacaacaactacaacaacttgtgctagcaaaccttgctgcatactctcagcaacatcagtttattccattcaaccaactggctgcattgaactctgct

SEQ ID NO: 318179 - DNA, 85 bp, Zea mays
aagaaaaaaaaaaaaaaaaattaaaaattaaaaaaaaaaaaaaaataaaaacggaaaaggggaaatactaaaattaaaaacaaag

SEQ ID NO: 318180 - DNA, 294 bp, Zea mays
atttgtgtttcctcatgatgtttgggaatgggatagggggttggcagctggtgagtttaggctgttttttcccagcctgttttgacactgattactgtatacttgaactgcggtttggaaatgctccagctgttaggttcaaaaaaaaaaaaaaaaaaaaaaaaaaaaaaaaaaaaaaaaaaaaaaaaaaaaaaaaaaaacaaaatataaaaaaaaacaaaataaatttgcaataaaaacaacattataaaaaataaataaaaaaaaaaaaggggcgccctttttaaaggttcc

SEQ ID NO: 318181 - DNA, 418 bp, Zea mays
cggacgcgtgggcggacgcgtgggcggtcgcgtgggcaactagcaacatagaaagcacgatagtgtaccaacaatggcagccaaaatattttgcttccttatgctccttggtctttctgcaagtgttgctaccgcaaccattttcccacaatgctcacaagctcctatagcttcccttcttcccccatacctctcaccagcggtgtcttcaatgtgtgaaaacccaattgttcaaccctacaggatccaacaggcaatcgcaacaggcatcttaccattatcacccttgttcctccaacaaccgtcagccctattacagcagttacctttggtccatttggtggcacaaaacatcagggcacaacatcttcaacaacttgtgctagcaaaccttgctgcatactctcagcaacatcag

SEQ ID NO: 318182 - DNA, 149 bp, Zea mays
tcgcagcatagaaagcacaatagtgtaccatcaatggcagccaaaatattttgctttcttaggctccttggtcttttttgcaatgctggtaccgcaaccatttatccacaatgctcacaaagctctatagcttactttattcccccata

SEQ ID NO: 318183 - DNA, 429 bp, Zea mays
cccacgcgtccgcccacgcgtccgcccacgcgtccgcttcaaccctacaggatccaacgggcaatcgcagctggcatcttacctttatcacccttgttcctccaacaatcatcagccctattacagcagttacctttggtgcatttattggcacaaaacatcagggcacaacaactacaacaacttgtgctagcaaaccttgctgcctactctcagcaacagcagtttcttccattcaaccaactagctgcattgaactctgcttcttatttgcaacaacaacaactaccattcagccagctacctgttgcctacccccagcaatttcttccattcaaccaactggcagcattgaactctcctgcttatttacagcagcaacaactactaccattcagccagctagctggtgtgagccctgctaccttc

SEQ ID NO: 318184 - DNA, 411 bp, Zea mays
ctgcactgaaccctgctgcttatttgcagcaacaactattaccattcagccagctagctactgcctactctcagcaacaacaacttcttccatttaaccaattggccgcactgaaccccgctgcttatttgcagcagcaaatactactaccatttagccagctagctgcagcaaaccgtgcttccttcttgacacagcaacagttgctgcctttctaccagcagtttgcggctaaccccgcaaccctcttacaactacaacaattgttgccctttgtccaacttgctttgacagacccagcggccttctaccaacaacacatcattggtggtgccctcttttagattgcttattagttgtaattcaataataaagttttttggatgatgtatgtggccaaccagaaataag

SEQ ID NO: 318185 - DNA, 386 bp, Zea mays
gggttggcttctcctacccctccggttcgggttcgggttcgtgaggttctacggggtgcggttgcgtgggtgagcggatcgagatggcggcgtctgatgttgagtaccgctgcttcgtctgcggcctcgactgggccacggacgaccactccctccacaacgccttcagcacctacagcgaggtcctcgagtccaagatcatcctggatcgggagacgcagaggtcccgcggcttcagcttcgtcaccttctccacggaggaggcgatgcggaacgccatcgagggcatgaacggcatggagctggacggccgcaacatcaccgtgaacgaggcccagtcccgagtcggccgttgaagctgctgcggtgggtacagtggtggccgt

SEQ ID NO: 318186 - DNA, 383 bp, Zea mays
aaacctcattgattggataatcagagcacagcatgtgccaactgacaactactaattgcaccgtatgctcctgatgtaaatcggagctactctatcctactatcacaaggtctttcggtgacttcagcatgtcctgcatcatcactgctatttcgcatacctcaagtacctactcgtaagtgctctccctccccctgaatctggtctattctccatacaatcgcaaatcacgcggtgctagcaagtaagaattgctcactgtctcacatgtttgatattcttctgtactatttcaacctttagttgcattcatatgcttaagtctgattcttcttctgtataatcctatctttgacagtactagaaaattattctcatgatat

SEQ ID NO: 318187 - DNA, 417 bp, Zea mays
gagcattcagaaacacaccaagcgaatcacattagcaacaacctaacaacaatggctagcaagatattatccctccttgcgcttcttgcgctttttgcgagcgcaacaaatgcgttcattattccacaatgctcacttgctccaagttccattattacacagttcctcccaccagttacttcaatgggcttcgaacacccagctgtgcaagcctataggctacaacaagcaattgcggcgagcgtcttacaacaaccaatttcccagttgcaacaacaatccttggcacatctaacaatacaaaccatcgcaacgcaacagcaacaacaattcctaccagcactgagccacctagccatggtgaaccctgccgcctacttgcaacagcagttgcttgcatcaaacccacttgctctg

SEQ ID NO: 318188 - DNA, 407 bp, Zea mays
gctccaacaagcaatcgcagcaagcatcatacctttatcacccttgcttcaacaatcgccagccctatctttggtgcagtcattggtacaaaccatcagggcacagcagctgcagcaactcgtgctacctgtgatcaaccaagtagctctggcaaacctttctccctactctcagcaacaacaatttcttccattcaaccaactgtctacattgaaccgtgctgcttatttgcagcaacaactattaccattcagccagctagctactgcctactctcagcaacaacaacttcttccatttaaccaattggccgcactgaaccccgctgcttatttgcagcagcaaatactactaccatttagccagctagctgcagcaagccgtgcttccttcttgacacagcaac

SEQ ID NO: 318189 - DNA, 110 bp, Zea mays
  unsure (1)..(110): unsure at all n locations
ttccggtcgacgcatcgtacgcccagcgtccgctttattctaagttaatcttaaggaaaaaatgctgcttcttggtccgtncaggaaaaaaaagaaagagagaaaaaggt

SEQ ID NO: 318190 - DNA, 167 bp, Zea mays
aaaaaaaaaaaaaaaaaaaaaaaaatttaaaaaaaaaaaaaaaaaaaaaaaaaaaaatgaaaattaaaaaaattaaaaacacaaaaatacaacataatataatcaaaatattatatcaccttaacttcaataaactaacacatcattttacaacttcaaatactctt

SEQ ID NO: 318191 - DNA, 426 bp, Zea mays
attgagaccaacaagcaacatagaatgtggaatccagtagcaacaatagagcaacagtggcgaccaagatattttccctccttatgctccttgctctttctacatgtgttgctaacgcgacaattttccctcaatgctcacaagctcctatagcttcccttcttcccccataccttccatcaattatagcttcaatatgtgaaaacccagctcttcaaccatataggcttcaacaagcaatcgcagcaagcaacatacctttatcgcccttgttgtttcaacaatcgccagccctatctttggtgcagtcattggtacaaaccatcagggcacaacagctgcaccaactcgtgctacctctgatcaaccaagtagctctggcaaacctttctccctactctcagcaacaacaatttcttccattca

SEQ ID NO: 318192 - DNA, 75 bp, Zea mays
ccaccaacctgctctccctcctctctgatgccatcaccagctccttgacctccttcctaccggggtgggccatcc

SEQ ID NO: 318193 - DNA, 68 bp, Zea mays
agaaaaaaaaaaaaaaaaaaaaaagataaaaaaaaaaaaaaaaaaaaaaaaaaaaaagaggtcatcca

SEQ ID NO: 318194 - DNA, 277 bp, Zea mays
cccactcgtcctctcactcgtagtctttacgcataggccgacaagcacacgctgagtgtcctttcaaaaattttcgggctctatctaatcctactctacaccctactctcctacccgtccacgatcctggacctcgagctctccatcctcgtcaaccttcatctcctcaaatccatgatcacattcacagagctgctgcttacaaacaccatcgatcccgcctttgcgcgcttcgtccgccacctccagacccttgtcctcgcatcttcatctcacc

SEQ ID NO: 318195 - DNA, 443 bp, Zea mays
gagaccaactagcaacatagaaagcgcaatagtgtaccaacaatggcagccaaaatatgttgcgtccttatgctccttggtctttctgcaagtgctgctaccgcaaccattttcccacaatgctcacaagctcctatagcttcctttcttcccccatacctctcaccagcggtgtcttcagtatgtgaaaacccaattcttcaaccctacaggatccaacaggcaatcgcagcaggcatcttacctttatcacccttgttcctccaacaaccgtcagccctattacagcagttacctttggtgcatttgttggcacaaaacatcaaggcacaacaactacaacaacttgtgctaggaaaccttgctgcctactctcagcaacagcagtttcttccattcaaccaactggctgcattgaactctgctgcttatttgcaacaaca

SEQ ID NO: 318196 - DNA, 418 bp, Zea mays
ggagaactcgacaccatgaaggtgctgatcgttgcccttgctctcctggcgctcggtgggagcgccgcctccagtacaagcggcggctgtggctgccagacaccaccgtttcatctaccgcctccgttctatatgccgcctccgttctatctgccgccgcagcagcagccgcagccatggcaataccccactcaaccaccgcagctaagcccgtgccagcagttcggatcctgcggcgtcggcagcgtcggcagcccgttcctgggccagtgcgtcgagttcctgaggcaccagtgcagcccggcggcgacgccctacggctcgccacagtgccaggcgctgcagcagcagtgctgccaccagatcaggcaggtggagccgctgcaccggtaccaggcgacatacggtgtggtcctgc

SEQ ID NO: 318197 - DNA, 436 bp, Zea mays
cttccgcgaccttaaaagggggaatccagtggcatcaacagagcaacaatggcgaccaagatagtttccctccttatgctccttgctctttctgcatgtgttgctaacgcgacaattttccctcaatgctcacaagctcctatagcttcccttcttcccccataccttccatcaatgatagcttcagtatgtgaaaacccagctcttcagccctataggctccaacaagcaatcgcagcaagcaacatacctttatcacccttgttgtttcaacaatcgccagccctatctttggtgcagtcattggtacaaaccatcagggcacagcagctgcaacaactcgtgctacctgtgatcaaaccaatagctcttgccaacctttcttcctaattttaacaaccaccattttcttccattcaaccaactgtctacactg

SEQ ID NO: 318198 - DNA, 403 bp, Zea mays
attttgagcattcagaaacacaccaagcgaagcgcactagcaacgacctaacacagtggctaccaagatattagccctccttgcgcttcttgccctttttgtgagcgcaacaaatgcgttcattattccacaatgctcacttgctcctagtgccattattccacagttcctcccaccagttacttcaatgggcttcgaacacctagctgtgcaagccaacatgcaacaacaagcgcttgcggcgagcgtcttacaacaaccaattgcccaattgcaacaacaatccttgccacatctaacaatacaagccatcacaacgcaacagcaacaacagttcctaccagcactgagccacctagccatggtgaaccctgccgcctacttgcaagagcagctgcttgca

SEQ ID NO: 318199 - DNA, 52 bp, Zea mays
  unsure (1)..(52): unsure at all n locations
gctgggnccaccagctttgaccgccgcctcccattcccctccgcttactgcg

SEQ ID NO: 318200 - DNA, 437 bp, Zea mays
cagcatagaaagcacaatagtgtaccatcaatggcagccaaaatattttgcttccgtgtctccttggtctttctgcaagtgctgctaccgcaaccattttcccacaatgctcacaagctcctatagcttcctttcttcccccatacctctcaccagcggtgtcttcagtatgtgaaaacccaattcttcaaccctacaggatccaacaggcaatcgcagcaggcatcttacctttatcacccttgttcctccaacaaccgtcagccctattacagcagttacctttggtgcatttgttggcacaaaacatcaaggcacaacaactacaacaacttgtgctaggaaaccttgctgcctactctcagcaacagcagtttcttccattcaaccaactggctgcattgaactctgctgcttatttgcaacaacaactacca

SEQ ID NO: 318201 - DNA, 438 bp, Zea mays
gagcattcagaaacacacctagcgaagcgcactagcaacgacctaacaacaatggctgccaagacattatccctccttgcgcttcttgccctttttgtgagtgcaacaaatgcgttcattattccacaatgctcacttgctccgagtgccattattccacagttcctccctccagttacttcaatgggcttcgaacacccagctgtgcaagcctataggctacaacaagcgcttgcggcgagcgtcttagaacaaccaattgcccaattacaacaacaatccttggcacatctaaccatacaaaccatcgcaacgcagcagcaacaagcactgagccacctagccgtggtgaaccctatcgcctacttgcaacaacagctgcttgcatccaacccacttgctttggcaaacgtagctgcataccaacaacaacaacag

SEQ ID NO: 318202 - DNA, 429 bp, Zea mays
gatcgttgcccttgctctcctggcgctcgctgcgagcgccgcctccagtacaagcgggggctgtggctgccagacaccaccgtttcatctaccgcctccgttctatatgccgcctccgttctatctgccgccgcagcagcagccgcagccatggcaataccccactcaaccaccgcagctaagcccgtgccagcagttcggatcctgcggcgtcggcagcgtcggcagcccgttcctgggccagtgcgtcgagttcctgaggcaccagtgcagcccggcggcgacgccctacggctcgccacagtgccaggcgctgcagcagcagtgctgccaccagatcaggcaggtggagccgctgcaccggtaccaggcgacatacggtgtggtcctgcagtccttcctgcagcagcagccgcagggcgagctcgc

SEQ ID NO: 318203 - DNA, 315 bp, Zea mays
ataaactccatctcctatcctcacaacactacacacatcatacatgaacaccacatcaagaatctcaccactttcttctatcaactaacaatcatcaataaatcttataacaaattacacaccaactgaatttcacctctacttccaacatctcatcctcttaccaaaccctacctcatatctctctactatacacaactgctcatatatgtgcctatactcatcatcatcactcaacaattcatggttcacatcacaaccacaatctttcatcttatcaacgattcactcactaatacataagcatatttattt

SEQ ID NO: 318204 - DNA, 431 bp, Zea mays
gcattttgcacgcgccaaggaattcaatcacctatatctgatctcactgaacgactgggatttgaggatcgtgacccccctgtggttcctctggaatgctcactcgaagcaccatcatttgatgaggttgatgttcaagccctagcgcatgctgttgagttgacaagacaaggtgctgtggatagcttgaagtttgcaaaaggacatttataccaagcttttcagaacgaattgtgccggatgaagctggacctgacacttctggataaacttgtacatgagtattgtgtatacaggggaatagttgaaggcagttcacatgttctttctggaactgctgacttgaaatgtaatcaaaataatgatgttaataatgaaacacagctttattgtgaaatgaccaacaatcagaatggacattgtagcaccag

SEQ ID NO: 318205 - DNA, 402 bp, Zea mays
  unsure (1)..(402): unsure at all n locations
taccaagtcctcctcgggttagggttcctganggttttgtggaggggcgatggcggcggctgatgtggagtaccgttgcttcgtcggcgggcttgcctgggccaccagcaacgagtcgctggagaatgccttcgcctcctacggcgagatcctcgactccaaggtcatcaccgaccgggagacggggaggtctcgcggcttcggcttcgttaccttctcctccgagaactccatgctcgacgctatcgagaacatgaacggcaaggagctcgacggccgtaacatcaccgttaaccaggcccagtcccgtggcggtggcggtggcggcggtggctacggcggcggtcgcggcggcggcggctatggtggcgggcgccgtgactgcggttatggcggcggtgg

SEQ ID NO: 318206 - DNA, 431 bp, Zea mays
gaccaactagcaacatataaagcacaatagtgtaccaacaatggcagccaaaataggtggcttccttatgctccttggtctttctgcaagtgctgctaccgcgaccattttcccgcaatgctcacaagctcctatagcttcccttcttcccccatacctctcatcagcggtgtcttcagtatgtgaaaacccaattcttcaaccctacaggatccaacaggcaatcgcagcaggcatcttacctttatcacccttgttcctccaacaaccgtcatccctattacagcagttacctttggtgcatttgttggcacaaaacatcagggcacaacaactacaacaacttgtgctagcaaaccttgctgcctactctcagcaacagcagtttcttccattcaacccactgggctgcattgaactctgctgcttat

SEQ ID NO: 318207 - DNA, 431 bp, Zea mays
cccacgcgtccggagaccaacaagcagcatagaaagtggaatccagtagcaacaatagagcaacaatggcgaccaagatattttccctccttatgctccttgctctttctgcatgtgttgctaacgcgacaattttccctcaatgctcacaagctcctatagcttcccttcttcccccataccttccatcaatgatagcttcagtatgtgaaaacccagctcttcaaccctataggctccaacaagcaatcgcagcaagcaacatacctttatcacccttgtttcaacaatcgccagccctatctttggtgcagtcattggtacaaaccatcagggcacagcagctgcagcaactcgtgctacctgtgatcaaccaagtagctctggcaaacctttctccctactctcagcaacaacaatttcttccattc

SEQ ID NO: 318208 - DNA, 442 bp, Zea mays
agaccaactagcaacatagaaagcacaatagtgtaccaacaatggcagccaaaatatgtggcttccttatgctccttggtctttctgcaagtgttgctaccgcaaccattttcccacaatgctcacaagctcctatagcttcccttcttcccccatacctctcaccagcggtgtcttcaatgtgtgaaaacccaattgttcaaccctacaggatccaacaggcaatcgcaacaggcatcttaccattatcacccttgttcctccaacaaccgtcagccctattacagcagttacctttggtccatttggtggcacaaaacatcagggcacaacaactacaacaacttgtgctagcaaaccttgctgcatactctcagcaacatcagtttcttccattcaaccaacttgctgcattgaactctgctgcttatttgcaacacca

SEQ ID NO: 318209 - DNA, 281 bp, Zea mays
acaatctcctatatcttacctccttctctcatacctcttaccaacaatttcttcaaaaattcaaaacccaatttctcaaccctacactatccaacatttcaatcactatcattcatcttaccattatcacccttattcctcctacatccttctatcctattacatcaattacctttcttccatttcattccacaaaacattattacacatcaactacaacaacattttctaactaaacctttcttcatactatcatcaacttcattttcattcattctacc

SEQ ID NO: 318210 - DNA, 240 bp, Zea mays
  unsure (1)..(240): unsure at all n locations
tctagccacacatccaagcttacaacctccaacatnacctttttctcctcactacntaaccctaataaagttgttatattaaacatttttcgcgccataaaacaccatactacacattaactatctacatatttcttcttaaatcatatattctcatctaaaaccactatcccattttttcatactcaaaatctaaaaatcattatccattataatcaaacatcaattaaccactttata

SEQ ID NO: 318211 - DNA, 291 bp, Zea mays
accaaaaattctatcaatatcccatctacattttaatttatgtccttttaaaatatcatcatccacctactcctcacactctcaacctccatactactctacaacctcccttctcccacccccaacacctacaccttctacattcttttactaaaccatccaaaacaactacttccctaactaccactcttactataccatccttaccttcatcatctaacctctcctactcataccatatctcaaaattatatacttcctttatctcacatacatacctttctacttact

SEQ ID NO: 318212 - DNA, 301 bp, Zea mays
cattgaacatgtgactatttaataaaactctgtcagaatggaggagctgaaaaacatgggggcaacatgttattaggaaaaaatttaatgaaaacaaggaccatgagcattctggtagcctagatgacaccgatcgtaacagaccaaccaataatgataatgaatacgcttcctccgcgaatgatggaggtgatggcagctggaaatctcagagaaagaaaagagagaaagaagatgatgaaactgacctcgaaaatggtgatccttcttctacatcaaagaacccaagagttgtttggtc

SEQ ID NO: 318213 - DNA, 428 bp, Zea mays
cccacgcgtccgagacgcccgtgggctcttgtgagaaagtggaatccagtagcgcgatagagcaacaatggcgaccaagatattttccctccttatgctccttgctctttctacatgtgttgctaacgcgacaattttccctcaatgctcacaagctcctatagcttcccttcttcccccataccttccatcaattatagcttcaatatgtgaaaacccagctcttcaaccatataggcttcaacaagcaatcgcagcaagcaacatacctttatcgcccttgttgtttcaacaatcgccagccctatctttggtgcagtcattggtacaaaccatcagggcacaacagctgcagcaactcgtgctacctctgatcaaccaagtagctctggcaaacctttctccctactctcagcaacaacaatttc

SEQ ID NO: 318214 - DNA, 311 bp, Zea mays
actggaaccccgctgcttatttgcagcttcaaatactactaccatttagccagctagctgcagcaaaccgtgcttgcgggttgacacagcaacagttgctgcctttctaccagcagtttgcggctaaccccgcaaccctcttacaactacaacaattgttgccctttgtccaacttgctttgacagacccagcggccttctaccaacaacacatcattggtggtgccctcttttagattgcttattagttgtaattcaataataaagttttttggatgatgtatgtggccaaccagaaataagaagttaca

SEQ ID NO: 318215 - DNA, 428 bp, Zea mays
tcccgtctcgaggcacgcgtacgccaacatagaaagcacaatagtgtaccaacaatggcagccaaaatattttgcttccttgtgctggcttatctttctgcaagtgctgctaccgcaaccattttcccacaatgctcacaagctcctatagcttactttcttaccccatacctctcaccagcggtgtcttcagtatgtgaaaacccaattcttcaaccctacaggatccaacatgcaatcgcagcatgcatcttacctttatcacccttgttccttcaacaaccgtcagccctattacagcagttacctttggtgcatttgttgacacaaaacatcaatgcacaacaactacaacaacttgtgctaagaaaccttgctgcctactctcagcaacagcagtttttttcattcaaccaacttgcttgcat

SEQ ID NO: 318216 - DNA, 207 bp, Zea mays
gcgactttattacatccttgtgcctatgtctttcggcaattatgttaaaacctttgtcaaattaatgaaattaaacagattgactctctcgttaattcaccccacatacccacaaaaatctgaactattaaccatcaatggtgatcttaccattctttttttaagaaacctcataaatctcttttataacccatatacacttaatta

SEQ ID NO: 318217 - DNA, 429 bp, Zea mays
cccatacctctcaccagcggtgtcttcagtatgtgaaaacccaattcttcagggcctgcaggatccaacaggcaatcgcagcaggcatcttacctttatcacccttgttcctccaacaaccgtcagccctattacagcagttacctttggtgcatttgttggcacaaaacatcaaggcacaacaactacaacaacttgtgctaggaaaccttgctgcctactctcagcaacagcagtttcttccattcaaccaactggctgcattgaactctgctgcttatttgcaacaacaactaccattcagtcagctagctgctgcctacccccagcaatttcttccattcaaccaactggcagcattgaactctgctgcttatttacaacagcaacagctaccaccattcagccagctagctgatgtgaaccctg

SEQ ID NO: 318218 - DNA, 431 bp, Zea mays
gatgaatggacttgctctgatcctatgtgtgtgtggctatgcttgtgctcaatggtgggcacttttcagttaaagttttgtagtgctgtctgtcagttgctgcctcaaacttggaatactacttctgtttggcacctgaactgcttatcaaaaactttatgtataccagttacattccacttttaaccttcatattagtattaccatattataactgtcttttcagtatttagtacttactattcatggtgacttgcacctttctagttacatggagtgaagatatgctggctgatatgcggtcaacatgcacgtagcttactgttgaagttgatataatctgtgctgtttgcgttgctgatgatgatggctgatgagatgatggaactgcagctgactgcacaagttgctgctgtctgcacctattatgc

SEQ ID NO: 318219 - DNA, 287 bp, Zea mays
cccacgcgttcgaaaaaaaaaaaaaaatataataaaaaaaaaaaaaaaaaataaaaaaagaaagaatataaaaaaaaaaaaaataaaaataataaaaaaataacttatacttaaaatattataaaaaaatttaaaaaatcaatacatacttataaataatgaaaatcttgatgctaaaactaattataattcaaaaaatattaaatataagtaaattattaaactttttaaaatttcattatttaatgaatttgattcataatcctttattgcactttattatcatt

SEQ ID NO: 318220 - DNA, 419 bp, Zea mays
agaccaactagcaacatagaaagcacaatagtgtaccaacaatggcagccaaaatagtttgcttccttatgctccttggtctttctgcaagtgttgctaccgcaaccattttcccacaatgctcacaagctcctatagcttcccttcttcccccatacctctcaccagcggtgtcttcaatgtgtgaaaacccaattgttcaaccctacaggatccaacaggcaatcgcaacaggcatcttaccattatcacccttgttcctccaacaaccgtcagccctattacagcagttacctttggtccatttggtggcacaaaacatcagggcacaacaactacaacaacttgtgctagcaaaccttgctgcatactctcagcaacatcagtttcttccattcaaccaactggctgcattgaac

SEQ ID NO: 318221 - DNA, 118 bp, Zea mays
ctgacgcgtccgaccgtgaagcacacctattagctatcgcagcttaacgacgactgcgaccagaccgattatgtcaagctgctgaatgtactgggttccggatcacaacgctaacttg

SEQ ID NO: 318222 - DNA, 374 bp, Zea mays
agctcatcgactccagattggagaactcgacaccatgaaggtgctgatcgttgccctggctgtcctggcgctcgctgcgagcgccgcctccagtacaagcggcggctgtggctgccagacaccaccgtttcatctaccgcctccgttctatatgccgcctccgttctatctgccgccgcagcagcagccgcagccatggcaataccccactcaaccaccgcagctaagcccgtgccagcagttcggatcctgcggcgtcggcagcgtcggcagcccgttcctgggccagtgcgtcgagttcctgaggcaccagtgcagcccggcggcgacgccctacggctcgccacagtgccaggcgctgcagcagcagtgct

SEQ ID NO: 318223 - DNA, 168 bp, Zea mays
acgcggacgcgtgggtggagttagtatttggtttgtatcttcaataatgctatagtactggtggatgctctgcattaaggccagaaaaaaaagctcgagctggctcgggctcgtagcagttcggctcgaaccggtttaacgctcaaaaaaaaagaatacataaggctt

SEQ ID NO: 318224 - DNA, 444 bp, Zea mays
agaccaactagcaacatagaaagcacaatagtgtaccaacaatggcagccgaaaggttttgcttccttatgctccttggtctttctgcaagtgctgctaccgcgaccattttcccgcaatgctcacaagctcctatagcttcccttcttcccccatacctctcatcagcggtgtcttcagtatgtgaaaacccaattcttcaaccctacaggatccaacaggcaatcgcagcaggcatcttacctttatcacccttgttcctgcaacaaccgtcatccctattacagcaattacctttggtgcatatgctggcacaaaacaataaggcacaacaactacaacaacttgtgctagcaaaccttgctgcctactctcagcatcagcaagtttcttcattcaaccaactggctgcattgaactctgctgcttatttgcaacaacaac

SEQ ID NO: 318225 - DNA, 224 bp, Zea mays
ggcacatacaagcacaattcagactcacaatggccgccaaaatattcgcgtcgggtgctccttgctctttctgcaatagctgctaccgtaacctttttcccacagtgctacacaagctcctatagctcgctttctttcatcattcctcttaccagctgagtattcaagatttcaaaacccaatatctcaaccctacaagatgcaatcggcgatcatcacaggca

SEQ ID NO: 318226 - DNA, 80 bp, Zea mays
cccacgcgtccgaaaaaaaaaaaaaatttatataaaatgataaaataaaaataaaaaagggaagtaaaaaaaaatcgcga

SEQ ID NO: 318227 - DNA, 425 bp, Zea mays
caccaagcgaagctacctagcaacgacttaacaacaatggctaccaagatattagcccgtccttgcgcttcttgccctttttgtgagcgcaacaaatgcgttcattattccacaatgctcacttgctcctagtgccattataccacagttcctccgaccagttacttcaatgggcttcgaacacctagctgtgcaagcctacaggctacaacaagcgcttgcggcgagcgtcttacaacaaccaattaaccaattgcaacaacaatccttggcacatctaaccatacaaaccatcgcaacacaacagcaacaacagttcctaccagcactgagccaactagatgtggtgaaccctgtcgcctacttgcaacagcaggtgcttgcatccaacccacttgctctggcaaacgtaactgcataccaac

SEQ ID NO: 318228 - DNA, 407 bp, Zea mays
gcaacatagaaagcacaatagtgtaccaacaatggcagccaaaatattttgcttcctgatgctccttggtctttctgcaagtgctgctaccgcgaccattttcccgcaatgctcacaagctcctatagcttcccttcttcccccatacctctcatcagcggtgtcttcagtatgtgaaaacccaattcttcaaccctacaggatccaacaggcaatcgcagcaggcatcttacctttatcacccttgttcctccaacaaccgtcatccctattacagcagttacctttggtgcatttgttggcacaaaacatcagggcacaacaactacaacaacttgtgctagcaaaccttgctgcctactctcagcaacagcagtttcttccattcaaccaactggctgcattga

SEQ ID NO: 318229 - DNA, 376 bp, Zea mays
acgcagccatataaagcacaaaactataccttcactaccatccaaaacatcatactggctggtcctacttgcactttcttcaatacctgctacccaaacccttttaccacaatactcacattattctatagtatacctactacacccatacctctcatcacacataccttaactatcttaaaacaccaatctaaatacctacacaatccaccactatctctatacatgaatcttaccataatcacacattttccactacaacccacatacatataacatcaaacatatctaccacatttactcaaacacaacatcaggccacaccaacaactacacctctaactatcaaacacaattacctacacttaaaaccacc

SEQ ID NO: 318230 - DNA, 402 bp, Zea mays
ggcttctcctccccctccggttcgggttcgggttcgtgaggttctccggggttcggtgtcgtgggtgagcggatcgagatggcggcgtcggatgttgagtaccgctgcttcgtcggcggcctcgcctgggccacggacgaccactccctccacaacgccttcagcacctacggcgaggtcctcgagtccaagatcatcctcgatcgggagacgcagaggtcccgcggcttcggcttcgtcaccttctccacggaggaggcgatgcggaacgccatcgagggcatgaacggcaaggagctggacggccgcaacatcaccgtcaacgaggcccagtcccgcggcggccgtggaggcggcggcggtgggtacggtggtggccgtggaagcggcggctacggcggt

SEQ ID NO: 318231 - DNA, 386 bp, Zea mays
cctggctctcgctgcgagcgccacctccacgcatacaagcggcagctgcggctgccagccaccgccgccggttcatctaccgccgccggtgcatctgccacctccggttcacctgccacctcctgtgcatctcccaccgccggtccacctgccgccgccggtccacctgccaccgccggtccatgtgccgccgccggttcatctgccgccgccaccatgccactaccctactcaaccgccccggcctcagcctcatccccagccacacccatgcccgtgccaacagccgcatccaagcccgtgccagctgcagggaacctgcggcgttggcagcaccccgatcctgggccagtgcgtcgagttcctgaggcatcagtgcagcccga

SEQ ID NO: 318232 - DNA, 435 bp, Zea mays
ccgacgcgtccgcatcgatcacacacactcatacgccgcgaatccacacgcatctccggctcgagtctccagttctccaccttgccagcgtctctccacgtacgccatggacgggtcggcgttcccgtcgctgtcgccggagctccgcgacgcgctcgccaaggtggccgtgttcgtgctcgtccaggggctggtctacctcatcctccgcagctcctccgacgtcttctccaaggacggccggctcaggtccctcagcttccgccccatgcgctccatgagcgtcaggcgcgtgctggcgccgctctccgacgtccccgtcggcacccaacaacgccctttccatcgttgtcgccccgccgcgacgtcgtcgcaccgcaaagctgcccgcgaggattgaaatggccgccacttctgggcagcttgcagttgcag

SEQ ID NO: 318233 - DNA, 417 bp, Zea mays
  unsure (1)..(417): unsure at all n locations
cccacgcgtccgcccacgcgtccgcccacgcgtccgcccacgcgtccgcgggcgcggggggaccaacaagcaacatagaaagtggaatccagtagcaacaatagagcaacaatggcgaccaagatattttccctccttatgctccttgctctttctgcatgtgttgctaacgcgacaattttccctcaatgctcacaagctcctatagcttccattcttcccccataccttgcatcaatgatagcttcagtatgtgaaaacccagctcttcaaccctataagctccaacaagcaatcgcagcacgcaacatacctttatcaccctcgattcaacaatcgtcagccctatctttggtgcagtcattggtacanaccatcagggcacagcagctgcagcaactcgtgctacctgtgatc

SEQ ID NO: 318234 - DNA, 288 bp, Zea mays
cggacgcgtgggaaaaaaaaaaaaaaataaaataaaaaaaaaaaaaaaaaaaaaaaaagaaaagtaaaaacaaaaaatttaaaaaaaaaaaataaaaataaaaaaaaaataaaataaaataaataaaatattaaaaaaaattaaataaaattaactaaaaataaatttaaaaaaataaaaattgattaaaatattaaaatatccaaactttaatcaaattgcataataatccaattttcaaaaactggattaatatttgaaaaagcctttaaaatatcaattttaaaa

SEQ ID NO: 318235 - DNA, 407 bp, Zea mays
  unsure (1)..(407): unsure at all n locations
cgatcgacaccatgagggtgttgctcgttgccctcgctctcctggctctcgctgcgagcgccacctncacgcatacaagcggcggctgcggctgccagccaccgccgccggttcatctaccgccgccggtgcatctgccacctccggttcacctgccacctccggtgcatctcccaccgccggtccacctgccgccgccggtccacctgccaccgccggtccatgtgccgccgccggttcatctgccgccgccaccatgccactaccctactcaaccgccccggcctcagcctcatccccagccacacccatgcccgtgccaacagccgcatccaagcccgtgccagctgcaaggaacctgcggcgttggcagcaacccgatcctgggccagtgcgtcgagtttctg

SEQ ID NO: 318236 - DNA, 400 bp, Zea mays
cccacgcgtccgcggacgcgtgggcggacgcgttggataggcttcaacaagcaatcgggacaggcaacatacctttatcgcccttgttgtttcaacaatcgccagccctatctttggtgcagtcattggtacaaaccatcagggcacaacagctgcagcaactcgtgctacctctgatcaaccaagtagctctggcaaacctttctccctactctcagcaacaacaatttcttccattcaaccaactgtctacactgaaccctgctgcttatttgcagcaacaactattaccatttagccagctagctactgcctactctcaacaacaacaacttcttccatttaaccaattggccgcactgaaccccgctgcttatttgcagcagcaaatactactacc

SEQ ID NO: 318237 - DNA, 61 bp, Zea mays
cggacgcgtgggaaaaaaaaaaaaaaaaaaaaaaaaaaaaaaaaaaaaaaaaaggaagggg

SEQ ID NO: 318238 - DNA, 247 bp, Zea mays
catgaaaccagcggaccctatttgcacagctggtatcctcctaaagatgagctagggacaaactctatttacctgacgcaacctcagcttactccgaccctttggcgtcgagcgcatgcacctaaacaggactcttaatgctctgttcactgcttctcacaaactgttgtattttcaccataacaatttgacctcaattagcagcagctaaatacataacgatttatacgactgaccaaccaaaggt

SEQ ID NO: 318239 - DNA, 414 bp, Zea mays
cggacgcgtgggttcagaaacacaccaagcgaagcacattagcaacaacctaacaacagtgggtaccaagatattatccctccttgcgcttcttgcgctttttgcgagcgcaacaaatgcgttcattattccacaatgctcacttgctccaagttccattattacacagttcctcccaccagttacttcaatgggcttcgaacacccagctgtgcaagcctataggctacaacaagcaattgcggcgagcgtcttacaacaaccaatttcccagttgcaacaacaatccttggcacatctaacaatacaaaccatcgcaacgcaacagcaacaacaattcctaccagcactgagccacctagccatggtgaaccctgccgcctacttgcaacagcagttgcttgcatcaaaccc

SEQ ID NO: 318240 - DNA, 344 bp, Zea mays
cccacgcgtccgtccacgcgtccgaaaaaaaaaaaaaaaaaaaaaaaaaaaaaaaaaagaaaaaaaaaaaaaaaaaaaaaaaaaaaaaaaaaaaaaaaaaaaaaaaaaaaaaaaaaaaaaataaaaaaaaaaaaaaatttaaaatatatttattttttttggtttaaaaaaaaaaataatttgggcacgttttaatgttttaaattttactttcattttatttcaattgtatattttttatttagtgtaacttaatttaattttattggcagtatttttaaaactccggtactggaaaaacctttggtttacctaatttattctctttagagaaaatccctttt

SEQ ID NO: 318241 - DNA, 393 bp, Zea mays
cgacccaggcgtgcggttggcttctcctccccctccggttcgggttcgggttcgtgaggttctccggggttcgggttcgtgggtgagcggatcgagatggcggcgtcggatgttgagtaccgctgcttcgtcggcggcctcgcctgggccacggacgaccactccctccacaacgccttcagcacctacggcgaggtcctcgagtccaagatcatcctcgatcgggagacgcagaggtcccgcggcttcggcttcgtcaccttctccacggaggaggcgatgcggaacgccatcgagggcatgaacggcaaggagctggacggccgcaacatcaccgtcaacgaggcccagtcccgcggcggccgtggaagcggcggcggtgggtacggtggt

SEQ ID NO: 318242 - DNA, 258 bp, Zea mays
gttccttatccgtagagtgtggcgaattcgagctccaacttcagtgggtccacctgcgtggctctaagggtgtatgagaagagttatgagcgctgcctagcttgcactgctcaggttcttcgcttcacattaaagtaatctatttgaactgtagttgtaatctatagagataaaagcagtgtaaaaatagtagaaatcgttatggattaaagacagtcgacccagctcttgctagttgaaaagaacccagctcttgcc

SEQ ID NO: 318243 - DNA, 381 bp, Zea mays
  unsure (1)..(381): unsure at all n locations
gcgacatagaaagcacaattgtggtccctcaatggcaggccaaataatttggtttcctgatgctcctgggtctttctgcaagtgctgctaccgcgaccattttcccgcaatgctcacaagctcctatagcttcccttcttcccccatacctctcatcagcggtgtcttcagtatgtgaaaacccaattcttcaaccctacaggatccaacaggcaatcgcagcaggcatcttacctttatcacccttgttcctccaacaaccgtcatccctattacagcagttacctttggtgcatttgttggcacanaacatcagggcacaacaactacaacaacttgtgctagcaaaccttgctgcctactctcagcaacagcagtttc

SEQ ID NO: 318244 - DNA, 132 bp, Zea mays
agccttccgaaaaaaaaaaagcacaataaaaaaactttcataaacaaacaaaataaaaaaaaaaaggggggcggctttataagtcccaaacttccgatcccgtgaatacaacgccataattcttataaacgg

SEQ ID NO: 318245 - DNA, 411 bp, Zea mays
cggacgcgtgggctagttctagatcgcgagcggcgccctttttttttttttttttttgttttttttttgacgctcaaaaaagatgttttggattagattacatccaccatctgtttaataacagtgcatccttcatctcatgattaaaatatagagagatgcaaaggaggttcaggaacaaaaaaacaacttgctaaataaaacactgctatttactaacaaacatctaacaggttctacccagtactaaaacacaagtaaaaaccgttcagatgttctaatctctctctctctctctctctctctctctctctcttttcactgagaggttagcttcggctcaatccgtcagcaagccaaacacactgaacgccgccaatcggatgcccagccatgacggccaaaacacct

SEQ ID NO: 318246 - DNA, 189 bp, Zea mays
ggaacaaaacaaaatatcttgggcatttaacttggtcaaaacaagtagaaaagctggagcaacattgccaactgactcttgggagactacagagcccggttacagctcaagaattcaaagcttagcattgcacaattatgctggtttggtggaaggttttgagttaatcatatctaaactgagttggtt

SEQ ID NO: 318247 - DNA, 356 bp, Zea mays
cgccagccctatctttggtgcattcattggtacaaaccatcatggcacatcatctgcggcgactcgtgctacctctgatcaaccaagtagctctggcaaacctttctccctactctcagcatcatcaatttcttccattcaaccaactgtctacactgaaccctgctgcttatttgcagcatcaactattaccatttagccagctagctactgcctactctcagcaacaacaacttcttccatttaaccaattggccgcactgaaccccgctgcttatttgcagcagcaaatactactaccatttagccagctagctgcaacaaaccgtgcttacttcttgacacagcaacagttg

SEQ ID NO: 318248 - DNA, 421 bp, Zea mays
tcgtccaatgcaacggccagtggtgaccggttttcccttgggggacaaccggccggcctggcggccttctggaccccccagctggcagatctgtctaatctgtacaatgacctgctgatggtgtttcggtttcgagaagagaaaacggtcccacaactcgttaattcaaagcaacccatccgttgtggtgaacaggggaaaacttctgatttgggtgatgcatcggagtccgattcggatggggattgtcaatctggcaaagaacttgcaccaccagttcagaagcatacaagagccaaccggaagcatatagatagcattactttagttgatatagctcagtacttccatcttccaatccgagatgcatcaaagacactcaagattggggtcagcatattgaagaggaaatgccgacagt

SEQ ID NO: 318249 - DNA, 133 bp, Zea mays
cagaaacacacctagcgaagcgcactatcaacgacctaacaacaatggctttcaagacggtaggccttcttgcgcttcttgccctttttgtgagtgccacaaatgcgttcattattccacaatgcttacttgc

SEQ ID NO: 318250 - DNA, 380 bp, Zea mays
cccacgcgtccgcggacgcgtgggattgagaccaacaagcaacatagaaagtggaatgcagtagcaacaacagagcaacaatggcgaccaagatattttccctccttatgctccttgctctttctgcatgtgttgctaacgcgacaattttccctcaatgctcacaagctcctatagcttcccttcttcccccataccttccatcaatgatagcttcagtatgtgaaaacccagctcttcagccctataggctccaacaagcaatcgcagcaagcaacatacctttatcacccttgttgtttcaacaatcgccagccctatctttggtgcagtcattggtacaaaccatcagggcacagcagctgcagcaactcgtgcta

SEQ ID NO: 318251 - DNA, 429 bp, Zea mays
  unsure (1)..(429): unsure at all n locations
cagcacaacagttacctttggtgcatttgttggcacanaacatcagggcacaacagcgacaacaactcgtgctagcaaaccttgctgcctactctcagcaacaacagtttctgccattcaaccaactagctgcattgaactctgctgcttatttgcaacaacaactagtactaccattcagccagccagctgctgcctacccccagcaatttcttccattcaaccaactagcagcattgaactctcctgcctatgtacagcagcaacaactactaccattcagccagctagctgctgtgagccctgctgccttcttgacacagcaacaattgttgtcgttctacctgcacgctgcgcctaacgttggcaccctcttacaactgcaacaattgctgccattcaaccaacttgctttgacatacccagcag

SEQ ID NO: 318252 - DNA, 206 bp, Zea mays
attcttatattttttatactttatttttttttttagtttgtttttattattttttttttttttttttttttttttttttttttttttttttttttttttttttttataattttttttttttttttttttttttttttttttttttaattttttttattatttttttattttttttttttaaaaaaaaaaaaatttttttttttttt

SEQ ID NO: 318253 - DNA, 242 bp, Zea mays
tggccggacccttggccattaatggagaagaaggttcccaactgcaaaggaaggatgcttccttaccaagggaaaaattggttgtatccaaggatggcattactgaccaccaaattaatgaccagaaaagaaccccaaattctgttgcccgaactaccgtgagccctccaaggtcaaaggatgctgacatggatgatgtgaaacccacaagcttaagctctcggagctacctgaaaagtgca

SEQ ID NO: 318254 - DNA, 188 bp, Zea mays
tcggagaaaataagagaagataagacgaaagcacttcttgcgttgaaagctgatgacaggggaggggaagttcacaaagatcctcgttctatgcagccactttcaaaccagaaaggaaattcttaaattctcattaagcttggttcttaccaggattacaagaatggaaattcttaaccttattaacc

SEQ ID NO: 318255 - DNA, 264 bp, Zea mays
tcccactcgtcctcccacgcgtccgcctactcgtccgcccacgcgtcctaaaaagaaagaaaaaaaaaaaaaaaaaaaaaaaaaaaaaaaaaataataaaaataatataaaaattattaacttcttaaacttattcatacaactttataattattatattattttatctaatttcattaatctaatctacttactcacatcttttttaaactgcttaataccttatgttatcaattttgatattatatttgtacatcataattt

SEQ ID NO: 318256 - DNA, 350 bp, Zea mays
ccccagcaatttcttacattcaaccaactggcagcattgaactctcctgcttatttagagcagcaacaactactaccattcagccagctagctggtgtgagccctgctaccttcttgacacaaccacagttgttgccgttctaccagcacgctgcgcctaacgctggcaccctcttacaactgcaacaattgctgccattcaaccaacttgctttgacaaacctagcagtgttctaccaacaacccatcattggtggtgccctcttttagatttcttatgagttatagttcaataataaagttttttgtctgatgtttgtggcttcccagaaataagaaagtacatttct

SEQ ID NO: 318257 - DNA, 341 bp, Zea mays
ggttcttcttattcctcaaaatccttgtcccctattttagttgcctcctcatatatctgatctaccacatcaacctgtcactaatcattgcttacttatataagaacataagtagtatttgctattgtcaagtgttgcccttcttgatacaagttgtgttttcgtatcattattattatgcactgtcatcttacgtgtatatctcgtatgtgttattgtcaactttataaaagcacactctgtttgcctaaaaaaaaaaaaataaacaaacctatatctggtgcgtatatttatacaaacaatcaatgcattaatatatttatattaaatttatatatatc

SEQ ID NO: 318258 - DNA, 368 bp, Zea mays
  unsure (1)..(368): unsure at all n locations
nctggtttcaccaatcgccagccctatctttggtgcagtcattggtacaaaccatcagggcgcagcagctgcagcaactcgtgctacctgtgatcaaccaagtagctctggcaaacctttctccctactctcagcaacaacaatttcttccattcaaccaactgtctacattgaaccgtgctgcttatttgcagcaacaactattaccattcagccagctagctactgcctactctcagcaacaacaacttcttccatttaaccaattggccgcactgaaccccgctgcttatttgcagcagcaaatactactaccatttagccagctagctgcagcaagccgtgcttccttcttgacacagcaacag

SEQ ID NO: 318259 - DNA, 164 bp, Zea mays
tataaactacaaccttatatatttcctgcttatattcatcttctacttcatccaacatatcataaatcttaactattcccacctcatatttagtttccaaattaacatcaagcacattattactctacttcatcactatcatctttcaacatattatagataat

SEQ ID NO: 318260 - DNA, 416 bp, Zea mays
cccacgcgtccgcccacgcgtccggctgcactcgcaagcaatacatctcgtcgttcgactaagatcgaggagcaaatggcggccaccttgaagctcaggatcctcatcgtggcggcggccgtcgccgcgtccctggtcggcacggcctcagcggcagagggaccggcgcccgctccgacgtccgccgccgcgtccatggccgcgccggccgttgccgctgcgtccttcaccgcgcttgtcttcggctacctcttctgaacgccgtgaacattcacgcgtacaccgtgttgccccagccgaattgtttgcctgctcagatttttcttcttctctgtctcgctctcgtgttttggtgtgtataggtttgtaattacgtgttcattttttttattgcgtgaccatggatctcgtaatta

SEQ ID NO: 318261 - DNA, 237 bp, Zea mays
cccacgcgtccggaattattagctgggtagctaattaccatgatcggtttatttagttgtctgtttgagaattctttggccagaacgaagaagaattctttttttcttccttgctggtattcatcatatctgcgaggatacgaactgattaattagacctagtcgaactcatatatatacatagtgtgtaaattcaaataagatgatggaacaggttatatgcaattctttcgcttc

SEQ ID NO: 318262 - DNA, 438 bp, Zea mays
  unsure (1)..(438): unsure at all n locations
ccgacgcgtccgcggcagtgcgtagagaggatcgtcgaacagaacagcatgaagatggtcatcgttctcgtcgtgtgcctggctctgtcagctgccagcgcctctgcaatgcagatgccctgcccctgcgcggggctgcagggcttgtacggcgctggcgccggcctgacgacgatgatgggcgccggcgggctgtacccctacgcggagtacctgaggcagccgcagtgcagcccgctggcggcggcgccctactacgccgggtgtgggcagccgagcgccatgttccagccgctccggcaacagtgctgccagcagcagatgaggatgatggacgtgcagtccgtcgcgcagcagctgcagatgatgatgcagcttgagcgtgccgctgccgncagcagcagcctgtacgagccagctctgatgcagcagcagcag

SEQ ID NO: 318263 - DNA, 318 bp, Zea mays
attggagcaacaatggcgaccgagatgttttccctccttatgctccttgctctttctgcatgtgttgctaacgcgacaattttccctcaatgctcacaagctcctatagctgcccttctttccccataccttgcatcaatgatagcttcagtatgtgaaaacccagctcttcaaccctataggctacaacaagcaatcgcagctagcaacatacctttatcacccttgtttcaacaatcgccagccctatctttggtgcagtcattggtacaaaccatcagggcacatcagctgcaacgactcgtgctacctgtgatc

SEQ ID NO: 318264 - DNA, 394 bp, Zea mays
ccttggttagacccacctgcctccttaaaagccccattatggtcccaccatgggtggccaaataatttggcctcctaatcctcctgggcctttctgcaagtcctgctacaacaaccattttcccgcaatgctcacaagctcctatagcttctcttcttcccccatacctctcaccagcgttgtcttcagtatgtgaaaacccaattcttcaaccctacaggatccaacaggcaatcacagcaggcatcttacctttatcacccttgttcctccaacaatcatcagccctattacatcaattacctttggtgcatttattggcacaaaacatcagggcacaacaactacaacaactcgtgctagcaaaccttgctgcctacgctcagcaacagca

SEQ ID NO: 318265 - DNA, 289 bp, Zea mays
aagccttccgttgcctgaaggtcctgttccccggttaagggattatttctgccggctcttagttcggggggattgacggttcggggggacttgacgcctgcgaatctgtcgagtcaaaagatgagaatttgaagcgtaatgtaacgctgtagaccaatgctggctctgaacatacatatgatcagagtgatgagggtgagctctgtgagcttcagactacggaatacagataattttggaccaagtgcttggagttcacttggattggattctgctgaattttctggta

SEQ ID NO: 318266 - DNA, 218 bp, Zea mays
cggaaagcacccgtgagtactttaggtacccagagcctttgacacttggggctgttcttcgaatctaatttcagctgttgcatggttgttgcccttaagttccggttttccctttttaacaagtggccgtaaggttcatttttttgaatttaaaaaaattgctaaaggccggaattattatggtttttaactggaaaattaaccttaccttaaaaagg

SEQ ID NO: 318267 - DNA, 394 bp, Zea mays
ggagacgcagaggtcccgcggcttcggcttcgtcaccttctccacggaggaggcgatgcggaacgccatcgagggcatgaacggcaaggagctggacggccgcaacatcaccgtcaacgaggcccagtcccgcggcggccgtggaggcggcggcggtgggtacggtggtggccgtggaggcggcggctacagcggtggcgggcgccgtgatggcggcggcggctacggcggtggcggcggctacggtggcggcggcggctacggtggtggtggcggcggctacggcggtggcaaccgtggcggcggctacggcaactccgacgggaactggaggaactgagcggtggtgcccgcgcggccaagttatcctgttcgctgccgtgatgtttaccct

SEQ ID NO: 318268 - DNA, 440 bp, Zea mays
cccacgcgtccgcccacgcgtccgaccacgcgtccgcaaaagaaaaaagaaaggttatgggaaaataaaaaaaaaaaaaaaaagaaaaaaaaaaaaatgaaaaaataaaactataaaacaaaaaaagaaaaaattaaaaataaaaaaaatacgacagaaaaaaaaaaaaaaaaaaaaaaaaaaaaaccaaataattaaaaaattactacaaaataaattaatccaaaaaaaattagataacaatttaaaattaaaaataaaagaaaataaaatgaaattttaaatttaaaatttctataacaaagaataaaaaaaaattttaattaatctaaagactaaaaaaccgggttacctaataaaaaaaaacgtaaaaataaaaaaaaatatggcttaaaattaaatccggaataaaaaaaattattcaaattaaatttaagaat

SEQ ID NO: 318269 - DNA, 293 bp, Zea mays
aaaaaattaatcaccaaattataataaaacacaaataaagtcgtattatctactaactcaacaccttaatcatacaaccactaactttcacatcacatcattactaaatctctttaaaacataccacacttttaattcctctaaccaacattataacatcctctactatacaacacactcatctaacatacctctaactattacacactcatacttctttatatccataatccttcctaccacaataactcctaaacataattacactcctaaaaacattagaacctcatata

SEQ ID NO: 318270 - DNA, 104 bp, Zea mays
aagaacacataaagcaaattatgctagctctaataagaaagaaaaaagaaaaaaaacgagaaaagagatctaataaaaaaactaagggccggcccttctaacga

SEQ ID NO: 318271 - DNA, 357 bp, Zea mays
cacactcttccgctagcatcattgaatttacaaatgtataccatcattcacaggcatgatataccacatcattatcctcttaggctacctctcaacctcagcaatcgtatcaaaactactacatctctcacactctcctatatcctactttcaatcttaatacctcataataacattgacattctgtgtgtcaacactcatatgatcactcttacaagctccaacaagcacatctaaaatcgcatcttataattatcaaaccagttctcaaagcatccattaactctattactataaatacctttcgaccatacttactatcaaatcatcaagctaccacaactacaacaacttata

SEQ ID NO: 318272 - DNA, 429 bp, Zea mays
  unsure (1)..(429): unsure at all n locations
aacacacctagcgaagcgcactagcaacgacctaacaacaatggctaccaagagattgtccctctttgcgcttcttgccctttttgtgagcgcaacaaatgcgttcattattccacaatgctcacttgctcctagtgccattattccacagttcctccctccagttacttcaatgggcttcgaacacccagctgtgcaagcctacaggctacaacaagcgcttgcggcgagcgtcttacaacaaccaattgcccaattacaacaacaatccttggcacatctaaccatacaaaccatcgcaacgcaacagcaacaacaatttctaccagcactgagccaactagctgtggtgaaccctgtcgnctacttggcacagcagttgcttgcatccaacccacttgcttttgcanacatagttgcataccaaca

SEQ ID NO: 318273 - DNA, 443 bp, Zea mays
gcgaacacacctagcgaagcgcactagcaacgacctaacaacaatggctaccaagaggttgtccctctttgcgcttattgccctttttgtgagcgcaacaaatgcgttcattattccacaatgctcacttgctcctagtgccattattccacagttcctccctccagttacttcaatgggctttgaacacccagctgtgcaagcctacaggctacaacaagcgcttgcggcgagcgtcttacaacaaccaattgcccaattacaacaacaatccttggcacatctaaccatacaaaccatcgcaacgcaacagcaacaacaatttctaccaacactgagccaactagctgaggtgaaccctgtcgactacttgcaacagcaattgcttgcatccaacccacttgctctggcaaacatagttgcataccaacaacaacaacaat

SEQ ID NO: 318274 - DNA, 398 bp, Zea mays
attttgagcattcagaaacacaccaagcgaagctacctagcaacgacttaacaacaggggctaccaagatattagccctccttgcgcttcttgccctttttgtgagcgcaacaaatgcgttcattattccacaatgctcacttgctcctagtgccattataccacagttcctccgaccagttacttcaatgggcttcgaacacctagctgtgcaagcctacaagctacaacaagcgcttgcggcgagcgtcttacaacaaccaattaaccaattgcaacaacaatccttggcacatctaaccatacaaaccatcgcatcacaacagcaacaacagttcctaccagcactgagccaactagatgtggtgaaccctgtcgcctacttgcaacagcaggtg

SEQ ID NO: 318275 - DNA, 159 bp, Zea mays
  unsure (1)..(159): unsure at all n locations
gcggcacaactctctcgcaggcttctctcccctctgcgcccttcccgcagcacccctgctcgcatcggctctctccacaggactgctccgngcgcgccgaccccatcgccggcaaggcggcggtgctgctgcatattctcccgtcccccctccggagcc

SEQ ID NO: 318276 - DNA, 404 bp, Zea mays
gtgcgtcagcattcaaaaacacaccaagcgaagcgcactatcatcgggctgacaccaatggctaccaagatattagccctacttgcgcttcttgcccttttagtgagcgcatcaaatgcgttcattattccacagtgctcacttgctcctagtgccagtattccacagttcctcccaccagttacttcaatgggcttcgaacatccagccgtgcaagcctacaggctacaactagcgcttgctgcgagcgccttacaacaaccaattgcccaattgcaacaacaatccttggcacatctaaccctacaaaccattgcaacgcaacaacaacaacgacagtttctgacatcactgagccacctatccgtggtgaaccctgtcacctacttgcaacagcagctgct

SEQ ID NO: 318277 - DNA, 233 bp, Zea mays
tcgcggtcgctaggggctggccagacagactactggcccagtataatgccgattaaccaagacggctactagtacaatacaccgaactacagattcgtgctcgcgatttaccagacacgacatcacaacccatagcatatctgctaggatagcacgtgacatggctcttgctatctgccactcgcatgagatgacacgaaactgtctcaaagttcctctgaccaactattcag

SEQ ID NO: 318278 - DNA, 416 bp, Zea mays
gaccaacaagcaacatagaaagtggaatccagtagcaacaacagagcaacaatggcgaccaagatattttccctccttatgctccttgctctttctgcatgtgttgctaacgcgacaattttccctcaatgctcacaagctcctatagcttcccttcttcccccataccttccatcaatgatagcttcagtatgtgaaaacccagctcttcagccctataggctccaacaagcaatcgcagcaagcaacatacctttatcacccttgttgtttcaacaatcgccagccctatctttggtgcagtcattggtacaaaccatcagggcacagcagctgcagcaactcgtgctacctgtgatcaaccaagtagctctggcaaacctttctccctactctcagcaacaacaatttcttcc

SEQ ID NO: 318279 - DNA, 127 bp, Zea mays
cggacgcgtgggttcggcttggttgatctctctccttccctctttgcgtcaggaagcggcagcttgcaaacctggtctcagcactgtaattatttcttctgttctaccacatcttttgtttgttgtt

SEQ ID NO: 318280 - DNA, 372 bp, Zea mays
aagaaagaagggtcccaaggtccttctaggaaaaaggatactggtggaaagatggccgagggttacagtaagcgtcagatgatgaacatcaggcctgtgaattacaactccatagacaacgacattacatcaagcactgacagcactactatataagtttatcatgcaagactattgcatcaagagtgttgctgtctcttgcagcaagagacaacatgtatgtatacgctggcgatcaatagggcaacctgagctctttaccagcagcttcaaccaagttttacgtgcacacaggattggctgacagaattagcccaacggacagctactggaagtaggatccctgaaggttatatcgatttacactttttt

SEQ ID NO: 318281 - DNA, 406 bp, Zea mays
  unsure (1)..(406): unsure at all n locations
gaaaattgactgacaagcctacagtttgggaaggtagactcaactgctttgacaccagtggagaagtttgaaacttggaaggagattaaaattatgagtatggtatttcttatattatctacgctatgcatgacttgctgggtctattcattgtctaattataaatatgcatttctaacaatgttattgttcttgtggcttttctctgatttcttacgtttcagaaaaatagtttctgcaatgtgggcaatgacattgcttagcttgtatgttagagttcatgtcaccatattaggtacccatctctactaggattttgcccagtgtacaaatggtgcacagttacaagtacatctatgctccagcctnctcattctatgctcaagcattatcgtatgaatggctt

SEQ ID NO: 318282 - DNA, 173 bp, Zea mays
  unsure (1)..(173): unsure at all n locations
gtactcggtctcggaattctccgggttcgtacccacgtcgtctcgtcagatgaagtcttaattgaggggttatctcccaagnggtcgtacctgtcttcgtaaaggaaagtactggtggagttccactttaagtcgtaagatgggatgaaaaacatagtctctatgannattag

SEQ ID NO: 318283 - DNA, 414 bp, Zea mays
ttacttttacagaagtaaatgcaaaacgtgtactttcaaaggcaaaggtcatttgtgtttcttcctagatctgattgtaccatataaatctgtcacaagtcttgcctctctcacctgatcttatttgtagtctgcatgctccatgtcccttggccttggggagagcaccataagcgcttcatcggtgcttgccatgcctatggtctcgtcaagaacaaccggcttcagaggaatcgaaaatgaccgtccaaagtatgtccctttaagaaccactgattggagtaacctatagctgatggtaatatataggtacacaggaaaggtctttgtttttttatgttgcctagcggatggcagtgaagttttttgttgcttccagaggcgcaactgtttgttgtgatcgtagctagctat

SEQ ID NO: 318284 - DNA, 111 bp, Zea mays
tctcccctcgtccgctcataccgacatgtgttttctaaaagatctatatttattaattagtaggattaatcacatgtttatattaacaaacacagtcttccgactcatagt

SEQ ID NO: 318285 - DNA, 68 bp, Zea mays
tcgcagaaaaaaacgctcataccgacatgtttttaataagaaaaaaaaatttaaaaaataagaaggtt

SEQ ID NO: 318286 - DNA, 397 bp, Zea mays
tcgttggcatcgattaatctcgggacattgtcatagagagtgcacgcaggatgttcatcgagacggttgcagcccagcatgaagagcggtaagaagaggatagtgactaagcttatattgtttgtgtttgcattcctcagctggcagattcaatttggttccaacgttcactgatactatgtgatattgtgggtcaaattttccagggttttcttattacctggttgagcgcttgaatctgtcaacagtttatggatcatattgcattacagttagagatgtctgcgtgggtcagcaaaatcttggtgttagtaaccttttgagctgtgacataacttctttatcttatttaacacatcaaagatgattagtgcacttatatcgttgcatgataaat

SEQ ID NO: 318287 - DNA, 52 bp, Zea mays
gatatgtgcaacttctcagtaataaaagattagagatctatattttaagttc

SEQ ID NO: 318288 - DNA, 229 bp, Zea mays
cggacgcgtgggtgtcgttctacctgcacgctgcgcctaacgttggcaccctcttacgactgcaacaattgctgccattcaaccaacttgctttgacaaacccagcagcgttctaccaacaacccatcattggtggtgccctcttttagattgcttatgagttatagttcaataataaagtttttttgatgatgtttgtggcttcccagaaataagaaagtacatttct

SEQ ID NO: 318289 - DNA, 320 bp, Zea mays
cccacgcgtccgcccacgcgtccgttgtcacgtgggcttcctctggctctgctgtgaggtgcaagcattgctgatgctgcatgtgtgtgtgcgatcagtgactggctgctggttcatagaacatgaactgaaagaaggatgattaagggctttgtcaatcgccgttacaactgcatcccatgcgcatgctcgcttagtagattgggtataatttggcttggcacacccagcatcattatgtgctgatctgttatcctttactagctaggtcgcccgatatatctctacctttttggggaatggtctactgtgtactgaaa

SEQ ID NO: 318290 - DNA, 313 bp, Zea mays
aagcgctctatcaacgacctaacaacaatggcttccaagggattatccctccttgcgcttcttgccctttttgtgagtgcaacaaatgcgttcattattccacaatgctcacttgctccgagtgccattattccacagttcctccctccagttacttcaatgggcttcgaacacccatctgtgcaagcctataggctacaacaagcgcttgcggcgagcgtcttaaaacaaccaattgcccaattacaacaacaatccttggcacatctaaccatacaaaccatcgcaacgcagcagcaacaagcactgatcc

SEQ ID NO: 318291 - DNA, 365 bp, Zea mays
cggacgcgtgggttcagaaacacacctagcgaagcgcactagcaacgacctaacgacgatggcttccaagacattatccctccttgcgcttcttgccctttttgtgagtgcaacaaatgcgttcattattccacaatgctcacttgctccgagtgccattattccacagttcctccctccagttacttcaatgggcttcgaacacccagctgtgcaagcctataggctacaacaagcgcttgcggcgagcgtcttagaacaaccaattgcccaattacaacaacaatccttagcacatctaaccatacaaaccatcgcaacgcagcagcaacaagcactgagccacctagccgtggtgaacccta

SEQ ID NO: 318292 - DNA, 136 bp, Zea mays
cccactcgtccgcccacgcgtccgaaataaaaaaaaatactaaaaaaaaaaaaagggggaaacaaaaaaacaaaaaaaaaaacaaataggctcccgatctagacaatcaccaccttactaacgctttcatcctatc

SEQ ID NO: 318293 - DNA, 423 bp, Zea mays
gtgctcagcgacctcaccggcatcaacaacagcaacggttgcttcttaccgagggagcgcgcgcgggttggcgacttggccggcgcgaccttgaacttggacatgcaaggtgaacgctctctgctgccgctagtgtcagctccggtgccgctgccggtgcccgcggaggacgtgcagaacaggttgctctgctctgcctccgcgtctaccagtggacaccctacgcccagcgtctcgccagtgtctcacctgtaccgacactgcgtcgagattgacgcgctagtccgcatcgagaatgagaggctgcgagcggcgctgcaggaggcgcgacgccggcactttcggactgtggtgctgtcagcggaacgtgcagcggctcggcgcctgctgacagacgatgccgaactggtacgcgccatgctg

SEQ ID NO: 318294 - DNA, 258 bp, Zea mays
acgacgcgtccgcccacgcgtcccttcacgcgtccggcgtctccttcgacatcgaaggtagcctgggtgctcctgttccgcgtggagagaacgcgagtacccgacccgattgtgctctctcatttgcacccaaacgggccaacgttacatctcactcgcccgatctgaacactgtactccacgcagaacgattggaacatcctgatcgatattacttgactagacacctacactttcgaacgcgattccactatcagc

SEQ ID NO: 318295 - DNA, 293 bp, Zea mays
agtacgtgttgcaggcggaagaagcgctaactgaggagctacttttgatacggacagggatgactcatatagtgcctccactgattccacgagatcgcatgatcgtatctagtcagatgatgagcttgctatgtcgacaacaagactgtctgctaatgcagcgaatacatacgatgctgcattgtacgcataggccgatgctgctatatccataaacgcggacactttctgtgtactgttagcaactgcatgatactagatcagagtatatatacgtagtgtgacatcgtgct

SEQ ID NO: 318296 - DNA, 374 bp, Zea mays
atagaaagcacaatagtgtaccaacattggcagccaaaatattttgcctccttatgcggcttggtctttctgcaagtgctgctacggcgaccattttcccgcaatgctcgcaagctcctatagcttcccttcttcccccgtacctctcatcagcggtgtcttcagtatgtgaaaacccaattcttcaaccctacaggatccaacaagcaatagcaactggcatattacctttatcacccttgttcctccaacaatcatcagccctattacaacaggtacctttggtgcattcattggcacataacatcagggcacaacaactacaacaacttgcgctagcaaaccttgctgcctactctcagcaacagcagttt

SEQ ID NO: 318297 - DNA, 378 bp, Zea mays
gatcagcaaagcggcagtgcgtagagaggatcgtcgaacagaacagcatgaagatgggcatcgttctcgtcgtgtgcctggctctgtcagctgccagcgcctctgcaatgcagatgccctgcccctgcgcggggctgcagggcttgtacggcgctggcgccggcctgacgacgatgatgggcgccggcgggctgtacccctacgcggagtacctgaggcagccgcagtgcagcccgctggcggcggcgccctactacgccgggtgtgggcagacgagcgccatgtaccagccgctccggcaacagtgctgccagcagcagatgaagatgatggacgtgcagtccgtcgcgcagcagctgcagatgatgatgcagcttg

SEQ ID NO: 318298 - DNA, 400 bp, Zea mays
catagaaagtggaatccagtatcaacaatagagcaacaatggcgaccaagatattgggcctccttatgctccttgctctttctacatgtgttgctaacgcgacaattttccctcaatgctcacaagctcctatagcttcccttcttcccccataccttccatcaattatagcttcaatatgtgaaaacccagctcttcaaccatataggcttcaacaagcaatcgcagcaagcaacatacctttatcgcccttgttgtttcaacaatcgccagccctatctttggtgcaatcattggtacaaaccatcatggcacaacagctgcagcaactcgtgctacctctgatcaaccaagtagctctggcaaacctttctccctactctcagcaacaacaatttct

SEQ ID NO: 318299 - DNA, 408 bp, Zea mays
gtctaattgctgctgttatagctgtttggagcacagctttgcaacaatacgtgagtggtagcatctttaaatgcagatttcttatacgtcacctaaccagtaagattgcttgctacctcctgtttgcaattacctgcaagttcgtcggtgcgctttgagccttttcaaaggacaatatggcacttcagtgacagtgatacttgtttattatggaaagttgttgataattagcagttgtcaaattattcattgggatcaccgcagctttaggatataactccttttttttctggagattatgaatagccactcaccatggccacttgatatctttcatacttgaattgtcagacttcataaatgtgctcatgaatcatgatgccactaatatattgttctttacacaaa

SEQ ID NO: 318300 - DNA, 187 bp, Zea mays
tctctgactcgtggtctgactcgtgggataaaaaaaaaaaataaataaataataaaataaagaagagatttctaactatctaaaaaatccaaaacttacatacacatacatacaacatcataaactcttctataatatcacctaaattcaattaactaaaccatatatttacaacataataacttaa

SEQ ID NO: 318301 - DNA, 363 bp, Zea mays
ccaacgcttccgccaaaatttattaaagaaagagctgaggttgttggtccaattgagttggataatctgggaacgctacacggtgataaggcaagccgaagcattcacatcacatcatttgaaaatcttggtagcgcgaaggttgttgaagcttcctccagttcagacaagaacatggcctgtgatccttcatggacagcatgaatgcctgttatcgaggcacctgatcctgctttgcaggtgaatgctcggaggcacggaaccagaaacaggacttccaccgtgaaagctttagaagctgatgcgtttggacttcttggaagcgggaagcgtaagggtgacatgaagaacagggcgacaagc

SEQ ID NO: 318302 - DNA, 405 bp, Zea mays
gagactcaactgcatcataggctgcactctcgtgtgcgaactttgggcaccacgctggtcgcactgcttatgctacacgaccgctccgcacgcgctgctaccatgaccatcttggcggaatgcttactggctactatagcggatctacttccggcataactctgaccatcgacgtcaccaagatgtgcattcgaattccatcaacgctacaggacactagatgtagcgacagcactgatcataatgtataggagcgtaagacgtcgaacacatacatctcatactacctcagatgcgtatagagcttatacagacacgttgcatgtcgatgctcagatacgtctactgcagctattaaaccttgctgccttagcatatggacaactggaagctttggcgcaatta

SEQ ID NO: 318303 - DNA, 418 bp, Zea mays
cggacgcgtgggtgcgcttcttgccctttttgtgagcgcaacaaatgcgttcattagtccacaatgctcacttgctcctagtgccattattccacagttcctcccaccagttacttcaatgggcttcgaacacctagctgtgcaagccaacatgcaacaacaagcgcttgcggcgagcgtcttacaacaaccaattgcccaattgcaacaacaatccttgccacatctaacaatacaagccatcacaacgcatcagcaacaacagttcctaccagcactgagccacctagccatggtgaaccctgccgcctacttgcaagagcagctgcttgcatccaacccacttgctctggcgaacgtagttgcaaaccatgctcatcatcagctacaacagtttctgccaacgctcagtcaacta

SEQ ID NO: 318304 - DNA, 384 bp, Zea mays
aaaaaacaaaaataaaaaaaaaaaaattaataaaaaaataattacaaaaaaaaatacggaacaaaaaaaaaataaaaaaaatactcacaatatcctggcacccattccaagtctcctaaggtcatgttcacgtatcttctactccacttcactaacatcatgcacactaccttctttctttgcccgttctctttacacattcctaactgatacctccttgatgttaccgatctcaatcacctttttccatttccgcttttctccaactgtctttttccctccgtgccccctaactatcgccactcccatgagctgggccgcttgcccgccaaatgagccacgctcatcctggatcttttaaagactgctgccagtttcgctgct

SEQ ID NO: 318305 - DNA, 285 bp, Zea mays
cccacgcttccggccacagcctgcgaaagaaaatacggtggtaggtcgcataggcaacggctgcatcttgctactatcgccttgatggcagagacaaaatacagcggtggcgccttctacagctaccaacgcaagctacactatagtacgatgtaactacagctatagctaccctcgcaactgctactgcaactccgacgttaaacagaggaactaatgcgaaaaccctgcgcggtcaaattatactgaacgctaacgagatgcccaccctattacatagggttt

SEQ ID NO: 318306 - DNA, 337 bp, Zea mays
caacaagcaacatagaaagtggaatccagtagcaacaacagagcatcaatggcgaccgggatattttccctccttatgctccttgctctttctgcatgtgttgctaacgcgacaattttccctcaatgctcacaagctcctatagcttcccttcttcccccataccttccatcaatgatagcttcagtatgtgaaaacccagctcttcagccctataggctccaacaagcaatcgcagcaagcaacatacctttatcacccttgttgtttcaacaatcgccagccctatctttggtgcagtcattggtacaaaccatcaaggcacagcagctgcagc

SEQ ID NO: 318307 - DNA, 315 bp, Zea mays
gagcaatgcttatacctgatgctgtaactgatcagtcccacaatggatgctaggcgcgctcggctacataagcactaccatatagcatagaatgctattctatgaccatcctacagatcacgaattcatccaaaaccaacttcttgatcctcgtacacccatgggacgcatagtcagtacggctgattatgcttacagaatatcagatttaggagtggctatgaattgatcactgtgttatgaacattaacatcctatgcactatgtgcaacagatcgatgatcatagactcaatgcgatcaacatctacaagac

SEQ ID NO: 318308 - DNA, 425 bp, Zea mays
ctaattctctctcagatcgtccagtgctatttagttatttacaccgtacctgtctgtgcttcgagttctcagtttttagtggcttattggtgaaaatttgttatccgtttgaaatttctcatgcgaacgaggagaaggagatttgacagtgccttggccgtcgacacaatccgccaacacatttgatcattaccagcttctgcaatatgctctagagagcctggtttgtacaaataaagggagaacaggcagatttttgtacagcctgatggcatagcgttagccattgtatcatatacaaggactggcccgagcgaatacgctcctggagtccttttgcacaacgagagcaccacaggatgcattcgtttgtgattgtctgcaatagaaattgcgatgcttccaaattttccagaccgccagcg

SEQ ID NO: 318309 - DNA, 426 bp, Zea mays
gtgcgacaaggacttcgagaggtgggtgtgtgtgcatgcatgcatgcaaacgcaacgtacagctctttcatccagacgatcacatgatccaaactgacctgtgattaggatggtcttgggtttcttacgcgtcgtgaccacggcacacgtgtgactgacggctgcagggcggagatgtacttcaagcaggcggtggccgccgagccggcggacggcgaagcgatgcggaggtacggcatgttcctgtggcacgcccgcggcgacacgggcggcgcggaggacatgttcaccggcgccattgacgcggagcccgagagcagccaccaccggagcagctacgcgtggttcctatggatgaccggcggcgtcgagacctgcctcatggacaccggcaggcagagcgacggcaacgacgcggattgaacc

SEQ ID NO: 318310 - DNA, 450 bp, Zea mays
cgacgccacgcgtacgcgtacgcgctctaagactcgctggtcctggtacgcgagctggcgaagactcaagggggggcaggtgagcacgaggatgacgtcagacgaccgaccaggacgagcagcatatgcacgtgcatggtgctcacgaacttcatcctaactgtggtggaggcgggcacggaagtgatactctagcactgggacgtcaagcggtcatgcaacgtctaccgactgaacgtgctcaacatcctaaattcgctccagtaagactccgcacgtgccgccatatgtactggacagtatgcattgaaagagttgcagtcccaagctgccaagaaagactctatgcccaaggacgacaaacattagatgatcttacaccctgtttcttgtaatgcggtagcagtttgaggtccaagattttgaattggtcctttaaaaaaatggatg

SEQ ID NO: 318311 - DNA, 430 bp, Zea mays
gcgcggacgcgtgggtttggaaacaagtatcatctggatctaatgatcttatgtggggtacggatacaaaatagacatcgacgagtggaacgcaacatgagaacgacgaatccacacggagtgtaagaaccgcttcttctcctctagtcctctgaggagatcggtcggatcagaagactgacgagacgatcgcagagaccacggcgagcgcgacgctgcctcggaccccagcctggagcctgataacggcgctgtcgctcgccgggctgcctccggctgatggcgtgatcttgggaggctttgccaaaaagcccgtagtctggcgagcccggtttcaggttaaccaggttgatgcaaaccgagacgttggcgttggggaggctgcaggcggcggggagcgccaggaggcggtcgaagcgcaggccgagcg

SEQ ID NO: 318312 - DNA, 449 bp, Zea mays
cccacgcgtccgcccacgcgtccgcccacgcgtccgattgagaccaactagcaacatagaaagcacaatagtgtaccaacaatggcagccaaaatattttgcttccttatgctccttggtctttctgcaagtgttgctaccgcaaccattttcccacaatgctcacaagctcctatagcttcccttcttcccccatacctctcaccagcggtgtcttcagtgtgtgaaaacccaattgttcaaccctacaggatccaacaggcaatcgcaacaggcatcttaccattatcacccttgttcctccaacaaccgtcagccctattacaagagttacctttggtccatttggtggcacaaaacatcagggcacaacaactacaacaacttgtgctagcaaaccttgctgcatactctcagcaacatcagtttcttccattcaaccaactggc

SEQ ID NO: 318313 - DNA, 444 bp, Zea mays
attttcagcattcaaaaacacaccaagcgaagcgcactagcaacgacctaacaccaatggctaccaagatattagccctccttgcgcttcttgcccttttagtgagcgcaacaaatgcgttcattattccacagtgctcacttgctcctagtgccagtattccacagttcctcccaccagttacttcaatgggcttcgaacatccagccgtgcaagcctacaggctacaactagcgcttgcggcgagcgccttacaacaaccaattgcccaattgcaacaacaatccttggcacatctaaccctacaaaccattgcaacgcaacaacaacaacaacagtttctgccatcactgagccacctaaccgtggtgaaccctgtcacctacttgcaacagcagctgcttgcatccaacccacttgctctggcgaacgtaactgcatacc

SEQ ID NO: 318314 - DNA, 430 bp, Zea mays
ctgattgccccataccttacatcaatgatagcttcagtatgtgaaaacccagctctgcagcgctataggctccaacaagcaatcgcagcaagcaacatacctttatcacccttgatgtttcaacaatcgccagccctatctttggtgcagtcattggtacaaaccatcagggcacagcagctgcagcaactcgtgctacctgtgatcaaccaagtagctctggcaaacctttctccctactctcagcaacaacaatttcttccattcaaccaactgtctacactgaaccctgctgcttatttgcagcaacaactattaccattcagccagctagctactgcctactctcagcaacaacaacttcttccatttaaccaattggccgcactgaaccccgctgcttatttgcagcagcaaatactactaccat

SEQ ID NO: 318315 - DNA, 304 bp, Zea mays
cggacgcgtgggcggacgcgtgggtagcaacatagaaagcacaatagtgtaccaacggtggcagccaaaatattttgcctccttatgctccttggtctttctgcaagtgctgctaccgcgaccattttcccgcaatgctcacaagctcctatagcttcccttcttccaccgtacctctcaccagcggtgtcttcggtatgtgaaaacccaattcttcaaccctataggatccaacaggcaatcgcagctggcatcttaccttaatcacccttgttcctccaacaatcatcagccctattacagc

SEQ ID NO: 318316 - DNA, 157 bp, Zea mays
  unsure (1)..(157): unsure at all n locations
atcaattgtagattcttacactggatttccaggagcttgggccacatttaccattcgaatcgattggagattcttagaaattcttgacatcattggattatgcctgaaatntttaattaaataacgtcactgaaatgacatttgcgttaagaattgc

SEQ ID NO: 318317 - DNA, 383 bp, Zea mays
tagagagaaggaaaaatatccccaaaccgtagctgccgatctcgatggcgaaccctcgcgtcttcttcgacatgaccgtcggcggcgccccggcgggccggatcgtgatggagctgtacgccaacgaggtgcccaagaccgcggagaacttccgcgcgctgtgcacgggcgagaagggcgtgggcaagtccgggaagccgctccactacaagggctccaccttccaccgcgtcatccccgagttcatgtgccagggcggcgacttcacccgcggcaacggcaccggcggcgagtccatctacggcgagaagttccccgacgagaagttcgtgcgcaagcacaccgtccccggtgtgctctccatggccaacgccgggcccaac

SEQ ID NO: 318318 - DNA, 362 bp, Zea mays
cagaaacacaccaagcgaagcgcactagcaacgacctaacaacaatggctaccaagatattagccctccttgcgcttcttgccctttttgtgagcgcaacaaatgcgttcattattccacaatgctcacttgctcctagtgccattattccacagttcctcccaccagttacttcaatgggcttcgaacacctagctgtgcaagccaacatgcaacaacaagcgcttgcggcgagcgtcttacaacaaccaattgcccaattgcaacaacaatccttgccacatctaacaatacaagccatcacaacgcaacagcaacaacagttcctaccagcactgagccacctagccatggtgaaccct

SEQ ID NO: 318319 - DNA, 421 bp, Zea mays
gaccaagatattttccctccttatgctccttgctctttctacatgtgttgctaacgcgacaattttccctcaatgctcacaagctcctatagcttccctttttcccccataccttccatcaattatagcttcagtatgtgaaaacccagctcttcaaccatataggcttcaacaagcaatcgcagcaagcaacatacctttatcgcccttgttgtgtcaacaatcgccagccctatctttggtgcagtcattggtacaaaccatcagggcacaacagctgcagcaactcgtgctacctgtgatcaaccaagtagctctggcaaacctttctccctactctccgcaacaacaatttcttccattcaaccaactgtctacactgaaccctgctgcttatttgcagcaacaactattaccattt

SEQ ID NO: 318320 - DNA, 95 bp, Zea mays
ggcaggcgttccatcactcgtccggtagggtttttcagagatactccgaaagcatggggcggacatacttacccattgcaatgcaaacagattta

SEQ ID NO: 318321 - DNA, 388 bp, Zea mays
ccggcaaaaaaaaaacaaacacaagaaaaataaattaaaaaaaaacaatttttattttaaaaaaaaaaaaaaaaaaaaaaaggacatggcccaattcataaaatcacattaactacaaaaacaaacctccgctgtaaaaacatcctttatataaccacttgtcctttaaaaaccccacttttaaaatataaaaaacgccttccaaaaaaaaaaatccaaactaacaatacacgtgcatcctacctctaaaactctcccctatttctcacccaaacttaaaaaacttaacctttttttaaaaacgtcccaatttaaaaaacccttactttacttaaaaaaaccgtcattttaaaaaacccttcttttccaacttttattaccctaaaaa

SEQ ID NO: 318322 - DNA, 443 bp, Zea mays
  unsure (1)..(443): unsure at all n locations
gctgcttcgtcggcggcctcgcctgggccacggacgaccactccctccacaacgcctgtgagcacctacggcgaggtcctcgagtccaagatcatcctcgatcgggagacgcagaggtcccgcggcttcggcttcgtcaccttctccacggaggaggcgatgcggaacgccatcgagggcatgaacggcaaggagctggacggccgcaacatcaccgtcaacgaggcccagtcccgcggcggccgtggaggcggcggcggtgggtacggtggtggccgtggaggcggcggctacggcggtggcgggcgccgtgatggcggcggcggctacggcggtggcggcggctacggtggcggcggcggctacggtggtggtggcggcggctacggcggtggcaaccgtggcggcggctacggcaactncgacgggaactggaggaactg

SEQ ID NO: 318323 - DNA, 348 bp, Zea mays
  unsure (1)..(348): unsure at all n locations
cccacgcgtcccgaatttaatctggcctggcttttgcgggggtcaatggttgtcctggttggctggtggtaggtgctttggttacccattattcggattggaaggccgtttgtaaggggcctggctgaataagtccttagtccctggcttacactgctgtgctaccacatgacatgatgtactcgtgtgtgtgctaggatggtgtgtaattacatgaccatgatcagtaatctgaataaaaaatattggagatgtgcttgcttcctaaaaaaaaacatncgtcgacctaatcaatcatagagcccagccagccagtcagtcaagtaagcacaagcacaagcaccaaaa

SEQ ID NO: 318324 - DNA, 91 bp, Zea mays
gttccgggaccccttggcaccaaccccaattttacctataaattcattcagagagccctccagcgggggattaaatggcttcttcgctaac

SEQ ID NO: 318325 - DNA, 315 bp, Zea mays
cccactcgtcctcatgcactttcccttactcatagacctatatgttccataacaattccactttcaccattgtatgttcataaacttcttatacaacatacactaaactataactaccacactccctaaccctatctacttcaatctacttcaccttaaacccttcacaacaactactcctcaatcttcagatcttatccgatattccaacacacactgacattaatcaacattacaattctcatcacatccctactacctatcaccaactatcacactatctataataatatacaataaaaataacacttttca

SEQ ID NO: 318326 - DNA, 231 bp, Zea mays
cccacgcgtgcgcgatgcagctgtctgtcttcaaatatatagctcactcgccggttggtgcggtacggattgatgtgtgcgtacgtgattgaagacggaggcccataagtgcgctgtcagcactggccatgtgcctggctcgatacgactccaacgtcctgctgaccgatgtgaccgcactctcggcggctgtcactttcgtcgcggcgcatgacctctactcgcggtgcc

SEQ ID NO: 318327 - DNA, 366 bp, Zea mays
gaaagtggaatccagtagcaacaatagatcaacaatggagaccaagatatttggcctcgttatgctccttgctctttctacatgtgttgctaacgcgacaattttccctcaatgctcacaagctcctatagcttccctttttcccccataccttccatcaattatagcttcagtatgtgaaaacccagctcttcaaccatataggcttcaacaagcaatcgcagcaagcaacatacctttatcgcccttgttgtgtcaacaatcgccagccctatctttggtgcagtcattggtacaaaccatcagggcacaacagctgcagcaactcgtgctacctgtgatcaaccaagtagctctggcaaacct

SEQ ID NO: 318328 - DNA, 417 bp, Zea mays
ggcttctcctccccctccggttcgggttcgggttcgtgaggttctccggagttcgggttcgtgggtgagcggatcgagatggcggcgtcggatgttgagtaccgctgcttcgtcggcggcctcgcctgggccacggacgaccactccctccacaacgccttcagcacctacggcgaggtcctcgagtccaagatcatcctcgatcgggagacgcagaggtcccgcggcttcggcttcgtcaccttctccacggaggaggcgatgcggaacgccatcgagggcatgaacggcaaggagctggacggccgcaacatcaccgtcaacgaggcccagtcccgcggcggccgtggaggcggcggcggtgggtacggtggtggccgtggaggcggcggctacggcggtggcgggcgccgtgat

SEQ ID NO: 318329 - DNA, 422 bp, Zea mays
  unsure (1)..(422): unsure at all n locations
caaccatataggcttcaacaagcaatcgcagctagcaacatacctttatcgcccttgttgttgcaacaatcgccagccctatctttggtgcagtcattggtacaaaccatcagggcacaacagctgcagcaactcgtgctacctctgatcaaccaagtagctctggcaaacctttctccctactctcagcaacaacaatttcttccattcaaccaactgtctacactgaaccctgctgcttatttgcagcaacaactattaccatttagccagctagctactgcctactctcagcaacaacaacttcttccatttaaccaattggccgcactgaaccccgctgcttatttgcagcagcaaatactactaccatttagccagctagctgcagcaaaccgtgcttncttcttgacacagcaaca

SEQ ID NO: 318330 - DNA, 129 bp, Zea mays
cgggctcaaggcaccacaacttgatttacttgtgctaactgggatcaacggaattggttttggcaaacttttttccttattttcggaacaaccatttttttcatttaaaccaattgtttaaattgaacc

SEQ ID NO: 318331 - DNA, 448 bp, Zea mays
cggacgcgtggggaaccacaccaagctaagcgcactagcaacaacctaacaacaatgggtacggagatattatccctccttgcgcttcttgcgctttttgcaagcgcaacaaatgcgtccattattccacaatgctaacttgctcctagttccattattccacagttcctcccaccagttacttcaatggccttcgaacacccagctgtgcaagcctataggctacaacaagcgattgcggcgagcgtcttacaacaaccaattgcccaattgcaacaacaatccttggcacatctaacaatacaaaccatcgcaacgcaacagcaacaacagttcctaccagcactgagccacctagccatggtgaaccctgtcgcctacttgcaacagcagctgcttgcatccaacccacttgctctagcaaacgtagttgcaaaccagcaacaac

SEQ ID NO: 318332 - DNA, 102 bp, Zea mays
aagaaaaaaaaaaaaaaaaaaaaaaaattaaaaaaaaaaaaaaaaaaaaaaaaaagaaggggaaaataaaaaaaaaaaaaaaaaaaaaaaaaaaaaggccgc

SEQ ID NO: 318333 - DNA, 396 bp, Zea mays
attgagaccaacaagcaacatataaagtggaatccagtagcaacaatagagcagcaatggcgaccaagatattttccctccttatgctccttgctctttctacatgtgttgctaacgcgacaattttccctcaatgctcacaagctcctatagcttcccttcttcccccataccttccatcaattatagcttcaatatgtgaaaacccagctcttcaaccatataggcttcaacaagcaatcgcagcaagcaacatacctttatcgcccttgttgtttcaacaatcgccagccctatctttggtgcagtcattggtacaaaccatcagggcacaacagctgcagcaactcgtgctacctctgatcaaccaagtagctctggcaaacctttcttcct

SEQ ID NO: 318334 - DNA, 442 bp, Zea mays
  unsure (1)..(442): unsure at all n locations
ttttgggccatcctnntgccctccttgctnnctttcagncaagccgttgctaccnnngcgactannntattccacaatgcntnncacaacaatnnacctctctttccggtgaccagcnncgcgaagatnnttgaataccccannactatacaatnncctacaggctnnnacaaagaggccanntcgcagcaagggcattcttaaacggtcgtnntagcatnntgaccgnntccaacaaccccatatgnnncctattgcaacccaaccanntccttaatgggaatctanntatctcnncaaagaatcnnngcagcacaacanacctacccaacaaccagtnntgctntccannataatcananntcaagtagttnnngcagcgaacncttnnngctgcttacnctnncnnagcaacaaccannatttcttcccattttcaatc

SEQ ID NO: 318335 - DNA, 408 bp, Zea mays
acatagaaagtggaatccagtagcaccaatagagcatcaatggagaccaagggattttccctccttatgctccttgctctttctacatgtgttgctaacgcgacaattttccctcaatgctcacaagctcctatagcttccctttttcccccataccttccatcaattatagcttcagtatgtgaaaacccagctcttcaaccatataggcttcaacaagcaatcgcagcaagcaacatacctttatcgcccttgttgtgtcaacaatcgccagccctatctttggtgcagtcattggtacaaaccatcagggcacaacagctgcagcaactcgtgctacctgtgatcaaccaagtagctctggcaaacctttctacctactcttcgcaacaacaatatcttccattc

SEQ ID NO: 318336 - DNA, 419 bp, Zea mays
cccacgcgtccgagcacaatagtgtaccaacaatggcagccaaaatattttgcttcgttatgctccttggtctttctgcaagtgttgctaccgcaaccattttcccacaatgctcacaagctcctatagcttcccttcttcccccatacctctcaccagcggtgtcttcagtgtgtgaaaacccaattgttcaaccctacaggatccaacaggcaatcgcaacaggcatcttaccattatcacccttgttcctccaacaaccgtcagccctattacaagagttacctttggtccatttggtggcacaaaacatcagggcacaacaactacaacaacttgtgctagcaaaccttgctgcatactctcagcaacatcagtttcttccattcaaccaactggctgcattgaactctgctgct

SEQ ID NO: 318337 - DNA, 413 bp, Zea mays
cagatcagcaaagcggcagtgcgtagagaggatcgtcgaacagaacagcatgaagatggtcatcgttctcgtcgtgtgcctggctctgtcagctgccagcgcctctgcaatgcagatgccctgcccctgcgcggggctgcagggcttgtacggcgctggcgccggcctgacgacgatgatgggcgccggcgggctgtacccctacgcggagtacctgaggcagccgcagtgcagcccgctggcggcggcgccctactacgccgggtgtgggcagacgagcgccatgtaccagccgctccggcaacagtgctgccagcagcagatgaggatgatggacgtgcagtccgtcgcgcagcagctgcagatgatgatgcagcttgagcgtgccgctgccgccagcagcagcctgtacg

SEQ ID NO: 318338 - DNA, 351 bp, Zea mays
cccacgcgtacggtgatgaacatgataatgcatattcttgcgctttataagggaaggtgagcatcttatagtaacttataaagcgcaagaatataaattactatgagatgctcatattcctttaaaaaacaccatactacatacctagaacagcactgacatccagcctgacaacaaaaataggcacgacgcctattctacacgatccaagattacctcaggcatcctgcgagcatcacgctgtcgtatagcgccatactactctcaattgtgtgcccactatcttcaaacaccaggcgggccaaaaacattgcttcacacaacttactaggattatagacattcaacctt

SEQ ID NO: 318339 - DNA, 352 bp, Zea mays
aacagatctcgctatggacattctatttatactctacttcaagatcaatcagtaagggtgcatgcacgtaggttcattccaaatatctgtactcagcaattgactaatccgattagtcgaaatgctgcgtattgagcaacacacggctcttgaagcatcatatattgccatgcaaacctgtaaacttagcgtggttcatattgtgtacagtcagatgacctgcaactatgacaacttaactcacgtagtactgtcgagctaactaaactacatatgctagtaaagcactaattcatatgatactataggatgagcatatgcctatttgaactgctgatgctattggatcttg

SEQ ID NO: 318340 - DNA, 426 bp, Zea mays
cccacgcgtccgcccacgcgtccgaactagcaacatagaaagcacaatagtgtaccgacaatggcagccaaaatattttgcctccttatgctccttggtctttctgcaagtgctgctaccgcgaccattttcccgcaatgctcacaagctcctatagcttcccttcttcccccgtacctctcaccagcggtgtcttcggtatgtgaaaacccaattcttcaaccctataggatccaacaggcaatcgcagctggcatcttacctttatcacccttgttcctccaacaatcatcagccctattacagcagttacctttggtgcatttattggcacaaaacatcagggcacaacaactacaacaacttgtgctagcaaaccttgctgcctactctcagcaacagcagtttcttccattcaaccaacta

SEQ ID NO: 318341 - DNA, 119 bp, Zea mays
cccacgcgtccgcccacgcgttcgcgtgattccctgatttcagaaaaaaaaggaagagagaaaaaaaaaaaaaaaaaaaaaaaaaaaaaaagaaaggtcggcctttttaaaggaccctt

SEQ ID NO: 318342 - DNA, 376 bp, Zea mays
ggaatacagtagcaacaatagagcaacaatggcggccaagatattgtccatccttgtgctccttgctctttctgcatgtgttgctaacgcgaccatttttcctcaatactcacaagctcctatagctgcccttcttcccccataccttccatcaatgaccgcttcagtatgtgaaaacccagcccttcaaccctacaggctccaacaagcaatcgcaacaagcaacttacctttatcacccctgttctttcaacaatcgccagccctatctttggtgcagtcattggtacaaaccatcagggcacaacagctgcagcaactcgtgctaccagtgatcagccaagtagctctggcaaacctttctccctactctcag

SEQ ID NO: 318343 - DNA, 420 bp, Zea mays
agcaacttacctttatcacccctgttctttcaacaatcgccagccctatctttggggcagtcattggtacaaaccatcagggctcaacagctgcagcaactcgtgctaccagtgatcagccaagtagctctggcaaacctttatccctactctcagcaacaacaatttcttgcattcaaccaactgtctacactgaaccctgctgcttatttgcagcaacaacaactactaccattcagccagctagctactgcctactctcagcagcaacaattgcttccatttaaccaattcgccgcactgaacccctgtgcttatttccagcagcaaatactactaccatttgaccagctagctacaacaagccccgctatcttcttgacacaacaacaattgcttacgttctaccagcagtttgtg

SEQ ID NO: 318344 - DNA, 414 bp, Zea mays
agagcacaatggcgaccaagatattttccctccgtatgctccttgctctttatgggtgtgttgctaacgcgacagctttacctcaatgctcacaagctcctatagctccccttcttcccccataccttccatcattgatagcttcagtatgtgcaaacccagctcttcaaccctataggctccaacaagcaatcgcagcaagcaacatacctctatcacccttgtttcaacaatcgccagccctatctttggtgcagtcattggtacaaaccatcatggcacagcagctgcagcaactcgtgctacctgtgatcaacctagtagctctggcaaacctttctccctactctcagcaacaacaatttcttccattcaaccaactgtctacattgaaccgtgctgcttattcgcagc

SEQ ID NO: 318345 - DNA, 268 bp, Zea mays
actcgacccactcgtccgaagcacacactctcgtattatatattttattttcgtccacacatttccctttatccgtcagtttttaaaactacaataatcccacaactctcacatccttctacaacttatcctcaactaacataccttccatcaattataactccaatatattcaacacccatctcttcaaccctatattcttcatcactcaatcacatcaagctacatacctttattacatctactttcaacaatctccatccctatc

SEQ ID NO: 318346 - DNA, 178 bp, Zea mays
gaaaacgaaaattatacctctctcttgtattattattgatatatttttgtgggtacgaaactcgatcagatgaaacacatccgagttagatgacgcagtcagatgactgagtgttggtgtctgacatccaaggtgaaagatgtatacgtctgcaacgtctatgtagatgtacttaatt

SEQ ID NO: 318347 - DNA, 196 bp, Zea mays
cccacgcgtccgaaaaaaaaaaatatatagaaaatacatagaaaagataacggaacggaaaaaaacaagacatgataacaagctaacctatactacaaataaaacatcatacgatatcatctataatatcttacgcatgttaaaactgagctattcaatcatatacgcttcagcaagcaatctcagcacgcaacat

SEQ ID NO: 318348 - DNA, 407 bp, Zea mays
ccctgctgcttatttgcagcaacaactattaccattcagccagctagctactgccgactctcagcaacaacaacttcttccatttaaccaattggccgcactgaaccccgctgcttatttgcagcagcaaatactactaccatttagccagctagctgcagcaaaccgtgcttccttcttgacacagcaacagttgctgcctttctaccagcagtttgcggctaaccccgcaaccctcttacaactacaacaattgttgccctttgtccaacttgctttgacagacccagcggcctcctaccaacaacacatcattggtggtgccctcttttagattgcttattagttgtaattcattattaaagttttttggatgatgtatgtggccaaccagaaataagaagtta

SEQ ID NO: 318349 - DNA, 415 bp, Zea mays
cagaaacacaccaagcgaagcacattagcaacaacctaacaacaatggctaccaagatattatccctccttgcgcttcttgcgctttttgcgagcgcaacaaatgcgttcattattccacaatgctcacttgctccaagttccattattacacagttcctcccaccagttacttcaatgggcttcgaacacccagctgtgcaagcctataggctacaacaagcaattgcggcgagcgtcttacaacaaccaatttcccagttgcaacaacaatccttggcacatctaacaatacaaaccatcgcaacgcaacagcaacaacaattcctaccagcactgagccacctagccatggtgaaccctgccgcctacttgcaacagcagttgcttgcatcaaacccacttgctctggcaaa

SEQ ID NO: 318350 - DNA, 243 bp, Zea mays
cccacgcgtccgctcacagagttcattgcttaacagcaagcctgactcgccgagatgctgataggatcctgctgctacattcgcccatgttccacgcgtctcaggtcttattagccgcatgccactcatgagcttgaatatgcatactcatagagcatgtcatgagtatataatgacatagacagagaggagccgtaagtgtaaatacaggaaggttatatgctatatatgcgacgatcaaaa

SEQ ID NO: 318351 - DNA, 411 bp, Zea mays
ccacgcgtccgattgagaccaacatgtcacatagaaagtggaatccagtagcagcgatagagcaacaatggagaccaagatattttccctccttatgctccttgctctttctacatgtgttgctaacgcgacaattttccctcaatgctcacaagctcctatagcttccctttttcccccataccttccatcaattatagcttcagtatgtgaaaacccagctcttcaaccatataggcttcaacaagcaatcgcagcaagcaacatacctttatcgcccttgttgtgtcaacaatcgccagccctatctttggtgcagtcattggtacaaaccatcagggcacaacagctgcagcaactcgtgctacctgtgatcaaccaagtagctctggcaaacctttctccctactc

SEQ ID NO: 318352 - DNA, 367 bp, Zea mays
cccacgcgtacgcttacctttatcacccttgttcctccaacaatcatcagcgctatgacagcagttacctttggtgcatttaatggcaccaaacattcgggcaccaccacctacaacaacttgtgctagcaaaccttgctgcctactctcagcaacagcagtttcttccattaaaccaactagctgcattgaactctgctgctaatttgcaacaccaactaccattcagccagctagctgctgcctacccccaacaatttcttccattcaaccaactggcatcattgaactctcctgcttatacacagcaggcacatcttatacaatacacccatatctctggtgagagctgttgtgtttttttcac

SEQ ID NO: 318353 - DNA, 269 bp, Zea mays
cgacacccttggtaaaaaaacaaatatttatttaaaacaaaaataaaaaccaacaagggtaagcttatcaactatatccaaaaaaaaagcaaactaactttctaactgttcaatactcttgacattctttgagtaaactttagatatcctctcatacattcattatccagtacctgattgtccattgtctctatattctttactgtgacattatatggttgactcgcatttcccatttatccagtttctgttatactaccattgcttct

SEQ ID NO: 318354 - DNA, 179 bp, Zea mays
ctcaatcattccatcgcgccatccatagcttcataccaattcttgatcgtgcagctgctggtggcagcctgagaccagacacgaggatgctgaccgagttcagcggctatgagttggaggtatccagaggagctagttgtggctgctagacatacgacttctgccaagactaacgctta

SEQ ID NO: 318355 - DNA, 367 bp, Zea mays
gagatgctgaagtacgctatctgcatagactcaaaggggcacaagttgcaccagatgctgtcaacactggctataaagctgatgatttcgctgatgacgcactctacaaaaaagagctgaccgaggatccttatgatcagagcatcctatatgaagtggactaagacttcagaatgtatcggtctggcaggactgataggaagaaatgacctgatgacaatgagtctatagaagattacgaatgttatatgggtgaaatgattcagcgaacgaaagctgattgatctccagatgggatgattgactgctaatgtcttacatcgagacatagagcctttcaaagcatgggtggggatggcgaatgata

SEQ ID NO: 318356 - DNA, 380 bp, Zea mays
ctcacgcgtccgactacccgttcggtttaatcgctggagtgcataacaatgtgttggaattcgtaatcaaagaaatatgcatgactggtaacatcgctatgagacatgaaatgatgggtgcaacagcccatttctggcgatatcgtgctgcttattacccagacctgattgaagcgttgacgatacatgcaccgacatttgtatataggacaaattacgtcatttctagtcaaacatacaatgcttctactgatgcctatgctgtggaatcatacgatagctatttactgaaccatgtactctatgctcattgcagtgttctggatgaagatgatgcgactgaacatcgatcggatactctttccattcttgtgaatgac

SEQ ID NO: 318357 - DNA, 419 bp, Zea mays
gcaatcgttccaaaaccagtatgtttttgttgacgaagaatatagaacagcagcggattttgttcgtcaaaaactggactcaagcgcggcagacgaggtggatgaatctgcttgtgtgataaaaaaatgttctgaatacgctgaaagatatttcaatgaaactgcacaagatgtggtagtacttgagtcagaaagcactgatgaatctgaagtttgcgactgtgagaccattgcttgcacattctctaaccttgataatcatgctgggaaaattgaaactccaggactgcacagaaagcggctccctagagttttccctggagatacaactactacacatgacatcatcaagcttcatgggaaagagaaactgccagtacaatacctgccacagaggagacgaaatggtgaaaaggaga

SEQ ID NO: 318358 - DNA, 168 bp, Zea mays
cccacacatacgaacacaagttcagttttatcataatagaactataattcttctagggaactacaatctgttctattccttctaattactcaaatgaactctactacatattgtcatcaatttccactcacattgacccagctatattcactttaatattatcaaaaa

SEQ ID NO: 318359 - DNA, 415 bp, Zea mays
cccacgcgtccgcggacgcgtggggtagggagaaaggtttgccagagctactctcagcaacaacaatttcttccattcaaccaactgtctacactgaaccctgctgcttatttgcagcaacaactattaccatttagccagctagctactgcctactctcagcaacaacaacttcttccatttaaccaattggccgtactgaaccccgctgcttatttgcagcagcaaatactactaccatttagccagctagctgcagcaaaccgtgcttccttcttgacacagcaacagttgctgcctttctaccagcagtttgcggctaaccccgcaaccctcttacaactacaacaattgttgccctttgtccaacttgctttgacagacccagcggcctgctaccaacaacacatcattg

SEQ ID NO: 318360 - DNA, 108 bp, Zea mays
cccacacgtaccatcacaagttgagttttaacaaagatttgccagaattccggtcgggaattacaatcacttaccttgctactaattacataaatgaattattctaca

SEQ ID NO: 318361 - DNA, 267 bp, Zea mays
cccacgcgtccgagtacgcgttggattaaaaaaaacaaaaacataactgcgggaaggaaaacgtaagggaaaatcttgcaacgaagctgaaaggaccagtacagatcacatgattctacactccactaccatctatagcacgctaggggtgatcttctatcaagtccaagttgaactgatcagtattcacaatggctacgattgatcatggtgtaatttgcatgcaatgtatgacctgttggagaacaactgctgatgaggtagaac

SEQ ID NO: 318362 - DNA, 271 bp, Zea mays
cccacacgtcccaatacgcgttgaatttaaaacaataaaaacatatcttcgggaaagagatcaaaatggcaaataccataacgaatctgaaaaaccacctaaagctcgcacgatactacactctcaaacatctctaccaaacttgcatgatcttctttgaagtccacatttaacagatcaatattcatctaactactttggacgatactctgatttgaactaaatgtattaactgtaacatagcaatctctgaagacgtacaacattgaaa

SEQ ID NO: 318363 - DNA, 318 bp, Zea mays
ctcagtcgttacactacccgttgtctttcgagatacggttatttaaaatgatgcaggagaacctattggatcttacagctatgtagactaaggactgatatggtctcgaccagtggacactaacattaccatctgctgcatgaacgattgacttatgtatcaagaggatgatataatatatagtatacaatgaacgtcgatgcaatacagtcaaaatggactagataattaccgcacacatagcataattatatatacgattgaccgtcgaggaattgataaggatcaaccagaagttgaaaaatatcacttaatgaa

SEQ ID NO: 318364 - DNA, 409 bp, Zea mays
ccgacgcgtacgcagaagatggaggttccgtttgccttaccccatccgtgaatcgggtggagcatcggatgacgaggaggaagacatccggaaaatcggggagaacctggtgcagacgcaggcgctcatgaacgcgctcgcgtactcgctgaagaacgttctgcagaaggtgatgccggagctgtggaaggacatcaaccacaagatccaccagaactggatctataactggatcttcctcacgctcctcgtcagcacctacgactacgccttgtaatacaccgtgtatgacaaggtttacgacaagttttacatgagatgttatatgcactgagctttagagactgacattggatttaacatttgcatgatcaagtttagttaaccgcctatatgtatgtatatattc

SEQ ID NO: 318365 - DNA, 412 bp, Zea mays
  unsure (1)..(412): unsure at all n locations
aggattgggatcgtcaaaatccaacacaaattgtaacggagatgtgcggcttcgttgcaatcctttctggaacttttcttcttcacaagacaaaggatatggtggatggtatgtcgtacatttacgccccttttgacctgtaactactcacgttcataatgtcttattggttcgcgtcgtgacaggtctcccaccaaatttaccgattcggcttcctaaacatgcggatgaggacggctacgctgctgaaggaattcctctcagatccgctgctgacggtattccgctcaggtcaccaagggctacagattcatttcgctcgtcatgatgccccgctgagatttgcatgcgcactcaaatcgtgtcacttgaaggctcatacccagcangcgtcagtcctatatatacatgg

SEQ ID NO: 318366 - DNA, 417 bp, Zea mays
caacaagcaacatagaaagtggaatccagtagcaacaatagagcaacaatggagaccaagatattttccctccttatgctccttgctctttctacatgtgttgctaacgcgacaattttccctcaatgctcacaagctcctatagcttccctttttcccccataccttccatcaattatagcttcagtatgtgaaaacccagctcttcaaccatataggcttcaacaagcaatcgcagcaagcaacatacctttatcgcccttgttgtgtcaacaatcgccagccctatctttggtgcagtcattggtacaaaccatcagggcacaacagctgcagcaactcgtgctacctgtgatcaaccaagtagctctggcaaacctttctccctactctccgcaacaacaatttcttccattc

SEQ ID NO: 318367 - DNA, 107 bp, Zea mays
cggacgcgtgggatcgcgagctgattgtctaacgattatttcttggctgcggaatggcgcctgtaagagataatatggcatatttgcagaaaaaaaaaataaggtcc

SEQ ID NO: 318368 - DNA, 402 bp, Zea mays
cggacgcgtgggtttctccctactctcagcaacaacaatttcttccattcaaccaactgtctacactgaaccctgctgcttatttgcagcaacaactattaccatttagccagctagctactgcctactctcagcaacaacaacttcttccatttaaccaattggccgcactgaaccccgctgcttatttgcagcagcaaatactactaccatttagccagctagctgcagcataccgtgcttccttcttgacacagcaacagttgctgcctttctaccagcagtttgcggctaaccccgcaaccctgttacaactacaacaattgttgccctttgtccaacttgctttgacagacccagcggactcctaccaacaacacatcattggtggtgccctctttt

SEQ ID NO: 318369 - DNA, 387 bp, Zea mays
gtgacacctgttggtagaaagaacctttaaagatacggaacgtgtcattcatggtcaaagcggtacctgtgctggataacatgttgcatgagtatcggcgcaacttataacacattgtcaaatgggactatgggagtccaaaacatattacatttaaccaattggacgaactgaaaccacgatgattatttgcagcagaaaatactactaaccatttagccagctagctgcaagcaaaccgagcttaaattgggacaccagttcaaggtgccgaatttatactagcagtgagcggataaccaagcatccctattacgactacaacaatgagtgcacgtacgtgcaacttgcaatgacagacccagcaaacccctaccatcaacacat

SEQ ID NO: 318370 - DNA, 380 bp, Zea mays
ggatgagcagctacaccaacaaccttaaaattttgatgggcgacggtcgacttctgggctcgaagaggttattatgggatgtagttcgaggaggtccaaaagagcggaagcatctggcccaggtggaaacaaggagagcagaggatggcagtacccatccttctggccatctggcagccaacaggatcatcatgggtagaagagcagcaacacatccctgcctggcactgtatgtgccgcaccacctttgcatgaagccaaccttggagagggcaaccgaaagcagagagacacctgacatcatcattactagctaccatgataagatcatcatataaacctagctacactgtcgtacctaccatatctaggcttacaat

SEQ ID NO: 318371 - DNA, 390 bp, Zea mays
tcaacatagaaagcacaatagtgtaccaacgatggcagccaaaatattttgcctccttatgctccttggtatttctgcaagtgctgctacggcgaccattttcccgcaatgctcacaagctcctatagcttcccttcttcccccgtacctctcaccagcggtgtcttcggtatgtgaaaacccaattcttcaaccctacaggatccaacaggcaatcgcagctggcatcttacctttatcacccttgttcctccaacaatcatcagccctattacagcagttacctttggtgcatttattggcacaaaacatcagggcacaacaactacaacaacttgtgctagcaaaccttgctgcctactctcagcaacagcagtttcttccattcaa

SEQ ID NO: 318372 - DNA, 56 bp, Zea mays
tcccggctcgacctagacgtacgcgtacgcgcacgcgtacgtgtatagattgattt

SEQ ID NO: 318373 - DNA, 418 bp, Zea mays
catgagggtgttgctcgttgccctcgctctcctggctctcgctgcgagcgccacctgcacgcatacaagcggcggctgcggctgccagccaccgccgccggttcatctaccgccgccggtgcatctgccacctccggttcacctgccacctccggtgcatctcccaccgccggtccacctgccgccgccggtccacctgccaccgccggtccatgtgccggcgtcggttcatctgccgccgccaccatgccactaccctactcaaccgtcccggcctcagcctcatccccagccacacccatgcccgtgccaacagccgcatccaagcccgtgccagctgcagggaacctgccgcgttggcagcaccccgatcctgggccagtgcgtcgagtttctgaggcatcagtgcagcccgacg

SEQ ID NO: 318374 - DNA, 233 bp, Zea mays
aaaaaaaaaacaaaaacacaatttaaaataaaaaaaaaaaaaaaaaaaaaaaaggggaaggaaaaaaaaaataaatacacaaaaatgcaacgatgctattcttcaataaagataccgtaattcaattcactaggctcataactttacaacgtcgtcactgagaaaacatttgttctaccatcagcttaaaaacaattgcacaggtaagactttaaccagatggacttttatca

SEQ ID NO: 318375 - DNA, 347 bp, Zea mays
gttctagatcgcgagcggcgcccttttttttttttttttttggttttttttttttttttttttttttttcacattaaaatgtggaaaggtaactttttatttttggtgggccacatactcggatcattttgctaccatatggacaaaggtagcaaaagaaacaaaaggatatgcaaacagcagcagttgaagtaggatgtacatattcaggggaatttgacctgttactgtgcaccgggaatagctacactcattgaaaatcatgccactggcttatacacaaacgggaccacactcttcattcccgaaggatacatttctatggattttcctggggattggtatct

SEQ ID NO: 318376 - DNA, 94 bp, Zea mays
agcatgcttgttatgcttattttatcagaggattatcggttgtaataatagtggttaggagtcatggaattgttacaaaacaagcagttcttgt

SEQ ID NO: 318377 - DNA, 155 bp, Zea mays
catgcttgttatgcttattttctcagtgtattatcgggtgagcgaaaatggtgccatagtttgttcgtacgatacaattaccttttttcaacatgtattaggattgtaatttctttttactgatgctaaaatgtctagcttatggggttgagttg

SEQ ID NO: 318378 - DNA, 323 bp, Zea mays
aggacacctacgaatgtttacatcattagcagcaccctttattcatgagtgacttggtgcattacagagggagaatttattttcagataaacatgtccaaccttaatgtcagatttatattaatacccgaaactgtaactttgtgctctattcagagcacatcatcccagagaaccaataatttctactaccaattgtgcactgagtccattacgcctacctttgcgacccggacatccaatatgcaatttctacaatcgctactgcatgtgcaagatccgaccagattgcacattacatcacccaatgtgaaatgccatgta

SEQ ID NO: 318379 - DNA, 320 bp, Zea mays
gcaacatagaaagtggaatccagtagcaacaacagagcaacaatggcgaccaagatgttttcggctccttatgctccttgctctttctgcatgtgttgctaacgcgacaattttccctcaatgctcacaagctactatagcttaccttcttccgccataccttccatcaatgatagcttcagtatgtgaaaacccagctcttcagccctatgggctgcaacaagcaatcgtagcaagcaacatacctttatcacccttgctgtttcaacagtcgccagccctatctttggtgcagtcattggtacacaccatcagggcac

SEQ ID NO: 318380 - DNA, 330 bp, Zea mays
cggacgcgtgggcggacgcgtgggcggacgcgtgggacagcagcaacaggtactagcattcagccagctagctggtgtgagccctgctaccttcttgacacaaccacagttgttgccgttctaccagcacgctgcgcctaacgctggcaccctcttacaactgcaacaattgctgccattcaaccaacttgctttgacaaacccagcagcattctaccaacaacccatcattggtggtgccctcttttagatttcttatgagttatagttcaataataaagttttttgtctgatgtttgtggcttcccagaaataagaaagtacatttct

SEQ ID NO: 318381 - DNA, 313 bp, Zea mays
gaccagctggccaaattctaacacctaggcgctcggccgagatggcccccaagcgctctgcgccacctgcgccgcctccgcccacggctgactcctccgaggagaccgcctctggttcgggctccgaggaggaggaggaggaggaggaggaggaggatgatttggagaccgtccactcaccgtcttccgtcgctcccaagagcgtagctccgatgccgcataacgtccaagagcccgaagcgtccgacgaggatgagtatgacgatgaagatgacgagccgtataaggtacaagaacccgaaacgtccgatga

SEQ ID NO: 318382 - DNA, 415 bp, Zea mays
cgcccgttcgtcttgtctagcgaccagcgcgcccaggccgcccggccatggagaagaagctgctgctgccgctggcggtggcgcacaagcacgcgcacggaggcggcggggagcggccgtgggcgcggccgtggcggtgggccaagaccgccttcttcgtcgcggcgatgctggcatcgctcctgctcgtctgcgcgccgccgctgctcgtcgtgctcctcgacctcgcgctcccgccggcgctcctcctccgcggcggggatggcggcggcggctcgctcgcgctggcggtcgtggcccaggcgcgggcgttcgacttccgctcctcgctcgtcgacctgcccgccgtctccgcggcgcgcgcgctgctcatcctctgcgcgtacgtggcgtgcggcggaggcggcgcgtacct

SEQ ID NO: 318383 - DNA, 360 bp, Zea mays
cggacacttggtcagacgcgtcgcctgacgcctgaggcctcaatctcaaggactagcactgactacgatcactactgtaagcccatgtaccgtctggacccaacgacagctgatgacctgataccagcactcttggcgtaacactctcacactgttacaactgcgacatacgctggcattgaactcaacttgcattcacgataccctacaccattctaccaacagctcataattgttgtgaccgtcctttaactatgccctaatacaaccagaacaatattaagaggctatacactatctttgccgatctccagacgtacgaacaggcatctctcaaagcggcagcaggggggaaagaag

SEQ ID NO: 318384 - DNA, 418 bp, Zea mays
ctgtaaccgacgacggaacgggtagctcatctgcggcgagctatgagcgatcggccgagtcaggtgatgcttcacaggacgctgacactgaacacacactctccaagcttcagactacttcagtggatgacctgccatatactgtacaatagggaacaagatcaaacgatgatcgcgtaacaggtctactagacgagaaacttcacaatgaggtaagattctatgaccacatgcagcgtcaaatttacaagcgcaggctcaagttattacatactattcatgttgaatccagtgatttcgatcttgagattcactatgcctttcatgatgaacctcatatactactagcttagatagtcatgacgatagctaggactattatagtgaaggcctgcaatcacactgatcattgctagat

SEQ ID NO: 318385 - DNA, 428 bp, Zea mays
gcaacatagaaagcacaatagtgtaccaacaatggcagccaaaatattttgcctgcttatgctccttggtctttctgcaagtgctgctacggcgaccattttcccacaatgctcacaagctcctatagcttcccttcttcccccgtacctctcaccagcggtgtcttcggtatgtgaaaacccaattcttcaaccctataggatccaacaggcaatcgcagctggcatcttacctttatcacccttgttcctccaacaatcatcagccctattacagcagttacctttggtgcatttattggcacaaaacatcagggcacaacaactacaacaacttgtgctagcaaaccttgctgcctactctcagcaacaacagtttcttccattcaaccaactagctgcattgaactctgcttcttatttgcaac

SEQ ID NO: 318386 - DNA, 381 bp, Zea mays
gaaacacacctagcgaagcgcactagcaacgacctaacaacaatggctaccaagatgttatgcctctttgcgcttcttgccctttttgtgagcgcaacaaatgcgttcattattccacaatgctcacttgctcctagtgccattattccacagttcctccctccagttacttcaatgggcttcgaacacccagctgtgcaagcctacaggctacaacaagcgcttgcggcgagcgtcttacaacaaccaattgcccaattacaacaacaatccttggcacatctaaccatacaaaccatcgcaacgcaacagcaacaacaatttctaccagcactgagccaactagctgtggtgaaccctgtcgcctacttgcaacagcag

SEQ ID NO: 318387 - DNA, 285 bp, Zea mays
gcgcagtccttcaagcgcaagctgcctccttctcgtagtccggtcgtgagaagggggggcggtccatggcaaggctatctacgctgactccgcgtagaagtcatcgattaggagatcgatatccttactccatttacgcgcaagagctattgctagatccatgaaagccacccagtgcactaaccacgtcatgatccaacgcatacagtacctaatcatcgagctactagtacatcgcagctgacagtatctaacttgtattaaacgtagacagcttacaacacg

SEQ ID NO: 318388 - DNA, 416 bp, Zea mays
cccacgcgtccgcggatcgagatcatgatccagcgagcgagcgagccagctcgtcacttccattagcagttagtctcgggctcgttggccgtctttgctggggcagctacctagcagacgcatggcacacgtcgaccggccacggagccgcgccgtgctcgcggtcgccgtcgccgtcgccgccgcggcgctcctcctttttgccgcagcgggcgtcccgcgtgcggccggccagacgacgacgacagcggtggtggatctggacagctgggccgatcgcggcgcggcgtgcacgggcgcggtggaggcgtgcggcggcatcggcgcgacggccaggacggagctgggttccggcgggtacatcagctacgacgccatgagccgcgggcgcgtgccgtgctcgtaccgctgcgcgt

SEQ ID NO: 318389 - DNA, 405 bp, Zea mays
  unsure (1)..(405): unsure at all n locations
gcggcagtgcgtagagaggatcgtcgaacagaacagcatgaagatggtcatcgttgtcgtcgtgtgcctggctctgtcagctgccagcgcctctgcaatgcagatgccctgcccctgcgcggggctgcagggcttgtacggcgctggcgccggcctgacgacgatgatgggcgccggcgggctgtacccctacgcggagtacctgaggcagccgcagtgcagcccgctggcggcggcgccctactacgccgggtgtgggcagacgagcgccatgtaccagccgctccggcaacagtgctgccagcagcagatgaggatgatggacgtgcagtccgtcgcgcagcagctgcagatgatgatgcagcttgagcgtgccgctgncgncagcagcagcctgtacgagcc

SEQ ID NO: 318390 - DNA, 355 bp, Zea mays
gggtactctttgggcagtttatggtgtcatacgtacgttggatgcttcggtaggaacttagacagactggaatgacgtcatcgcgattgtactgagaagagcttcctagcgtgcccgagctaagtgcaggcacatctgttcgtccacgcagtgatagccttgccctccaatctatatacactctatcacgtggtcaaaagagcagtgctgattcgctaaactaatctgacgactctgcccatcatgatacttgacgtgactcctaaccgtctcgagacgtacactgttgaggcgctaatcgcgagctgacaggtcgctcagagagggttgctgatcgtcaggtacgatgagcata

SEQ ID NO: 318391 - DNA, 84 bp, Zea mays
cgcacgcgtgcgtgaacgcgatcgttcacacattcggacgaccgactgttgtagtggtctagtttaagtatactatattacaca

SEQ ID NO: 318392 - DNA, 291 bp, Zea mays
taaaaaaaaaaaaaaaaaaaaaaaaaaatttaaattaaaaaaaaaaaaaaaaaaaaaaaaaaaaaaataaaaaaatacaaataactacaaaaatcaacaaataaaaaataaaaaaaaaaaaaaaaaaggccaccctttttaaaggttcaaagtttacttccccttacttccaacttattaccttttttatagggtcccctaaattaaattaattgcccgtttttttaaaacttattaactggaaaaaccttggctttaccaaatttaatcccttttaaaaaaatccccttt

SEQ ID NO: 318393 - DNA, 391 bp, Zea mays
cccacgcgtccgcgtagttgcaaaccagcaacaacaacaactgcaacaggttctggcagcgcttagtcaactagccatggtgaaccctgccgcctacctacaacagcaacaactgctttcatctagcccgctcgctgtggccaatgcacctacatacctgcaacaagaattgttgcaacagattgtaccagctctaactcagctagctgtggcaaaccctgttgcctacttgcaacagctgcttccattcaaccaactaactatgtcgaactctgttgcgtacctacaacagcgacaacagttacttaatccattggcagtggctaacccattggtcgctgccttcctacagcagcaacaattgctgccatacaaccgggttctcttgatg

SEQ ID NO: 318394 - DNA, 315 bp, Zea mays
ttttattttttagcaaccagacttcctctctaggtcatggtgatttatacgagtatcgatgaattcgagctcaagatatgctatcattattacatattcttaatttgctaatactttcattttgttatataaaattcattgacgaacactttaacccattaatccataagtttttcatgtttaccgactactataaacattattggttaccatctaacaatcaccttttggcccattacatttacaaagctgttttaatccaaccttacgaaagacggtcattcaacgacccctctgaaatctatcactcatttt

SEQ ID NO: 318395 - DNA, 315 bp, Zea mays
aactagcaacatagaaagcacaatagtgtaccaacaatggcagccaaaatattttgcttccttatgctccttggtctttctgcaagtgttgctaccgcaaccattttcccacaatgctcacaagctcctatagcttcccttcttcccccatacctctcaccagcggtgtcttcaatgtgtgaaaacccaattgttcaaccctacaggatccaacaggcaatcgcaacaggcatcttaccattatcacccttgttcctccaacaaccgtcagccctattacagcagttacctttggtccatttggtggcacaaaac

SEQ ID NO: 318396 - DNA, 354 bp, Zea mays
aggcgacgcgggggctgttggcttgaacctttatttgaccaaagggcaggcaatctttgttgaggtctctggagccgtttgtcaaatggctcgaggaggctgaggaggaagaataagcatttgatttggagaacggccgaatgctggcctaagtgttactttatatgtctgaagttagaagtttgaggaggaattattgctgctgcctcttactgcctagaactttatgttatgatgtttaaccacatggatcccggctgcacagtgctataatatgttgctgttaaaactatgtgtcgagcattttttgaaaactttgttatcaatactgaaaggagttataatgggacgtta

SEQ ID NO: 318397 - DNA, 416 bp, Zea mays
gtgggttggcttctcctccccctccggttcgggttcgggttcgtgaggttctccgggggtcgggttcgtgggtgagcggatcgagatggcggcgtcggatgttgagtaccgctgcttcgtcggcggcctcgcctgggccacggacgaccactccctccacaacgccttcagcacctacggcgaggtcctcgagtccaagatcatcctcgatcgggagacgcagaggtcccgcggcttcggcttcgtcaccttctccacggaggaggcgatgcggaacgccatcgagggcatgaacggcaaggagctggacggccgcaacatcaccgtcaacgaggcccagtcccgcggcggccgtggaggcggcggcggtgggtacggtggtggccgtggaggcggcggctacggcggtggcgggc

SEQ ID NO: 318398 - DNA, 153 bp, Zea mays
ctggaagactgcccctcccgcgcatataggtcgagcgagtggttgatataccggctgagctctgaatgccacagccacctgcttgtatcaatctatgatgttggcagtcttgagaacaccactgtgacttgttaaatctgtatgcttattccc

SEQ ID NO: 318399 - DNA, 385 bp, Zea mays
tttgagcattcagaaacacacctagcgaagcgcactagcaacgacctaacaacagtggctaccaagatattatccctctttgcgcttcttgccctttttgtgagcgcaacaaatgcgttcattattccccaatgctcacttgctcctagtgccattattccacagttcctccctccagttacttcaatgggcttcgaacacccagctgtgcaagcctacaggctacaacaagcgcttgcggcgagcgtcttacaacaaccaattgcccaattacaacaacaatccttggcacatctaaccatacaaaccatcgcaacgcaacagcaacaacaatttctaccagcactaagccaactagctgtggtgaaccctgtcgcctacttgc

SEQ ID NO: 318400 - DNA, 418 bp, Zea mays
attatttagaccaactagcaacatagatagcacaatagtgtaccaacaatggcagccggaatattttgcctccttatgctccttggtatttctgcaagtgctgctacggcgaccattttcccgcaatgctcacaagctcctatagcttcccttcttcccccgtacctctcaccagcggtgtcttcggtatgtgaaaacccaattcttcaaccctacaggatccaacaggcaatcgcagctggcatcttacctttatcacccttgttcctccaacaatcatcagccctattacagcagttacctttggtgcatttattggcacaaaacatcagggcacaacaactacaacaacttgtgctagcaaaccttgctgcctactctcagcaacagcagtttcttccattcaaccaactagctg

SEQ ID NO: 318401 - DNA, 181 bp, Zea mays
ctcttacaactacaacaattgttgccctttgtccaacttgctttgacagacccagcgggctcctaccaacaacacatcattggtggtgccctcttttagattgcttattagttgtaattcaataataaagttttttggatgatgtatgtggccaaccagaaataagaagttacatttccag

SEQ ID NO: 318402 - DNA, 417 bp, Zea mays
caacaagcaacatagaaagtggaatccagtagcaacaatagagcaacaatggcgaccaagatattttccctccttatgctccttgctctttctacatgtgttgctaacgcgacaattttccctcaatgctcacaagctcctatagcttcccttcttcccccataccttccatcaattatagcttcaatatgtgaaaacccagctcttcaaccatataggcttcaacaagcaatcgcagcaagcaacatacctttatcgcccttgttgtttcaacaatcgccagccctatctttggtgcagtcattggtacaaaccatcagggcacaacagctgcagcaactcgtgctacctctgatcaaccaagtagctctggcaaacctttctccctactctcagcaacaacaatttcttccattc

SEQ ID NO: 318403 - DNA, 225 bp, Zea mays
ggagattaaggagttccaaaagttcaatggaccggttattccctttgggcctttggttcgggttgtgaaggaggtaaccaatttcgttacaaacgggaaagtatagcgctataccgcaaaagcccttcttgcgcttcaagaagcaacagaattccacttgatagaactggttgaaatggcgaatctgggtgccattcatgccagcgtgtcacaattatgcaaaag

SEQ ID NO: 318404 - DNA, 97 bp, Zea mays
tccacgcgttcgcccacgcgtccgcggacgcgtgggaaaaaaaaaaaaaaaaaaaaaaaaatgaggaaagggaaaaaacaaaaaataggcagaaaaa

SEQ ID NO: 318405 - DNA, 397 bp, Zea mays
atgtaaacgtccttgaaaccgtttaaggtggcccaaccctttcatgaacccattaaagggccttggtattaagcctctttttggaccatctgtcattaaaggcctaattggactttcaaggatctgaactagtcaggaagatggaccattgcttatgcttatgctttgcatgatgaatcttgccgacttcaagctatcatcgagcatgtactcatactgtacaaaatcgtacatgatactctttgtaatcataataagcaccatctggtgcaatctacactagctgtagctctgaataaagaattcctttgcatgttaaatatgacagaatcagaaccaatagcaagcacatgtgtatgccaatccaatataacagtcgtgcttctcttatgcccta

SEQ ID NO: 318406 - DNA, 415 bp, Zea mays
tgacttcggaggctccgaaactagtttcccgtgcagggagcccttaacgaccggggaccggtgccatgtacacgtgcgagactgcctctactagaacacaaggactactgctggctataacaaacgcctagtacagtggctgcagaccatgcacccggtgatgaacgaatgcacctttctccagaagcagcactgtctgtactgctacttgggatacaaatggcgacattccgtctataccttgtatgtcgatagtcaagctatgactatgaaccttactgacaaagctatgaggctcctaagagctgatgaaccctatgatgatcttgcctgctcgtgtacacaaatgcgctcacttgctgtgtacgacaagacatcttttggatactgcgccttgaatcatgtaccagggatt

SEQ ID NO: 318407 - DNA, 421 bp, Zea mays
gcaacatagaaagcacaatattgtaccaacaatggcagccaaaatattttgcctccttatgctccttggtatttctgcaagtgctgctactgcgaccattttcccgcaatgctcacaagctcctatagcttcccttcttcccccgtacctgtcaccagcggagtcttaggtatgtgaaaacccaattcttcaaccctacaggatccaacaggcaatcgcagctggcatcttacctttatcacccttgttcctccaacaatcatcagccctattacagcagttacctttggtgcatttattggcacaaaacatcagggcacaacaactacaacaacttgtgctagcaaaccttgctgcctactctcagcaacagcagtttcttccattcaaccaactagctgcattgaactctgcttcttat

SEQ ID NO: 318408 - DNA, 424 bp, Zea mays
ctctcaccaacagcagttccttccattcaaccaactggctgcattgaactctgctgcgcatttgcaacaacatctaccattcagtcagctagctgctgcctacccgcagcaatttcttgcattcaaccaactggcagcattgaactctgctgcttatttacaacagcaacagctaccaccattcagccagctagctgatgtgagccctgttgccttcttgacacaacaacagttgttgccgttctacctgcacgctgcgcctaacgctggcaccctcttacaactgcaacaattgctgccattcaaccaacttgctttgacaaacccaacaacgttctaccaacaacccatcattggcggtgccctcttttagattgcttatgagttatagctcaataatgaagatttccggatgatgtatgag

SEQ ID NO: 318409 - DNA, 417 bp, Zea mays
cccacgcgtccgcgtaactcagactgacacagctcaagataaagttggactccatattaattgttacttacatattatcatcttctttttccccaaaaaattcttactagaatactaagaccatttctacacagcaatcacataaagttggatccatcatcaacaatgattttacaaactctcttgaatcacctgcaaaggttcttattatacatctgcaattgaattatctaaaattaaaacatagaattcaattatgttcgttgtttacaggttgaaacaacaacttttgaagactggccatgaatatctagatagtactacaccatctacataatttgtaatcaatataatttgcatattattcatcggacacctttataaccatagcacatcatgacagtagctcacaggctc

SEQ ID NO: 318410 - DNA, 423 bp, Zea mays
ctcgtagagagaaggaaaaatatccccaaaccctagctcccgatctcgatggcgaaccctcgcgtcttcttcgacatgaccgtcggcggcgccccggcgggccggatcgtgatggagctgtacgccaacgaggtgcccaagaccgcggagaacttccgcgcgctgtgcacgggcgagaagggcgtgggcaagtccgggaagccgctccactacaagggctccaccttccaccgcgtcatccccgagttcatgtgccagggcggcgacttcacccgcggcaacggcaccggcggcgagtccatctacggcgagaagttccccgacgagaagttcgtgcgcaagcacaccgtccccggtgtgctctccatggccaacgccgggcccaacaccaacggctcccagttcttcatctgcaccgtcgcg

SEQ ID NO: 318411 - DNA, 240 bp, Zea mays
ctctgccaaacgctgtgtagtggacataaatgttacctgccgaatttcttgcataagttatggctattcttagaactctattttgttaacgggtttgtattcctaagcgaaattaatctagacgctatctgagaaaactagacatcctttaaggctgattcgctggatatggaattggagggaatcacagtccatattaagacaatacactacaaaggctacaccttacaaccgataaat

SEQ ID NO: 318412 - DNA, 205 bp, Zea mays
atcatcttgcatgcgatgacataactacttatataacgcaacctaaattcaattaattggccgtggttttaaaacgtagttactgaaaaatccctgctactaccaaactttgtggcttgggtgttaattctgctttcgccagctttcctattacctacttggccccatctgactgtccttcatatacaattcgcaagcctgaatg

SEQ ID NO: 318413 - DNA, 482 bp, Zea mays
  unsure (1)..(482): unsure at all n locations
aattcccgggntcgactccacgtcgtctcgtcccacgtcgtctcgcgtgacgtcgtgagggctatgagtctcgtaccggcagttgtctaagggacgtgagagacggctaaccgtacaaagtcttcgatctgtccctcgcttatttcggcaaaccatgttcgtctgcccgagggagtatctctcgtcgcctaggtttctgagcgtaagttcgcgtggatggatgccatctgaatgtttctctgaatggtagaaaatcatcaagaagcccagtggtctacaagttcccatgcataccttcaatggatctcacataagggaccagtcaacttaaaggatgcctgtgccgtcattgcacggaactaggaagtctcnttccgtattattgaatggaaccccaactgctnnngcatcgcttggcccctatggtnnttcgagtaagacaaaataactggaaacgatattctaagtgtttagactttggg

SEQ ID NO: 318414 - DNA, 233 bp, Zea mays
aaaaaaaaaaaacaaacactaaaaattaaaaaaaaaaaaaaaaaaataaaaggatagggaaacaaaaacaaaaaaaaaaaacactaaaacaaaaaaaaaaaaaaaaaaaaaaggggtcctccttttaaatgatccaaacttacctaccgattctttccaatctttaacccttttattggctcacctaaattaaattcctgcccccctttttaaaaagtcacaactttgaaaac

SEQ ID NO: 318415 - DNA, 293 bp, Zea mays
aggccacatatccaaaatacaaatccttgtctccttcccatagactgcgatctaaggggtctccgacaatggatctatctgtagtgaacactgcactgtgcgacatgtcatagtcaaacataacctcgctgtgcgacgaacgtctgatgaagaccgcgtgccaagcatccaccaccaacgaatggccgtactgtatcaacgtgctagtgcacctttacatctatgacctgaacagtgcgcgatgcttcaggaagacattatcataggaggtcatagacactggttggaaacta

SEQ ID NO: 318416 - DNA, 246 bp, Zea mays
aaatctgcataatacgtgctgatacagcagctagaagcagattcgttccaacacagggagcggtacactatgcaatcgtcatagattggatacgggatggcaattatcagaaagcagcttgctatttgcgaaatgctgcatcgaagcgatccgcatatatcaatacagacgatataagcggataccaaaagcatgttaatacattcactgatccagctagctatgattaacatcatctaccactta

SEQ ID NO: 318417 - DNA, 412 bp, Zea mays
gtccggccttaacaatggttggcatggtcagtttatccattgacctgattgaccaatcgaggtgaggcgaaataaacaaatcgtataagatacaatacgaaattacaaataatcataaagcaacaacgaatttgcgtaatgcttcatcgatcctatctgcgtatatcaatacaaaccattataacagcgataccaaacgtcattaaataccttcaactgatccagctagctattattaacatctatcaacttcttataccattaactcctgacatacaaccgatttgctgtagccctcgtttacattaacgagcaacttcttcaacatacacaccttctaaaatctcttattaaactagtcatagtataccatagcatctacctacatcctcgacatcttatttcatctaat

SEQ ID NO: 318418 - DNA, 427 bp, Zea mays
caactagcaacatagaaagcacaatagtgtaccatcaatggccgccaaaatattttgcttccttatgctccttggtctttctgcaagtgttgctaccgcaaccattttcccacaatgctcacaagctcctatagcttcccttcttcccccatacctctcaccagcggtgtcttcagtgtgtgaaaacccaattgttcaaccctacaggatccaacaggcaatcgcaacaggcatcttaccattatcacccttgttcctccaacaaccgtcagccctattacaagagttacctttggtccatttggtggcacaaaacatcacggcacatcaactacaacaacttgtgctagcaaaccttgctgcatactctcagcaacatcagtttcttccattcaaccaactggctgcattgaactctgctgcttat

SEQ ID NO: 318419 - DNA, 53 bp, Zea mays
tcgaactagcatcattgggggcacaatagtgtacgaacaacggcacccaaaat

SEQ ID NO: 318420 - DNA, 367 bp, Zea mays
cacctttttccactgcttgccagaaatgatagcgtttgcggttcagagggttctccagcacagcggttgttatcatgcagcttttgctctgggcccttgattctgcctgcgagttggtgaaatcgccctgatacttccgtgctcttatatacatttcgataatagttttggttttctgacatctactgtaaggtgacctgttgctgggttgttggttatctgaatattaattgtaagaggccacttagtctgttatagctggtggatcgcctttttcaaatatatatttttttgttttgcactgaaaaaaaaaaaacaaacaaaaaaaaaaaaaaccacaaaaaaacaaggaataatcacaaaaaca

SEQ ID NO: 318421 - DNA, 416 bp, Zea mays
caagcggatgctagagatgatcaagatattgatggagagtgatctcaaccaaaaagggaaaaaaaacacaagaggacactaaagacaaacaggcaagagtaccataacgccaaccgagctctctacagcatgctgaagaaggagcagcaccagctgacaccaccgaagccatcaaacaaatgtgaaaaaatcatcatgcacgacgaactcataaacaaccaattgctacgacgcgaaccccgatggatcataagaacaaggacgaacaacaacaatgaagaccaacccgctgcagcacaacgatgacaagatcaagactcaatgacaaaagctgccgaactacaaggactcagcggctagaagcgcacctgtactgcaaacacatcgacaggtgcactctgagcaagatgcggaga

SEQ ID NO: 318422 - DNA, 416 bp, Zea mays
  unsure (1)..(416): unsure at all n locations
gncgcaactagcaacatagaaagcacaatagtgtaccaacaatggcagccaaaagattttgcctccttatgctccttggtctttctgcaagtgctgctacggcgaccattttcccgcaatgctcgcaagctcctatagcttcccttcttcccccgtacctctcaccagcggtgtcttcggtatgtgaaaacccaattcttcaaccctacaggatccaacaggcaatcacagctggcatcttacctttatcacccttgttcctccaacaatcatcagccctattacatcagttacctttggtgcatttattggcacaaaacatcagggcacaacaactacaacaacttgtgctagcaaaccttgctgcctactctcagcaacagcagtttcttccattcaaccaactagctgcattg

SEQ ID NO: 318423 - DNA, 417 bp, Zea mays
aaccatcagggcacagcagctgcagcatctcgtgctacctgtgatcaaccaagtagctctggcaaacctttctccctactctcagcaacaacaatttcttccattcaaccaactgtctacactgaaccctgctgcttatttgcagcaacaactattaccattcagccagctagctactgcctactctcagcaacaacaacttcttccatttaaccaattggccgcactgaaccccgctgcttatttgcagcagcaaatactactaccatttagccagctagctgcagcaaaccgtgcttccttcttgacacagcaacagttgctgcctttctaccagcagtttgcggctaaccccgcaaccctcttacaactacaacaattgttgccctttgtccaacttgctttgacagacccagc

SEQ ID NO: 318424 - DNA, 206 bp, Zea mays
cttttagattacatatgagatggcacctccttctattgaacgctgcacggcaagcatcatcagggacaagtttatatatcactgcgatccttcctactgcatcacgcatgcatccaccaacttcttatccactgtgcatggattaatcaactgctgtcgatacttgtatatacacatcaaattttcactcaacacattctacttaa

SEQ ID NO: 318425 - DNA, 426 bp, Zea mays
ctgggtgggggtattctatctactatctttactactataacacactacttttaatagttccagtcgtggtttttgtgcgtcgcgcccccacccgctcgctcgttttccacgctgtgctatccaggagcgtccgtccgctctctgacatccacaaacactatcctttgagcattacatatctttttgaactgatttagttgtgcattaccattttattcaaaattttgtatgccgtcgcaacgcacgggcacttacctagtaccttgataagaccaggaagaggttcctttgggcaagaggagaaaatccaacgagagggaaatgcaaagtcgtccaataaacctcgtgcggcttaggaatgcttgattcagaaagatttgctagagcgttgtgattacgttggatgtggctgcaatgggctaaacc

SEQ ID NO: 318426 - DNA, 174 bp, Zea mays
cccacgcgtccgggagaattagttgagttacctgagtacaggcgagaataaatagatcgggttgtctcagagaaatgttgtaatcattcctaattgtagagctagagaaactctcttttttttcgatacccatttcgacggagttactgatccaaagactggtcttatgcgttc

SEQ ID NO: 318427 - DNA, 436 bp, Zea mays
gaccaacaagcaacatagaaagtggaatccagtagcaacaacagagcaacaatggcgaccaagagattgtccctccttatgctccttgctctttctgcatgtgttgctaacgcgacaattttccctcaatgctcacaagctcctatagcttcccttcttcccccataccttccatcaatgatagcttcagtatgtgaaaacccagctcttcagccctataggctccaacaagcaatcgcagcaagcaacatacctttatcacccttgttgtttcaacaatcgccagccctatctttggtgcagtcattggtacaaaccatcagggcacagcagctgcagcaactcgtgctacctgtgatcaaccaagtagctctggcaaacctttctccctactctcagcaacaacaatttcttccattcaaccaactgtctacac

SEQ ID NO: 318428 - DNA, 321 bp, Zea mays
acccacgcatccgcccactcgtccgcccacgcgtcctttttatgagtacttgacaaagtgcggaatgctgcatctgattatgaatgaggccagtggcacatgatttcgaacagcgcaaaggatcttatatgaaaaatcctatgcctttgtcaatcgaaaaaattaaagcccactttaattttaaagcttcctggaatatgaaaatataaaggctacaccattaaatcttgatcccacatgtcttttttgtacccataaattattttccattaattaattcaagaaatttgctctaccagttattgcttaacattttttata

SEQ ID NO: 318429 - DNA, 413 bp, Zea mays
agaaaatggcacccaattactgccctcgaggtgttgttagacttaatgggtcactacgcgaacggtcagtgtagttctatgcatgcatctacaataacagctgtttaagttgcacaggcgcgagacaaatggggtcgtagcgccatcgttttgttgtcgcgtggtcatgatattccatcggcgaacatcgacaactctgccacgcacatgagtatttgtgttcaacctttaatggtggatctgtttttttagaaatgtgtcaagagaagttgaaaatgatgatactggtcaccaaaactggattggggtataatttgaataccggttattccttgaccaaatgttaacaaccaaagtttttaagaaacttaaattatttattccattagcttgaatcggtcaatggtgggtta

SEQ ID NO: 318430 - DNA, 231 bp, Zea mays
taaaagtgacgcccaattactgccctcaatgttttgttagacttaatggctcactacgctaacggtcggtgtaattatatacatacatctacaataacatctgtttaagttacacaagctcaaaacaaatggcctcctagctccatcgttttgttgtcgcgtgttcatgatattccatcggcgaacattgacaactctgccacgcacatgactatttgtgttcaaccttta

SEQ ID NO: 318431 - DNA, 462 bp, Zea mays
  unsure (1)..(462): unsure at all n locations
cccacgcgtccgcagaaacacaccaagcgaagcacattagcaacaacctaacaacaatggctagcaagatattatccctccttgcgcttcttgcgctttttgcgagcgcaacaaatgcgttcattattccacaatgctcacttgctccaagttccattattacacagttcctcccaccagttacttcaatgggcttcgaacacccagctgtgcaagcctataggctacaacaagcaattgcggcgagcgttttacaacaaccaatttcccaattgcaacaacaatccttggcacatctaacaatacaaaccatcgcaacgcaacagcaacaacaatttctaccagcactgagccacctagccatggtgaaccctgccgnctacttgcaacagcagttgcttgcatcaaacccacttgctctggcaaacgtaattgcaaaccagccacaacaacagctgcaac

SEQ ID NO: 318432 - DNA, 90 bp, Zea mays
aaaaaaaaaaaaaaaaaaaaaaaaaaataaaaaaaaaaaaaaaaaaaaaaaaaaaagagtaaaaataaaaacaagggtcggccgttcatt

SEQ ID NO: 318433 - DNA, 157 bp, Zea mays
cctcaattcccttatccacccacgcgtccactcactcaacacaccactctaccaccaactcttttattattcaccacaacttacctctctatagactggatttctaacaaaaccttttccctcctcatcctccatccttccaattcatatcatctta

SEQ ID NO: 318434 - DNA, 243 bp, Zea mays
agcatgtgtaatgtataactgtaaatattggcttgatttgaacaaacttgttttttttgcgaaagaaaaaaaaaaaaaaatagaaaaaaaaaaaaaaaaaaaaaaaaaaaaaaaaaaaaaaaaaaaaaaaaaaaaaaaaaaaacaaaaaaaaaaataaaaaaaaaaaaaaaaaaaaaaaaagtcaaccattaaaaatattcaaaatttacataccaataaattcaacgtaaaaattttttaaa

SEQ ID NO: 318435 - DNA, 198 bp, Zea mays
acgcgtccggaaaaaaataactcttaatttatacgagactcctaaaattccaaactgggagggatttcatagcatattgcggaggaccatcaaaaagcacatcaaatgtcacatgccccttgcaagatcgaatccatgattaaactactcttctagcacattctactatccgtaatatgactctatctaacttatatc

SEQ ID NO: 318436 - DNA, 70 bp, Zea mays
aaaaaaaaaaaaaaaaaaaaaaaaaaaataaaaaaaaaaaaaaaaaaaaaaaaaaagaagaaaaaaaaaa

SEQ ID NO: 318437 - DNA, 274 bp, Zea mays
cccacgcgtccgcggacgacgacgcccggcggataagagcgggagcgggagcgagagcgacgacgatgactgggtcgagaaccagatgctggctttgctcgacgtggcggtgccgtaccggaagaagagcaggaggctgccggtctttgaggagatctcgcgagcagaatagcagatggctgatatagattagcagcagcatcatcatctttcgatcgagctccatgcatatatcgtttgagcgagcgcggatcctctggacctaactgcagtc

SEQ ID NO: 318438 - DNA, 315 bp, Zea mays
gtgagctgtcttctaagcctgatgatgaaccagatatcaatacagaacattcttagacaccttgggaggcaaatgaatcgtagtaaacttgtggaacaagcgatgctgatgatggcacaaaggaaatcatgcaagataactggcttgtgctacttttcagggagcttgaaaagcaaggcatcactttgcctgataggtacactgatgatgagttacacagattttatgttgctgcaaatggtgactttgaaagtctactttattctggtaagaagacaattcattgtaaggaaacatatcacatacttacatagc

SEQ ID NO: 318439 - DNA, 322 bp, Zea mays
aaaaaaaaaaagaaaaaacaaaaaaaacaaaatttattttaaaaaaaaaaaaaaaaaaaaaaaaagaacaagaaaaaaaaaaaaaaaaaaaggccaacccatctaaaaaatccaacctttcttacacatccatccttacgtcatagttcttccatactcatacctaatttcaattcactccccattttattacactgcctcaactttaaaaaccttggcattaccaaacttattccttttccaaactatacccctttccacaacttccccatttcccaaaatgccctaacagataaaatttcccaacagtttcccattctaa

SEQ ID NO: 318440 - DNA, 271 bp, Zea mays
caacaagcaacatagaaagtggaatccagtagcaacaatagagcaacaatggcgaccaagatagtttccctccttatgctccttgctctttctacatgtgttgctaacgcgacaattttccctcaatgctcacaagctcctatagcttcccttcttcccccataccttccatcaattatagcttcaatatgtgaaaacccagctcttcaaccatataggcttcaacaagcaatcgcagcaagcaacatacctttatcgcccttgttgtttc

SEQ ID NO: 318441 - DNA, 202 bp, Zea mays
gcgtaccagtgcaagtctattactgatgattggttttcttctttatcaaatgtgttcatgatgattgagttgctgaacttgaaatactgcaacaagatcacttatactgatttgggtcacctatactccctgtatgatctcacaaacctttaactgacatgcttgttcctcttaacaagcattgagatctcctcaatttcaa

SEQ ID NO: 318442 - DNA, 366 bp, Zea mays
  unsure (1)..(366): unsure at all n locations
caagatgatcctcgatcgggagacgcagaggtcccgcggcttcggcttcgtcaccttctccacggaggaggcgatgcggaacgccatcgagggcatgaacggcaaggagctggacggccgcaacatcaccgtcaacgaggcccagtcccgcggcggccgtggaggcggcggcggtgggtacggtggtggccgtggaggcggcggctacggcggtggcgggcgccgtgatggcggtggcggctacggcggtggcggcggctacggtggcggcggcggctacggtggtggtggcggcggctaccgcggtggcaaccgtggcggcggctacggcaactncgacgggaactggaagaactgagcggtggg

SEQ ID NO: 318443 - DNA, 292 bp, Zea mays
cggacgcgtgggggtgggttggcttctccttcccctccggttcgggttcgggttcgtggggttgtccgacgttcgggttcgtgggtgagcggatcgagatggcggcgtccgatgttgagtaccgctgcttcgtcggcggcctcgcctgggccactgacgaccactccctccacaacgccttcagcacctacggcgaggtcctcgagtccaagatcatcctcgatcgggagacgcacatgtcccgcggcttcggcttcgtcaccttctccacggaggatgctatgcggaacgc

SEQ ID NO: 318444 - DNA, 428 bp, Zea mays
  unsure (1)..(428): unsure at all n locations
ctgtgcatctcccaccgccggtccacctgccgccgccggtccacctgccaccgcctgtccatgtgccgccgccggttcatctgccgccgccaccatgccactaccctactcaaccgccccggcctcagcctcatccccagccacacccatgcccgtgccaacagccgcatccaagcccgtgccagctgcagggaacctgcggcgttggcagcaccccgatcctgggccagtgcgtcgagttcctgaggcatcagtgcagcccgacggcgacgccctactgctcgcctcagtgccagtcgtgccgcagcagtgttgccagcagctcaggcaggtggagccgcagcaccggtaccaggcgatcttcggcttggtcctccagtccatcctgcagcagcagccgcanagcggccaggtcgcggngctgttgg

SEQ ID NO: 318445 - DNA, 217 bp, Zea mays
cacacgcgtggggttgtctccctgtcgctttccgtgcctagatgtagaaccggacccgcagaggcgagggccgcctatattctactcctattagaacgcccgtgaccgggattacgtggagcaagcgcggatgtcaacgctgcactcagagtctaccgtcgaatcccccatcaaggcggccgaatacaaggacaccgtaaaggccgatcaccagctg

SEQ ID NO: 318446 - DNA, 412 bp, Zea mays
gctctcggtcgccatggccgggggatacacatgcgtaacgctcgtcatgctaacatgatgaagtaccttaaaataatgaccgagagacatgtagaggggctattaaggcatgatccacacgaatatcatctgccatcaaaagctgcatggtgcagacatacacagcaagctgcaaaccctttgctaggctactctactgtggaactcactggctaattacctggatcggctcttactagccagctcacatccatccgtatgcactctgataattgacaactgccatcataccctactatcatatgaaccacacgcatcatttgcacacgtcgttcccattctagaaccagcagttctagatgtatgagcttatcctggacaacctgcatcgtctgatccatcagcactatct

SEQ ID NO: 318447 - DNA, 154 bp, Zea mays
cttcacgtcacgcgagtcgtcatgcccttgttcggttctaagattctggcccttaaaataaactggccggccatttatcacacctggtcggtcgactcaagcaagccggtctttaggtcactggctgctgacttcaaccattacgctgacagct

SEQ ID NO: 318448 - DNA, 314 bp, Zea mays
acaatagaaaccatcgcaacgcaacagcaacaacaattcctaccagcactgagccacctagccagggtgaaccctgccgcctacttgcaacagcagttgcttgcatcaaacccacttgctctggcaaacgtagttgcaaaccagccacaacaacagctgcaacagtttctgccagcgctcagtcaactagccatggtgaaccctgccgcctacctacaacagcaacaactgctttcatctagcccgctcgctgtggccaatgcacctacatacctgcaacaacaattgttgcaacagattgtaccagctctgac

SEQ ID NO: 318449 - DNA, 192 bp, Zea mays
  unsure (1)..(192): unsure at all n locations
ttcagacgttgccttctcgtacacctactctatgcttctcatagaaatccancacactatgaaggcacgttcattatataactttacgatgaacatgaccaactactactgcatcaacacatctaccatcttctacatatctctcctattcatcacctacactgcctatttcaacacctttccagtgaactt

SEQ ID NO: 318450 - DNA, 275 bp, Zea mays
actgacgcgtgggaaaaaaaaaaacaaaaaaatataattaaaaaaaaaaaacaaaacactaaaaaagaagcgctcattatataacgtgaccatgaatacatccaccttctaccgaatcaacatctctaccatattctacctctaactcaattgcatcgcctacgctttcttacgcaacacactggaaaaacaacgtgcttacccactttaactagcctttctgactattccacttttccaacatcgccttatacctacaattccttgacgcatat

SEQ ID NO: 318451 - DNA, 377 bp, Zea mays
cccacgcgtccttattttgattctgcactgctcccgtgtacaaacgtgggtctcaataaggcaggcaggaatgcatctgccagtggaacagagcaacctgcacattatttatgtatgcctgttcattggagggcttgttcattacatgttcgtctatactagaaaaaacagaatattagcattaatctatagttaattaaagtatgtaaatgcgcctgttttttgttgtgtactgtaatcatctgagttggttttgtgaaattttcgtaaaaagaatgaatgtaaaatccagaaaatgtaatgccgtgtaatatccttatggaacaatgtataatcttttttctcaccaccaccagtttcttccattcaaccaactg

SEQ ID NO: 318452 - DNA, 345 bp, Zea mays
ggtgggttggcttctcctccccttccgttccggtttcggttccgtgaggttctccggggttcggtttcgtgggtgaacgtatcgagatggcgtcgtcggatgttgagtaccgctgcttcgtcagcggcctcgcctgtgccacggacgaccactccctccacaacgccttcagcacctacggcgaggtcctcgagtccaagatcatcctcgatcgggagacgcagatgtcccgcggcttcggcttcgtcaccttctccacggaggatgcgatgcggaacgccatcgagggcatgaacggcaaggatctggacggtcgcaacatcaccgtcaacgaggcccagtccc

SEQ ID NO: 318453 - DNA, 439 bp, Zea mays
accaactagcaacatagaaagcacaatagtgtaccaacaatggcagccaaaatattttgcctccttatgctccttggtctttctgcaagtgctgctaccgcgaccattttcccgcaatgctcacaagctcctatagcttcccttcttcccccgtacctctcaccagcggtgtcttcggtatgtgaaaacccaattcttcaaccctataggatccaacaggcaatcgcagctggcatcttacctttatcacccttgttcctccaacaatcatcagccctattacagcagttacctttggtgcatttattggcacaaaacatcagggcacaacaactacaacaacttgtgctagcaaaccttgctgcctactctcagcaacagcagtttcttccattcaaccaactagctgcattgaactctgctgcttatttgcaacaac

SEQ ID NO: 318454 - DNA, 382 bp, Zea mays
aaaaaaaaaaaaaaaaaaaaaaaaaaattaaaaaataaaaataataaaaaaaaaaaaaagaaaaaggtaaaaaggataaaaaagaacataactatgagctatgtggaacatactttaaaggggtggatgtttttaatggattgtttttgcagtccctggtttttcaaggggagtctattatttgtttacctttagtattgttaatggccagtagtttatgacattgggggttcttataagcgtggtctgcctatactatttccattttctggcatttaccatttatcctgtcgggctatttagaatgagctctctgatgttcctgttgtcaaccttttacattggcagatctgcattggggactacccctatgcgatcgttt

SEQ ID NO: 318455 - DNA, 442 bp, Zea mays
attggcacaaaacatcagggcacaacatctacaacaacttgtgctagcaaaccttgctgcctactctcagcaacagcagtttcttccattcaaccaactagctgcattgaactctgctgcttatttgcaacaacaactaccattcagccagctagctgctgcctacccccaacaatttcttccattcaaccaactggcatcattgaactctcctgcttatttacagcagcaacaactactaccattcagccagctagctggtgtgagccctgctgccttcttgacacaacaacagttattgccgttctacctgcacgctgcgcctaacgctggcaccctcttacaactgcaacaattgctgccattcaaccaacttgctttgacaaacccagcagcgttctaccaacaacccatcattggtggtgccctcttttagatttct

SEQ ID NO: 318456 - DNA, 437 bp, Zea mays
cccacgcgtccgattgagaccaacaagcaacatagaaagtggaatccagtagcaacaacagagcaacaatggcgaccaagatattttccctccttatgctccttgctctttctgcatgtgttgctaacgcgacaattttccctcaatgctcacaagctcctatagcttcccttcttcccccataccttccatcaatgatagcttcagtatgtgaaaacccagctcttcagccctataggctccaacaagcaatcgcagcaagcaacatacctttatcacccttgttgtttcaacaatcgccagccctatctttggtgcagtcattggtacaaaccatcagggcacagcagctgcagcaactcgtgctacctgtgatcaaccaagtagctctggcaaacctttctccctactctcagcaacaacaatttcttccattc

SEQ ID NO: 318457 - DNA, 299 bp, Zea mays
agcattcactatattgaccataatgcagccgtcgaacggcctaaaccgacggctctgggaagacgtcaggagcgacttatggctacatcgtatgtaagtgcctactgaactatgcacttgaacttgactgctcacaccttacatgcttcatagaggcatgtaccattttgttgtgatgagtattgcttctatcaatgatagcgctaatatgcaagccctcaactctgcatccatatatgctcttactggctattgtggttagctgcatactgagatgactatagatggcataacagtca

SEQ ID NO: 318458 - DNA, 166 bp, Zea mays
gtattgctatgggatcctgtgccaaaacaatactactacgcaacaggatcccatagcaatacgagaaatgtgcaacgtctcataagaacaggcactgcataaattgaaggaaagaatgatttccatcgatttatgcagtgcctgttcttaagagacgtagcacata

SEQ ID NO: 318459 - DNA, 251 bp, Zea mays
ccccgctatcgcatactcttccacggtcgcgcttctacgcatcaggatcccatagcggtacgagcaatgtgcaacgactcacaagaacacgcactacgtaaatagaaggaccgactgatttcacatcgattaacgaactgcctgcacgaccgagacgtagcacatattgaggacagcgacatgattctgacgcttcctgtcagagacatctcgcacgagctgatgacagatccgaatgcgtccatcgaccc

SEQ ID NO: 318460 - DNA, 429 bp, Zea mays
gagaccaacaagcatcatagaaagtggaatccagtagcaacaatagagcaacaatggcgaccaagatattttccctccttatgctccttgctctttctacatgtgttgctaacgcgacaattttccctcaatgctcacaagctcctatagcttcccttcttcccccataccttccatcaattatagcttcaatatgtgaaaacccagctcttcaaccatataggcttcaacaagcaatcgcagcaagcaacatacctttatcgcccttgttgtttcaacaatcgccagccctatctttggtgcagtcattggtacaaaccatcatggcacaacagctgcagcaactcgtgctacctctgatcaaccaagtagctctggcaaacctttctccctactctcagcaacaacaatttcttccattcaaccaac

SEQ ID NO: 318461 - DNA, 378 bp, Zea mays
gccacgcgtccggatccactacctcagacagttgtgagtgcaccagcgtacacgaactgcagggggcaaaggtaccagctctgaatgacatgaactgcccgagatgtcatcaactgtgcgatctatgcatgactcgacagcctacactatgaagccactgtatatgacctgatccgatgtcatatctgggatcatcatgttagacaggctcgatcgccccaatacttgaactgaaactacggctgagtaccccatgttatgaagatggtacaaggagcttgtactgacctctacaatcgacttacgttaaccctatacctgcatcatacgcaggaggcgcatcagctgttatctcagcatatactgatggccgaagtg

SEQ ID NO: 318462 - DNA, 369 bp, Zea mays
cactcgtatgctctatatgtaattcacatcatatatcaggatgatagactatctacatgaaccgtactccacaatctttcagaactgaacatctattcatatggtcacttgaaacccaaaacagccctatatatcgttatgtactgactacttctctattaatgtatatatctgcacactgtactaaacgagccgtgccgctgccattgccgcaaacgatgtacagacattagctgctaacttgccaagctatgattacgaacatgagatatccaacatacgtcgataacaggatgacgtgcatcacatactcacataatcctcaggtagacgactttgtgttatcgaagcgatccagctggttctaaa

SEQ ID NO: 318463 - DNA, 326 bp, Zea mays
gtgacacgtcttttttcaatttcttagttattttttatcgctgtatgattcacgaacggcatggggcttatgtaagaactctttaacatgtgaaatgcaactgctaacatcaacattgagataagtacttgaatctattgtcgatatgaactaactaatattgtatgacctgaagggacgaaagaccaacgaaattgtgtacatccaacttgaaagacgcagtaattgcagtgctcatagggctgaatatgatatccaataaaccactaactaagtgtttaaacgaactactataatcgactatcaatacacaaacatctacttta

SEQ ID NO: 318464 - DNA, 399 bp, Zea mays
gttctagatcgcgggcggcctttttttttttttttttttttttttttttttttttggtttttttttttttttttttttttttttttttttttttttttttttattatttttttttttttttttttttattttttttggctaaaactaaaggagaaattttgaaaaaaaataaaaaattaaaaaaaaagtttaaaaaaaaaatttaaaaaaacgggaaaaaatttttaaaaaaaacaagaaaaaaaaaacatttttttggaaaaagggggaaatttaagtgctttaaaaaatggccccgaaaaatgaaaaaaatggacctaaaaacctttttgcaaaaaaccaaaaattttttaggaaaattttcaaaaggggcaaaatgttaaattgaaaaggggataa

SEQ ID NO: 318465 - DNA, 402 bp, Zea mays
catggatgcagtactgcatgaagcaacagggggttgccaacttgctagcgtggccgaggctgatgctgcagcaactgttggcctcaccgcttcagccgtgccagatgccaatgatgatgccaggtatgatgccaccgatgacaatgatgccgatgccgaatatgatgccatcgatgatggtgccgactatgatgtcaccaataacgatagctagtatgatgccaccgatgatgatgccaaacatggtttcaccaatgatgatgccgagtatgatgccttcgacgatgacgccgagtatgatgccaccgataatgatgccaagtatgataccaccgatgatgatgccgagcatggtgtcatcaatgataatgccaaacatgatgacagtgccacaatgttact

SEQ ID NO: 318466 - DNA, 435 bp, Zea mays
gaccaactagcaacatagaaagcacaatagtgtaccaacaatggcagccaaaatattttgcctccttatgctccttggtctttctgcaagtgctgctaccgcgaccattttcccgcaatgctcacaagctcctatagcttcccttcttcccccgtacctctcaccagcggtgtcttcggtatgtgaaaacccaattcttcaaccctataggatccaacaggcaatcgcagctggcatcttacctttatcacccttgttcctccaacaatcatcagccctattacagcagttacctttggtgcatttattggcacaaaacatcagggcacaacaactacaacaacttgtgctagcaaaccttgctgcctactctcagcaacagcagtttcttccattcaaccaactagctgcattgaactctgctgcttatttgca

SEQ ID NO: 318467 - DNA, 185 bp, Zea mays
tcgcgacgcgttcggattcttcctgggcaagtttttggtgccctggtcattgagcactttggttgatttcagtttaggatttgaatgatgctgggttaaacaatgacttggctggcattaggtattaactaatgctaattaacctgccaaaaaaaaaaaattcaagaaattaaacggctttacat

SEQ ID NO: 318468 - DNA, 420 bp, Zea mays
aaaccatcagggcacaacagctgcagcatctcgtgctacctgtgatcaaccaagtagctctggcaaacctttctccctactctccgcaacaacaatttcttccattcaaccaactgtctacactgaaccctgctgcttatttgcagcaacaactattaccatttagccagctagctactgcctactctcaacaacaacaacttcttccatttaaccaattggccgcactgaaccccgctgcttatttgcagcagcaaatactactaccatttagccagctagctacagcaagccgtgcttccttcttgacacaacaacagttgctgccgttctaccagcagtttgcggctaaccccgcaaccctcttacaactacaacaattgttgccctttgtccaacttgctttgacaaacccagcag

SEQ ID NO: 318469 - DNA, 420 bp, Zea mays
cggacgcgtgggcggacgcgtgggtgcaacaacaattaccattcagccagctagttgctgcctacccccagcaatttcttccattcaaccaactagcagcattgaactctgctgcttatttacagcagcaacaactactaccattcagccagctagctgatgtgagccctgctgccttcttgacacaacaacagttgttgccgttctacctgcacgctatgcctaacgctggcaccctcttacaactgcaacaattgctgccattcaaccaacttgctttgacaaactcaacagtgttctaccaacaacccatcattggtggtgccctcttttagattgcttatgagttatagttcaataatgaagttttttggatgatgtttgtggcgtcccagaaataagaaagtacatttctagatt

SEQ ID NO: 318470 - DNA, 431 bp, Zea mays
  unsure (1)..(431): unsure at all n locations
gcaacatagaaagcacaatagtgtaccaacaatggcagccaaaatattttgcctccttatgctccttggtctttctgcaagtgctgctaccgcgaccattttcccgcaatgctcacaagctcctatagcttcccttcttcccccgtacctctcaccagcggtgtcttcggtatgtgaaaacccaattcttcaaccctataggatccaacaggcaatcgcagctggcatcttacctttatcacccttgttcctccaacaatcatcagccctattacagcagttacctttggtgcatttattggcacaaaacatcagggcacaacaactacaacaacttgtgctagcaaaccttgctgcctactctcagcaacagcagtttcttccattcaaccaactagctgcatngaactctgctgcttatttgcaacaac

SEQ ID NO: 318471 - DNA, 436 bp, Zea mays
gagagggtgttttgtctctcttcaactccacatcaacaaaaccaatggaaccaactcgggatgctacttggtctttctgcaagtgctgctaccgcgaccattttcccgcaatgctcacatgctcctatagcttaccttcttcccccgtacctctcaccagcggtgtcttcggtatgtgaaaacccaattcttcaaccctataggatccaacaggcaatctcagctggcatcttacctttatcacccttgttcctccaacaatcatcagccctattacagcagttacctttggtgcatttattggcacataacatcagggcacaacaactacaacaacttgtgctagcaaaccttgctgcctactctcagcaacagcagtttcttccattcaaccaactatctgcattgaactctgctgcttatttgcaacaacaac

SEQ ID NO: 318472 - DNA, 92 bp, Zea mays
tgttttttttttttttttttggtttttattttttttttttttttttttattttgggtttgtttttttgccaaaattccaaagggcccctttt

SEQ ID NO: 318473 - DNA, 431 bp, Zea mays
gcaacatagaaagcacaatagtgtaccaacaatggcagctaaaatattttgcctccgtatgctccttggtctttctgcaagtgctgctacggcgaccattttcccacaatgctcacaagctcctatagcttcccttcttcccccgtacctctcaccaacggtgtcttcggtatgtgaaaacccaattcttcaaccctacaggatccaacaggcaatcgcagctggcatcttacctttatcacccttgttcctccaacaatcatcagccctattacagcagttacctttggtgcatttattggcacaaaacatcagggcacaacaactacaacaacttgtgctagcaaaccttgctgcctactctcagcaacagcagtttcttccattcaaccaactagctgcattgaactctgcttcttatttgcaacaac

SEQ ID NO: 318474 - DNA, 317 bp, Zea mays
cccacgcgtccgcccacgcgtccgggctcacaccagctagctggctgaatggtagtagttgttgtgagccctgctaccttcttgacacaaccacagttgttgccgttctaccagcacgctgcgcctaacgctggcaccctcttacaactgcaacaattgctgccattcaaccaacttgctttgacaaacctaacagtgttctaccaacaacccatcattggtggtgccctcttttagatttcttatgagttatagctcaataataaagttttttgtctgatgtttgtggcttcccagaaataagaaagtacatttct

SEQ ID NO: 318475 - DNA, 257 bp, Zea mays
ctctaattaaatggaaatgtgaagtggtaggaccgttgaagtaaatcgctgggattggctcatgcacgttgggagatcagatcttcgcttgcataggatgcagactagcctacctactcatacgtataactagatattgtatattatatcactaagaacaattccctatccgctttaatacatggtcctgactagcaataccataactgcacccatcttaatgctctgccaatacatcacacatatgacatctgtcc

SEQ ID NO: 318476 - DNA, 436 bp, Zea mays
acctttctccctactctcagcaacaacaatttcttccattcaaccaactgtctacactgaaccctgctgcttatttgcagcaacaactattaccattcagccagctagctactgcctactctcagcaacaacaacttcttccatttaaccaattggccgcactgaaccccgctgcttatttgcagcagcaaatactactaccatttagccagctagctgcagcaaaccgtgcttccttcttgacacagcaacagttgctgcctttctaccagcagtttgcggctaaccccgcaaccctcttacaactacaacaattgttgccctttgtccaacttgctttgacagacccagcggcctcctaccaacaacacatcattggtggtgccctcttttagattgcttattagttgtaattcaataataaagttttttggat

SEQ ID NO: 318477 - DNA, 164 bp, Zea mays
ccgacgcgtccgcccacgcgtccgcctttgcgttcgcccacgcgtccgcccacgcgtgcgagcaaacatgctgagacatttagttgaacgaacctgagttgttccgagatttctgtcgggattattcaattggaatttttgaagcttggtattctattggatct

SEQ ID NO: 318478 - DNA, 440 bp, Zea mays
  unsure (1)..(440): unsure at all n locations
cacagttcctccgaccagttacttcaatgggcttcgaacacctagctgtgcaagcctacaggctacaacaagcgcttgcggcgagcgtcttacaacaaccaattaaccaattgcaacaacaatccttggcacatctaaccatacaaaccatcgcaacacaacagcaacaacagttcctaccagcactgagccaactagatgtggtgaaccctgtcgcctacttgcaacaacaggtgcttgcatncaacccacttgctctggcaaacgtagctgcataccaacaacaacaacaattgcaacagtttctgccagcgctcagtcaactagccatggtgaaccctgccgnctacctacaacagcaacaactgctttcatctagccctctcgttgtgggtaatgcacctacatacctgcaacaacaattgctgcaacagattgta

SEQ ID NO: 318479 - DNA, 286 bp, Zea mays
aaaacacatgctactacacgtagaaagttacacattgaagctgcatccacaacgcatgcatcggggggcgttgcaacgctctgtacaagaccacctaatgcgacgcatattccactagacaggactccaggtatgcacattcttaagacgaacccatacatgcagtactgcataatggaacatacgctcagtagcttgattactcgacagtccatcatgctaaatcccctggtggacatacctcatcacacgatgccaaagatgacgcctcagatgatgacgccta

SEQ ID NO: 318480 - DNA, 423 bp, Zea mays
gtgaatatggtcagccatccagttcccatctcttctacttctctactactacttatggacctaacgtaggcgtccacactcaaaattggtgcacggttctgcctttctccacgcgctggccgcgaatctcgtcggtctaccaaatccgtcgcgaatctcgtccacaaaacttccagccatggctgccgtgaccaatccatggcagccgcgccctggtccctcgaccgcgccggcttccatccatggtgcttcttcttgttgtggtgttcggatcgcagtccactgaccgaaccgaaccactgttcgacggagcagatgacacgatggccatcttcctggcgctgcggtcgccgaagctggaggtgtcgggcctcaccactaccttcggcaacgtccacaccgccctcgccacgcgcaacgcgc

SEQ ID NO: 318481 - DNA, 416 bp, Zea mays
cggacgcgtgggtgctgcttatttgcaacaacaactaccattcagccagctagctgctgcctacccccagcaattacttccattcaaccaactggcagcattgaactctgctgcttatttacaacaacagcagctaccaccattcagccagctagctgatgtgagccctgctgccttcttgacacagcaacagttgttgtcgttctactcgcacgctgcgcctaacgctggcaccctcttacaactgcaacaattgctgccattcaaccaacttgctttgacaaacccagcagcgttctaccaacaacccatcattggtggtgccctcttttagattgcttatgagttatagttcaataatgatgttttttggatgatgtttgtggcttcccagaaataagaaagtacatttctag

SEQ ID NO: 318482 - DNA, 414 bp, Zea mays
gcttatttgcagcaacaactattaccatttagccagctagctactgcctactctcagggacaacaacttcttccatttaaccaattggccgcactgaaccccgctgcttatttgcagcagcaaatactactaccatttagccagctagctgcagcaaaccgtgcttacttcttgacacagcaacagttgctgcctttctaccagcagtttgcggctaaccccgcaaccctgttacaactacaacaattgttgccctttgtccaacttgctttgacagacccagcggcctcctaccaacaacacatcattggtggtgccctcttttagattgcttattagttgtaattcaataataaagttttttggatgatgtatgtggccaaccagaaataagaagttacatttccagaaaaa

SEQ ID NO: 318483 - DNA, 361 bp, Zea mays
cgcacgcgtccgaaaaaaaaaaaaattaaataaaaaaaaaaaaaaaaaaaaaaaaaagaaagaataataaaaaaaaaaaaaaaaaaaaaaaaaaaaaaaaaaaaaaaaaaaaaaaaaaaaaaaaaaaaaaaaaaaataaaaaaaagtgcctccccttttaaatattccaagtttactatcccttatttccaaattcaaaccttttttatatcgtcccttaaattaaataccatacccgtcattttacaattatcaccctggaaaaaccttgacttatccaacctaaaacattttttacaaaatccccttttacccacttgccatattaccaaaaaacccctaccaaaactccttctaaaaa

SEQ ID NO: 318484 - DNA, 368 bp, Zea mays
gggactcgtaccttgcaacccactctttgcgatccgcactatctccagcctatcgcggatggctaccaagatctcatcgctccgtacactaactgaccttctaaccagctcagctcatgcgatcatgattccacagacctcacttactcctaaagccaggattgcacagatcctgacaccacttacagaaatgggctcttaacatgcagacttgctagcactcctcctactactagcacttgcgatgctcgccctacaactacccattgtcaaacacagtcatctatgcttgacacactgaccataccaccaatgcaacacaacatcaaccacagccactgcatccaagactgatccacctacacgca

SEQ ID NO: 318485 - DNA, 388 bp, Zea mays
ccaactagcaacatagaaagcacaatagtgtaccaacaatggcagccaaaatatttggcctccttatgctccttggtctttctgcaagtgctgctacggcgaccattttcccgcaatgctcgcaagctcctatagcttcccttcttcccccgtacctctcaccagcggtgtcttcggtatgtgaaaacccaattcttcaaccctacaggatccaacaggcaatcacagctggcatcttacctttatcacccttgttcctccaacaatcatcagccctattacatcagttacctttggtgcatttattggcacaaaacatcagggcacaacaactacaacaacttgtgctaacaaaccttgctgcctactctcagcaacagcagtttct

SEQ ID NO: 318486 - DNA, 433 bp, Zea mays
cgcactcgtccgcccacgcgtccggcaacatagaaagcacaatagtgtaccgacaagtgtagccaaaatattttgcctccttatgctccttggtctttctgcaagtgctgctacgacgaccattttcccgcaatgctcacaagctcctatagcttctcttcttcccccatacctctcaccagcgttgtcttcagtatgtgaaaacccaattcttcaaccctacaggatccaacaggcaatcacagcaggcatcttacctttatcacccttgttcctccaacaatcatcagccctattacatcaattacctttggtgcatttattggcacaaaacatcagggcacaacaactacaacaactcgtgctagcaaaccttgctgcctacgctcagcaacagcagttacctttggtgcaattgttggcacaaaacatc

SEQ ID NO: 318487 - DNA, 401 bp, Zea mays
cgttgccctcgctctcctggctctcgctgcgagcgccacctccacgcatacaagcggcggctgcggctgccagccaccgccgccggttcatctaccgccgccggtgcatctgccacctccggttcacctgccacctccggtgcatctcccaccgccggtccacctgccgccgccggtccacctgccaccgccggtccatgtgccgccgccggttcatctgccgccgccaccatgccactaccctactcaaccgccccggcctcagcctcatccccagccacacccatgcccgtgccaacagccgcatccaagcccgtgccagctgcagggaacctgcggcgttggcagcaccccgatcctgggccagtgcgtcgagtttctgaggcatcagtgcagcccga

SEQ ID NO: 318488 - DNA, 367 bp, Zea mays
gtggctgccaacaagtcatgctcatgcaaaccgatgaatctatctctgtatcatcggtctcggttgcttgctagtccagactccagacatggctatatatatatagctggtgctaataaataggagtataatcgtcatatcgatcggttgcgtgtggaatgccaatcatgtgtgtaatctgttggcaaataacaaacctctgttcctccctgctgctgttgtccgtgcgatcatgattcagaactggcgtgggcgccaataactcagaagagagacttgctgtatatgcatgctagtatgcattgtccctctcttgtcaatgcttgtaatcgaactttattatgaaaaccaaaacgagaatccaacc

SEQ ID NO: 318489 - DNA, 323 bp, Zea mays
tgaaagtcaagcgattttgctaaaaaaaaaaaaaaaaaaaaaaaaaaaaaaaaaaaggaaagaaaaaaaaaaaaaaaaaaaaaaaaaaaaaaaaaaaaaaaaaaaaaaaaaaaaaaaaaaaaaaaaaaaaaaaaaaaaaaaaaaaaataaatcaacataaaaaaaaaaaaactaaaacaaaaaaaaaaaaaaaacaacaaaaaatcgactcaaaaataataaaaaaaaatttaaccttccaaaaaaaaaaataaaactaaaaactgctataactaaaatgacttaaccaacatataccaatcacataaatactgtacaacttt

SEQ ID NO: 318490 - DNA, 136 bp, Zea mays
tctcaacacttacacatttaaccataatctcaattcatgccttacatcaaaacatacctccctttcataccttgcttcatctaattacccatatttcattaatcttacactgcattaactcaaatctccgactaac

SEQ ID NO: 318491 - DNA, 334 bp, Zea mays
actcatccaaaaaaaatttaaattaaaaaaaaaaaaaaaaaaaaaaaagataagatttaatttcaaactagccaacccatccaaactaacaaacacatacatacaacaacataacactactataaaacaaccaaaattcaattcactacccatcatttaacaacaacataacaataaaaaaccctttcataacccaactaaatcaccttacaccacatccccctttctccaactaaccaaaaaacaaaaaaacccacaccaatcacccttcccaacaattacccaacctaaataacaaataaaacacaccctaaaactacacataaaacccaac

SEQ ID NO: 318492 - DNA, 383 bp, Zea mays
cggacgcgtgggcggacgcgtgggtgctgagagtaggcagcagtttcttccattcgaccagctggctgcattgaactctgctgcttatttgcaacaacaactaccattcagtcagctagctgctgcctacccccagcaatttcttccattcaaccaactggcagcattgaactctgctgcttatttacaacagcaacaactaccaccattcagccagctagctgatgtgagccctattgccttcttgacacagcaacagttgttgccgttctacctgcacgctgcgcctaacgctggcaccctcttacaactgcaacaattgctgccattcaaccaacttgctttgacaaacccaacagcgttctaccaacaacccatcattg

SEQ ID NO: 318493 - DNA, 390 bp, Zea mays
  unsure (1)..(390): unsure at all n locations
gaaacacaccaagcgaagcgcactagcaacgacctaacaacaatggctaccaagatgttagccctccttgcgcttcttgccctttttgtgagcgcaacaaatgcgttcattattccacaatgctcacttgctcctagtgccattattccacagttcctcccaccagttacttcaatgggcttcgaacacctagctgtgcaagccaacatgcaacaacaagcgcttgcggcgagcgtcttacaacaaccaattgcccaattgcaacaacaatccttgccacatctaacaatacaagccatcacaacgcaacagcaacaacagttcctaccagcactgagccacctagccatggtgaaccctgccgnctacttgcaagagcagctgcttgca

SEQ ID NO: 318494 - DNA, 401 bp, Zea mays
  unsure (1)..(401): unsure at all n locations
gccagccgcttcgcgatcggngactcggagaggggaaaggcgagtcgtcgtccgtgcacggcagcttccctccctctcctctccggccccgcttacctaacccggcccctcctacgcccccccttccgccgtcgcacgatgagcacctctccggcgggcgtcgtgcaacgcgcttgccaccgcgtacctgccgtcgctgctggccccggaccacgcggtggtggaggaggacgacgaggagggcgcggacgacgaggacgaggacgagggccagcacgggcgcggcgggctcaggggcaggaggccgtccacgttcccgtccccgcggctgatcgcgcacgccaccgtcggccagatggcgagggcccggtcgtttcggtccccgaggtccttctccatga

SEQ ID NO: 318495 - DNA, 430 bp, Zea mays
cggtcgattgaagaaagtccaaaagaagccgatgggaaaccagggtttataagaatggctggttgggccagaaaccaaaggtcattcaatggaaaccatggaaccaggaattggtgaagaagaaccagaccagaaggaagggcttgggaattttcaattaagctggaaaaacttaaaggtttaagttataacatgctaaaaccaagtgaaagtgagatagatgcagatataaaggatgggggtatgatgctgataactgcattgagtccttatgcaaactggcttcaaggctatgctgatgttctcctgcaggttaaaggcactgttgatcagcctgttgttgatggatcagcaacgtttaaccgggctattgtgaactctccttttcttcggacaccattgacaaattttgcgggtacaattcaagtca

SEQ ID NO: 318496 - DNA, 176 bp, Zea mays
cacccactttacagcaccggttgcatatacgatgtatacttattacttgccaatagccatagatagcttgagtaaaaaaatcatataaaaaaaaaaaaaaaaaaaaaaaaaaaaaaaaaaaaaaaaaaaaaaaaaaaaaaacaaaaaatataaaagaaccaaacaaaaaaaaaaca

SEQ ID NO: 318497 - DNA, 357 bp, Zea mays
cctgaattccctcgtctaccctctcttcctaaaaaaaaaaaaaaaaaaaataaaatttaaaaaaaaaaacaaaaaaaaaaaagaaaagctaaaatacacaaacaaacaaccaaaaaacctctactataacaaacattaatttcattacactctccctcctttctacaacttcctctcttactaaatccctttcttttcccaacttattctcctttctacactttcaaatcccttcctcttccttacttactcaacattccctcacttacccctcttcccaactttcacacttcctaaatatccaacttttccctccctttctcacctttttaccccttcatcccctctctttccccc

SEQ ID NO: 318498 - DNA, 419 bp, Zea mays
gttggcttctcctccccctccggttcgggttcgggttcgtgaggttctgggggggtcggtttcgtgggtgagcggatcgagatggcggcgtcggatgttgagtaccgctgcttcgtcggcggcctcgcctgggccacggacgaccactccctccacaacgccttcagcacctacggcgaggtcctcgagtccaagatcatcctcgatcgggagacgcagaggtcccgcggcttcggcttcgtcaccttctccacggaggaggcgatgcggaacgccatcgagggcatgaacggcaaggagctggacggccgcaacatcaccgtcaacgaggcccagtcccgcggcggccgtggaggcggcggcggtgggtacggtggtggccgtggaggcggcggctacggcggtggcgggcgccgtga

SEQ ID NO: 318499 - DNA, 406 bp, Zea mays
  unsure (1)..(406): unsure at all n locations
agcaatcgcagcaagcaacatacctttatcgcccttgttgtgtcaacaatcgccaggcctatctttggtgcagtcattggtacaaaccatcagggcacaacagctgcagcaactcgtgctacctgtgatcaaccaagtagctctggcaaacctttctccctactctccgcaacaacaatttcttccattcaaccaactgtctacactgaaccctgctgcttatttgcagcaacaactattaccatttagccagctagctactgcctactctcaacaacaacaacttcttccatttaaccaattggccgcactgaaccccgctgcttatttgcagcagcaaatactactaccatttagccagctagctacagcaagccgtgcttncttcttgacacaacaacagttg

SEQ ID NO: 318500 - DNA, 341 bp, Zea mays
atggtcagcgtcgtcttcctcgtgtacgcttatttctaagggaaggagccacttggctcttatcccactgatccctgctacctcgcaatgttctatcccacttgagaattcatctgctgctgaaagttctgcctctaccacccctacgtcaacccaatggcatctcctgatgagtggaggcagcttggttcccgcctcgtgctggtgaccactgctgaccattgctggttcgtggaaaaggcaaagtcttactcaaagggaatcaataaattcggctgggatggggagctcgaattctacgagaccaagggtgaagctcacgtcttctttttgcctaaaca

SEQ ID NO: 318501 - DNA, 118 bp, Zea mays
ttatataaaacaaccatcctttacaaaatctcatatataataacttatctaaaaataatctttatcatttaacccacatcctccctactaatatcaaaattattataatttatctact

SEQ ID NO: 318502 - DNA, 410 bp, Zea mays
gcatatatgacttgggatagatgaatgggtagtaatacttccactatgaaatggggctaggcattcatatatgacttgggatagatggaccaaccattcaatcaagcaaccaagtgccttcatggcaactgggaatgggtgatatgtcaggttagttttggctaacttaaccacggtgtgggttaacaacaccaacatgctagaggaggaagcggatacagaaacattttctgaggggcttcttttctttgagtcatgtttttagttttgattcctgcgcgtggctagctccttttggtttttgaatgagatgtgtagtggtgattattgcggcgcatattttagagatcgtggttcttccaacataagctggaaaaagaagtctgtatacggatgaacatgtataccaa

SEQ ID NO: 318503 - DNA, 148 bp, Zea mays
cgcacgcttacgagcaagatcaccattatctcgcccatgtcccactccttgtcctggtgggtgaacacatgctagaaaacatgctatagcgaactttgtaacccagcttgtgagctggcttatatgcttggaaatatgcttttaaaaa

SEQ ID NO: 318504 - DNA, 75 bp, Zea mays
gacctacgcgtacgggaactcgttgaccttagtttacattgtctttatcgtgcttcccacaatggtagcggtcaa

SEQ ID NO: 318505 - DNA, 421 bp, Zea mays
gcaagtatccaggacaaggatggcattccaccggaccagcagcgcctgatgtttggtggcaagcatctggaggatggccgtaccctcgccgactacaacatccagaaggagagcaccctccacctggtgctccgcttgcgaggtggtatgcagatctttgtgaagaccttgactggcaagaccataaccctggaggttgagagctccgacaccatcgacaacgtgaaggcgaagatccaggacaaagagggcatccccccagaccagcagcgtctgatcttcgccggcaagcagctggaggatggccgcaccctatcagactacaacatccagaaggagagcactctccacctggtgctccgccttcgcggtggtcagtaagccatggttcatttaagctgctgctgtacctgggtatctg

SEQ ID NO: 318506 - DNA, 303 bp, Zea mays
cgcactcgttcgcccacgcgtccgattataaaactccttccgtgtgtaaccagagctgctagcatcggtggaacctcggtctcgtttagttcgtaaagctgagtccaattctttgagtaacctgagtcctgagctaggttttcagtcgtttctaactaacagttctttggcgacgtacgtacgtacagctcggagaccgacagaagcgagcgatggcgtgcaagactaagagcctgctgttgacgctctgcgtggcggcgctgctcgcggcgcatctcaagtcccaccgcctaggctacttca

SEQ ID NO: 318507 - DNA, 437 bp, Zea mays
gcgcaacaagcaacatagaaagtggtttacagtagcaacaatagagcaacaatggcggccaagatattttccatccttatgctccttgctctttctgcatgtgttgctaacgcgaccatttttcctcaatactcacaagctcctatagctgcccttcttcccccataccttccatcaatgaccgcttcagtatgtgaaaacccagcccttcaaccctacaggctccaacaagcaatcgcaacaagcaacttacctttatcacccctgttctttcaacaatcgccagccctatctttggtgcagtcattggtacaaaccatcagggcacaacagctgcagcaactcgtgctaccagtgatcagccaagtagctctggcaaacctttctccctactctcagcaacaacaatttcttccattcaaccaactgtctacact

SEQ ID NO: 318508 - DNA, 392 bp, Zea mays
agcaacttacctttatcacccctgttctttcaacaatcgccagccctatctttggtgcagtgattggtacaaaccatcatggcacaacagctgcagcaactcgtgctaccagtgatcagccaagtagctctggcaaacctttctccctactctcagcaacaacaatttcttccattcaaccaactgtctacactgaaccctgctgcttatttgcagcaacaacaactactaccattcagccagctagctactgcctactctcagcagcaacaatttcttccatttaaccaattcgccgcactgaacccctctgctaatttccagcagcaaatactactaccatttggccagctagctacaacaagccccgcttccttcttgacacatcaaca

SEQ ID NO: 318509 - DNA, 402 bp, Zea mays
ctagcaacatagaaagcacaatagtgtaccaacaatggcagccaaaatggtttggttccttatgctccttggtctttctgcaagtgctgctaccgcaaccattttcccacaatgctcacaagctcctatagcttcctttcttcccccatacctctcaccagcggtgtcttcagtatgttaaaacccaattcttcaaccctacaggatccaacaggcaatcgcagcaggcatcttacctttatcacccttgttcctccaacaaccgtcagccctattacagcagttacctttggtgcatttgttggcacaaaacatcaaggcacaacaactacaacaacttgtgctaggaaaccttgctgcctactctcagcaacagcagtttcttccattcaaccaactggc

SEQ ID NO: 318510 - DNA, 296 bp, Zea mays
aaaaaaaaaaaaaaaaaaaaaaaaattaaaaaaaaaaaaaaaaaaaataaggcaaggatacaaaatactaaaaaatactaaaaaaaaaaaaaaaaaactaataactaaacataaattcactacatttgattactgtttaaaccttgtctatcaactgactcttaatcctacaaaccaccaaatttcaatctaccttaatattacattaatagcatctcaggctaacaccgttgcggacttgccaacccttgctcaccctgaattacatttgctacactccatttacctttgcatca

SEQ ID NO: 318511 - DNA, 442 bp, Zea mays
gcgattgagaccaactagcaacatagaaagcacaatagtgtaccaacaatggcagcgaagatattttgcctccttatgctccttggtctttctgcaagtgctgctacggcgaccattttcccgcaatgctcgcaagctcctatagcttcccttcttcccccgtacctctcaccagcggtgtcttcggtatgtgaaaacccaattcttcaaccctacaggatccaacaggcaatcacagctggcatcttacctttatcacccttgttcctccaacaatcatcagccctattacatcagttacctttggtgcatttattggcacaaaacatcagggcacaacaactacaacaacttgtgctagcaaaccttgctgcctactctcagcaacagcagtttcttccattcaaccaactagctgcattgaactctgcttcttatttgc

SEQ ID NO: 318512 - DNA, 134 bp, Zea mays
  unsure (1)..(134): unsure at all n locations
gtagttcgaatgtcactactgttctgtttgcatagttacaggaanatttaaaaaggttttaataatgcaaacagaacaaaatttaaaaataaactaaatataaaaaaactaaaaatactaaaaaacataaataa

SEQ ID NO: 318513 - DNA, 416 bp, Zea mays
gttctagatcgcgagcggccgcccttttttttttttttttttttttttttaagagggaacgaaagcatggatcatatctgattcttttaacttcaaaggcccaaaccatgcggaatgaagtaacaaacacactaaacaaatcccaggaagtggatcatcccacttccgtgtatgtacataaccgatgcctcagtgtacatacactggagcagagccgacaaacgccgctagatatgttacgcccccaacgattattgcggaatatctcacaaggattattgcagaacatctcacatggctcacagggcaaacctggtaggtcttgggctcttggcaatccatggcaacgctgaaactgcacaaacgatgaggaacaggtggtctagtccttgtagacaagaggcttgttgacccat

SEQ ID NO: 318514 - DNA, 410 bp, Zea mays
caacaagcaacatagaaagtggaatacagtagcaacaatagagcaacagtggcggccaagatattttccatccttatgctccttgctctttctgcatgtgttgctaacgcgaccatttttcctcaatactcacaagctcctatagctgcccttcttcccccataccttccatcaatgaccgcttcagtatgtgaaaacccagcccttcaaccctacaggctccaacaagcaatcgcaacaagcaacttacctttatcacccctgttctttcaacaatcgccagccctatctttggtgcagtcattggtacaaaccatcatggcacaacagctgcagcaactcgtgctaccagtgatcagccaagtagctctggcaaacctttctccctactctcatcatcaacaatttct

SEQ ID NO: 318515 - DNA, 109 bp, Zea mays
ctttcccctcctcgcttcgcttctctgcggattcctcctccttcgccggtccgggtccctttttccgcgccccaacctggcccaaaatgccaaccccaaaaccggttgc

SEQ ID NO: 318516 - DNA, 403 bp, Zea mays
ggtgggttggcttctcctccccctccggttcgggttcgggttcgtgaggttctgcggggttcgggttcgtgggtgagcggatcgagatggcggcgtcggatgttgagtaccgctgcttcgtcggcggcctcgcctgggccacggacgaccactccctccacaacgccttcagcacctacggcgaggtcctcgagtccaagatcatcctcgatcgggagacgcagaggtcccgcggcttcggcttcgtcaccttctccacggaggaggcgatgcggaacgccatcgagggcatgaacggcaaggagctggacggccgcaacatcaccgtcaacgaggcccagtcccgcggcggccgtggaggcggcggcggtgggtacggtggtggccgtggaagcggcggcta

SEQ ID NO: 318517 - DNA, 376 bp, Zea mays
  unsure (1)..(376): unsure at all n locations
cggacgcgtggccggacccttggccagtggatcatgggggattcaaaaacggagaaccagtggtacttgccagggaggtctttggcccgttgaaccctataacaaatcttcaaaatggtgggaatggttttgatatcggtgagatgcttaaggatgatggaaagcgatccacataatgcangtggagccgacgctggcatgggacagccctggtatcttgatgagctggattcgagtgtcttagagagcatgctccagccggagccggagccagagccagagccattcctgatgtctgaagaaccggacatgtttcttgctggcttcgaaagcgctggtttcgtcgagggtcttgagcggctaaactgaatttctg

SEQ ID NO: 318518 - DNA, 363 bp, Zea mays
cccacgcgtccgcccacgcgttttcttagcgtccgcggacgcgtgggaaaagaaagaataaaaaaaaaaaaaaaaaaaaaaaaaaaaaaaaaaaaaaaaaaaaaaaaaaaaaaaaaaaaaaaaaaaaaaaaaaaaaaaataaaaaaaaaaaaggccgcactttttaaaaattcaaagtttacttacccataattgcaactttataacttttttatagtttaaccaaatttaaattcattgaccatatttttaaaacgtcattattggaaaaaccttgtctttaccaaattaaatctcttttcaaaaaatcctcttttttcaattttacttattacccaaaatgcccaaactcattaccttttc

SEQ ID NO: 318519 - DNA, 144 bp, Zea mays
tcgcggacgcgtgggtgctatccagctttgccgagaactacaacaatggtttccgaaaaagaccgggttacctaacagacacgtgtaccggtcaagatctgaagaaataccacaacatggatgccatcaatgtaagctactcat

SEQ ID NO: 318520 - DNA, 282 bp, Zea mays
tgaagcagccgcagtgcatcccgctggcggcggcgccctactacgccgggtgtgggcagccgagcgccatgttccagccgctccggcaacagtgctgccagcagcagatgaggatgatggacgtgcagtccgtcgcgcagcagctgcagatgatgatgcagcttgagcgtgccgctgccgccagcagcagcctgtacgagccagctctgatgcagcagcagcagcagctgctggcagcccagggtctcaaccccatggccatgatgatggcgcagaacatgc

SEQ ID NO: 318521 - DNA, 413 bp, Zea mays
attttgagcattcagaaactcaccatgcgaagcgcactagctacaacctaacagcgaatggctaccaagatattatccctccttgcgcttcttgcgctttttgcgagcgcatcaaatgcgtccattattccacaatgctcacttgctcctagttccattattccacagttcctcccaccagttacttcaatggccttcgaacacccagctgtgcaagcctataggctacaacaagcgattgcggcgagcgtcttacaacaaccaattgcccaattgcaacaacaatccttggcacatctaacaatacaaaccatcgcaactcatcagcaacaacagttcctaccagcactgatccacctagccatggtgaaccctgtctcctacttgcaacagcagctgcttgcatccaaccc

SEQ ID NO: 318522 - DNA, 418 bp, Zea mays
ggagaaggaagggtaggaggcccagcccaccagccagccatagtccttggtctggcaaccccaggttgcttctctcccctaccattcagttgctgccccgattgagccaccgccgcctcagattcatcgtcgtcgccgacgatttggatgctaccgccgacgattcggatgtcgccgccctggatttggcctccgccaccctggatttggcctccgccgctcccgattcggcgctgccaaccccgaaatggcgccgccccttccccttccccttcccctatgtcatcttgttgattcttacctaggcggcggggacgccttggatctttcgggcgtctgaacgcctaggtgacgcctttaaaacaggggggaatttgttcccacatattacttgcagtcaaagatcgacaacttagtt

SEQ ID NO: 318523 - DNA, 491 bp, Zea mays
  unsure (1)..(491): unsure at all n locations
ctgtccgtgtatatgtctttacgttcatggattctctagatgctacgaaacagagggacttctctcttgaacctagaagtgacgatnntgaggcnnttcgaactaaagtactgaatatcagactacttacgtaggacctnnagtatgttagtatggcacattcgtgaagaaggttcattgggcctacttagctgtattaactctacttcggtatagtgttctagagtccaagaaaaggtgcattgaactttggatcatggttatgagattgagctggactttgttattgcagcacagtacanaatgcttgacgtaggttgttatattctgatggcaactccacaagtaagctgagtgtatgccttcttaatataatagacttttggtgagaccaaggttaaatctttgatactgcattgggacaaagagcaagcttcagaaatgttgaatacttttgacatcattgttgcaagtgactgcacatttttcaa

SEQ ID NO: 318524 - DNA, 303 bp, Zea mays
ggattcccggtcgaccagcctcgggcaaccttcggcaaaaggcccctattggaagctcgggtcttaagaaaagtggggaggagattaaaccggtcacccgtcttcatttccctaaaggttattaaggcacctttctattctgggttgcccttaactacctgtgaattggtaccagtgggtacctcttggggttctgtggtcccgcgatgttgcagttggttgcttgatcgaaagatgtttcagcctcccatctgctagctatgatacagatggttcctgataataatgatgacatattctgtg

SEQ ID NO: 318525 - DNA, 391 bp, Zea mays
ttattgagaccaactagcaacatagaaagcacaatagtgtaccaacaatggcagccaaaatattttgcttccttatgctccttggtctttctgcaagtgttgctaccgcaaccattttcccacaatgctcacaagctcctatagcttcccttcttcccccatacctctcaccagcggtgtcttcagtgtgtgaaaacccaattgttcaaccctacaggatccaacaggcaatcgcaacaggcatcttaccattatcacccttgttcctccaacaaccgtcagccctattacaagagttacctttggtccatttggtggcacataacatcagggcacaacaactacaacaacttgtgctagcaaaccttgctgcatactctcagcaacatca

SEQ ID NO: 318526 - DNA, 68 bp, Zea mays
aaaaaaaaaaaaaaaaaaaaaaaaaaaaaaaaaaaaaaaaaaaaaaaaaaaaaagaagggacaaacga

SEQ ID NO: 318527 - DNA, 411 bp, Zea mays
ttggtttaagttaaggattccatttgtaaaaaagaggattcccttgaactaggtgacgttgaggcttcgaacaaatacaatatcgacactactggactagtatgttgttggccatcggaagaggttcttgcctactactgtattaaccactcggatgtgttcaggtccaagaaagtgcttgaacttggatctggttatggattggctggacttgttattgcagccagtacaaatgctgacgaggttgttatttctgatggcaacccacaagtagctgagtgtatccttcttaatataatagacttttggtgagaccaaggttaaatctttgatactgcatttggacaaaagagcaagcttcagaaatgtggaatacttttgacatcattgttgcaagtgactgcacatttt

SEQ ID NO: 318528 - DNA, 172 bp, Zea mays
aaaaaaaaaaaaaaaaaaaaaaaaatttaaaataaaaaaaaaaaaaaaaaaaaaaaagaaaagaaaaaaaaaaaaaaaaaaaaaaaaaaaaaaaaaaaaaaaaaaattctaaatcccaaaccgcccattttaaattttcaaattttacttccccttccttccaacttaaaac

SEQ ID NO: 318529 - DNA, 384 bp, Zea mays
cccacgcgtccgactgcctactctcagcaacaacaacttcttccatttaggcaaggggccgcactgaaccccgctgcttatttgcagcagcaaatactactaccatttagccagctagctgcagcaaaccgtgcttccttcttgacacagcaacagttgctgcctttctaccagcagtttgcggctaaccccgcaaccctcttacaactacaacaattgttgccctttgtccaacttgctttgacagacccagcggcctcctaccaacaacacatcattggtggtgccctcttttagattgcttattagttgtaattcaataataaagttttttggatgatgtatgtggccaaccagaaataagaagttacatttccagattct

SEQ ID NO: 318530 - DNA, 180 bp, Zea mays
tgtgcatctcccaccgccggtccacctgccgtcgccggtccacctgccaccgccggtccatgtgccgccgccggttcatctgccgccgccaccatgccactaccctactcaaccgccccggcctcagcctcatccccagccacacccatgcccgtgccaacagccgcattcaaacccgtg

SEQ ID NO: 318531 - DNA, 413 bp, Zea mays
aaaaaaaaaaaaaaaaaaaaaataaataaaaaaaaaaaaaaaaaaaaaaaaagagagggataaaaaaaaaacaaaatcatacatgcccggtctttcttgctgtttcatgttaacttaaatctttcttgtctagccatcgctatacaatgtagtgactgaaattaaattaactggccacagtttaataactttgcttctgataaacctttgcctttctccaatttaatctttttgcccctcatccatttttcttcagatcccttactatcgctcattcccaaattgttccccctttaaaacggttccttaccctcattgtctattggcattacccccgtcgtgactcattaacttccgcgctttttatggttcactccattgtgtcctttacctttgtcttttcccatactccc

SEQ ID NO: 318532 - DNA, 441 bp, Zea mays
aacttgtgctagcaaaccttgctgcctactctcagcaacagcagtttcttccgttcgaccaactagctgcattgaactctgcttcttatttgcaacaacaacaactaccattcagccagctacctgctgcctacccccagcaatttcttccattcaaccaactggcagcattgaactctcctgcttatttacagcagcaacaactactaccattcagccagctagctggtgtgagccctgctaccttcttgatacaaccacagttgttgccgttctaccagcacgctgcgcctaacgctggcaccctcttacaactgcaacaattgctgccattcaaccaacttgctttgacaaacccagcagcgttctaccaacaacccatcattggtggtgccctcttttagatttcttatgagttatagttcaataataaaagttttt

SEQ ID NO: 318533 - DNA, 313 bp, Zea mays
cagaaacacaccaagcgaagcgcactaatcacaaacctaacaacaatggctaccaggatatgatccctccttgcgcttcttgcgctttttgcgagcgcaacaaatgcgtccattattccacaatgctcacttgctcctagttccattattccacagttcctcccaccagttacttcaatggccttcgaacacccagctgtgcaagcctataggctacaacaagcgattgcggcgagcgtcttacaacaaccaattgcccaattgcaacaacaatccttggcacatctaacaatacaaaccatcgcaacgcaac

SEQ ID NO: 318534 - DNA, 356 bp, Zea mays
cccactcgtccgcagaaataagaagttacatttccagattctggttggaggcagggataacacaaaggaaagaatactaaaaaatcaaacaaaaaaaaaaaacacaaacaaaatgccaacctgtacaaagtacccaagcctacataccttcacctccgagctcaaatacgccacataggagcacaaaaacccaacccacaccacttccatcaacaccaacgatacaataaaaaccaacccccaaccaaactcaatcaacttgcatcacaaacatctttcgcaacttcgcctcatacctaacaatacagtaccaactgcactcacgaacagcggctaaaccatatatacaatacaaa

SEQ ID NO: 318535 - DNA, 424 bp, Zea mays
aaaccttgctgcctactctcagcaacagcagtttcttccattcaaccaactagctggattgaactctgctgcttatttgcaacaacaactaccattcagccagctagctgctgcctacccccaacaatttcttccattcaaccaactggcatcattgaactctcctgcttatttacagcagcaacaactactaccattcagccagctagctggtgtgagccctgctgccttcttgacacaacaacagttattgccgttctacctgcacgctgcgcctaacgctggcaccctcttacaactgcaacaattgctgccattcaaccaacttgctttgacaaacccagcagcgttctaccaacaacccatcattggtggtgccctcttttagatttcttatgagttatagttcaataataaagttttt

SEQ ID NO: 318536 - DNA, 98 bp, Zea mays
tcgcaccaccaatgatgggttgttggtagaacactgttgagttttttggatgatgttggtggcgtcccagaaataagaaagtacatttctagattctt

SEQ ID NO: 318537 - DNA, 54 bp, Zea mays
aaaaaaaaaaaaaaaaaaaaaaaattaaaaaaaaaaaaaaaaaaaaaaaggaaa

SEQ ID NO: 318538 - DNA, 170 bp, Zea mays
  unsure (1)..(170): unsure at all n locations
cccactcgtccgctgccattctacccacaggatgtggcaaacaatggcagcaactgttgctgttgcaagaaggcgttaatgtttcccacaacctgtgggtaaaatggcagcggtcgcgtgggcggtcgcgtagttaattttgtggtatatgtagnttattgaatgggaaa

SEQ ID NO: 318539 - DNA, 421 bp, Zea mays
cagctagcaacatagaaagcacaatattgtaccaacaatggcagccaaaatattttgcttccttatgctccttggtcgttctgcaagtgctgctaccgcaaccattttcccacaatgctcacaagctcctatagcttcctttcttcccccatacctctcaccagcggtgtcttcagtatgtgaaaacccaattcttcaaccctacaggatccaacaggcaatcgcagcaggcatcttacctttatcacccttgttcctccaacaaccgtcagccctattacagcagttacctttggtgcatttgttggcacaaaacatcaaggcacaacaactacaacaacttgtgctaggaaaccttgctgcctactctcagcaacagcagtttcttccattcaaccaactggctgcattgaactctgct

SEQ ID NO: 318540 - DNA, 264 bp, Zea mays
cgcactcgtccgaaaaaaaaaaaaaatataaaaaaaaaaaaaaaaaaaaaaaaaaaaagaaaagataaaaaaaaaaaaaagaaaaaaaaaaaaaaaaaaaaaaaaaaaaaaaaaaaaaaaaaaaaaaaaaaaaaaaaaaaaaaaaaaaaaaaaaaaaaaaaaaataaaaaaaaaaaaaaaaataaaaaaaaaaaaaaaattaaaaaaaaattaaaataaaatcaaaataaacatatttaaaaaaaaatatataaattataaaat

SEQ ID NO: 318541 - DNA, 405 bp, Zea mays
cggacgcgtgggcaactagcaacatagaaagcacaatagtgtaccaacaatttgatccaaaatattttgcctgcttatgctccttggtctttctgcaagtgctgctacggcgaccattttcccgcaatgctcgcaagctcctatagcttcccttcttcccccgtacctctcaccagcggtgtcttcggtatgtgaaaacccaattcttcaaccctacaggatccaacaggcaatcgcagctggcatcttacctttatcacccttgttcctccaacaatcatcagccctatgacaacagttacctttggtgcatttattggcacataacatcagggcacaacaactacaacaacttgtgctagcaaaccttgctgcctactctcagcaacagcattttctttcatt

SEQ ID NO: 318542 - DNA, 405 bp, Zea mays
cggacgcgtgggcggacgcgtgggttctacttctcgaagttgcgtgatatgaagatactgtgtcaacggcctgagttagagcatctaccgatgactaaggcggtccggaagatactttatgcagctgatgcaaaggattcaccgctacctgaggcgaatgatataatcacaaagtcaccaagcttgttctcaaatgaaaccgagtgagatgtgcggctacatgagctaattttggtgcttattttccatcattgatcgtcttagtttttagtttttttttttggggggggggtttgttttttttttttttgttttgttttttttttttttttttttttttttttttttgttttttttttttttttttttttttttttttgtgtttttttttttttttgttttttt

SEQ ID NO: 318543 - DNA, 184 bp, Zea mays
aattccgggggacacgcgcacaatgctcgctcgggctgttactcgtgctgcttgccctccgtttcctcacgcggaaaaagagtccggctgcaacccggatgttggcggcgataagactccggcaacgaaacacctcactcaggactggcgcttgcctatgaccaccaaagcctgcttttgggtt

SEQ ID NO: 318544 - DNA, 266 bp, Zea mays
acccacgcgtgcgggtggcgtcgtaacgagccagtttcctgctggccgcggtgaccgcgctcttctcgtctgtcgttttcgtcgcggcgcttcacctctacgcgcggtgcctcctgcagcggcgcgtcgccctcgcggaaggcagccctcgcgtggtcgcgctgcagcggcagctcccgccggacggctacgtggttgaggtcgttcttatttttcttatacttcttcgttttcattttattatttttatttttttttattttttt

SEQ ID NO: 318545 - DNA, 293 bp, Zea mays
  unsure (1)..(293): unsure at all n locations
gcgagttagaccaactagcaacatataaatcacaatagtgtaccaacaatggcanccgaaatattttgcctccttatgctccttggtatttctgcaagtgctgctacggcgaccattttcccgcaatgctcacaagctcctatagcttcccttcttcccccgtacctctcaccagcggtgtcttcggtatgtgaaaacccaattcttcaaccctacaggatccaacaggcaatctcatctggcatcttacctttatcacccttgttccttcaacatatcatcaaccctattac

SEQ ID NO: 318546 - DNA, 374 bp, Zea mays
caacaggcatcttaccattatcacccttgttcctccaacaaccgtcagcccgatgacaagagttacctttggtccatttggtggcacaaaacatcagggcacaacaactacaacaacttgtgctagcaaaccttgctgcatactctcagcaacatcagtttcttccattcaaccaactggctgcattgaactctgctgcttatttgcaacaacaactaccattcagccagctagctgctgcctacccccagcaatttcttccattcaaccaactagcagcattgaactctgctgcttatttacagcagcaacaactactaccattcaaccagctagctgatgtgagccctgctgccttcttgacacaacaacaa

SEQ ID NO: 318547 - DNA, 243 bp, Zea mays
tcatcctgggaaaaaaaaaaaaaaaaaaaaattaaaaaaaaaaaaaaaaaaaaaaaaaaaaagaaattttaaaattctaaagataacaaacacatacatacaaaaaaaaaacaaaaaatataaaataaccaaaataaaatatatataaacaactttaaacaacattttttacttttaaaacccttccaatactatatctaaattatctttattatcacatcctcttttctcatttttccttaa

SEQ ID NO: 318548 - DNA, 421 bp, Zea mays
ctgggtcttcagaccattagctttatctactccagagcgcagaagaacccgagctgcaccatgagggtgttgctcgttgccctcgctctcctggctctcgctgcgagcgccacctccacgcatacaagcggcagctgcggctgccagccaccgccgccggttcatctaccgccgccggtgcatctgccacctccggttcacctgccacctcctgtgcatctcccaccgccggtccacctgccgccgccggtccacctgccaccgccggtccatgtgccgccgccggttcatctgccgccgccaccatgccactaccctactcaaccgccccggcctcagcctcatccccagccacacccatgcccgtgccaacagccgcatccaagcccgtgccagctgcagggaacctgcggcgttggca

SEQ ID NO: 318549 - DNA, 332 bp, Zea mays
cggactctttatcagacccatttgactatccttctatcaataccatcaatcatgatgcatcttattaatattggcaccaaatcaaatctgcaacatcaattatctaactccaaaaaccatgaatctggtgcttgtggttcttgctttcattgctttaatatcaagtgtttcttgtacacagacacgcagctgtatctttcatcaacaacaaattcatcatcatctacatcatccacatcaacatcatccacaaaaacatcaacatcaactacaaccacaacatcatcatcatcagcgacatctacaacaacattttcacattctacctcatt

SEQ ID NO: 318550 - DNA, 292 bp, Zea mays
taaacatcaatggttgattgaattaatttaaaaaaaaaaaaaaaaaaaaaaaaaagaaagataaataaaaaaaatagaaagaaaaaaaacaaacaaaaaaaaaaaaaaaaaacacaaaaacactccctcccctctacatattccatctttactcccccttcctttcaacatcttccctcttctatacctccccctaatttcatttcacctccctccttttcaaaatttctcaccttcaaaaccccttcctttccccaacctattctcctttcttcaattcccccttttccca

SEQ ID NO: 318551 - DNA, 357 bp, Zea mays
ggctgtgcaccagcgccaccgtgtcaattgcgctcatgagctacgtgcagtacgacgtgttctgggccctcggcttcggcgtgccgtccatggccatgctactcgcgctcgccatcttcctgctcggcacgaggacctacaggttctacggctcccgcggtggtgctgtttccaattccagcttcttttttattttttattattttatattatattttttatttatattatttatttatttattttttttttattttattttattttttttttttttttttatatttattggggggggggtttatttatttatttttttatttttttttttattttttattttttataatttttttt

SEQ ID NO: 318552 - DNA, 424 bp, Zea mays
agcgcagcaagcaacatacctttatcgcccttgttgtgtcaacaatcgccagccctgtctgtggtgcagtcattggtacaaaccatcagggcacaacagctgcagcaactcgtgctacctgtgatcaaccaagtagctctggcaaacctttctccctactctccgcaacaacaatttcttccattcaaccaactgtctacactgaaccctgctgcttatttgcagcaacaactattaccatttagccagctagctactgcctactctcaacaacaacaacttcttccatttaaccaattggccgcactgaaccccgctgcttatttgcagcagcaaatactactaccatttagccagctagctacagcaagccgtgcttccttcttgacacaacaacagttgctgccgttctaccagcaatttg

SEQ ID NO: 318553 - DNA, 71 bp, Zea mays
cggacgcgtgggaaaaaaaaaattaaaaaaaaaaaaaaaaaaaaaaaaaaaaaagaaaaattgtcaacctt

SEQ ID NO: 318554 - DNA, 231 bp, Zea mays
cgcacgcgtccgcccacgcgttcgttctactctcagcaacaacaacttcttccgtttaaccaaatggccgcagtgaaccccgcttcttatttgcagcagcaaatactactaccatttagccagctagcttcagcaaaccgtgcttccttcttgacacagcaacagttgctgcctttctaccagcaatttgcggctaaccccgcaaccctcttacaactacaacaaattgtg

SEQ ID NO: 318555 - DNA, 419 bp, Zea mays
gcagcattcaaaaacacaccaagcgtaagcgcactagcaacgacctaacaccgattgctaccaagatattagccctccttgcgcttcttgcccttttagtgagcgcaacaaatgcgttcattattccacagtgctcacttgctcctagtgccagtattccacagttcctcccaccagttacttcaatgggcttcgaacatccagccgtgcaagcctacaggctacaactagcgcttgcggcgagcgccttacaacaaccaattgcccaattgcaacaacaatccttggcacatctaaccctacaaaccattgcaacgcaacaacaacaacaacagtttctgccatcactgagccacctagccgtggtgaaccctgtcacctacttgcaacagcagctgcttgcatccaacccaatttgc

SEQ ID NO: 318556 - DNA, 293 bp, Zea mays
agcaactagcaacatagaaagcacaatagtgtaccaacaatggtagccaaagtatgtgcctccttatgctccttggtctttctgcaagtgctgctacgacgaccattttcccgcaatgctcacaagctcctatagcttctcttcttcccccatacctctcaccagcgttgtcttcagtatgtgaaaacccaattcttcaaccctacaggatccaacaggcaatcacagcaggcatcttacctttatcacccttgttccttcaacaatcatcagccctattacatcaattacct

SEQ ID NO: 318557 - DNA, 405 bp, Zea mays
cgtggattcaacgagtttatgacatttctgtatgaatcctctttacctgtttgccatgtttgttatttatcttgtttgaaaagccctttgattgcaatcataaattgtcatataattccaacattgatttctattcttatatttttttattttttattaattttatttttatttttatttattatttttatttattatatttttatttctttattttttttttttttttttttttatattattatatttttttttatttttattttattttttttttttttttttttttttattttatttttgttgtgtttttttattttttttttttctttttttattttttttttttttttatttttttattattttaattctttatttatattttttttttttttatttttt

SEQ ID NO: 318558 - DNA, 410 bp, Zea mays
gcaacatagaaagcacaatagtgtactcaacaatggcagccaaaatattttgctgtgttatgctccttggtctttctgcaagtgttgctaccgcaaccattttcccacaatgctcacaagctcctatagcttcccttcttcccccatacctctcaccagcggtgtcttcaatgtgtgaaaacccaattgttcaaccctacaggatccaacaggcaatcgcaacaggcatcttaccattatcacccttgttcctccaacaaccgtcagccctattacagcagttacctttggtccatttggtggcacataacatcatggcacaacaactacaacaacttgtgctagcaaaccttgctgcatactctcaacaacatcaagttcttccattcaaccaactggctgcattgaac

SEQ ID NO: 318559 - DNA, 503 bp, Zea mays
  unsure (1)..(503): unsure at all n locations
tcgtctcggtgccgagccatctgttnnnatttgtgtgagttgtgactagtggagcccttgctgagctgtggtggccgttgtatgcncntagattgacgttcgcgtgtattttctgtnngaattanntgaaatncatgtgcnnnttgcctgttgnnctgtttnngaaaacctgtgtcgagtggtcgagcccagcatttgtgccttaagtgtnncttttcaatttcaatctgtttgaaaccctgtgttgagtggcatagtcatgcagctctgtgccctaatgtccatgtgctatcatcatgaagccaggctaagccaacaaagccgtgcccttgcattcacagaagccaacaagcaaccagctcgtgccagatgaagaagcagcaagctcgaaccttaacttttaaagtgccttatagttttcaacttttcagtttttgtttggttttacttgctggaatgctttttaaccgtgtgcaactatggccacattgtgatgtggttta

SEQ ID NO: 318560 - DNA, 146 bp, Zea mays
gggtccctcttcatcgtgcccttctttcatgtcgtgtccaagatcgccgactacgtccgttatggagtggttgggcagcatcaccacccagaactccatgtacacccaccagtctgacaagacatccatgtcacaggaactgtctc

SEQ ID NO: 318561 - DNA, 409 bp, Zea mays
caacaagcaacatagaaagtggaattcagtagcaacaatagagcaacaatggcgggcaagatattttccctccttatgctccttgctctttctgcatgtgttgctaacgcgacaattttccctcaatgctcacaagctcctatagcttcccttcttcccccataccttccatcaatgatagcttcagtatgtgaaaacccagctcttcaaccctataggctccaacaagcaatcgcagcaagcaacatacctttatcacccttgtttcaacaatcgccagccctatctttggtgcagtcattggtacaaaccatcagggcacagcagctgcagcaactcgtgctacctgtgatcaaccaagtagctctggcaaacctttctccctactctcagcaacaacaatttcttc

SEQ ID NO: 318562 - DNA, 105 bp, Zea mays
accacacctcttctttttcttcctcctcctcctagcacatctatctgctgctcccaaacttgtgtgatcatgtcttgcatcatcttcaagttcaactgtttcttc

SEQ ID NO: 318563 - DNA, 290 bp, Zea mays
agtcggggaggattgtctgtaacgtgtcctagtagagtatctgcagctatgggacgtggtttatggggtagtgctgcaacctgacatcgcagaccaacacatctggcgcctctctgctcatggtacttattgtagcaaatcggcctatgatgctctctttgttggctctatcccttttggcccttggcgacgtgtctggaagacctgggcccccttaagatgcaaattctttgtatggttggcaatcaaaaacagggtttggacagctgatcgacttgcataatgagggg

SEQ ID NO: 318564 - DNA, 412 bp, Zea mays
gcgggagaaagcacaatagtgtaccaactaatggcagccaaaatattttgcttccttgttctccttggtctttctgcaagtgctgctaccgcaaccattttcccacaatgctcacaagctcctatagcttcctttcttcccccatacctctcaccagcggtgtcttcagtatgtgaaaacccaattcttcaaccctacaggatccaacaggcaatcgcagcaggcatcttacctttatcacccttgttcctccaacaaccgtcagccctattacagcagttacctttggtgcatttgttggcacaaaacatcaaggcacaacaactacaacaacttgtgctaggaaaccttgctgcctactctcagcaacagcagtttcttccattcaaccaactggctgcattgaactctg

SEQ ID NO: 318565 - DNA, 70 bp, Zea mays
attcccgctctacccaccctccgactttattatgaccatgcatatattttgttcataccacacatgataa

SEQ ID NO: 318566 - DNA, 388 bp, Zea mays
cgagaaacacaccaagcgaagcgcactatcaacaacctaacaacaatggctacgaagatattatccctccttgcgcttcttgcgctttttgcgagcgcaacaaatgcgtccattattccacaatgctcacttgctcctagttccattattccacagttcctcccaccagttacttcaatggccttcgaacacccagctgtgcaagcctataggctacaacaagcgattgcggcgagcgtcttacaacaaccaattgcccaattgcaacaacaatccttggcacatctaacaatacaaaccatcgcaacgcaacagcaacaacagttcctaccaacactgagccacctagccatggtgaaccctgtcgcctacttgcaacagcagctgc

SEQ ID NO: 318567 - DNA, 197 bp, Zea mays
gacccacgcgtgcgcgtccgcgtggagccggagcacggttttcaccagctgaatccgtcgccgtcatgttcttcgtttacgtggcgatcgtcacaagtccagtaccaaacgttccagctcgacatcaacaggcacaacgtctgcgccatggaggtataggcacaacagattaactgatgtaccattgcctacattat

SEQ ID NO: 318568 - DNA, 59 bp, Zea mays
cccacgcatcctcgtctcctccccctcttaccaagtcctcctctgattagggttcctta

SEQ ID NO: 318569 - DNA, 370 bp, Zea mays
actgaaccctgctgcttattggcattatcaactattaccattcagccagctatgtactgcctactctgagcggcaacaacttcttccatttaaccaattggccgcactgaaccccgctgcttatttgcagcagcaaatactactaccatttagccagctagctgcagcaaaccgtgcttccttcttgacacagcaacagttgctgcctttctaccagcagtttgcggctaaccccgcaaccctcttacaactacaacaattgttgccctttgtccaacttgctttgacagacccagcggccttctaccaacaacacatcattggtggtgcccttttttagagtgcttattagttgtaatttcaataatta

SEQ ID NO: 318570 - DNA, 95 bp, Zea mays
tctcttcatttgaccttttatattttctctgtttatttatctttctgtttttttttgtttattttactttttttttatgctatttattttttttt

SEQ ID NO: 318571 - DNA, 247 bp, Zea mays
attcaggcggagctgatgaagaaggtgcaccagtggtgcgacgaggccaactcgatttgcgacgcaggagagtctgccatcgttgcttctatggttgcgctgccgttgtggggtggcaacccagcggatctggtaacggcgctgtgcagccctgatgaaaaggcccatggtaacttggatggacagagtgggcgccaagtagcttctggactgtcttcagcagctgctgaaatgataaatatttgtg

SEQ ID NO: 318572 - DNA, 52 bp, Zea mays
tgagaaacatctcaaccaacatcatataattcacaatactacaccaactact

SEQ ID NO: 318573 - DNA, 151 bp, Zea mays
gaaaagcaaaaaaaaacaaaaaaaataacttatcaaactacaaaaaaaaaaaaatggaaagatttaatacaacgttggcccgcccataccaaactaacttacacacccatccaactcctaaccccttttaaaattaaacctaaattcaatt

SEQ ID NO: 318574 - DNA, 397 bp, Zea mays
cgccacgcgtccggaccaactagcatctatagaaagcacaatagtgtaccaacgatggcagccaaaatattttgcttccttatgctccttggtctttctgcaagtgttgctaccgcaaccattttcccacaatgctcacaagctcctatagcttcccttcttcccccatacctctcaccagcggtgtcttcaatgtgtgaaaacccaattgttcaaccctacaggatccaacaggcaatcgcaacaggcatcttaccattatcacccttgttcctccaacaaccgtcagccctattacagcagttacctttggtccatttggtggcacaaaacatcagggcacaacaactacaacaacttgtgctagcaaaccttgctgcatactctcagcaacatc

SEQ ID NO: 318575 - DNA, 162 bp, Zea mays
tactctccccacatattctcccaacaccaccaccagcaaccaaaagcaagctattaacactttcgggacctcaatccttacacctacaccaacattatccaatataactaaaacatccatcacaaatttatctactcctcccattttaaatatattaactta

SEQ ID NO: 318576 - DNA, 448 bp, Zea mays
gccacgcgtcctgcgctacatgtgctgtccatgcatcgatccatggcaggggacgtcaagtgcgagcagccgaagcggacgccgagcccgagcgcttcgtctctgaggatcttcggctacgacgtggctggctcgggtatcgccgtccgcatcatcgagccttcgcctcatgacgattgccggccgtccgtggtggacagtatgcgcatgtttgagtttctgttttgttgtcttgtgttcttttatttttattttctttttttttattttttattttttttttttttttgggggggggtttttttttatttttttttatttttgttctttttattgtttttttttttttttttattttattttttttttattttttttttgttatttttttttttattttttttattttttttttttttttttatttttttttttttatttttttatt

SEQ ID NO: 318577 - DNA, 157 bp, Zea mays
cccacgcgtcctcagacgcgttggctcaaattgcatgacatcatctcctggtaagtaaccttacaactttcgccacggccaccaatcacaagacctacaattctctcctattgaaagttaaccaaatcagatctgtgaccaatagtatctaatcttt

SEQ ID NO: 318578 - DNA, 76 bp, Zea mays
acgaggggcatgattgtaattccttacaggctgtgtcctgtgcctataaagagtgaatagttctcctttactgttc

SEQ ID NO: 318579 - DNA, 181 bp, Zea mays
agccacacgtccgcccacgcatccgataaaaaaaaaaaaaaaaaaaaaaaaaaaaaagaaggataaaaaaaaaaagagagcaaaaaaaaaaaaaaaaaaaaaaaaaaaaaaaaaaaaaaaaaaaaaaaaaaaaaaaaaaaacaaaaaaaaaaaaaaaaaaaaaaaaaaaaaacaacccact

SEQ ID NO: 318580 - DNA, 429 bp, Zea mays
tttgaagaaaaaacaaaacttaaatatggtggtgagggaacctggtaagggttggttttgttgaaatatcgtgggagaggttgtgataatttactttttttattttttttaattttatttttttttgttttattttttttttaattttttttttatttttttattttatttattattttatatttttttttttttattatttattttattttttttttttttattttttttttttttattatttttttttttttttttttttttttttatttttttattattttttttttattttttttttatttttttttgttttttttttatattttttattttatttttattttatttttatttattattttattttttattttttatttttttttattttatttatattttattattttttttttatttttttta

SEQ ID NO: 318581 - DNA, 379 bp, Zea mays
gcttcagtatgtgaaaacccatctcttcaaccatataggcttcaacaagcagtcgggagcaagcaacatacctgtatcgcccttgttgtgtcaacaatcgccagccctatctttggtgcagtcattggtacaaaccatcagggcacaacagctgcagcaactcgtgctacctgtgatcaaccaagtagctctggcaaacctttctccctactctccgcaacaacaatttcttccattcaaccaactgtctacactgaaccctgctgcttatttgcagcaacaactattaccatttagccagctagctactgcctactctcaacaacaacaacttcttccatttaaccaattggccgcactgataccccgctgcttattt

SEQ ID NO: 318582 - DNA, 464 bp, Zea mays
  unsure (1)..(464): unsure at all n locations
ggctaacttctcataattcgtaacctgatttgtacgacagaagagctcttgtgtggtntgttcgtattgaaccattagaacctatgttgcatacctttaaatgatnncccctactgaagaccaatgtggataacctcttccctgtcatgccatctcagattaggaacatagcccgctttggcgtgtcctcagttgctgtcaagctctatgtaattggtggttccatttatctagtttttcctcttactgtatattattacattatcttttctattctattttgttatttctttttatatttttatatgtttgtgtttttattattcgtttttttatttttttattctttttcttttatttttttttttttatttttttatttttattatttatatttatttttattttttttttatattatttttttttattttttcatatttttttttattttattatttttt

SEQ ID NO: 318583 - DNA, 302 bp, Zea mays
  unsure (1)..(302): unsure at all n locations
tgtatctagagcttgtaacctaagcttttttcattaaggtggtgtttatttntntttgcantttttaaatttgtttgtcccctattttatttttttttttttttattttatttttttatttatattttttttatttttttttatattatttatttattttttatttttatttatttatatattattttttttaattttatttttttttaatttttttttttatatttttttttttttattttttttttaatatttattttttatttttttattatttttttttttttttattattttttttt

SEQ ID NO: 318584 - DNA, 421 bp, Zea mays
cgtgacgtttagctttaagcttgctattaatggaactgttaacaatgttgattctgcaagtgtattctggctatgccgtgaggtgcaaagatcctatatctgctcatgaaatgacccatatggaagttcaagtttgcaacaacacaaaggaaattattcggatgaaccttaacatttcatgcaaagatgttgcaggacagaattgcttcgatgaaaatagtgcaactgttctctgggctgttgttcttagcgatattcaccttgaagttttatcttttcaagttatttttgaggggggtttattttctttatttttattttttttttttttttattttatttttttctattttttttttttatatttttttttttatttttttttctttttttttttatttttttttatatattttatttt

SEQ ID NO: 318585 - DNA, 424 bp, Zea mays
gggcacgcgtccgccttgttcctccttcaatcatcagccctattacaacagttacgtttggtgcatttattggcacaaaacatcagggcacaacaactacaacaacttgtgctagcaaaccttgctgcctactctcagcaacagcagtttcttccattcaaccaactaggttcattgaactctgcttcttatttgcaacaacaacaactaccattcagccagctacctgctgcctacccccagcaatttcttccattcaaccaactagcagcattgaactctcctgcttatttacagcagcaacaactactaccattcagccagctagctggtgtgagccctgctaccttcttgacacaaccacagttgttgccgttctaccagcacgttgcgcctaacgctggcaccctcttacaactgcaac

SEQ ID NO: 318586 - DNA, 416 bp, Zea mays
ggaaaaaaattagatgatctttgacttgcttaggatttaatcctgactcattctcactctatattcagatcgattgagagctaaccgaacaagccctaatgggttgttctgttatttcttatacacatgtgttttatttaatttattttatttatatgtttttatttttttttttttttatcccttttttttttttttttttctttttttttttatttcttttttttctttttcttttttttttttttttttttttttttctttttattattttttatttttttggggttgttttttttttttattttttttttttttttttttcatttttttatattttttttttttttttttattatttttttttattatcttttcattttttttttttattttattttttttttttttttttt

SEQ ID NO: 318587 - DNA, 368 bp, Zea mays
gccacgcgtccgcccacgcgtccgtttaaaggtgcatgggactccttttgaaatggacggctctgaaggtgaatggtctgagtatgatgagaagggagaatgccccgttgagctaggcaagctgcagtcaacattcaaagtggtaagcaggcaattgcttcctgcactaccatatttatcatcatttctatccctccatatacttttgacattattgtgattgacaacaggtgaagaagcatgagaggggtgggaagactagatttgtctagatcgagtgacttggaatctgacagatattggagttggcggtgtataaatggtagatttgggctgaaggtcatgcgtgatccgatctctttttcttc

SEQ ID NO: 318588 - DNA, 427 bp, Zea mays
tcccgcgcggccacgcgtccgaccccggggaggttattaaaccagttttcacaaggccattaacgatgaaggtatgcctcatcatggccttggctgcatgaacgaccgtctgtttgttgaattcaacgtcgcgattcccgagccttactctctctatcctgcccagatcctatctttttcataagatcctttcactcaaactctttttccttctttaatctcttcatctctatctgttctatttaatcatgctttacctattatcattttatttttttcattttttctttattcttttcttctctttattgggggggctttcattttttcttattttttttttattctttttttttatatttattattttttttttctttttattttctattttatttctatttttcttatttattattattttttt

SEQ ID NO: 318589 - DNA, 367 bp, Zea mays
agagcaacatagaaagtggaatccagtagcatcaacagagcaacaatggcgaccaggatgttttccctccttatgctccttgctctttctgcatgtgttgctaacgcgacaattttccctcaatgctcacaagctcctatagcttcccttcttcccccataccttccatcaatgatagcttcagtatgtgaaaacccagctcttcagccctataggctccaacaagcaatcgcagcaagcaacatacctttatcacccttgttgtttcaacaatcgccagccctatctttggtgcagtcattggtacaaaccatcatggcacagcagctgcagcaactcgtgctacctgtgatcaaccaagtagctc

SEQ ID NO: 318590 - DNA, 310 bp, Zea mays
cgccacgcgtccggaaaggggttaatctaccaatccgcttaggggacctccggatggattctttgattgctatggcgtacctgccgctctataaggaatgcatgaattccaatgggcaacttttgcctcaaaggcttacaggtcagcttgtacagcctgcaatcatgctctagtaccagcaagcttaaagtaactcctccaccatataactcttttccatcttgaagcactacatacaactatctatgattcactcttcaatttactcttcattaatccattattaacgggggctttttttacattcttt

SEQ ID NO: 318591 - DNA, 262 bp, Zea mays
tagtgttcatcgtgccctaagtttctctccttcaccgcggagctcaagtactgctcgttttattacaaattctgtcggcacaccatttctatcatcaccaactatttaatattcatcaactctcatcaaattctatcaacatttttcttaatctttttatcttatctttttttcattttttatttatttattttttatcttaatattttatttttttattatattttatatatcattcttaattatttattcttttttattt

SEQ ID NO: 318592 - DNA, 420 bp, Zea mays
gaataatctgtacttgttggggacttattattgccaatgaactttagcacgcaatgtttatgtgcagctggtgtagtaaattcaattgtgctctgttttccctgtttgtgttcattatagttttatttatatttatttgcggggtgtgcgctgatttttgttttacatttactctattatttttactgttttttattttcttttttttatgattatttctttctttttttttactttttttttttttaatttttttatcttttttttttttttttttttatttttttttttgggggggtttttttttttttttttttatttttttttattttttttatttatttttatattattttttatttctctttttattttttttttttttttttttatttttatttttttttttttattattttt

SEQ ID NO: 318593 - DNA, 314 bp, Zea mays
cccccctcttccggacgaacttggattttatctcgagaagaaaatcttgtcaaccagtccgttataaagattgggccaaccacattaagtttctattctttttctttttcctttcccttaaccccttatctagctatataactttacattttctcatttttttctttttttttttttaaaatttattttttttttttctttttcttttttttttttttcttactctttatttttttttttttttttctttattttattttttttttttaattttttttttctattttatcttgttggtgtggtttttttttttt

SEQ ID NO: 318594 - DNA, 305 bp, Zea mays
gcgatgcaacgtacaaagcacaattttgtaccaacaatggcagccaaaatatttttgctccttatgctccttggtctttctgcaagtgctgctacggcgaccattttcccacaatgctcacaagctcctatagcttcccttcttcccccgtacctctcaccagcggtgtcttcggtatgtgaaaacccaattcttcaaccctataggatccaacaggcaatcgcagctggcatcttacctttatcacccttgttcctccaacaatcatcagccctattacagcagttacctttggtgcatttatt

SEQ ID NO: 318595 - DNA, 457 bp, Zea mays
cgccacgcgtccgcggacgcgttggattgcatcggcatgtgcactgttaatgtctgcaaaatttaaacattggtgggtaatacaaaattaattttaacaatatttttttattttatatttaataatttaatttatttcaatattatatattttattttttatattttttattattatatattttttattttattttttatttttatttttatatttttatttttattttaattttatttttttttatttattatttatttttattttattatttttatttttttttttttattttttatttttattttttgttaatattaattattttatttttaattattatttataatatattatttttttattttattatattaatttttttttttatttttattttattatttttattttttttttttatttttatttttatatttttattatattttttttt

SEQ ID NO: 318596 - DNA, 258 bp, Zea mays
cgcacgcgtccgcggacgcgtggggttaatattttggaatgaaagggagtgatgaagtttcttattatagcagtaggaaccgcataaaaatatgggagccgtcattgtatgaaattgatgtctaatattggcgtattgttgtaggctctattgatttatatgttgtcgtttttattaaatatttatttatttttttattttatttattttttatatattatattctatttttttatttttttttttttatttattata

SEQ ID NO: 318597 - DNA, 190 bp, Zea mays
gtcatgatggacttgtgaatgattttcacatctactccaacaacttccaagaaagcgcacgtttattttaaccttcgccagtacgacccccacttctactcaaactagcgccactacaactaccacttgctctcctacttcctcgccttcaacaacatcttactcaacatacctctctacaacttcattt

SEQ ID NO: 318598 - DNA, 426 bp, Zea mays
ggtagccaattagcgcaatatctgatatgcaccttacgacttctaactttgcaagatttgttctctgatagacatgggcatgcagatgcacttatgggtagatatatgaatcagttagtattataggtatatgttgtgtgcattatattggctaccaaatcacaaataaaaggtgcagagtccgcagtcgcttcattactgttgctagcgcaagttataattttgattttttctttttttttatattatttttatttttttttttttttttttttatttatttttttttggggggggtttgtttttttttatttattttttatttttttttatattttttttttctattttttttttattatattatatttatatttttattttattatttttttttttaattttttttttttttttttttatttt

SEQ ID NO: 318599 - DNA, 389 bp, Zea mays
  unsure (1)..(389): unsure at all n locations
cctagtgccattattccacagttcttcccaccagttacttcaatgggctgcnaacacctatctgtgcaagccaacatgcaacaacaagcgcttgcggcgagcgtcttacaacaaccaattgcccaattgcaacaacaatccttgccacatctaacaatacaagccatcacaacgcaacagcaacaacagttcctaccagcactgagccacctagccatggtgaaccctgccgcctacttgcaagagcagctgcttgcatccaacccacttgctctggcgaacgtagttgcaaaccagcaacaacaacagctacaacagtttctgccaacgctcagtcaactagccatggtgaaccctgccgcctacgtacaacaacaacaactgctttc

SEQ ID NO: 318600 - DNA, 214 bp, Zea mays
gacccacacgtcctgtcatcatcaacttctgcatgctttttgcgagacggacagagccatagagaaagtatctttcagattttggtacggcctcctcactctaaccagccagattatttcaagcttgtgaatgctctcttgtctaaacacaatgttcaccttgtcacttttccttctgctaatactcatatctatgtttcttatcttttcaata

SEQ ID NO: 318601 - DNA, 319 bp, Zea mays
ctgaaccccgctgcttatttgcagcagcaaatactactaccatttagccagctagctgcagcaaaccgtgcttccttcttgacacagcaacagttgctgcctttctaccagcagtttgcggctaaccccgcaaccctcttacaactacaacaattgttgccctttgtccaacttgctttgacagacccagcggcctgctaccaactacacatcattggtggtgccctcttttagattgcttattagtcgtaattcaataataaagtttcttggatgatgtatgttgccaaccagaaatatgaagttacatttccagaaa

SEQ ID NO: 318602 - DNA, 224 bp, Zea mays
gttatagatcgcgagcgtcttccgcatctgctcatattgccctacatctagcaagctgtggcaagctgtagggcattctgtcctcagtcactgttgctcatctgctaccagcatttcgccattaacacggtgtgcgttcttacatcatcaaccatgcttgccctagagccagctcgttgtgccagaatcaccgcacatttcatgacatcccattatagctagtt

SEQ ID NO: 318603 - DNA, 298 bp, Zea mays
ccggaattcgacggcacgcgttcggcgacgcattcccaatacggtttggattcagaatgtgctggtgctgctgtgatctgtagcgtgggtgaactgatatacatgccaataacgaatatccagtacaagacgttcgtgcgtggccttgcctgtagcaaggtcaagtagtcctatgatagcgaattgaacaagtactggaagaggctcaatgcgcacaagaatcggatgatcgagacgcataggtgaactgtgttcatgctctgcacgatgaggtctgatgaagctattcagaaagaca

SEQ ID NO: 318604 - DNA, 299 bp, Zea mays
aacacaataaatgaagctactatgtgtttcgtaagtataatcttacttaaaaaaaaggagaaaaaaaaaaaaaaaaaaaaaaaaaaaaaaaaaaaaaaaaaaaaaaaaaaaaaaaaaaaaaaaaaaaaaaaaaaaaaaaaaaaaaagggctagcctcaaatatatgacaaactaaaatttcccctacttacaactgtaaattatatttaaaatactacctaaaaaaaattaatggtccgaatattaaaaacatcaacactgaaaaaaaacatggcttacaaaattaaatacttttaaaa

SEQ ID NO: 318605 - DNA, 435 bp, Zea mays
agaaacacaccaagcgaagctacctatcaacgacttaacaacaatggctaccaagatattagccctccttgcgcttcttgccctttttgtgagcgcaacaaatgcgttcattattccacaatgctcacttgctcctagtgccattataccacagttccttcgaccagttacttcaatgggcttcgaacacctagctgtgcaagcctacaggctacaacaagcgcttgcggcgagcgtcttacaacaaccaattaaccaattgcaacaacaatccttggcacatctaaccatacaaaccatcgcaacacaacagcaacaacagttcctaccagcactgagccaactagatgtggtgaaccctgtcgtctacttgcaacagcacgtgcttgcatccaacccacttgctctggcaaacgtagctgcataccaacaaca

SEQ ID NO: 318606 - DNA, 233 bp, Zea mays
acgagatgttttaagcggctgaacatatcaaaaataaaacctgaatcacccacaacagtgttcgtaaatactcaaacagaggtatttactgaaaaaaactgctgtacgttgtataggattcgatcttacttacgcactcttcctacggcatatctgtactataggattcataaagactaatgataatgccgccttcttaaattatcataactggcacaaccaattctgctcca

SEQ ID NO: 318607 - DNA, 316 bp, Zea mays
gacactcgtgcggtggattgtacgggttcgatcatagggtaacaacaacgaggtggtgtcaacaaataggagatcaactagacatagtgtcggcttaagcatgcctagtagtagtacgtaacagtgacacttagtgatagtgaaaggatactgctgatgtgaagattaatattgatggatgagacatagcgctgtagaagctgtcaagcccgcagagcgaatatgatgtgcagacattgaatcatatccatgagatttctgcacatgaataatattaagattaatgagacagctactggttctatatgaatctaac

SEQ ID NO: 318608 - DNA, 378 bp, Zea mays
ctcgagtccaagatcatcctcgatcgggagacgcagaggtcccgcggcttgggcttggtcaccttctccacggaggaggcgatgcggaacgccatcgagggcatgaacggcaaggagctggacggccgcaacatcaccgtcaacgaggcccagtcccgcggcggccgtggaggcggcggcggtgggtacggtggtggccgtggaggcggcggctacggcggtggcgggcgccgtgatggcggtggcggctacggcggtggcggcggctacggtggcagcggctgctacagtggtggtggcggcggctacggcggtggcaaccgtggcggcggctacggcaacttcgacgggaactggaggaactgaacggtggggccc

SEQ ID NO: 318609 - DNA, 392 bp, Zea mays
gcgacacacacgctgactatatggcgactgaccatactgtaacacttcgcctgggcgatggagagctttctcagactattcattgacacactggtctcattgcacacaactgacaactctcagaaacggtatggggctggctagaagtgggatggtggacctggtgctcgcgtgcacagcccctatagcggtggacgaggtggaagattgctcggacaaagtgaacgtgcttcacaggagcactacaacactatctgacatccaatccaaagaccacagtactctcactgcaagaggatactgctgtggatgataaacgtgcaaaagcagagactgatgactacatataacaaatgaatacacatgcttctgtatgttctgaagaacatcgt

SEQ ID NO: 318610 - DNA, 413 bp, Zea mays
attgagaccaactagcaacatagaaagcacaatagtgtaccaacaatggcagccaaggtattttgcctccttatgctccttggtctttctgcaagtgctgctacggcgaccattttcccgcaatgctcgcaagctcctatagcttcccttcttcccccgtacctctcaccagcggtgtcttcggtatgtgaaaacccaattcttcaaccctacaggatccaacaggcaatcacagctggcatcttacctttatcacccttgttcctccaacaatcatcagccctattacatcagttacctttggtgcatttattggcacaaaacatcagggcacaacaactacaacaacttgtgctagcaaaccttgctgcctactctcagcaacagcagtttcttccattcaaccaactagc

SEQ ID NO: 318611 - DNA, 323 bp, Zea mays
cccacgcgtccgccaacaagcaacatataaagtggaatccagtagcaacaacagaacggcaatggcgaccaagatattttccctccttatgctccttgctctttctgcatgtgttgctaacgcgacaattttccctcaatgctcacaagctcctatagcttcccttctttcccccataccttccatcaatgatagcttcagtatgtgaaaacccagctcttcaagcctataagctccaacaagcaatcgcagcaagcaacatacctttatcacccttggtggttcaacaatcgccagccctatctttggtgcaatcattggta

SEQ ID NO: 318612 - DNA, 412 bp, Zea mays
cagacgcgtgcgatggaaaggtagccttcgatgattatcttgatgctacaggatcagggatgaaggcatcactcagcacaatagggatgcacagaccaagatcggatgtatctcgatcgaacttagtcatatggctacagtctaaacccaaccatgagatagatatggctacgtgctaagcactaatgatgaattatagctgctgaacacctatgtgcatgagattctataacatgttcttgcgaaagatgaaaatctgtagatcaatcaagctgaatgtaaaaagtcgaagcatgaccaatgctagtgctaatgacacagctattgcatcaacattcaggagagttgcacagattatatagactgtgcataggtccaatgcttattggacgactgagtgccagactatgat

SEQ ID NO: 318613 - DNA, 404 bp, Zea mays
  unsure (1)..(404): unsure at all n locations
cggacgcgtgggcggacgcgtgggcggacgcgtgggcggacgcgtgggagaccaacgtggcaacatagaaagcacaatagtgtaccaacaatggcagccaaaatattttgcctccttatgctccttggtctttctgcaagtgctgctaccgcgaccattttcccgcaatgctcacaagctcctatagcttcccttcttcccccgtacctctcaccagcggtgtcttcggtatgtgaaaacccaattcttcaaccctataggatccaacaggcaatcgcagctggcatcttacctttatcacccttgttcctccaacaatcatcagccctattacagcagttacctttggtgcatntattggcacaaaacatcagggcacaacaactacaacaacttgtgctagc

SEQ ID NO: 318614 - DNA, 442 bp, Zea mays
ctggcaccatagaaagcacattagtgttccaacaatggcagccaaaatatggggcctggttatgctccttggtctttctgcaagtgctgctaccgcgaccattttcccgcaatgctcacaagctcctatagcttcccttcttccaccgtacctctcaccagcggtgtcttccgtatgtgaaaacccaattcttcaaccctataggatccatcaggcaatcacagctggcatcttacctttatcacccttgttgctccaacaatcatcagccctattacagcagttacctttggtgcatttattggcacaaaacatcatggcacaacagctacaacatcttgtgctagcaaaccttgctgcctactctcagcaacagcagtttcttacattcaaccaactagctgcattgaactctgctgcttatttgcaacaacaactacca

SEQ ID NO: 318615 - DNA, 430 bp, Zea mays
gctgcattgaactctgctgcttatttgcaacaacaactagtactaccattcagccagccagctgctgcctaccaccagcaatttcttccattcaaccaactagcagcattgaactctcctgcctatgtacagcagcaacaactactaccattcagccagctagctgctgtgagccctgctgccttcttgacacagcaacaattgttgtcgttctacctgcacgctgcgcctaacgttggcaccctcttacaactgcaacaattgctgccattcaaccaacttgctttgacaaacccagcagcgttctaccaacaacccatcattggtggtgccctcttttagattgcttatgagttatagttcaataataaagtttttttgatgatgtttgtggcttcccagaaataagaaagtacatttctagattctt

SEQ ID NO: 318616 - DNA, 400 bp, Zea mays
cccacgcgtccgcccacgcgtccgcggtacgcgtgggctagcaacatagaaagcacagtgagtgtaccaacaatggcagccaaaatattttgcctccttatgctccttggtatttctgcaagtgctgctacggcgaccattttcccgcaatgctcacaagctcctatagcttcccttcttcccccgtacctctcaccagcggtgtcttcggtatgtgaaaacccaattcttcaaccctacaggatccaacaggcaatcgcagctggcatcttacctttatcacccttgttcctccaacaatcatcagccctattacagcagttacctttggtgcatttattggcacaaaacatcagggcacaacaactacaacaacttgtgctagcaaaccttgctggct

SEQ ID NO: 318617 - DNA, 418 bp, Zea mays
ctcacgcgtccgtatcctagttcctaccttcgtcgccgatgccggctgcgagtactggtgcgctcatctagacccagttcaatataagcggcaagggaagctgcagcaaaagctccgacgagaacctatagcttggggtttcagctggggataaagtggcgtcgaccgaggcggagacctagggagagcataggggatgcgatagggagagatgaatcaatcaatcgattcgtctgctgacgcccctgctaacgaccctactactatcctgacgatcatactgtcttttggcgttctttctccggctcttgttcgttagactgtggaacaccaggtgaagcgtcttcagaagattattcactatattagagtagatcgggtactggttcatggttagaatgattggaagaattaggtt

SEQ ID NO: 318618 - DNA, 421 bp, Zea mays
gatccaacaggcaatcgcagctggcatcttacctttatcacccttgttcctgcaacagtcatcagccctattacagcagttacctttggtgcatttattggcacaaaacatcagggcacaacaactacaacaacttgtgctagcaaaccttgctgcctactctcagcaacagcagtttcttccattcaaccaactagctgcattgaactctgctgcttatttgcaacaacaactaccattcagccagctagctgctgcctacccccaacaatttcttccattcaaccaactggcatcattgaactctcctgcttatttacagcagcaacaactactaccattcatccagctagctggtgtgagccctgctgccttcttgacacaacaacagttattgccgttctacctgcacgctgcgcct

SEQ ID NO: 318619 - DNA, 327 bp, Zea mays
cccacgcgtccgcccacgcgttcgcgtacgcgtgggggcgggtataaaggccaccatggcggcttcagcggtggtggcggttctggcggtggtggtggcttcggcgctggcggctacggtggtggcttctgcggctccttatggaaccgaagctccgctggtggttctgatggagaagctggcaaccgctgcggtggaggatgaaacggtggcggtgacggcgctggtggacgatactgcagcttccgaactggcgatgaacttcatggcgtatttggatttggccacctaggctaagctagctctaatggcaagggaccctccagc

SEQ ID NO: 318620 - DNA, 428 bp, Zea mays
ctagcaacatagaaagcacaatagtgtaccaacaatggcagccaaaatattttgcctgcttatgctccttggtctttctgcaagtgctgctaccgcgaccattttcccgcaatgctcacaagctcctatagcttcccttcttcccccgtacctctcaccagcggtgtcttcggtatgtgaaaacccaattcttcaaccctataggatccaacaggcaatcgcagctggcatcttacctttatcacccttgttcctccaacaatcatcagccctattacagcagttacctttggtgcatttattggcacaaaacatcagggcacaacaactacaacaacttgtgctagcaaaccttgctgcctactctcagcaacagcagtttcttccattcaaccaactagctgcattgaactctgctgcttatttgc

SEQ ID NO: 318621 - DNA, 379 bp, Zea mays
cccacgcgtccgcccacgcgtccggccccgatatcgtaacacattcacaggctcggctcccttctggttgtgcgttgcattcctttctggtctgatgcatctcattattctccatcggtgatgattggtaatccgatatggggggtgcaagtatagttacgttgtacaggaacgatgcattgcagtgtacatattccaaaatgaaatcattttacacacttcgaagggcatcgatgtctgaagctggttttctcgtgcaatactttcagagtcaacactacactgccctggttatccattcagcatgtatggtggtgtccaacaaagacccattccttgtgaaaaaatcttagcactggctccttcaatacgaaagaaa

SEQ ID NO: 318622 - DNA, 407 bp, Zea mays
cgatcgacaccatgagggtgttgctcgttgccctcgctctcctggctctcgctgcgagcgccacctccacgcatacaagcggcggctgcggctgccagccaccgccgccggttcatctaccgccgccggtgcatctgccacctccggttcacctgccacctacggtgcatctcccaccgccggtccacctgccgccgccggtccacctgccaccgccggtccatgtgccgccgccggttcatctgccgccgccaccatgccactaccctactcaaccgccccggcctcagcctcatccccagccacacccatgcccgtgccaacagccgcatccaagcccgtgccagctgcagggaacctgcggcgttggcagcaccccgatcctgggccagtgcgtcgagtttctg

SEQ ID NO: 318623 - DNA, 305 bp, Zea mays
caatagcgaaatcgtccctgattgtattattgcatatacacagatatgctaggcatagctcttactgtgattatacatgaactattcattcaatgaatggtcagattattgtccataatgtacggaattggcaaaagggaaaaccgtttatcctgttaattaattttttttaataatatatgaacccattttaattattgtactaacattaacagtaaggttcttattaaatacttaatacaaggggccctgtctgcttcttttctcttgacattggattgggtcccgtttctagtcataacaac

SEQ ID NO: 318624 - DNA, 432 bp, Zea mays
atccagtagcaacaatagagcaacaatggcgaccaagatattttccctccttatgctccttgctctttctgcatgtgttgctaacgcgacaattttccctcaatgctcacaagctcctatagcttcccttcttcccccataccttccatcaatgatagcttcagtatgtgaaaacccagctcttcaaccctataggctccaacaagcaatcgcagcaagcaacatacctttatcacccttgtttcaacaatcgccagccctatctttggtgcagtcattggtacaaaccatcagggcacagcagctgcagcaactcgtgctacctgtgatcaaccaagtagctctggcaaacctttctccctactctcagcaacaacaatttcttccattcaaccaactgtctacattgaaccgtgctgcttatttgcagca

SEQ ID NO: 318625 - DNA, 393 bp, Zea mays
attttgagcattcagaaacacaccaagcgaagcgcactagcaacaacctaacaacaatggctaccaagatattatccctccttgcgcttcttgcgctttttgcgagcgcaacaaatgcgtccattattccacaatgctcacttgctcctagttccattattccacagttcctcccaccagttacttcaatggccttcgaacacccagctgtgcaagcctataggctacaacaagcgattgcggcgagcgtcttacaacaaccaattgcccaattgcaacaacaatccttggcacatctaacaatacaaaccatcgcaacgcaacagcaacaacagttcctaccagcactgagccacctagccatggtgaaccctgtcgcctacttgcaacagc

SEQ ID NO: 318626 - DNA, 307 bp, Zea mays
attccacgccacgcagtccggggcattacgaaactggtggaatcgttcatgacttgggtggtggattcagcaaacggggatggggtcttgtcagaggtagtggctacagtgctagtagccgcacgcagcacttggtggtggaagtggacatggcatgcctgccggattctgcaaggatgcttgtcttggcggatgctatagccttggctgtgcaagtggacatcgcatgcgtgcctgattctgcaagggttgtggtcttgacggctgcagacgatgacgtggttgctgccacagatgttgacttgtc

SEQ ID NO: 318627 - DNA, 117 bp, Zea mays
tcgatcacactttcttccatacattttaattatagtcatgtatctccattctaaagtatggttcaaatattcatctttgttacacaacatttgtccctgaatattcctaattataac

SEQ ID NO: 318628 - DNA, 366 bp, Zea mays
gagaccaactagcaacatagaaagcacaatagtgtaccaacaatggcagccaaaatattttgcctccttatgctccttggtctttctgcaagtgctgctacggcgaccattttcccgcaatgctcgcaagctcctatagcttcccttcttcccccgtacctctcaccagcggtgtcttcggtatgtgaaaacccaattcttcaaccctacaggatccaacaggcaatcacagctggcatcttacctttatcacccttgttcctgcaacaatcatcagccctattacatcagctacctttggtgcatttattggcacaaaacatcagggcacaacaactacaacaacttgtgctagcaaaccttgct

SEQ ID NO: 318629 - DNA, 431 bp, Zea mays
agcttcccttgttcccccataccttacatcaatgatagcttcagtatgtgaagacccagctcttcagccctataggctccaacaagcaatcgcagcaagcaacatacctttatcacccttgttgatacaacaatcgccagccctatctttggtgcagtcattggtacaaaccatcatggcacagcacctgcagcaactcgtgctacctgtgatcaaccaagtagctctggcaaacctttctccctactctcagcaacaacaatgtcttccattcaaccaactgtctacactgaaccctgctgcttatttgcagcaacaactattaccattcagccagctagctactgcctactctcagcaacaacgacttcgtacatttaaccgaatggccggactgaaccccgctgcttatttgcagcagcaaatactac

SEQ ID NO: 318630 - DNA, 439 bp, Zea mays
cgtaccggcaacaaaggcctaagaacgaagacacgaatagacggcatgactactgtcgtgaatgaggaactggcgtgaagtggatctgaatgcttggatggacttacgcagtcctgaaaagaggcatacatgatgacggaatacttcagaagtttctacgcaactcacgtagcacaaggcacttcaggagtatgacccatcgctagtgggttgagagcacacttcaactggatgaaaggagatgctttaatctcaaaggctttagctattcattccactcgaaagctacagcatgatctactatgaggagttactacaacagacaagcaagtcaaactctcaagctgtatgccagaagaatgttcatatgtgctgaatctgatgaccttgttccaaaatatctgagctatttgaggtgtattgttgactcagacgcact

SEQ ID NO: 318631 - DNA, 306 bp, Zea mays
ttccgaggctacgacgtcacgcgacaagctctaatcttttcgtttttgctactgttactggttttaattgtcactcggagtctgggaactatttatatcttggttcctttttagttgtcaagtgcatgtttctgaacatcattggtcatactgtactatccaattgctgttaaaacattttttccaataattcgtatggtaccatttgttaaaaaaaaaaacataaaaaaaaaaaaaagaaaaaaaaattaataataataatataaaaataataaaaataaacataataaaaattataaagcataa

SEQ ID NO: 318632 - DNA, 323 bp, Zea mays
agccttctatcagtaccatcaatcatcattcatcttagtagtataggggccaaatgaaatctgcaacatcaattatctaactccaaaaaccatgaagctggtgcttgtggttcttgctttcattgctttagtatcaagtgtttcatgtacacagacaggcggctgcagctgtggtcaacaacatagccatgagcagcaacatcatccacaacaacatcatccacaaaaacaacaacatcaaccaccaccacaacatcaccagcagcagcaacaccaacaacaacaagttcacatgcaaccacaaacacatcagcaacgacaag

SEQ ID NO: 318633 - DNA, 229 bp, Zea mays
aacaacagttgttgccgttctacctgcacgctatgcctaacgctggcaccctcttacgactgcaacaattgctgccattcaaccaacttgctttgacaaactcaacagtgttctaccaacaacccatcattggtggtgccctcttttagattgcttatgagttatagttcaataatgaagttttttggatgatgtttgtggcgtcccagaaataagaaagtacatttct

SEQ ID NO: 318634 - DNA, 302 bp, Zea mays
ctttctgcaagtgctgctacggcgaccattttctcgcaatgctcacaagctcctataggttccgttcttcccccgtacctctcaccagtgttgtcttcagtatgtgaaaacccaattcttcaaccctacacgatccaacatgcaattgcatcaggcatcttacctttatcacccttgttcctccaacaatcatcagccctattacagcagttacctttggtgcatttattggcacaaaacatcagggcacaacaactcgtgctagcaaaccttgctgcctactctcagcaacaacagttacc

SEQ ID NO: 318635 - DNA, 199 bp, Zea mays
gaataatcaaagtggcagcctaaacattgctgagaggccagaccacgtaagggtaacgagaatacagtgaaatgcctagcaatctgtagggaaggataaactgaatgaacaagacaaggacgacttacaggtggaccatcccgtacttaaccaggttacacactttgaggataggaaactgactaccatcaaagctgga

SEQ ID NO: 318636 - DNA, 175 bp, Zea mays
cttgctttgacagacccagcggcctcctaccaacaacacatcattggtggtgccctcttttagattgcttattagttgtaattcaataataaagttttttggatgatgtatgtggccaaccagaaataagaagttacatttccagattctaaaaaatacaaaaaatgagtataag

SEQ ID NO: 318637 - DNA, 373 bp, Zea mays
  unsure (1)..(373): unsure at all n locations
cccacgcgtccgcccacgcgtccgctgacgcgtgggctggcgaggggccgaatagtgtctgcctggctggttgctgctcacctctctgctccttccttccttccctccctccctccctccagagtccggagcagagcagtcaaccgggctgtcgtcgccattggtgcggtacgtgcgagcccgagcggtgcgacgcagggggggaggggccagtgagagagacgacacgcgagagcgaagccaagcgaaggaggagcttcctggcgcgcgcggatcgcggaggctgtatatatatagtcggagggcgcgcgctccggtccggtaacgtgctgcangtggggtgtggcgcatggcaggattaggcaaggcagcg

SEQ ID NO: 318638 - DNA, 357 bp, Zea mays
  unsure (1)..(357): unsure at all n locations
cggacgcgtgggcggacgcgtgggcgccgcgctgctcgtgctagggctctctggcgcgcccgccgcggatgtggccagggtgcccgttgacttcatcgagctgctcgggatcaggcagagcctctctccctccaggaacagcggcctgctcaacatgctcagcctcatgaagcgcaaggcgcttgagatcgccggtggtgactcaacgtcaagtcagcaatcagtccaagaggttaccagaccgcgtctagtgaacgggaaagagcctgaatttgcagctttcgaggtgcaaganaaggaaaaggaaaggccacaggatgcanagaggcgcgacgaggatgaacaattgggtcaact

SEQ ID NO: 318639 - DNA, 117 bp, Zea mays
gcgtagagagcacgtgcacagtggacacggtcccgtagctgctgcggcagctggaggagcgcggttcatgattggcacatgatcatttacttgccacacgcattcttacacagacct

SEQ ID NO: 318640 - DNA, 203 bp, Zea mays
gaacgtggacaacgcttgcgcctttttgtcaggcctcgagtactaggggcgctggctgtccggcacgccgcgcgcgctctgcaagtcggtggagacgtacatcgacgccatgtactaagaggacctcaagcccggcaaggcgtgagagcagtacttcaggctgatccagaccagcctaacctagacgtactcgacggggttgc

SEQ ID NO: 318641 - DNA, 436 bp, Zea mays
  unsure (1)..(436): unsure at all n locations
gagggataatatcttggtagccattgttgttaggttgttgcgctttttgcgagcgcagcaaatgcgttcattattccacaatgctcacttgctccaagttccattattacacagttcctcccaccagttacttcaatgggcttcgaacacccagctgtgcaagcctataggctacaacaagcaattgcggcgagcgtcttacaacaaccaatttcccagttgcaacaacaatccttggcacatctaacaatacaaaccatcgcaacgcaacagcaacaacaattcctaccagcactgagccacctagccatggtgaaccctgccgnctacttgcaacagcagttgcttgcatcaaacccacttgctctggcaaacgtagttgcaaaccaggcacaacaacagctgcaacaagttctgccaacgctcagtcaactag

SEQ ID NO: 318642 - DNA, 241 bp, Zea mays
ggcatacactcaatcctatttgagattgcagaaccatcacccacccacgcaacaggcaatccttaagcgtaaactgaacaaccagaactgcataatgagagacctaactcacatctaaatcatcatgatcaatgactactacctaatctgcacacttgtcatgccagcagtattaatgaatcgacctaagcactagtgagacacaatttcattatagatccccatacttacatggaatttc

SEQ ID NO: 318643 - DNA, 404 bp, Zea mays
  unsure (1)..(404): unsure at all n locations
gccaactagcaacatagaaagcacaatagtgtaccaacaatggcagccaaaatatttggcttccttatgctccttggtctttctgcaagtgttgctaccgcaaccattttcccacaatgctcacaagctcctatagcttcccttcttcccccatacctctcaccagcggtgtcttcaatgtgtgaaaacccaattgttcaaccctacaggatccaacaagcaatcgcaacaggcatcttaccattatcacccttgttcctccaacaaccgtcagccctattacagcagttacctttggtccatttggtggcacataacatcagggcacaacaactacaacaatttgtgctagcaaacctgctgcatactctcagcaacatcagtttctnccattcaaccaactg

SEQ ID NO: 318644 - DNA, 372 bp, Zea mays
gctgcattgaactctgctgcttatttgcaacaacaactaccattcagccagctagctgctgcctacccccaacaatttcttccattcaaccaactggcatcattgaactctcctgcttatttacagcagcaacaactactaccattcagccagctagctggtgtgagccctgctgccttcttgacacaacaacagttattgccgttctacctgcacgctgcgcctaacgctggcaccctcttacaactgcaacaattgctgccattcaaccaacttgctttgacaaacccagcagcgttctaccaacaacccatcattggtggtgccctcttttagatttcttatgagttatagttcaataataaagttttt

SEQ ID NO: 318645 - DNA, 218 bp, Zea mays
tcggcacgcgtgcggtctatttaaactttttagaagcatcaaacaataaggaataatggggatacacgagacacaggagctgagagatccgctcctagatactgagctataggactttgatagcgttacgcacactgacctagctggcagtcgaacacatagtcggaaagctgtgtagccagcgacaccctcgcctatactgatgccagatgcgaaca

SEQ ID NO: 318646 - DNA, 201 bp, Zea mays
acggccacgcgtccgaccctggtcacggttgccgagtgctaacagtccaccggaacaggggaccccgaatgcatactggattcatcgctgcggagccaaacgattcaactaactgacattagcatagtgcatcacgctggaccttgtacatagctcatacctctgaatcctaatcacatcatgaatatgactgcattcgtc

SEQ ID NO: 318647 - DNA, 395 bp, Zea mays
cccacgcgtccgatttcctttagccactgatcaagtcaatagagactatgggcaggctgcacatccaattgttcaacaaaactcagttcaatcccctacacaatctgcacccaggatgcctgcccagatgtttggtgcaaaattcagcaatagcagtaaaatatcaccagcacaacctacaactattctgggtgatgacactgaaatttcttcacctagtggatcaaacaaatatgattctcggttaacaattaaggggcaacctgatgaccaaggaacagagcattcttcgtttctccgtggtggggctcatgttcttggggctacaggtgcaatgggcattaaacttggtgatcaaaatttccatggtaccccagcattgctgccagttatgc

SEQ ID NO: 318648 - DNA, 236 bp, Zea mays
gccacttccattattacacactgcatataacgcgttacagatacgggcatttgaacacggatctgtgcaagcatataggctacaacacggacatgttgcgagcgtcgaatatcaaccaagttcctaatttcaacagcgatccttaggacatctaacaatacagaccatggtgacccgcagcgacaacaatttgtaccgcgccgaccacctatatagggtgaactcctgccgtctac

SEQ ID NO: 318649 - DNA, 270 bp, Zea mays
acgaaaaatcatggttaattaaagttttattgtagaaaaaaaaaaaaaataaaatagaagggaaaacaaaaaaaaaataaaaaaaaaaaataaaaaaaataaaaaaaaagaaaaaaaaaaaaaaaaaaaaaaaataaaaataaaaaaaaaaagagaaaaaaagtaaaaaaaaaaaaagaagaaataaaaaagggggatcattcttaaagatgcaaagtttattaacattatatataatggataaattttataaaaagggccgcaaaaatt

SEQ ID NO: 318650 - DNA, 436 bp, Zea mays
cagaaacacaccaagcgaagctacctagcaacgacttaacaacaatggctaccaagatattagccctccttgcgcttcttgccctttttgtgagcgcaacaaatgcgttcattattccacaatgctcacttgctcctagtgccattataccacagttcctccgaccagttacttcaatgggcttcgaacacctagctgtgcaagcctacaggctacaacaagcgcttgcggcgagcgtcttacaacaaccaattaaccaattgcaacaacaatccttggcacatctaaccatacaaaccatcgcaacacaacagcaacaacagttcctaccagcactgagccaactagatgtggtgaaccctgtcgcctacttgcaacagcaggtgcttgcatccaacccacttgctctggcaaacgtagctgcataccaacaaca

SEQ ID NO: 318651 - DNA, 394 bp, Zea mays
gtgaaaacccagctcttcaaccatataggcttcaacaagcaatcgcggcaagcagcgtacctttatcgcccttgttgtttcaacaatcgccagccctatctttggtgcagtcattggtacaaaccatcagggcacaacagctgcagcaactcgtgctacctctgatcaaccaagtagctctggcaaacctttctccctactctcagcaacaacaatttcttccattcaaccaactgtctacactgaaccctgctgcttatttgcagcaacaactattaccatttagccagctagctactgcctactctcagcaacaacaacttcttccatttaaccaattggccgcactgaaccccgatgcttatttgcagcagcaaatactactaccatttag

SEQ ID NO: 318652 - DNA, 324 bp, Zea mays
  unsure (1)..(324): unsure at all n locations
acgcaanaagcagcacaagagtgaggtacaagaacaccatgagaacaacgatggcagccgggatgggttccatgctaatgctgcttgctctgtgtaggtgaggagcgaacgcgaccatatgggcgaagtgactccgtgctcatataactagatctgctctatggatacttatccatcattgaccagattgagtgtagtgaaaactcgatagctatgaacactacaggctttgaacacggtatactgcctacgcaactgacctttataagccctgtactttcgacactcgtgagaccgatgtctgtagcactcattggttcatac

SEQ ID NO: 318653 - DNA, 187 bp, Zea mays
acgcggacgcgtgcgagcccgactacattatctccgaagaaagcgttactctgggtgatatacctgatactgtatcatacacagctcttgacaagtgacttatatacgataatattcatgcatataatatagagacactagtaatatctgatgatgcacagtacaatacacgtgtcactaacttgat

SEQ ID NO: 318654 - DNA, 349 bp, Zea mays
agcacacggtgggttgaaatcgggttttcggacattacaggattgaagttggaatgggacatcgaagacatatttgatgtgaactacatagtgtgatcaaaaggtatacatgtcagtgctcataaaaaacttagctgtatgaatatagcggtcaacctagaacacatgatagtttactagcaattcctgaacgatgtgctagactatatgaaaactgtgaaatcaaacccaagcccgattaatcacgaagaaacgcatatatacagagccttacacaagatgacggacagatgcttgctgagtgatctgcacgctgaattcatggacagttattgctgaattcataatc

SEQ ID NO: 318655 - DNA, 433 bp, Zea mays
gaaaaaaaaaaaaaattaaatttaaaaaaaaaaaaaaaaaaaaaaaaaaaataaaaagggcgtgtcgttctcgtatcttatattttttcttaattatattttattttttatattttttgtttaatttttttttcttttttatttttttttatcttttttttaattttttatttttttattttttcgttttttattattaacttttttgtattttttcatgctattttatctttattttatatagtttctttatttcatattttttgctcttttttttacattttttttattttaaatctttttatttttttttctttatttctttttttttttttctcctttttttatttttttttttttctttttttatttttttcttttttttttattaatttttttatttttatttttttattttttattttctttttct

SEQ ID NO: 318656 - DNA, 391 bp, Zea mays
gaagaggaagactatcacccagggacaagggagcagtagcatctgccgtcgctatgttccaccccagggtacaccagctcgtcctggaggagggcaactgtcctaccaacgacctgctctgcatataccacaggcgactccgcatactcgccaggctgcccccactggcaccccaacgagacctactggccagggtactactacagtcaccacttgcttcaagtgtggtgaggttgggcactacgccaatgcttgtccgaagaggaatcccaacacacccgctcgaagcaatgtttaaagcaagcaacagactctggctaccggccaggggtccaataatgctagagtcaaccaaattagtgctgatgctactgttgacgatgatgatatt

SEQ ID NO: 318657 - DNA, 384 bp, Zea mays
gcaaagcggcagtgcgtagagaggatcgtcgaacagaacagcatgaagatggtcatcgttctcgtcgagtgcctggctctgtcagctgccagcgcctctgcaatgcagatgccctgcccctgtgcggggctgcagggcttgtacggcgctggcgccggcctgacgacgatgatgggcgccggcgggctgtacccctacgcggagtacctgaggcagccgcagtgcagcccgctggcggcggcgccctactacgccgggtgtgggcagccgagcgccatgttccagccgctccggcaacagtgctgccagcagcagatgaggatgatggacgtgcagtccgtcgcgcagcagctgcagatgatgatgcagcttgagcgtgccgct

SEQ ID NO: 318658 - DNA, 410 bp, Zea mays
cagcaagcaacatagaaagtggaatccagtagcaacaacagagcaacaatggcgaccgagatattttccctccttatgctccttgctctttctgcatgtgttgctaacgcgacaattttccctcaatgctcacaagctcctatagcttcccttcttcccccataccttccatcaatgatagcttcagtatgtgaaaacccagctcttcagccctataggctccaacaagcaatcgcagcaagcaacatacctttatcacccttgttgtttcaacaatcgccagccctatctttggtgcagtcattggtacaaaccatcaaggcacagcagctgcagcaactcgtgctacctgtgatcaaccaagtagctctggcaaacctttctccctactctcagcaacaacaatttct

SEQ ID NO: 318659 - DNA, 367 bp, Zea mays
gcaaagcggcagtgcgtagagaggatcgtcgaacagaacagcatgaagatggtcatcggtctcgtcgtgtgcctggctctgtcagctgccagcgcctctgcaatgcagatgccctgcccctgcgcggggctgcagggcttgtacggcgctggcgccggcctgacgacgatgatgggcgccggcgggctgtacccctacgcggagtacctgaggcagccgcagtgcagcccgctggcggcggcgccctactacgccgggtgtgggcagacgagcgccatgtaccagccgctccggcaacagtgctgccagcagcagatgaggatgatggacgtgcagtccgtcgcgcagcagctgcagatgatgatgc

SEQ ID NO: 318660 - DNA, 367 bp, Zea mays
cggacgcgtgggaacaaatgcgttcattattccacaatgctcacttgctcctagtgccattataccacagttcctccgaccagttacttcaatgggcttcgaacacctagctgtgcaagcctacaggctacaacaagcgcttgcggcgagcgtcttacaacaaccaattaaccaattgcaacaacaatccttggcacatctaaccatacaaaccatcgcaacacatcagctacaacagttcctaccagcactgagccaactagatgtggtgaaccctgtcgtctacttgcaacagcaggtgcttgcatccaacccacttgctctggcagacgtagctgcataccaacgactacaacaattgcaacag

SEQ ID NO: 318661 - DNA, 356 bp, Zea mays
agaaaaaaaaaaaaaaaaaaaaaaattaaaaaaaaaaaaaaaaaaaaaaagaaaaaaaggaaaaaaaaaaaaaaaaaaaaaaaaaaaaaaaaaaaaaaaaaaaaaaaaaaaaaaaaaaaaaaaggggcggccttttaaagggttcaagcttaactacctcatttttccaacttattagcttttttaaattgtccctaaatttaaataaattgcccgtattttaaaaacgtataacttggaaaaacctggggatccccaatttaaatccctttgaagaaattccccttttaccaagttggttaaataccaaaaagccccaaacgattggcctttccaaaaatttgccaacctaaatt

SEQ ID NO: 318662 - DNA, 303 bp, Zea mays
  unsure (1)..(303): unsure at all n locations
agaacacgtatgcggacaaccagaaaactttagtattgaattacaactactaagtaatgggtcatagggcgtagcacaacagtctccaagggcccacgttgcaatcttagtggtccttgccctgactctgagaagaaagcctgatgtactgattaatgttactacctagatactgangtcacagtgattatctgagacaacacaatcttgccatcatcgtctgcgatactgctcaatcctctgacagtgacctaccgtctggcatgctatgatgatctcattctctatttcccacattatgtt

SEQ ID NO: 318663 - DNA, 437 bp, Zea mays
acgcatccggtgccacgctcttactccgtcctagcgctacttgccctctttgtgagcgcagcaaatgtgctcattattccacaatgctcacttgctcctagtgccattattccaaagttcctcccaccagttactttaatgggcttcgaacacccagctgtgcaagcctacaggctacaacaagcgcttgcggcgagcgtcttacaacaaccaattgcccaattacaacaacaatccttggcacatctaacaatacaaaccatcgcaacgcaacagcaacaacagttcctaccagcactgagccacctagccatggtgaaccctgccgactacttgcaacaacaactgcttgcatccaacgcacttgctctggcaaacgtagttgcaaaccagcaacaacaatagctgcaacagtttctgccagcgctcagtcaact

SEQ ID NO: 318664 - DNA, 442 bp, Zea mays
gcgaagcgcactagcaacgacctaacaacaatggctaccaagatattatcgctctttgcgcttcttgccctttttgtgagcgcaacaaatgcgttcattattccacaatgctcacttgctcctagtgccattattccacagttcctccctccagttacttcaatgggcttcgaacacccagctgtgcaagcctacaggctacaacaagcgcttgcggcgagcgtcttacaacaaccaattgcccaattacaacaacaatccttggcacatctaaccatacaaaccatcgcaacgcaacagcaacaacaatttctaccagcactgagccaactagctgtggtgaaccctgtcgcctacttgcaacagcagttgcttgcatccaacccacttgctctggcaaacatagttgcataccaacaacaacaacaattgcaacagtttc

SEQ ID NO: 318665 - DNA, 440 bp, Zea mays
cagaaacacacctagcgaagcgcactagcaacgacctaacaacaatggctaccaagatgttatccctctttgcgcttcttgccctttttgtgagcgcaacaaatgcgttcattattccacaatgctcacttgctcctagtgccattattccacagttcctccctccagttacttcaatgggcttcgaacacccagctgtgcaagcctacaggctacaacaagcgcttgcggcgagcgtcttacaacaaccaattgcccaattacaacaacaatccttggcacatctaaccatacaaaccatcgcaacgcaacagcaacaacaatttctaccagcactgagccaactagctgtggtgaaccctgtcgcctacttgcaacagcagttgcttgcatccaacccacttgctctggcaaacatagttgcataccaacaacaacaa

SEQ ID NO: 318666 - DNA, 103 bp, Zea mays
ctgggcacttaatctgcatggactaatttggtttacttagggtgatcatcatcttctcactcattttttgtttggtttgtgcaatggaatgagttgatcaatc

SEQ ID NO: 318667 - DNA, 427 bp, Zea mays
gcaacatagaaagtggaatccagtagcatcaatagagcaacaatggcgaccaagatatgttccctgcttatgctccttgctctttctgcatgtgttgctaacgcgacaattttccctcaatgctcacaagctcctatagcttcccttcttcccccataccttccatcaatgatagcttcagtatgtgaaaacccagctcttcaaccctataggctccaacaagcaatcgcagcaagcaacatacctttatcacccttgtttcaacaatcgccagccctatctttggtgcagtcattggtacaaaccatcagggcacagcagctgcagcaactcgtgctacctgtgatcaaccaagtagctctggcaaacctttctccctactctcagcaacaacaatttcttccattcaaccaactgtctacattga

SEQ ID NO: 318668 - DNA, 385 bp, Zea mays
ggcacgcgtggtggaaccctaagtggtggacctcatggacgtacttaaggattcggcgggacttgcggatacgggtcttgattcatgtgaggaatgaggcgtgcagtttcactttcactttaactctgataatgaccatgcataagcgcattcgtgacttaatgacaaactaagtgtcaaaggacgagtctttcaaattatcgtgcgcactacataatacacttcatgccatatgttgatctcctatttgctatactaattatgatactgaatatgctttagaaaaaacataaaaaaatacaaacaataaaaacatatcaaaaacaacaattcacaccaaggctgaaccaaactagatcgagtaaccctgaagggttgtagcttc

SEQ ID NO: 318669 - DNA, 223 bp, Zea mays
aatgaggtataaatcatcgttgtggtgtaaaaaaattaaaaaaaaataaaaaaaaaaaagaaaaacggaaaaattaaaaaaaaaaataaaaaattaaaaaaaaaaataaaataaaaaaatataaagtacaaccttttttaaatttccaaacttactttcacttactttcaacataataactttcctttaatgtcccaaaatttcaattcattaccctttattt

SEQ ID NO: 318670 - DNA, 360 bp, Zea mays
aactacctcatgtctcactagaactagtgacaatttaaccttataatactaaacctatacctacttctctaattactatccaacaacatcttttcaaacatcctcaaaatctcaacactaaacctaaaatccaatataactctaaccactatcatcaccccataacaattcttcctcaatctcactgtccttccatttcaaactctcaactaaactccaacttcctttttaaccacgatcacctttacattccacaactacctcaacttctaatcgaaaaacatttccctaaaattaaaccaaaaattcctcttctaacccaatccttaaacctttttttactatctataaatttcacat

SEQ ID NO: 318671 - DNA, 259 bp, Zea mays
  unsure (1)..(259): unsure at all n locations
gcttgccaccgtgttttgctagatgagtcgtgaaataagcttttacttcctcgctgctgtgggtgaggtgactggaattcggaaatttggaactaacaaaaccccccgtggatttgtatgatacgttttgttcgacagttgcggncnatncaaatncactgtgggttttgtatgggacgcaaactgtggtatatggtatggtatggtcttattttttggatgcaaaaattggaaaaaccctaatgtagggcttccgatg

SEQ ID NO: 318672 - DNA, 437 bp, Zea mays
caacaagcaacatagaaagtggaatccagtagcaacaatagagcaacaatggcgaccaggatattttccctccttatgctccttgctctttctacatgtgttgctaacgcgacaattttccctcaatgctcacaagctcctatagcttcccttcttcccccataccttccatcaattatagcttcaatatgtgaaaacccagctcttcaaccatataggcttcaacaagcaatcgcagcaagcaacatacctttatcgcccttgttgtttcaacaatcgccagccctatctttggtgcagtcattggtacaaaccatcagggcacaacagctgcagcaactcgtgctacctctgatcaaccaagtagctctggcaaacctttctccctactctcagcaacaacaatttcttccattcaaccaactgtctacactgaa

SEQ ID NO: 318673 - DNA, 422 bp, Zea mays
cccacgcgtccgcccacgcgtccgggacaccagcaggcagtccaagcagctggaggatctcaccgccaagatgagagagtgcaagcgggcttagcaagaaagagctccaggaccttctgcaagagggcgccaagatgctggttcgtgctgcaagtgctagaggaaattggatcctcgggtcgggcgatgagatggaagggatgctgcagccacacgggcgttgagtcatgacgtgactgctcgcctggtgttagctttgtcaggaactcgctctattttgctgctgtctgttatgtcgtatggtctggtacttgtgtgatgtaaaactctaaactcgtcggttggcatgttgcctggtaggggacccggctgttctgagtcatccgaagcggattggctcgtcagcgcttctgtttgcgggt

SEQ ID NO: 318674 - DNA, 334 bp, Zea mays
cccacgcgtccgcccacgcgtccggggttccatcagccgacacaagcacggggacgatgttaccgtcaacatgagagagtgcaagctgtcttatcatgaaagagctacaggaccttctgcaataggtcgccaagatgctggatcgtgctgcaagtgctagaagaaattggatcctcgatttaggcgatgagatagaaggcatgctgcatccacactagcgttgagtcatgacgtgactgctcgcctggtgttagctttgtcaggaactagctctattttgctgctgtatgttatgtccgatggtttggtacttgtgtgatgtaaaactctaaac

SEQ ID NO: 318675 - DNA, 444 bp, Zea mays
gtagcaacaacagagcaacaatggcgaccaagatattttccctccttatgctccttgctctttctgcatgtgttgctaacgcgacaattttccctcaatgctcacaagctcctatagcttcccttcttcccccataccttccatcaatgatagcttcagtatgtgaaaacccagctcttcagccctataggctccaacaagcaatcgcagcaagcaacatacctttatcacccttgttgtttcaacaatcgccagccctatctttggtgcagtcattggtacaaaccatcagggcacagcagctgcagcaactcgtgctacctgtgatcaaccaagtagctctggcaaacctttctccctactctcagcagcaacaatttcttccattcaaccaactgtctacactgaaccctgctgcttatttgcagcaacaactattaccat

SEQ ID NO: 318676 - DNA, 419 bp, Zea mays
cggacgcgtgggcggacgcgtggggggttggcttctcctccccctccggttcgggttcgggttcgtgaggttctccggggttcgggttcgtgggtgagcggatcgagatggcggcgtcggatgttgagtaccgctgcttcgtcggcggcctcgcctgggccacggacgaccactccctccacaacgccttcagcacctacggcgaggtcctcgagtccaagatcatcctcgatcgggagacgcagaggtcccgcggcttcggcttcgtcaccttctccacggaggaggcgatgcggaacgccatcgagggcatgaacggcaaggagctggacggccgcaacatcaccgtcaacgaggcccagtcccgcggcggccgtggaggcggcggcggtgggtacggtggtggccgtggaggcggc

SEQ ID NO: 318677 - DNA, 407 bp, Zea mays
cggactcgtgggaaaaaaaaaaaaaaaaaaaaaaaaaaaaaaaaaaaaaaaaaaaaaaaggaaaagggaaaaaaaaaaaaaaaaaaaaaaaaaaaaaaaaaaaaaaaaaaaaaaaaaaaaaaaaaaaaaaaaaaaaaaaaaaaaaaaaaaaaaaaaaaaaaaaaaaaaaaaaaaaaaaaaaaaaaaaaaaaaagaaagaaaatattaaaaaaaaaaatttttaaaaaaaaaaaaaaaaaaaaaaaaatttttatataagggaaaaaaaaaaaaaaaaaaggagggtatttaaaaaaaagttgaattgaaaaaaaaaaggtttaacaaaataaattaggttaaaaaaaaaaaaatttttttaaaaaagggaaaaaataaaaaaaggctaaaaaaagaaattttaaaaa

SEQ ID NO: 318678 - DNA, 330 bp, Zea mays
ctgaaatactgttaggactagtttggttactctattttttcaagagattcatatttttgcaagtggaaatgaattaattttcttttgagaaaatagaaagaaatcccttgaaaaaaatgagattctctaggagccataaaaccggagtaaattggaggagctaaattcatcctttttattcaattttgaataagaggaatttagctcctctggttttgtggcttccaaactaaggttgtattctctaagatatttgtgctgctgctgctgccaatgtactgtaaatatctactaccatcaaagttattgatgttctctaagctatttttt

SEQ ID NO: 318679 - DNA, 64 bp, Zea mays
cattattggcaaaaaaaaaaaaaagaataaaaaaaaaaaaaaaaaaaaaaaaaaaaaaggaaaa

SEQ ID NO: 318680 - DNA, 445 bp, Zea mays
gttggcttctcctccccctccggttcgtgttcgggttcgtgaggttctccggggttcgggttcgtgggtgagcggatcgagatggcggcgtcggatgttgagtaccgctgcttcgtcggcggcctcgcctgggccacggacgaccactccctccacaacgccttcagcacctacggcgaggtcctcgagtccaagatcatcctcgatcgggagacgcagaggtcccgcggcttcggcttcgtcaccttctccacggaggaggcgatgcggaacgccatcgagggcatgaacggcaaggagctggacggccgcaacatcaccgtcaacgaggcccagtcccgcggcggccgtggaggcggcggcggtgggtacggtggtggccgtggaggcggcggctacggcggtggcgggcgccgtgatggcggtggcggctacggcggtggcg

SEQ ID NO: 318681 - DNA, 151 bp, Zea mays
tcggactcttgggaaaaaaaaaaaaaaattaaaaaaaaaaaaaaaaaaaaaaaaaaaaaagaaaaaagaaaccaaaaaaaaaaaaaaaaggccacccatttataagatcccaacttaactaccccttcattccaaataattactttttttt

SEQ ID NO: 318682 - DNA, 288 bp, Zea mays
cggacgcgtgggtgccgccgccggttcatctgccgccgccaccatgccactaccctacgcaaccgcgccggcctcagcctcatccccagccacacccatgcccgtgccaacagccgcatccaagcccgtgccagctgcagggaacctgcggcgttggcagcaccccgatcctgggccagtgcgtcgagttcctgaggcatcagtgcagcccgacggcgacgccctactgctcgcctcagtgccagtcgttgcggcagcagtgttgccagcagctcaggcaggtggagc

SEQ ID NO: 318683 - DNA, 435 bp, Zea mays
cccactcgtccgattgagaccaactagcaacatagaaagcacaatagtgtaccaacaagtgcagccaaaatattttgcttccttatgctccttggtctttctgcaagtgttgctaccgcgaccattttcccacaatgctcacaagctcctatagcttcccttcttcccccatacctatcaccagcggtgtcttcagtatatgaaaacccaattgttcaaccctacaggatccaacaggcaatcgcaacaggcatcttaccattatcacccttgttcctccaacaaccgtcagccctattacagcagttacctttggtgcatttggtggcacaaaacatcagggcacaacaactacaacaacttgtgctagcaaaccttgctgcatactctcagcaacatcagtttcttccattcaaccaactggctgcattgaac

SEQ ID NO: 318684 - DNA, 396 bp, Zea mays
  unsure (1)..(396): unsure at all n locations
aaaaagacgacgaccagcttacctttactaccggcaagtgcccctgccggtcctctgggcagccagttanattgtacgactaggtatcgtcgtacgtcgtgccgcatgcatgcatgcgcagaaggccaagatggctatgcagaaagcgtagcatatatcatacatgagcaacgccaaactgtgtagatatgtgcaagttttgcagtgtgctaaatgcatgtgcgcattgaagaggcaagcagcccaatttgctactcatggccagtaatcgaacaatgataatgttgccaaaactactagcgcatgttacatcgtgtgatgcatatcactatatgagcatgtggaatcaagcatgcatcctgagatagtagctgtgctggtatatattactgcatt

SEQ ID NO: 318685 - DNA, 446 bp, Zea mays
cggacgcgtgggcggacgcgtgggcggggctcatcatgcatctcctcagcggcgccggcgtcgtcggtgacggcggctctgagtctgagtcccgtgaagttgccgttcccgggttgccggagccggagatacggatccccgtcagcgagctgccggagttcttgagacgcccagcgaagggccaaggcacgttgaacccttgcaacgcggcgatggccaggtgcctgggcgtcgcctacaacacgttcgcgggcctggagcaggagtaccgcgaggcgagcatgcgcgtcgcgtccttgaagcgcagctacttcgtcggccccgtctcactgccgctgccgccggccgcggcaggcgtcactgagcctccatgcatccggtggctccactccaagccgagctgctcggtggtgtatgtgtgcttcggcacctacgccgccatctcg

SEQ ID NO: 318686 - DNA, 93 bp, Zea mays
tgaacaattgaaatgaaacgaaaaaagttttgttccaaaaaaaaaaaaaaaaaaaaaaagaaaataaaaaaaaaaaaaaaaataaaacaaaca

SEQ ID NO: 318687 - DNA, 351 bp, Zea mays
aaaaaaaaaaaaaaagaaataaaaaaatttaaaaaaaaaaaaaaaataaaagaaaaaaagaaaaataaaaaaaaaaaaaaaaactaaaaaaaaaaaaaaaaaaaaaaaaaaaaaaaaaaaaaaaaaaaaaaaaaaaaaaaaaaaaaaaaaaaaaaaaaaaatttgcccccctttttaaagttccaattttttcttccccttatttccaaatttttatttttttttttttccccctaaatttaattcatttgcccatctttttaaaaccttatttttgaaaaaccctttttttacccaattttattccttttcaaaaaattccctttttcccaatttgtgtattttccaaaa

SEQ ID NO: 318688 - DNA, 267 bp, Zea mays
gctgctcgcctgtcgattccgcctcatcgcgtcccgtaactccatgtccactgggaccgggaccctgggcggcgggcgatccccggctggcgcgcttcttaacctgcgcccgcgcgcaacccggggtggccccaatccgttgcccgggctgcgcgtcggctctgggtgccgtcacataactattggttccgcggaagcaagcccgcgccccaacggccccgtttcccaagggtgctgatttatttttcccggcagtaatctcgaaca

SEQ ID NO: 318689 - DNA, 410 bp, Zea mays
cctgcggcgtcggcagcgtcggcagcccgttcctgggccagtgcgtcgagttcctgaggcaccagtgcagcccggcggcgacgccctacggctcgccacagtgccaggcgctgcagcagcagtgctgccaccagatcaggcaggtggagccgctgcaccggtaccaggcgacatacggtgtggtcctgcagtccttcctgcagcagcagccgcagggcgagctcgcggcgctgatggcggcccaggtagcgcagcagctgacggcgatgtgcggcctgcagctgcagcagccaggtccctgcccttgcaacgcagctgccggcggtgtctactactgaggaaactatgtactggagtaataatgtaatggagccgctggctagctacctagctcgctagtttactcattt

SEQ ID NO: 318690 - DNA, 429 bp, Zea mays
caacaagcaacatagaaagtggaatacagtagcaacaatagagcaacaatggcggccaggatattttccatccttatgctccttgctctttctgcatgtgttgctaacgcgaccatttttcctcaatactcacaagctcctatagctgcccttcttcccccataccttccatcaatgaccgcttcagtatgtgaaaacccagcccttcaaccctacaggctccaacaagcaatcgcaacaagcaacttacctttatcacccctgttctttcaacaatcgccagccctatctttggtgcagtcattggtacaaaccatcagggcacaacagctgcagcaactcgtgctaccagtgatcagccaagtagctctggcaaacctttctccctactctcagcaacaacaatttcttccattcaaccaactgtct

SEQ ID NO: 318691 - DNA, 357 bp, Zea mays
accggttctcggattaccgactcgtcccactcgctcgtcgtacccctacggttctgctccggcttcgtgaggttctccgtggttgggtttctggggtggtccgatcgatatgtcctctttcaatgttcactactcgcttctattttcattggactctgctgagccacgtaccaccactcgctgaacaacgccttctgcacctaccgagatgtcctatagtacatgatcctcctcgatctgcagacgcacatgttacgctgattaggattaaccatcttatacacatatgatgcaatgcggcacgccatcttagtgcatgaactgtctggagctatacgggcgcaacatctccgtcaa

SEQ ID NO: 318692 - DNA, 241 bp, Zea mays
atcatgcactagcgttggtcgtacgccactcctgacaaggcatgatcggactttcacgtggtccggtcctgctgctcagcatatgcccgccggcagagattgccctggagatcccatctcttacgcctactcttgcagacgccactctggaagcgttactgcgatgaaacaggctcagcgctgtagattattgtcccgaagtttcctgctagccctgaagaacactaactgcatgtagcca

SEQ ID NO: 318693 - DNA, 442 bp, Zea mays
cccacgcgtccgcaacaagcaacatagaaagtggaatccagtagcaacaatagagcaggaatggagaccaagatattttccctccttatgctccttgctctttctacatgtgttgctaacgcgacaattttccctcaatgctcacaagctcctatagcttccctttttcccccataccttccatcaattatagcttcagtatgtgaaaacccagctcttcaaccatataggcttcaacaagcaatcgcagcaagcaacatacctttatcgcccttgttgtgtcaacaatcgccagccctatctttggtgcagtcattggtacaaaccatcagggcacaacagctgcagcaactcgtgctacctgtgatcaaccaagtagctctggcaaacctttctccctactctccgcaacaacaatttcttccattcaaccaactgtcta

SEQ ID NO: 318694 - DNA, 432 bp, Zea mays
cccacgcgtccgcccacgcgtccgcccacgcgtccgcccacgcgtccgctcgtcgcatgttccttgcaaccgattgcctatccccctcccaaccaaagaccgatggcgcccaaggccgagaagaagcccgcggcgaagaagccggcggaggaggagcccgcggccgagaagacgaccgccgggaagaagcccaaggcggagaagcgggtccccgcgggcaagtccgccggcaaggagggcggcgagggcaagcgtggcaagaagaagggcaagaagagcgtggagacgtacaagatctacatcttcaaggtgctgaagcaggtgcacccggacatcggcatctcctccaaggccatgtccatcatgaactccttcatcaacgacatcttcgagaagctggccggcgaggccgtcaagctcgcgcgctacaac

SEQ ID NO: 318695 - DNA, 141 bp, Zea mays
ccgacacgtacgcccacgcctccaccctctcgtccgcccacgcatcctctagtcacaagttccttgcaaacgattgcctatccccctcccaaccaaagacctatggcacccaatgccgagaagaagcccactcccaagaaa

SEQ ID NO: 318696 - DNA, 431 bp, Zea mays
cccacgcgtccgcccacgcgtccgaacaaagtttgagctgttgtaccttcacccaatcgacatatagcactacaaaatggtcactgggaaagtagcagtcgtcctcctagcctgctggacgctagttctctaccaaccagtgcttggccgtttaccgtgtaacaatgatcagaagagagagatcctgcgcgagtgtgatccactgaactcaacacctgactatactccatcccggcacggtgcgtgctgcgtggcggtgagaaaggtgccaggaaccaacatgctttgcattgcctccatactctcacttgctgacaaggccaaatacagtgtaaggaagattctaggatttagagatgcatgcgccccttcacatccacaccatcaggtcatggcctaaaagagtgtagctgccagcctgccatcgctta

SEQ ID NO: 318697 - DNA, 447 bp, Zea mays
gtcatgcgtgcgtggaggcggagctcctcctactatagcgtgccagcgtggggcagctgcctcaactatcgccggagcagagaacccacgggccactgccccaccccacccctctcttttccccagccaccggtggctgcggcggcagcctaggcggcgttgtcgagctgccgacagaggagggaggactggaccagaaaggtgaaggctgtgccgtgtgtcgatcaataggcccaaatcccaatacaaggaatgcaataagagacatggttgtccgtggtgctccagcaatagccatagcagcggcactagcattagccgttgaagtttctgatttagattttattggtacgcctgaagaagcagcttcttttgtttcaaagaaattggaataccttgtatccagccgaccaactgcagtgaacctatctgatgctgcaacaaagc

SEQ ID NO: 318698 - DNA, 180 bp, Zea mays
actgttaattcgttctatctgcctacctttcgcattctcttgaacccattctctatacgagtatcgatatcactgagctaaaacttatcattcgactgcattccatcatctatatataaactatcgacttcgatctcttcgccacgatccatctctaaatcagcactcactaccttacct

SEQ ID NO: 318699 - DNA, 441 bp, Zea mays
cccacgcgtccgcccacgcgtccgcccacgcgtccgcccacgcgtccgcccacgcgtccgggcagctcgagcacggcgggcggcacgacaagctacacagagcgacggctggcgcgagtagcagcaataggggcacgacgataaatcgcagaatcagaggtcggaggggagcgaggagcagagcaagtgaggaaggggaaggcgagctcgcaggcgcactacttatgggcgtccggaggagggaagacgagtaggcgatggtgcttcagtgtggccgacgactcttccgtgccagcaggcacaattacttggagaagaaatagacgaagttaatggaaaggaagagaaacggacgacgtccattgagaaggagaggcgagcggacggagtgaaaactcgtgtcgcggcaacgcatgcatgtggtgcgagcggcggtgcgcg

SEQ ID NO: 318700 - DNA, 445 bp, Zea mays
attgagaccaactagcaacatagaaagcacaatattgtaccaataatggcagccaaaagattttggctcattatgctccttggtctttctgcaagtgctgctacggcgagcattttcccgcaatgctcacaagctcctatagcttcccttcttcccccatacctctcaccagcgatgtcttcagtatgtgaaaatccaattcttctaccctacaggatccaacaggcaatcgcagcaggcatcttacctttatcacccttgttcctccaacaatcatcagccctattacagcagttacctttggtgcatttattggcacaaaacatcaaggcacaacaactacaacaactcgtgctagcaaaccttgctgcctactctcagcaacagcagttacctttggtgcatttgctggcacaaaacatcaaggcacaacaactacaacaac

SEQ ID NO: 318701 - DNA, 428 bp, Zea mays
tcagaaacacaccaagcgaagctacctagcaacgacttaacaacaatggctaccaagatattagccctccttgcgcttcttgccctttttgtgagcgcaacaaatgcgttcattattccacaatgctcacttgctcctagtgccattataccacagttcctccgaccagttacttcaatgggcttcgaacacctagctgtgcaagcctacaggctacaacaagcgcttgcggcgagcgtcttacaacaaccaattaaccaattgcaacaacaatccttggcacatctaaccatacaaaccatcgcaacacaacagcaacaacagttcctaccagcactgagccaactagatgtggtgaaccctgtcgcctacttgcaacagcaggtgcttgcatccaacccacttgctctggcaaacgtagctgcata

SEQ ID NO: 318702 - DNA, 71 bp, Zea mays
tcggactcttgggaaaaaaaaaaaaaaattaaaaaaaaaaaaaaaaaaaaaagggcaaagggtctaaaaga

SEQ ID NO: 318703 - DNA, 446 bp, Zea mays
caagcgaagcgcactagcaacgacctaacaccaatggctaccaagatattagccctccttgcgcttcttgcccttttagtgagcgcaacaaatgcgttcattattccacagtgctcacttgctcctagtgccagtattccacagttcctcccaccagttacttcaatgggcttcgaacatccagccgtgcaagcctacaggctacaactagcgcttgcggcgagcgccttacaacaaccaattgcccaattgcaacaacaatccttggcacatctaaccctacaaaccattgcaacgcatcaacaacaacaacagtttctgccatcactgagccacctagccgtggtgaaccctgtcacctacttgcaacagcagctgcttgcatccaacccacttgctctggcgaacgtagctgcataccagcaacaacaacagctgcaacagtt

SEQ ID NO: 318704 - DNA, 384 bp, Zea mays
gaacaagttgaaagaccaagttctgaggaattactagctgatgtttcacttggactagggaaggtagagcctcataagactgaacctgcacttgctgctctggttagtatccaacagcatgggttcaaacaagctgaaaatggcaacactgaacctaaaagcatggataacgctaacggcgatgatgacccgatatcaaggctacagctagcggacggtactgccatttcagaagctgcagtgaacgccaagttccttgttgagcacgaggagggttacattccacatctagctgcacttgtgatcgaaaagcaattccataagatggatacagtacagtcgtttctcaccgaagatggaaacctggtgttacgatcgagagat

SEQ ID NO: 318705 - DNA, 439 bp, Zea mays
aactagcaacatagaaagcacaatagtgtaccaacaatggcagccaaaatattttgcctccttatgctccttggtctttctgcaagtgctgctacggcgaccattttcccgcaatgctcgcaagctcctatagcttcccttcttcccccgtacctctcaccagcggtgtcttcggtatgtgaaaacccaattcttcaaccctacaggatccaacaggcaatcacagctggcatcttacctttatcacccttgttcctccaacaatcatcagccctattacatcagttacctttggtgcatttattggcacaaaacatcagggcacaacaactacaacaacttgtgctagcaaaccttgctgcctactctcagcaacagcagtttcttccattcaaccaactagctgcattgaactctgcttcttatttgcaacaacaac

SEQ ID NO: 318706 - DNA, 422 bp, Zea mays
cccactcgtccgggttatcctatgccaagccttcccactgcccatcattccggcattcgcaaagtaaaccctgccacgttccgcacatcatctgaatcatgttctgcagtaaagctcccacctgccagccccttcgataacttcctgaacgctgcctatcgcacccagcccgagctgtgatcgatttacctaagaacaaccctcttcacgagtgctaggctgcagtaccaaagcatagggtactagattatctaatggaacttatctatgacgttgccttagtcgtagtagcgtaactatgtgtatctatctactagacgtctgtaatgtttgcatatgtagttgtaagccgcgagttctgtgtcgcatgtgcagacgactgacttgtatgagaatactgagtatgctcggcactcctgtat

SEQ ID NO: 318707 - DNA, 383 bp, Zea mays
cggattgaccgactcgtcccacgcagtacgctcatgaagccctacactagatggagagaactgtccaaactaatgatcacctaccatggcaaggatttggaattgctcgtaacatccacaacagaacatattgtaagctatgttcatgagactagtccagaacgctctgatgatgcgctggacgactatcatccaggagctgtcaatcctttcgagcaacttgaactgttcataaaggtagactacgaggaatacgacaagcaatgctcactgcattaaagaaagcatagaaaggcgaaatcagctgacagtgctaggctattccatgcactgtcaaggtctacgagctggtgccaaactattgatccaaagtgatcacctgt

SEQ ID NO: 318708 - DNA, 334 bp, Zea mays
agtacgtctaatggacgcgtacgctggattgagtgcaccgtccaaactaacgctcgagcaccctggcaagtactctcaattgctcgtaacatcctccatagaacgtatcggcggccatggtcatcagactcggccagaactctatgatgacgcgctagacgaacctcatgcagaacactgtcagtccttgcgagcagcttgaactgatcatgaaggccgtcaacgtgcaatacaagaagcgcatgcacacgtattatagaccgcctacaaaggcgaaatcagctgacattcctaggctaggccatgcactgtcagagtctacgagctgttgcca

SEQ ID NO: 318709 - DNA, 439 bp, Zea mays
  unsure (1)..(439): unsure at all n locations
aagaaattagcgaatattggaaaaatcatctagagaaaaatgttgaagaacttcgcacatccaaggaaaggtgctttgagaaatccttggattgcgtgaagaaaataaaagctagcttcgccaaattgggtgcctactcttctgaaaaaaacttcatatgaggcgaccccgaaggcgttgttgaatggataagtggagaagccgaaacctttgaagaaattttgagtgattgcggggatgtttgcgcgtttttcggtgcacggggaatttgagccatgttggagaaggctggatgtgatcatattaaacccatagcctaggccgaaactgccttctccgtagatgatacanaggatccttcagccgaggcaaccttaatggatggaaatttttacaatgatgtctgggtgaatggtggccaagagatggcccatgagat

SEQ ID NO: 318710 - DNA, 302 bp, Zea mays
ttaattctcacccaaattaagcaatgggttgtactgtttcagtatcaaaaggtcatagcacaatgtaaagttcttagatcaagatacatactgatggcaataacctctctatagaatcatcaaagttacacctccagatccttagtatcacatgccatatgtataccatttatgatgctagaatgtaccgatataaactatcctaccattcgcagaaaacctaattatgaacctctgtatttacattaactgatttcaatcaaatatatatctaattctatataatactcaaattgttcata

SEQ ID NO: 318711 - DNA, 414 bp, Zea mays
cccacacgtccggcagtggcagggacaatcttgctctcagcatcggctatgcctgatgactggatgagtcttggtggagcacaacgctcagccggatgcggttgctatatgagataatgcggatgatcccactgaagctgctccagcagatgaagaaatgtgaccgcaaaacattgatacggaagacaatgtattatgcaggaaagaggaagcaaggtccaaggaagagcactggcttaatggaacccttagaactagcaagaggaagtattaattttccaacaaatcagaatatggagaaaatgggactcacgctactcctgttcaaccaaggcaaccaatctatatagatgcaacggagtccgaagaggcgaaattgctagcccagaattaacccatactggaatatgattc

SEQ ID NO: 318712 - DNA, 405 bp, Zea mays
cttatttgcaacaacaattaccattcagccagctagttgctgcctacccccagcaattgcttccattcaaccaactagcagcattgaactctgctgcttatttacagcagcaacaactactaccattcagccagctagctgatgtgagccctgctgccttcttgacacaacaacagttgttgccgttctacctgcacgctatgcctaacgctggcaccctcttacaactgcaacaattgctgccattcaaccaacttgctttgacaaactcaacagtgttctaccaacaacccatcattggtggtgccctcttttagattgcttatgagttatagttcaataatgaagttttttggatgatgtttgtggcgtcccagaaataagaaagtacatttctagattctt

SEQ ID NO: 318713 - DNA, 326 bp, Zea mays
acgacccgtactgcgagcttcactggctcatacaacgacggatactacgaggtgttcggatagctgtgcacatccctatggacgactcttacgacactgctgataacgatgttcatactgatcttcattggaatggtcactgccatctacaacgcgttcaactactgatgtcaattattcggcacgctgttctttaagctctggttgacctttcatgtgatcgcgcatctttacgctctcctcaagggtctgaacaggacgccgaccatgacgcctgccattgccattgtctggtctatcatcctgtctctgatcttgttgctgat

SEQ ID NO: 318714 - DNA, 371 bp, Zea mays
cccgtttaaaaaaaaaaaaaaaaaaaattaaaaaaaaaaaaaaaaaaaaaaggaaaaaaggaaaaaaaaaaaaaaaaaaaaaaaaaaaaaaaaaaaaaaaaaaaaaaaaaaaaaaaaaaaaaggccagccgttttaaaggttccaagtttacttacccttccttccaacttcttaacttttctatagggtaccctaaataaaatccattggccgtatttttaaaaccttttaactggaaaaaccttgcctttccccaatttaatccccttgctccaaatccccttttcgccagttgcattattaccaaataggcccataccattagcctttcaaaaaatttgccaaacctgaatggcaaatggaacccccc

SEQ ID NO: 318715 - DNA, 197 bp, Zea mays
cccacgcgtccgcccacgcgtccgactagttcttagatcgcgagcggccggtcgcccacgcgttcgcccacgcgtccgcccacgcgtccgtgtcgttgggcaaggtctagttcggtgttgtgtatggaacggtcgtcactgagtcatgcacgatttggtatccgtgttgtttatgttcaccggtttgaggaactctc

SEQ ID NO: 318716 - DNA, 413 bp, Zea mays
cccttgttcctgcaacaatcatcagccctattacagcagttacctttggtgcatttattggcacagaacatcatggcacaacaactacaacaacttgtgctagcaaaccttgctgcctactctcagcaacagcagtttcttccattcaaccaactagctgcattgaactctgctgcttatttgcaacaacaactaccattcagccagctagctgctgcctacccccaacaatttcttccattcaaccaactggcatcattgaactctgctgcttatttacagcagcaacaactactaccattcagccagctagctggtgtgagccctgctgccttcttgacacaacaacagttattgccgttctacctgcacgctgcgcctaacgctggcaccctcttacaactgcaacaatt

SEQ ID NO: 318717 - DNA, 366 bp, Zea mays
cgctcctggaggtctcgctgctcagcagcagtccactcgcgcagcggagggcggccaggatcttgcgctggttcaaggaggaagggccgcagagcaggacgaccagggcgcgttcggggcctcgcgtggagggagtggcagaggccacgtcgtgccacgacgacgacgtatcctgcgaggcgaagggttgccgggataccaccgtggacgagattgtgaggcgtagcctggataggaacatgaagtctatactgaggagggccacggcgtccgtggacctgaccaatgttaagctgctcgttacgagccccagctccaagagcttgccttgctgaactcacaatgacacaagtgctcagttttccc

SEQ ID NO: 318718 - DNA, 428 bp, Zea mays
ctagcaacatagaaagcacaatagtgtaccaacaatggcagccaaaatattttgcctcgttatgctccttggtctttctgcaagtgctgctaccgcgaccattttcccgcaatgctcacaagctcctatagcttcccttcttcccccgtacctctcaccagcggtgtcttcggtatgtgaaaacccaattcttcaaccctataggatccaacaggcaatcgcagctggcatcttacctttatcacccttgttcctccaacaatcatcagccctattacagcagttacctttggtgcatttattggcacaaaacatcagggcacaacaactacaacaacttgtgctagcaaaccttgctgcctactctcagcaacagcagtttcttccattcaaccaactagctgcattgaactctgctgcttatttgc

SEQ ID NO: 318719 - DNA, 449 bp, Zea mays
attgagaccaacaagcaacatagaaagtggaatccagtagcaacaacagagcaacaatggcgaccgggatattttccctccttatgctccttgctctttctgcatgtgttgctaacgcgacaattttccctcaatgctcacaagctcctatagcttcccttcttcccccataccttccatcaatgatagcttcagtatgtgaaaacccagctcttcagccctataggctccaacaagcaatcgcagcaagcaacatacctttatcacccttgttgtttcaacaatcgccagccctatctttggtgcagtcattggtacaaaccatcagggcacagcagctgcagcaactcgtgctacctgtgatcaaccaagtagctctggcaaacctttcttcctactctcagcaacaacaatttcttccattcaaccaactgtctacactgaaccct

SEQ ID NO: 318720 - DNA, 197 bp, Zea mays
  unsure (1)..(197): unsure at all n locations
ccttggtcttttctgcatagtgctagctacacgcataccattttctccacatatgctcacaagtctcctatagtcttcctttcttcccccatacactctcaccagccggtgtcttcaatatggtgaaaaccccaatgtcttcaaaccctacaaggatccatacangtcaatcgcaagcaagcatctttacctttatc

SEQ ID NO: 318721 - DNA, 436 bp, Zea mays
  unsure (1)..(436): unsure at all n locations
gcaaagcggcagtgcgtagagaggatcgtcgaacagaacagcatgaagatggtcatcggtctcgtcgtgtgcctggctctgtcagctgccagcgcctctgcaatgcagatgccctgcccctgcgcggggctgcagggcttgtacggcgctggcgccggcctgacgacgatgatgggcgccggcgggctgtacccctacgcggagtacctgaggcagccgcagtgcagcccgctggcggcggcgccctactacgccgggtgtgggcagacgagcgccatgtaccagccgctccggcaacagtgctgccagcagcagatgaggatgatggacgtgcagtccgtcgcgcagcagctgcagatgatgatgcagctngagcgtgccgctgccgncagcagcagcctgtacgagccagctctgatgcagcagcagcagcagc

SEQ ID NO: 318722 - DNA, 352 bp, Zea mays
gtgcttggggactgagaggtctagggtctgatatgcatgcccgatgacatcgcgctgggcggggacactcgcactggtgaggcatcggctaagatgagtttcgcctgcctggatgcttgtgctacgatgagcttgcttgataagacgtagttgcttgagtgcgcaatcatgtgcatggaaggacctacggaaactgtctgcatggacatgcccaacccgttcatacactgctgactatcacatgacacgaacgcttggagtgtgtgcttaccgcgttctgatattccatgaccctgatcacatgtctgcatcagttacatgatacatgcgctatgctactaacaaaccctac

SEQ ID NO: 318723 - DNA, 75 bp, Zea mays
attttcaccaatactgtttttcaagttatgtgtttatactggttaacaggtgtttacgagcattcgtatctattt

SEQ ID NO: 318724 - DNA, 377 bp, Zea mays
  unsure (1)..(377): unsure at all n locations
gaaagcagaatagtgtaccaacaatggtagccaaaatattttgcctccttatgctccttggtctttctgcaagtgctgctacgacgaccattttcccgcaatgctcacaagctcctatagcttctcttcttcccccatacctctcaccagcgttgtcttcagtatgtgaaaacccaattcttcaaccctacaggatccaacaggcaatcacagcaggcatcttacctttatcacccttgttcctccaacaatcatcagccctattacatcaattacctttggtgcatttattggcacanaacatcagggcacaacaactacaacaactcgtgctagcaaaccttgctgcctacgctcagcaacagcagttacctttg

SEQ ID NO: 318725 - DNA, 420 bp, Zea mays
gggttggcttctcctccccctccggttcgggttcgggttcgtgaggttctccggggtgcgggttcgtgggtgagcggatcgagatggcggcgtcggatgttgagtaccgctgcttcgtcggcggcctcgcctgggccacggacgaccactccctccacaacgccttcagcacctacggcgaggtcctcgagtccaagatcatcctcgatcgggagacgcagaggtcccgcggcttcggcttcgtcaccttctccacggaggaggcgatgcggaacgccatcgagggcatgaacggcaaggagctggacggccgcaacatcaccgtcaacgaggcccagtcccgcggcggccgtggaggcggcggcggtgggtacggtggtggccgtggaggcggcggctacggcggtggcgggcgccgtg

SEQ ID NO: 318726 - DNA, 266 bp, Zea mays
gcccggattgctccaaaaaacaacacatgagagactccaatagatctcaaatgtgcgtgtgtgccactggaactaacgtggttatctctccccttgaacctgaaccatcaccatcaacttagacgatacatgaaaaacaataggagagtttaagctgttgtcaacgttgccgacgccgatgcaaaacgcacatgattcgcatgatcacacgatgaccgtcatcaggatcttcaagcctgccaatgatacttttttactgcttataa

SEQ ID NO: 318727 - DNA, 396 bp, Zea mays
acaacctgcactgcacgagatgaggacggtgcactccacagctgctggcatttgcatgcttcttctcatggtcatgtcttgcaccctcatgacgacacccacctgggcagcagaggattgctaccagcagtacccgacatgccaggacgccgtgtgcgaggcaaaatgcagtgaggaattccactccaagctctccggtttcaggtgcacgagccgtatgcacatccctgtttgctgctgaacccacacttgacgcggccggccggggatgcgtcagatccaattaatataatccaccaccacccgtgctaaacctggacaccgattagtatgtaggagtaccattaattatatatcctataaagatatatgtaacagctggactggctcttccat

SEQ ID NO: 318728 - DNA, 419 bp, Zea mays
cccacgcgtccgcccacgcgtccgcccacgcgtccgggtgggttggcttctgctccgcctccggttcgggttcgggttcgtgaggttctccggggttcgggttcgtgggtgagcggatcgagatggcggcgtcggatgttgagtaccgctgcttcgtcggcggcctcgcctgggccacggacgaccactccctccacaacgccttcagcacctacggcgaggtcctcgagtccaagatcatcctcgatcgggagacgcagaggtcccgcggcttcggcttcgtcaccttctccacggaggaggcgatgcggaacgccatcgagggcatgaacggcaaggagctggacggccgcaacatcaccgtcaacgaggcccagtcccgcggcggccgtggaggcggcggcggtgggtacggtggt

SEQ ID NO: 318729 - DNA, 423 bp, Zea mays
ggcgcgggcaatggggtggttgaagaagagttggacgacgacgacgatttcatcacggatgaggtgaagcggaggctcaaggagctcaggaagaacagcttcatggtgctcatccccgaggacgagtgcgccgaggtcgaggaggatggcgacgaggaggaagggggcagccccagggagtggctggagtcgggtgtcggtgacggcttcccgctgtgtgggttcgattcactgtatgataagtactgcgagagtatgctggtgtttcataagatgatcgcacagctcatgaaggatccagagtcactgaacatgtccaaaaagtctccaagatcagcatcaaaattggtgtctaccctgcgcaacctctcattcaaaagaaaagatgagctcccggaggattgtgaacaacttcaacaacag

SEQ ID NO: 318730 - DNA, 376 bp, Zea mays
aaaaaaaaaaaataaaaaaaaaaaaattttaaaaaaaaaaaaaaaaacaatataaaaagagaaggtatactaaaaaaaaaaaaaaaaaaaaaaaaaaaaaaataaaaaataacaaaaaaaaaagtgcactccccttaaataaccaaagtttactacccctaaaatccaacctttacccatttttatagcctccccaaaattaaatttattgcccgctttttaaaaacctcatcaattgaaaaacccttggctttcccaaacttatcccctttcaaaaaaatcacccttttcccaacctgcataatctcaaaaaaccccccccccattagcctttccaacaatttgcccacttcaattcccaacatggcacccccct

SEQ ID NO: 318731 - DNA, 462 bp, Zea mays
gggccaatatcaaagcgtgtaaactcgaatataccagtcacttcaatgccatagggtgccgcatgacagcaacataagaaggaactaacaagctggcttcccaccatacactgggcaccttcgctgcaatcggctactccttggattctaacgagttatgacatctactgaggaatcccgctttacctcgttatgccatatttcgtgaatttatctctgcttggaaaagccactttgggtgccaatcagacacattggcacgggaattcacaacatcggatttctatcctggccatcactttcacttgtcgactgaaatttcgttcccactgtcaatgaacaatcctgaagaaaggttagctgacgccgggtcaaagaactctgcagcagtcccccgagaaggcaaagagagatgtgagcttcaaccaaaatccaccaggaacggttccttatacagcaatg

SEQ ID NO: 318732 - DNA, 416 bp, Zea mays
ggcaaacctttctccctactctcagcatcaacaatttcttccattcaaccaactgggtgcattgaaccgtgctgcttatttgcagcaacaactattaccattcagccagctagctactgcctactctcagcaacaacaacttcttccatttaaccaattggccgcactgaaccccgctgcttatttgcagcagcaaatactactaccatttagccagctagctgcagcaagccgtgcttacttcttgacacagcaacagttgctgcctttctaccagcagtttgcggctaaccccgcaaccctcttacaactacaacaattgttgccctttgtccaacttgctttgacaaacccagcagcctcctaccaacaacacatcattggtggtgccctcttttagattgcttattagttgt

SEQ ID NO: 318733 - DNA, 351 bp, Zea mays
tcgacacatacacccacccattctcttttatgtcagactaccaacacttgatgccagtgcattatccgtgattaggctcattgtcttgcatgagaatgcacctcctccgtccattatctgagacatctgacttgatcctagtcgcatccattacacattcccctcacagctgttaaaacactgaacaaagaacacccaaatatgaacggctctttgctacaacacacatctgactccagtttctatctacttcatcttatcctgattcagcatcactcctatggacatttaaccatacaaactatcttatcatacagctaacataatatactacctgactagactcatata

SEQ ID NO: 318734 - DNA, 226 bp, Zea mays
cccacgcgtccgcggactcgttggatttttttaatttaatataaaagctaaaccagagcaggttttaaatattattgacccaacaatcttaacatacactacttagcacttcacaatcgaatatctcaatactcttatatacatcctcactctagcatctaaattatccatattcctatattactaacgactctatacacaatgctatttacactattaatcattt

SEQ ID NO: 318735 - DNA, 424 bp, Zea mays
caactagcaacatagaaagcacaatagtgtaccaacaatggcagccaaaatattttggctccttatgctccttggtctttctgcaagtgctgctacggcgaccattttcccacaatgctcacaagctcctatagcttcccttcttcccccgtacctctcaccagcggtgtcttcggtatgtgaaaacccaattcttcaaccctataggatccaacaggcaatcgcagctggcatcttacctttatcacccttgttcctccaacaatcatcagccctattacagcagttacctttggtgcatttattggcacaaaacatcagggcacaacaactacaacaacttgtgctagcaaaccttgctgcctactctcagcaacaacagtttcttccattcaaccaactagctgcattgaactctgcttct

SEQ ID NO: 318736 - DNA, 138 bp, Zea mays
ggccaggcttcgccatgtcactcagttttctccgttagttatttccgctgcattaaagtttatggttattatttctgaaacttcgataatgtaatcactaatgatacttattaaatttgtggtattatgttttattgt

SEQ ID NO: 318737 - DNA, 414 bp, Zea mays
cccacgcgtccgcccacgcgtccgcggacgcgtggggatcagcaaagcggcagtgcggagagaggatcgtcgaacagaacagcatgaagatggtcatcgttctcgtcgtgtgcctggctctgtcagctgccagcgcctctgcaatgcagatgccctgcccctgcgcggggctgcagggcttgtacggcgctggcgccggcctgacgacgatgatgggcgccggcgggctgtacccctacgcggagtacctgaggcagccgcagtgcagcccgctggcggcggcgccctactacgccgggtgtgggcagccgagcgccatgttccagccgctccggcaacagtgctgccagcagcagatgaggatgatggacgtgcagtccgtcgcgcagcagctgcagatgatgatgcagcttg

SEQ ID NO: 318738 - DNA, 418 bp, Zea mays
gcccacaggacccaacgagccttgtaccgatccaaggagccatccacctttagctggtcttgaagatccatttcccggtgacccctttggcttgtctgtgaaggatcttgctaccaggatccttctcacgtggtgtgatagctccgagccgctgtacactcttcgcctgcttgcctccaattccccgacctccaccttgcatgccttgaccgctgctacctcatctatcacttggtgtcaccgccttggccacctcgggcctgatgtgatgtctaagttgtctagcagttctgtcatctcatgtagtcggggttcttttgagcatttgtgtcatgcctttcagttaggtcaacatgttaggctcccttttccctcctcttctagagcaacaagcaattttgatctggttcactgtgat

SEQ ID NO: 318739 - DNA, 375 bp, Zea mays
cccactcgtccgcggactcgtgggttattatcacgcacgtaatctaagcatcgaaggcgagtgcgtgcgtgttgggtgggggtacgcgcatcgcggtttgacgcgcgatgcattgataataattcgtgccccgaggtaccaataagcaacgatgagagaagcattccaccttgcatttacactccccttttaggcttattgagcccaatccacatgtgttgaggtggattgagggtgtttaacgaggctttagggcttttgaggtggattggaggtgtttaatgaggctttagggttttatttggtttgaaagggattagagtggattaaatttccttttatacaaatttgtgtacgagatctaattcttcttaa

SEQ ID NO: 318740 - DNA, 418 bp, Zea mays
gtgaaaacccaattcttcaaccctacaggatccaacaggcaatcgcagctggcatcggacctgtatcacccttgttcctccaacaatcatcagccctattacaacagttacctttggtgcatttattggcacaaaacatcagggcacaacaactacaacaacttgtgctagcaaaccttgctgcctactctcagcaacagcagtttcttccattcaaccaactaggttcattgaactctgcttcttatttgcaacaacaacaactaccattcagccagctacctgctgcctacccccagcaatttcttccattcaaccaactagcagcattgaactctcctgcttatttacagcagcaacaactactaccattcagccagctagctggtgtgagccctgctaccttcttgacacaacc

SEQ ID NO: 318741 - DNA, 391 bp, Zea mays
accaagagtgtcatactaaacatatcttcagatcatttaattgcatgcactaaataggttcaaactggatcaatatcacgaaaggacgcatcatctttgccctgtcattatgcattctaattaggcacatgtgcactctgaattccttaggctatgctgcgaggtacagctactagactggacatacgctctagttatggacctgtaactgagctcagcacaatcagagcgttagcagctgaatgaaactgaacaggccgtcagcgatctgtccttaaagctgatgctcatataatgatgctgatgcgaccttaacactgacacaggataaagcacttaagctgaaacctgtaccagacactcacaatgtatgctgcatagatagctagct

SEQ ID NO: 318742 - DNA, 419 bp, Zea mays
gttcgtgtaaatgctaatgatgaagaggatggagaggatatgacatatgtagagacggcaaggcgttctgttgactcaacatcatctagctacaagaagcggaagaaagagtgtataggaaagatgacttcatcaagtgacctgttttttgatgtgttcaatgaagtgagtggtgatctcaaggttgccaccatgtcaattggaaaaatggctgcaagctatggatcgcgaggcatccaacctagagaaggcaagagatgaggatacactgcacaatctaagagagaaggcgatcaatgaggtactgagactcgaatttactggctcagaagttatcaaagcatctggtgtgtttgttaggatgccagatcaaatggcgattgcgtttgcacttccagaaccactgaggagggaataca

SEQ ID NO: 318743 - DNA, 87 bp, Zea mays
aaatgatagattctaagaatattctgaacatgctgccacctaatcaaaaaaattcatgtggaacatcataaggaataactgttgctt

SEQ ID NO: 318744 - DNA, 337 bp, Zea mays
gatcaaccgaatggaggagggatgagtgtccctacctgaaagttttcccacagatgggggcaaaaagccagaaatagagggtatcggtataatgttctaatagtatactccatcacaaaaaatgtgcacttctatttacattgctttaagtcaaacaatcttcggttttaccaacttttttactacaaatatataaaagttatatgataccaaataagtaccattaggttcatcatagaatatagttccatcgtatacttatttgtaatattaagtgttgatattattttgacaaacttagtcaaacttaaaatagttatacttgcaccagatctag

SEQ ID NO: 318745 - DNA, 266 bp, Zea mays
agacccacgcgtacacatcgcctctcacttgcacagatacatggacaccgcgccgtgaaacaccatgtgtcgagctcggtccatgctccagtctgagctcggagttctgcgcacccatctcccccggctccttgcagctcggatccctgcacgtggagtcttatccatagccaagatcgttcttgctcgctgtcgatgcctaatacgacgtcagctatcgctacagctatggcgctatatcgatcaggagtccgtatactatgcgc

SEQ ID NO: 318746 - DNA, 246 bp, Zea mays
tgcactcgtacgcagactcgtggactaaaattgaaccaagtcaaaaaaaaaaaaaagaaaaataaaaaaaaaaaaaaaaaaaaaaaaaaaaaaaaaaaaataaaaaaaaaaaaaaaaaaaaaaaataataacaaataaaaaaaaaaaaaaaataattaagaaaaatctgaatacaaaatacaaaaaaaatacacatcagattaagatctgatggatcatatagacactatgaatgacgaagaaacc

SEQ ID NO: 318747 - DNA, 415 bp, Zea mays
cccacgcgtccgcggacgcgtgggtctggcttatcgagttgcacaagtagaggagggggcggaaaagaaagtagttgcaggatcacattagcactgacggccatgctgtctgcatcgtttcccgttgtcgtctgcaggatcgccatcgccgtgctcatagtttctaccctgtcatcctatgcggaggcgaggtactactgctacgccccgtgcaaggactgcccgaactgcagcagctggtgcaaggggaaagggtaccccaagggcgggcggtgccacccgaaggacggcggcggcgacatcgtgttctgctgctgcgacagggcagacgtcatgaagctgctagtttcagcagatgcgaatgcgattctctgatggactggcaaacaaataaacggggctggacgcattgaga

SEQ ID NO: 318748 - DNA, 450 bp, Zea mays
accggttcggaatataccgtcccaagcgtccggtgacgcgtgtgcggacgcgtgggtttgagctttcagaaccacacctagcgaagcgcactagcaacgacctaacaacaatggctaccaagatattatccctctttgcgcttcttgccctttttgtgagcgcaacaaatgcgttcattattccacaatgctcacttgctcctagtgccattattccacagttcctccctccagttacttcaatgggcttcgaacacccagctgtgcaagcctacaggctacaacaagcgcttgcggcgagcgtcttacaacaaccaattgcccaattacaacaacaatccttggcacatctaaccatacataccatcgcaacgcaacagcaacaacaatttctaccagcactgagccaactagctgtggtgaaccctgtcgcctacttgcaacagcagt

SEQ ID NO: 318749 - DNA, 386 bp, Zea mays
ccggcgcttacgcctacgcctccgccttcgcgtccgatgcggctgacgggacggtggggggctttttccatgaagcaacgattgacgttatctattgtagcttaccagcactcttgtgacttgtcacctgtgttagaataaccgtagtacttagtgtatgtagcaacgcgtagcatatatatatatatatatatccactaatgtctaattgaaccgtagtataactgccctgaatttaactagaacattgtatatacctggaataattggagcttgagtctcgaaccaggagttatccgcacataaactaataatactataagtatctaatcaaattaagcttacctaataatcagcactagtaccttaatgttcgcgttatttca

SEQ ID NO: 318750 - DNA, 167 bp, Zea mays
tccacccatacaccccttctccttcccaacctctcaaatcaaaaaccaccgaaataaaaaaacattccaaacggaccaacaaacgaccccaaactctttcatcaccttcttcaccaatctctatcgatccaccctccttgcccatcacttccatccccaatttccct

SEQ ID NO: 318751 - DNA, 238 bp, Zea mays
acagcaaactagcatagcaacgtttaaatcttaaaaaatccagtccatataattcactggatttttctcccatgaaaaagcaaacttcagctaattatggcctaataaaggctgtcatgcctactgctggggagtatgtataccaaagatcaatgagccaacctttcttatatgtcaagcctgttgaacatcatgcactaatactatcaaaaactcttaccattttcaaattaatata

SEQ ID NO: 318752 - DNA, 415 bp, Zea mays
  unsure (1)..(415): unsure at all n locations
acccactcgtccgcttggggaaggggtggttntaggagtcatacactgcatggcagtggcaatggtagcaagagcagatgttatcgcagtagtcgcttggctaagttagttgattatctccatagcttgaatgaaaacactgatgagttagatgtccatctcattcttttgtctttagacaaacaaattacaccaagcttgcagcagccacacctttgctgtcggccaacattgtctgtgaagcatctttgtgaatatgttgctcatcagacacctttgctggttgaagaagttgagatattggcaattaaaggaagctgcagtacagtttgtgacaagtcatttgatgagacttcattctctgatgagctaactacgcttggtatagatcctagccaagatgaactggaaactc

SEQ ID NO: 318753 - DNA, 268 bp, Zea mays
catccatgttatggcaactgagccatccaaagatgcgacacaagcagaagaaccaaagacactgccagatgcctggagaagtggtggaagtggaagacatggtggaagtgtgggacatggtggaagctgtagacactgtttaagcattagacatgttgatatgctggggacatggcatgagtacatggcttatgatgcaaatgctactgtctaaatgacatcaaatgtaacttaaaataataaaacacaaacatgaacttaatacact

SEQ ID NO: 318754 - DNA, 348 bp, Zea mays
gtctgatcagaactaactcgctcgtccatgttcagctcagctactacaattcctcatcaggttgtgagccattaccgaccaatgacgaccaaccgctccatgtccatgctcttctactgcactcacctgactagcgacaccatctccgacgtcatccaccggaagccctcccgcgctagaaccgtcctatttgtcacctacacgcctaactccttcataaacgtcctcacctcatgctctgtcactgttgagcatccatctgccatatagctgcacaacaacgcgtaagtatatatatattgatgtaacagattagcttactgctgctatcgtaactaattgatccat

SEQ ID NO: 318755 - DNA, 404 bp, Zea mays
  unsure (1)..(404): unsure at all n locations
gcaaccggtccagcactttcacgctcagctccagcaatggctgcctccaccatggcgatctcctccacggcgatggccggcacccccatcaaggtgggctccttcggcgagggccgcatcaccatgcgcaagaccgtgggcaagcccaaggtggcggcgtccggcagcccctggtacggccccgaccgcgtcaagtacctcggccccttctccggcgagcccccgagctacctcaccggcgagttccccggcgactacggctgngacaccgncgggctgtccgncgaccccgagaccttcgccaagaaccgcgagctggaggggatccactcccgctgggccatgctcggcgcgctcggctgcgtcttccccgagctgctctcccgcaacggcgtcaagttcgg

SEQ ID NO: 318756 - DNA, 242 bp, Zea mays
atgcggaggccacaaaacatatgtacccaaacttatcgatctgcgcatctccccaccatccatcgtgcaacgatctgattcaaaagcagacatcaatggctatcaactgctgcaacgtcaacggcaacggcaaggctgctccttctgatatggatgtgcctgatatcaagttcaccaatctcttcatcaactgctagttcgttaactcctccttcttcaagacattttataccattgaccca

SEQ ID NO: 318757 - DNA, 179 bp, Zea mays
actacctaattacccagacgaccgtattgagcatgctagctatcacagcagtgaaccggcacactcaaaaatcactcctcattacactacaacatctccatcttcaccgaaaccgcatggaaccactcttggatattgtagtacacgatatcaattctaccaatctacttctcaacaca

SEQ ID NO: 318758 - DNA, 330 bp, Zea mays
gttggcttctcctccccctccggttcgggttcgggttcgtgaggttctccggggttcggtttcgtgggtgggcggatcgagatggcggcgtcggatgttgagtaccgctgcttcgtcggcggcctcgcctgggccacggacgaccactccctccacaacgccttcagcacctacggcgaggtcctcgagtccaagatcatcctcgatcgggagacgcagaggtcccgcggcttcggcttcgtcaccttctccacggaggaggcgatgcggaacgccatcgagggcatgaacggcaaggagctggacggccgcaacatcaccgtcaacgag

SEQ ID NO: 318759 - DNA, 424 bp, Zea mays
  unsure (1)..(424): unsure at all n locations
gttggcttctcctccccctccggttcgggttcgggttcgtgaggttctccggggttcggtttcgtgggtgggcggatcgagatggcggcgtcggatgttgagtaccgctgcttcgtcggcggcctcgcctgggccacggacgaccactccctccacaacgccttcagcacctacggcgaggtcctcgagtccaagatcatcctcgatcgggagacgcagaggtcccgcggcttcggcttcgtcaccttctccacggaggaggcgatgcggaacgccatcgagggcatgaacggcaaggagctggacggccgcaacatcaccgtcaacgaggcccagtcccgcggcggccgtggaggcggcggcggcggctaccgtggtggccgtggaggcngcggctaccgcggtggcgggcgccgtgatggcg

SEQ ID NO: 318760 - DNA, 315 bp, Zea mays
atccattcgacgggtacagcgtagacagtgacccacataggctcctgctgatcgaggtcttcatgtgcgcttcaacagcgaccattatccactagtgcgggttggattctgatgatagctaggttggggagcatcggatcatgtccagcgcggagttgaacgtgtctgccggctccggccgcagcatcatggggcagatcatcacactacttctgtgcaaaccgcgaacacgaggtagcagacggagaggtcagcgatgaacaggaaggccaggagcggctgcagcgccagctgagcctctaccatgtaccagat

SEQ ID NO: 318761 - DNA, 379 bp, Zea mays
aattgatgagattctgtattggcacaatgctgttctgagagaactgagtgatatagcggaggagactaaaaggatacatcagtctggagatttttctgacatagcaggatttaatatgaggctgcaatttattgcagatgtgtgcattttccacagtattgccgaggatcaagttatattccctgcagtggatggtgaattgtcctttgtgcaggagcatgctgaagaagaacggcgattgaataaatttaggagtttaattgaacaaattcaactagcaggagccaagtcaactgtagttgattttcattcagagttatgctcacaagctgatcaaataatgcagaaaattgagagtcacttcaatgatgaggaatta

SEQ ID NO: 318762 - DNA, 374 bp, Zea mays
cctaccgatgcttgttttctagtacactgcaagtagcactttcttgcacacgtgaaatttctggtgaatgaacgaccatggaagaagcaactatttagcagtagaattggttcaaatcaagaccccgtatagcagaggattggaattgaaaacacaagcaaacattgaattgaaaccatctctgtgttatcacatgtttagcctcaccacatgcatcttctttctactagcatgcgcacaagcaccggtctatgtttgcctcaccacatataggcctggcaagattcgcttatattacgcatgcctgagctaaaaaaatgcatgacgtgagaagctctccaagcggacatggggatgaacaacatgtcagcaca

SEQ ID NO: 318763 - DNA, 365 bp, Zea mays
cacacccaaaagtttcccactgccctggtcccccattcaattcttccaactccgccgcttcgcctcggtccgtccgccgcccccatggcgtccgccgccgccacgaccacctccgcccccgcccagaacctcaatccccttagtatcaacatcaagctccccccatggctcagcgggctgcgctgccccttcaccttcgtctgcccgcccccgcccccgcctccgcctctgccgccgcctcctcccccgctgccacctacggaacccgtggtcccacggtcgcggaggttaccaagcctgcgggtgaccacggagtacgatagcgaagagggcgtgtttgtgaacaaggtgtcgtgcaagcttgc

SEQ ID NO: 318764 - DNA, 199 bp, Zea mays
accggagagagaacccgcttcgaatgcacaaacttctgtaaccccacttacatgagcgattgatctaccgtcatcattgactgcgctggatccacacccaaagactaccagaacagcacgaaactgaaaaggactaaagcttttaagtatactcaaccaattacaccagcactaatgaaacaaatgcctgatgatttct

SEQ ID NO: 318765 - DNA, 87 bp, Zea mays
gtcctactattttgtgaagcgtttggatcgtgatccattaccacctcacctttggacgtggacaggatatgaagcgaagtttgtttg

SEQ ID NO: 318766 - DNA, 171 bp, Zea mays
caccgtcttattctataccacattcagactgtcatttaaaaaaaaccggaactgtaaatactacatctaaacaccaactactaccatcatccactataactttctatacgaaataaatttaatcacttcctcctttacaacgcaaactataaaaccctactaacccaactt

SEQ ID NO: 318767 - DNA, 382 bp, Zea mays
  unsure (1)..(382): unsure at all n locations
cagaggtgggctggcttctcctccccctcttaccaagtcctccttgggttagggttccgttagggttttgtggagggcgatggcggcggctgatgtggagtaccgttgcttcctcggcgggcttgcctgggccaccagcaacgagtcgctggagaatgccttcgccttctacggcgagatcctcgactccaaggtcatcaccgaccgggagacgggaggtctcgcggcttcggcttcgttaccttctcctccgagaactccatgctcgacgctatcgagaacatgaacggcaaggagctcgacggccgtaacatcaccgttaaccaggcccaatcccgtggcggtggcggtggccgcggtggctacggcggcngtcgcggcg

SEQ ID NO: 318768 - DNA, 400 bp, Zea mays
  unsure (1)..(400): unsure at all n locations
cgtgcacctcgtcctcggtcgtcgccatggggaggtcctcttccacggagaagctggtgtgcttcgtcctggcggttctggccgtgctgtccccgctgtacatcgaccggcggcccgtggcggagcgagaggaggaggacgaggacgacggcggcggcccgtcggcgctgtggctgccggcggtgctcctcgcgctcatcctcgccatcaacgttacgtgcttcatggaccggcgcgtggtcaggttcgacccttactggatccaccgcgtgtgggggtcctccggcggcctcctcgccatgctgctgctcctcggcttcgtgctcaggtgcaaggcgtncctgctgtataccagctactaggtggtagctcgggcggtcgtcgtcatgggtcttttttt

SEQ ID NO: 318769 - DNA, 414 bp, Zea mays
gcaaccggtccaacactttcacgctcaggcgctcagctctagcaatggctgcctccaccatggcgatctcctccacggcgatggccggtacccccatcaaggtgggctccttcggcgagggccgcatcaccatgcgcaagaccgtgggcaagcccaaggtggcggcgtccggcagcccctggtacggccccgaccgcgtcaagtacctcggccccttctccggcgagcccccgagctacctcaccggcgagttccccggcgactacggctgggacaccgccgggctgtccgccgaccccgagaccttcgccaagaaccgcgagctggaggtgatccactcccgctgggccatgctcggcgcgctcggctgcgtcttccccgagctgctctcccgcaacggcgtcaagttcggcg

SEQ ID NO: 318770 - DNA, 276 bp, Zea mays
aaaaaaaaaaaaaaaaaaaaaaaaaaaaaaaaaaaaaaaaaaaaaaaaaaaaaaaaaaggggaaaaaaaaaaaaaaaaaaaaaaaaaaaaaaaaaaaaaaaaaaaaaaaaaaaaaaaaaaaaaaaaaaaaaaaaaaaaaacaaaaaaaaaaaaaaaaaaaaaagtgtaagccatttaaagctcaaaattaaactacagggtgctaacaaagcaaaacttttaaaaatacacaactaaaaaagaatccattaaatgcattataaaatatctaacctg

SEQ ID NO: 318771 - DNA, 263 bp, Zea mays
ggccggcgtctaatatagtgagcgcaatcgatgcctacgaactaggtctcaaagctggggtcgctcaacttgtactacagaggcgaagcttgagggcttacgcatgaacatgtcaaaggtcgcttcagagtatcaaagctgacagggataagttgcactattagcgttgtacccgtacagcatacgatcactaatatcgaacttggcattgtccgtaatatactacgctgaagctcgataggagagtctaccaggagtaccat

SEQ ID NO: 318772 - DNA, 297 bp, Zea mays
ctcctactaataatataatgatctccattaatgcctacgaattagaactcaagtctttgggcactcatcctatactacttattctaatctttaccccttacacattaacatctcaaagttcacctcacattactaatacttatccatataagtttaactataagccttatcctgtatagataccatcacttctatcaaacttatcattatccgtaatatactactctgaatatccatataacaatctactattactactattcatctccaatcaacatcaacatcttatcttatcaa

SEQ ID NO: 318773 - DNA, 405 bp, Zea mays
  unsure (1)..(405): unsure at all n locations
gaaagaaaaaaaatcatctgaagaactacgggccattattaaaaatatcggtgacattggaaaagagatagaagaagatggacgtaggatcaatcaactgagaagtcaaattgatgatatacgacggcgccaacaaaacaaactaacggccttcggaggagatagagttccgagcctctataaatcagtagagagacacatgagtaaattcaaatgccctcctattggtccaataggatatcatctgcaactggcaagcgattcctggtctgttgcaattgaatatgcattanggaggttattagatgctttcattgtctcatgtcataaggattcactcgttttacgagaatgtgcaaaagaagtgaactaccgcaaccttcaaattattatatatgacttcac

SEQ ID NO: 318774 - DNA, 346 bp, Zea mays
cacgttccttcggtaaattatgcactaaatactgtacctgatccttttatgggaaaagggggtcattaaccacattcaaattctactccacctgatcgagaaacattcatacgacctcaatatgagctctagcacttactccagcctagctcgcctattgattctgatcacgctacccactctcgataacatccctgatacgctcctcaaccctatagctctaatactcaactcggcatcttcgagtacattggagactccaatgtcaatgacactcaacatactaatctagccatccacgatatgcccagctttgacccttatcgcgcactgacacttggccaac

SEQ ID NO: 318775 - DNA, 281 bp, Zea mays
gacatatagcggctccaacaagcgctaggccctgctcggtctattctcctctcttaagcgatggcagtcgcagcgcatgcactcggctggtagccggtctcgacagcatagaacccaacttcaatcatgcctgcgctagttccgaactcactcagcacccagtacacgctcgactgtcagtcgattgatatcactgttacgctcattgctgccatcgcacaactgagccgcaactggtgacatccatgctgctggtcaagaactagtcataggaagaatat

SEQ ID NO: 318776 - DNA, 409 bp, Zea mays
tcaagtctcgctacgtagcagtgcaataaaaaaagcagccgcaatggcgagcagcaccatggccctctcctccacggccttcgccggcaaggccgtgaacgtgccgtcgtcgtccgccttcggcgaggcccgcgtgacgatgcgcaagacggcggggaaggccaagccggcggcggcgtccgggagcccgtggtacggccccgaccgcgtgctgtacctgggcccactgtccggcgagccgccgagctacctgacgggcgagttcccgggcgactacggctgggacaccgcggggctgtcggcggacccggagacgttcgccaagaaccgggagctggaagtgatccactcccgctgggccatgctgggcgcgctcggctgcgtcttcccggagctgctcgcccgcaac

SEQ ID NO: 318777 - DNA, 442 bp, Zea mays
ggtggagtcttctgacaccattgacaatgtcaaggctaagatccaggacaaggagggcatccctcctgaccagcagcggcttatcttcgccggcaagcagcttgaggacggccgcacacttgctgactacaacatccagaaggagtcaacccttcatttggtgctgcgccttaggggaggcatgcagatctttgtcaagaccttgactggcaagacaatcacccttgaggtggagtcttcagacaccattgataatgtcaaggctaagatccaggacaaggagggcatccctcctgaccagcagcggcttatcttcgccggcaagcagcttgaggacggacgcacacttgctgactacaacatccagaaggagtcaaccctccacttggtgctgcgccttaggggaggcatgcagatctttgtcaagaccttgactggcaag

SEQ ID NO: 318778 - DNA, 430 bp, Zea mays
ggcgctcccgtcttcgaccaatactgcgatgcggatctcggtgacaacgccatggagcgcgtccagcgtggccccgtcgacatcgaacgcatcgacctccgcaggggtgcgctagctggctgctacggcgagcagtccgcacgcggacacactccttcctccttcaacgacgatttgggtgcctcgctcgactcggtcgccaacagctccgtccatggcggccacggatccgtgctgccccacctcacgcccatctgcgcgggcactagcaggatccctgtgcccgacgaccggaggctggactgcgccgaggatttcgacaccaatcacttggacaaggggttcgagtcggatcccgtccctcttcccgtcgtctacgaccgctacgacgagccgaaccacaacgagatcgttgaggtgctcgcgctac

SEQ ID NO: 318779 - DNA, 180 bp, Zea mays
agcagcagaggcagcgacacgatcgcgagcgcacgcacgtaagcacgttgtcggaagctcaagttagaagaagcaccagtgcctgatcgatggcggcccaggctctcctctccggccggcagctgctgggccgccccgtgcagtcggccgtctctaggtcgtcggcgaggaaagcgccct

SEQ ID NO: 318780 - DNA, 334 bp, Zea mays
acgccataatcaagatatagaacagaaagccgccgctgccagcatacagaattaataagggggggcttctccttggctgcgacgcgcccacctgctgaacacgggccctcaatcgacgcacaggcacgcgcgcgtcgcaccaccacgaccacgaccagatcgctttcatgcaccgccgctcagatgcatcttttggcatgggagttgctcctaacattatggagacattcatcgagcctgaaatgaagacagcatcgcaatatgcgatgtctaaaatatacgagaagcagaagcacttgacagtagagaacacacgtgctactaccgcaagcta

SEQ ID NO: 318781 - DNA, 63 bp, Zea mays
ctagttctagatcgcgagcattcatgtactgtgtattttaaaaaaaaaaaaaaagaagggaaa

SEQ ID NO: 318782 - DNA, 208 bp, Zea mays
ccggctcgacccacacgtgcggcaacttggatatgttgttcacaaacctttttatatatttataggcgtggaaaacttaggagcagctttctgcctcgatccccatgtgcctgggagcattgccaaaagaaattacttacccactggatccgtacagtctgagagcctagattggcctaaatattttcccaaaggaacataaagattt

SEQ ID NO: 318783 - DNA, 366 bp, Zea mays
gaatacccgggcgagccatcctgtgcccccgcggcgatggccaaggcgctgctctactccttcctcctccacaggctgccccgcgcggtcgggagcagccggagcgctgccgcgaggctgctgctgctcccgcctctacggctgcgccgaggccggcgcgccgcctccgcgtgcgcggtgagggcggccctgcacgggctcgactccgtcggcgggccccatctccaggccgcgctggagcgcgccaaggcggcgctatacacgctcgccgacgcagcggtagccgcggcggacgccgacgcgggcgcggtagacgacgccagccaagctgcttcggaagcccagaagaacagcagttgggtcggc

SEQ ID NO: 318784 - DNA, 330 bp, Zea mays
cggacgcgtgggttttgtgtattaaattatgaacactaaaataaattatatgatgaagataattggagatgttgaaaaatcagtttcccttcttaaacagaaataaatattgtaaatgaagggaaatgtaatagaacacccttttcgccacgggtaaaaatgacagaaatgtatggtttgttttaccttcatttctgttacaattaaaacttgttagtctaaacttttacttcttcccaacttaaccctaactctttttttttattttcctttatggactgcattcttaatttctaactggtaaacacttgattggagactttttttaaa

SEQ ID NO: 318785 - DNA, 295 bp, Zea mays
gtagaagaacaccacatgaaccgcatatgttccacgaccaaaggaagaggacgactactgaccaagcagataatgattaccagtcacttaagctctgatccctggtacacatcgatgcgctagaccctctaggagtcgaatagccaccagctaggagagcgtgcaaatgaggccgacgacggcatgttcactgatgcatgcggcgacgcaaactgttagcctgatcagccagctcatgatactgtcctcaactccatatccaatatagcatggactaaatgaacgaatgcactca

SEQ ID NO: 318786 - DNA, 129 bp, Zea mays
cagcatgcagccctcctcctcgtcctcctccgctcacccgcccgaccatcccaactggagccctcccgcgtcggcccccggcatgggctaccccggcaaccaggcccgcaacgggaaccgcagcgccta

SEQ ID NO: 318787 - DNA, 432 bp, Zea mays
gttttgaatttgaatagggtctcttgttttgaataggatctctctttccgagaatcttctggtttttgtagacagaagttgtacttcctagtgctcatctgcacaaatagaaatgattggatcacgtgtcgtttagaaaagatggaataatactgaaacacaccagactgaatcatctatgtgttgcatgacgtggactgtgtcgttcttattattacgcactagcatagctgaactaattctcttgacctcgagttgcctgggtgcctcttcaaccttcatgttcagaatagcatttgttgtgggatatcatctcttatcttggtatatgtcttcagtttcagtctgctctcttggagcagacaaacagctcagagtcctatgttggttggttaaatgtctgcaggatttagtggtggggtatatgggagt

SEQ ID NO: 318788 - DNA, 310 bp, Zea mays
cccaacgtaccattcaactgatgaggtgatccttgtgaaccaacacgttagcccaccagcacttagcggtgatccgagaactttcatggcctgagttgatcatgttgcaaagcttacggtgctgcatgattcctataccgctcattatacagagactgatccaagcaatggcgatcaatgaagctgatattgccgtgacacacacatgtgtctaagtgtagacaaaaatgatgaatgcttgtaggcagatcattatagatcctacgctatgaactgacgcattatgcgctaagccgtgtataggcgtatc

SEQ ID NO: 318789 - DNA, 259 bp, Zea mays
gacacacgcgtgctgctacgtccgcccttttttacttctttttttatcttgtctttagcttcatacttaccggggcttttttcatttttttatgtaaaataaatatccccgaacaactttattacatgcattattacaaagggcctacctaccagtttattaacgtatccaatagaacccttttgctctattccgttaatttattcaacttatgacattcatgcaaaaaacacctttagacaaaaaaaccccgttttat

SEQ ID NO: 318790 - DNA, 260 bp, Zea mays
attgccgtttcaccggcggcggggaggtttcgtgctagaggtgtgccggcagctggccggtgccggctgccaccgtcgacgtcttaacagcctaggactatacgaggggtgcagtcgctgcacatgagctcagagaatttgggctctcctgatgtcatctttcatcagctggacattatcgacgcttgtagcgtcatgcgtcttggcttgagatcctcaaggcttcgttttggaatgcctatatatcctgttaaataatg

SEQ ID NO: 318791 - DNA, 407 bp, Zea mays
  unsure (1)..(407): unsure at all n locations
gggacctcataatttccatcatatcttttattgcgactcatctgancgatcctggaagcaggaatttttttttcttgatgtcttttgagatttattgttgtttttttttaaaaaaagatcattatatctttctcaaattaccaagtgtttgcatagaattagggaaagacatgtagttcacatgcatctgtctttttttctggatgtctctccttacactctctgtattttctccttctttgaagaagggaaaaaattgaaataatcttctatcttggaatggaaatgagggaaagggtggacattgttgaattaaaacttacaaaggctggcttagaactccatttccctttgattcgggccccgctatcttcccaggccccatcaccctgcacccaccccttctg

SEQ ID NO: 318792 - DNA, 400 bp, Zea mays
tcgcaataaggctattagacatgcacattccatctttcgtgatatccacaagtccatatttgaggagcaggtatttgatatggtgatccgggagacgtttaaccagtctcaaggcatcaatgttactgggatgtgcgaagattttctccaattagctattggccaggagtgatcgttgagcctttcactagagctctctggacagaacaataatgcaggaacagtaggacagcttgatcatatggatacaagttattctggataacctgacattcattgcaaacgttaatgatgcctcaaatattgatgccacagggtttcctaaccccaaaagctcacaaatctacctgctgcatatgttccatgaaattcttatgaaactcaaggagaaatctcgtca

SEQ ID NO: 318793 - DNA, 379 bp, Zea mays
accacctagacctacgcatgccgggtcttgccaatcctcctgcattccgaccgagcgagcaaggagagacacgagggcgactgaggccgtcgcatactccttctgtgcgatccgtacgtagcctgctacctagcaatagcaacccgatcagccaatcattgccgtgttcaccaactccgtttccctattacctagatagaccaggccagatgctgtctgcctcaacggatcgacacgacttgagggatggaggactgagaccgtcgattagagtctgagacagaagccgatgcaacaccggagcgactagctgtatgagatgtacatcatcattgacacggatccctgcatcgatgacagcgtggacatcctgatggca

SEQ ID NO: 318794 - DNA, 85 bp, Zea mays
tcttgctactcatcttctctgagttctgccttaattccatcccttccctgcctagaacttgctttagctttaccccatcacagct

SEQ ID NO: 318795 - DNA, 414 bp, Zea mays
ttgatatctccaagaaatgtggatttattcagtgcagtatccagcagctcttcaaatgaccttgaacaaggtgcaaatgtcaggtccaataatgccgagaggttaacattaccagtccaagggccactaaggaaattgttcgctgacatgttatgtcaccagaatatttacttacccgttacatcattgcaagaggcaaatgataacaggaaggaagtcagggttgaatccagtcaagaaactgttagtaatggtttccataggccaaagacaggagagtctgtgatttccattgaaaatggggagtccataaatgatgcccagacacaagaaattactcaagcaataatgccaactggttcttctgtaagtgataaagatgcagaatcacctgttattggagacaatggggca

SEQ ID NO: 318796 - DNA, 231 bp, Zea mays
acataacttcaagttgttggaaattattttcggaggtcccagtgaacaccatctactgggcaccgtgaaatttcacaaacatgcatatatatatgaaaaccactaacatgagcttccttctccacccacacccctttctcacgcacttcacataccatctatagttggcaggacacgccacctctgggctcgtccctggtccccacatcagggccgttctccgtcacatac

SEQ ID NO: 318797 - DNA, 315 bp, Zea mays
gcgtgtaaatcatggcgtcctccgcggtcctcaacgctctcgtcctccgatcgccatgaccgacgctctcgtcctcatctaaccgtcgcatcaccggcgccttcacgagcccgaaccgaccgggctttccatgcctgcgttctgtgcgtcgactcagccttgcgagggcgggtgcagcgcagtcgccgggcgatggccgcgaggacgagtgggggccggagcccgagggcgggtccgctgtcacagcggccgcagcggcggaggcgccgggagcgagagaggtcacggagctcagggctcgagtcaaggacgcgc

SEQ ID NO: 318798 - DNA, 270 bp, Zea mays
cccacgacacgactcgattcccagacccatatccatccatcaatccatccgcagcgggcaggcacacacacaggcttttgcgttggcagggatggacgcgttctactcgaccaccgacttctcctgcacgtcgtcagcgccgtacggcggctacggcggcggttgcgaaggctggggctacgactcggtgaagaacttccgccagatcagccccgtcgttccagacccagcttaagctcgtttaccttaccctatgcgtggcgctggcct

SEQ ID NO: 318799 - DNA, 226 bp, Zea mays
ggctgcgaaggccaagctcagcggcggggttcgggagcccgtggtacggccccgaccgcgtgctgtacctgtgcccactgtgcggcgagccaccgagctacctgacgggcgagttcccgggcgactacggctgggacaccgtgaggctgtcgggggacccggagacgttcgccaagaaccgggagctggaggtgatccactcgtcgtgggccatgctgggcgcgct

SEQ ID NO: 318800 - DNA, 362 bp, Zea mays
agcccacatagcccttccagcaacgcgctatcgaagggttgagagctattggaagcaagtacgtgcatggcgaggtttgcgctcgtggcgtgcgcaaatgtcaccatgcacctactggtcggcgtgagcgcagaagacgtggcgtgcacgatgacgcatgacctgtacaaccagatgctcgtcaatcgacacgacactcactgaccggtccacggtgtctacacctactacgcctatatgcaggccgtcaacatcttcccggtgtttggcaccggctacagcacctgactaactttacaagcgcgagcttgtcgacttcttctgtcataccttccactagactaccggtggcacgacaggtg

SEQ ID NO: 318801 - DNA, 77 bp, Zea mays
taccggtctcggattgacgggacgactccagcgtccgctagatagctcgagatgtctttgtgatttatgcgtatgat

SEQ ID NO: 318802 - DNA, 162 bp, Zea mays
ggacagtgaggcgccgcttgccctgcacatacggccgcggctaggaacccaaaaggccaagaccctgccaaaagctactacacagtacacacacggtacggaatccgggcatgcgagaaagcaggcctaatctcaaggccgatggtgcgagcgctggtttgc

SEQ ID NO: 318803 - DNA, 80 bp, Zea mays
gtcgtttctctctctccggcggctgcgctgcggcttggatcacatactcgtcggagctaccatgattgggaagctaattg

SEQ ID NO: 318804 - DNA, 117 bp, Zea mays
acgatttgtctcgacagttactactaggatttgccgagcgagcgagcttgcgccgtgcgcgattgaaggtgacgagaagttggtcgtcggggccgctgcttactggggcctgggctc

SEQ ID NO: 318805 - DNA, 271 bp, Zea mays
ctctcctctagcgcgcagccactcctttctctctctctggtctgcttccagccgagcagtgccatggcgttactctctccctctgcgcacggcgctcgcttctccctggctcccggccagaatttcttgcggcgcgaagcttgctccctgcgcccgtcccacatggcgctcggccgcccagctgtatcttgctccttgcgctcggatttcctctgctacctggcgaactcgccccagccccagcttaaatgtcttctctgccgtgcgcgct

SEQ ID NO: 318806 - DNA, 157 bp, Zea mays
tcgaaaacagatcaattctaacagtttgcctgtgtagccagcccacccaatcgaagaggaggatagtgtgcgtgaggactcagatgtggaccttgcgtacctgtgtgggtactgtggggaaagctatgctaatggagagttgtggatctggtgcgat

SEQ ID NO: 318807 - DNA, 131 bp, Zea mays
cgaccaagtctcccgtccctttcgagtttcaccacttcatcgacgcgcaactccctgagcttattccagtctaggtctacgatgactacaagctcatggtgtgatatactctttacacctaccgattgatc

SEQ ID NO: 318808 - DNA, 151 bp, Zea mays
atcagcggttgccgcctcatcttccttctctctcgttttggcgcaacttccttgccccgccgccgggcgtctctccaatgtagcggccgggaaagaagagactaccaccagttgggactcgctggtacctggatgtctgcgacatgtgctt

SEQ ID NO: 318809 - DNA, 341 bp, Zea mays
acagccgacgcgcacgcgatcgacgactacggccgtcggatagttagctcctccttgcagctagcttctctagctaataattctagctagccaccaccacctgctgccttagccagagacaaagagagagccatggccaccgtgaacgccacgacgacgactgcagggtccggcaagcagaccgacgcggcgccgtcccctacggcggcagcggcggctgcgtgcagaagcctctccggcgccgacctggccctcaaggtgctcctgttcgcggtgacgctttcggggctcgtcatgctggccaccgtcaatcagaccgagctcgttccggtcccgcagat

SEQ ID NO: 318810 - DNA, 78 bp, Zea mays
gggtagacgagctgagggagcgtgaggtggcggtttaagaagttacggaagcgttgaggctcgaggaggatagattgc

SEQ ID NO: 318811 - DNA, 383 bp, Zea mays
cggacgcgtgggcggacgcgtggggcatgggcagcaatggccttggcttcaggcagggtgtgtggtcaccgcaggcccagggtcgaggcttgtcagggcttgaatggatgatccctgtgaggggtcaatattaaagcaaaggtcaggttcggcttggagggcttggtggaacacctcaggtcactctagaagcttttaagtggtcagtgcattgtttgtaggccggaaggacagctgatatgctccttggtgatgtcctcggtgggcaccagccagtgaggagctctgtggtggggactgagggagttgtttagaggcgtttggaccagtgcggcagtcaagctgtctttctgcagtgaggaggactcaccaaacaacaaaga

SEQ ID NO: 318812 - DNA, 401 bp, Zea mays
cggacgcgtgggggagctgggaatttttgataactgttaaggacatcaactatatttttaaactgaagtgcagttgatttacattcctgtatttgttttggggtgtacaacacagtgattcaatatttttatgaaataaactctatttaaaggtatcacacacacaaaaaaagatgaaaatacacagattcaacaattctcacaaatcctaggaagagaaaaaataaatgtgcatctgggcacatcacagtgaaacttcaggacatgaacaacaaagagaaatctgaagagggtacatttaccagaaggtaaaatatatgttacatttaaagaacaacagaaagttgagtttttcagaagaaataatagaaacccagaatcagatcttcagggtgctgagg

SEQ ID NO: 318813 - DNA, 220 bp, Zea mays
cccacgcgttcggctagccgtacgatggttgacaccggtgacgtcgccgccgccgccgaggcctaggtgcgaccggcgggcagcagcagcacccagccgctggcggtgcgcgtgacgatcgtgacgggcgcgtctcggggcatcggctcggccatcgtcacgcacctgttctgcctcggctcgagcctggtgctgggctacgcggcgcgcgccgactagg

SEQ ID NO: 318814 - DNA, 287 bp, Zea mays
cggcttggtcctctgatcggcgtgtttgcccctgcaaagcccgcccagtctccatttttgtttcccagcccggatctccctgctcgccttgctcctccggcgccgcggatttctgctcgcttggccggccatggtggctgttcatgcctactggcggtggacggttctggtcccggccaccgtcgcgcccagggaaatggtgcgcattcctgtgcccggtcttcttttccgtcgcgtcggtctgtgctctgtcctggccgtcttctctgcctacgatctgtggcgct

SEQ ID NO: 318815 - DNA, 385 bp, Zea mays
cttaggctgttcatccacagtcttcagtgtaaaggggtgagttcgtgctctggcagcaggctgtgtggagccgcgtcaccgtgggactgggcggccatcacacagcctggggccaggtggctgcacctgcacatggggactgggtttggatcgtcagttcccagggtttctgtctgaaacagctgtttgaaggtgcactgtgcagatcgttgtcgacagcgcacttggatggctttcagttgatccatggagccatgcgtccatccctacgacccatttcagagcatttacatcaccccccaaagaagcccccatcagcagtaccctcccatcttcctgggcaccactaacccactttctctctctctggattggtctgatctag

SEQ ID NO: 318816 - DNA, 183 bp, Zea mays
gtcagcagcttctgcttgctctggggggtaggagagagagagagcgagagagagagagagatctagtagagaggctagtatgtggtactcgaactaagatgttggctgagttcagcgggcgagtggtggaggtgccggcggagctggtggcggcgtgcagccggactccgtcttccaagacga

SEQ ID NO: 318817 - DNA, 212 bp, Zea mays
atttctctcgaggtctgcacactcgtctgctaccgagaccgttggcggccatcgtcgcacacgctgggctgatgctaagtagcgagggtcacacgtgctactactacccggacgttgggacgagacggaagctatgcgccgggagaaacgtcttgcgagagaccgccccgcgtgacgcataggctgattcctgccgtcacggcaagaggaag

SEQ ID NO: 318818 - DNA, 282 bp, Zea mays
gctatttggtgcttgaatgtgactgttctttttactttttgctaagccttatttaaagtttgtataccatggaatatgtaggatttgtccagtcattttagtgctgagggggtctttgtgtttttgttgcagttttcctggtggctcgttttgtattgtaagagggcactcactgacataagtactaaggcactaagagaaaatacacacagataagtatttataagatgcttgtgatccatagcatgatttttgtttcgttttgtaagagaaaaaaattac

SEQ ID NO: 318819 - DNA, 216 bp, Zea mays
ggaaatattcgtgctctcccttctcggggtgagcttaactctgaacatgtacttcgcgagcctgaagtactacgtccccaacgttcgtcactaccgtggtgaacaccatcgcctcgattacgttcgtcatcgccatcatcctcaggatggagatcgtggacgtgaattgcctacgcagagtctccaaggtctgcatgaccgtggtgtaggatcttc

SEQ ID NO: 318820 - DNA, 400 bp, Zea mays
atttcagaatctctctaggggcacaaggactcaaggggttcagcctccattttcaaggaaaggcagtatggtctcagttctgagtggcaggaccaccctgagcttggagtgttgagaagcaagtggtggcaccttctggtgtcattaagacttaatgagcccatcacaggtcagggaatggaactaggagtcgggtggaggtaatcgagtggggtgaataatgcctgctgttcaacagcagctgcccagcgtcccaggggactcccatgggccactttaacctaaaggggaactgcctttatgggcctgtcgtgtctcatcacagcacatttctaagttggaagagcctcaacttccacggctaaatctgaacttactgtttgctcagtgcttggttcca

SEQ ID NO: 318821 - DNA, 105 bp, Zea mays
gcttaacattggatgtctgacatacggtgagaaagctatgaacttatcagaatctgtagatcaagcggatgagatcacaaaggcactgtctacgagttcagaaca

SEQ ID NO: 318822 - DNA, 101 bp, Zea mays
cgtgaggcggttatcaaaggcatggaccataagggtttgcctataatgttattcagcaccgattatgcatcatacgaagccagtttcgatgctggtgtgcc

SEQ ID NO: 318823 - DNA, 104 bp, Zea mays
tcgcgaaaagttaccagccttagaaaaacccgtggtggcctcttgtgtccatgttctgccaggggcggcacataatgctgtggggatggttaggtgtaattgtt

SEQ ID NO: 318824 - DNA, 128 bp, Zea mays
gcagtcggcagcaaactgaatggcgcttctcgctgtggagcttcggagattccttcttcggcaaattgtctgctgctaggcggtcctgccttctatcgcgtggcgcggtcgttctgctagctcatccg

SEQ ID NO: 318825 - DNA, 95 bp, Zea mays
atcgctagcggacaccttgaccttcattttcccttttgatcacacccttccagcatgtgggcatgggcaacattccactgactctaggcactatc

SEQ ID NO: 318826 - DNA, 464 bp, Zea mays
  unsure (1)..(464): unsure at all n locations
cgcggcagagatcttctttgctccacgctgcttggagtcgactgtgtcgggtcggcattcgtgcgaagagagggtagcagcagtacccgttgttctatccgttatttgcttaggnngctgactgtcctgcatcggactccannaactgaagaggctcaacgtctttaccaatgaacgcggctgaagcattatcaaaggttcttattttcagatggccatcgcctcggattggaacaagnnccaggcagcggcggcccgaaaggggtctggacgatgacgatgcctcgtccgtggactctgccaagacctggagccatgaggagaccccgacaccgctgaggcagaggtattccaggatcggctcgctgttcaacaagcggacctacgcagcaggcaaggcttcacctagcgaagcagtgaagaagggtggagtggtacaaccagctggttctactttactttcg

SEQ ID NO: 318827 - DNA, 381 bp, Zea mays
cgttttgggttggatgtgtctatgggaataatgatgagagctgatttagcttactctgccattctgatctgcagaggatgatccaaaaaggatcttcttctcatattatacattgctatcactgtgcatgtgctcacactgattaggtatacctggaacaaagacctcttaatgcaaaggaaaatggtatggatagtatctaccatgcacattgtacaagccaggaccgcatcacactaaaagggcaataccacaactgatacatggttacaacacgtctctcaaacatagtacccataagtagatccacacacagctattgcacatgactactatgacttccatggtattcaacaaggaattgaacctaacatttaggat

SEQ ID NO: 318828 - DNA, 128 bp, Zea mays
aatttccggctctccttctcccacacgcacgtctcctcccacgcgcacggccttgccgtcccgaccgcgccgcccccggcgggccccggcccgaccgccgcccgccccagctcttccgaccgcgcccc

SEQ ID NO: 318829 - DNA, 353 bp, Zea mays
catctccttcccttgacgtgctcgcccaggtcgcgcgcgtccagctcgccggccgaactccctcagcttcgtcttcaaccaccgccgaccccatggtgagctcgcacaaactccatctccctgtgcgccctttgttctgctccaaccgttctccacgccgtgttccccccccatggctccccttgcctctccggtcagcactagcccgaacggtatagcagcataccggtgccaaacccgtgttcgcgacgcttgccaagtgctcgatgaaataccgcagtgagctccacctcgagttgtgcagccccaacccgcgacgttgcaacacccttgccctccgtcgatgttgcgct

SEQ ID NO: 318830 - DNA, 159 bp, Zea mays
tcgcatctcctttccttgtcgtgctcgcctttgtcgttcgcgtccatctcgcctgtcgaacgtccctgagctttttcttcaaccaccgccgaccccatggtgagctcgtacaaactccatctccctgtgcgcccttagttctgcttcatccgttcttca

SEQ ID NO: 318831 - DNA, 117 bp, Zea mays
cattctccttcccttgtcgtgctcgtccttgtcttttcgcgtccagctcgcctgccgtaggccctgtacttcttcttcaaccaccggcgaccccatggtgagctctcacaaactcca

SEQ ID NO: 318832 - DNA, 204 bp, Zea mays
tcgggcacacgctcgccagactagccgatcttcactcaagcggcgcccaacagaagtaatggccactgggacggccctctccctcagcggtggccggggctgtactaccctgctactggggcacgcggtcttggactcagggcagtgctgcgcgttcccatgctcgcggtggaagccgccgcacctgccagactgccgcgcgga

SEQ ID NO: 318833 - DNA, 337 bp, Zea mays
cggattccgggtcgcccacgcgttctgtgagcctgctgcgcttcttcgccgtcccgtcgtgtcttcgtccgtagatcagatagcggggaggaagaaaaagcgatcgatggcgtccaactacgtggacacgacgggcgaggagggacggttccacggccctcacagccacagcaccagcacgaccccgacgggcggcgcggcggcggcggcggcatcgccgcgcaacttccggcgcagcttctcctccgcgtcctccgcgggccacagccacggcggcggcggcggcaggaggcggcagcaggcgccctcggccgcgtcggtcgtcgcggggattccg

SEQ ID NO: 318834 - DNA, 233 bp, Zea mays
gacccccccttcacactcacctctccacacccccccgccaatggccgattcgccgaaccctagctccggggacctccccgccggccccgggggctcgccggagaagccggtcctggcggatcgacgcgtggccgcgctcgccggcgccggcgcgaggtacaaggccatgtcccccgcgcggctgccgatctcgcgggagccatgcctcactattcccggcgggttcagccccg

SEQ ID NO: 318835 - DNA, 135 bp, Zea mays
acagcaatctacacaatcacttttacatatcactttcgctatagacagacacaccaagcgttggggccaatagcttactaccaggaggtgggctactgctcagaagacgtgacgtccggagcctcgggcgggttt

SEQ ID NO: 318836 - DNA, 241 bp, Zea mays
gctgttgtcgtcatttgagttcatgttcagcaaggtcgacataaaagacctaccaggggctaattaacatgtaagacgaactaaccctttgcacgggcaagctggttacctatcctgtgcaaatgggcagtacaatacgaaatgttcagatttcaccgtggcatcaatgaacttatgttcgaaggcagcgacaccacccaaggtatcgataccgattgtgaaaacgcatattgatagaaga

SEQ ID NO: 318837 - DNA, 234 bp, Zea mays
cgacatgaccgtcggcggcgccccggtgggccggatcgtgatggagctgtacgccaacgaggtgcccaagaccgcggagaactttcgcgcgctgtgcacgggcgagaagggcgtgggcaagtccgggaagccgctccactacaagggctccaccttccaccgcgtcatccccgagttcatgtgccaaggcggcgacttcacccgcggcaacggcaccggcggcgagtccatcta

SEQ ID NO: 318838 - DNA, 258 bp, Zea mays
catatgttcgccagagggaagtacatctatcaagactcacggggaggatgtaagggttcccctcgcgtgaatgctgcgcggcgaccgggtcactgccggcgacgtccactcggacgcgagatgttccatccctttacgcttgcttcttgcgcacgcggtctgagttgatagtaattggacactgaatacttggattgtatctctagatagtctataaggtgagtgggcttggaaggagaaatactacaagcgattatc

SEQ ID NO: 318839 - DNA, 328 bp, Zea mays
gaatccgggttcgaccacgcgtcacgcatgagagtcgtggagagagcagtcatggttcttctgtggactcactgctagcacattaatgggtacccgtctggttgaccctgtgacacacaactggcgcatcatgggacggatagagatctggttgccccacaagtcgaattctgcatgcaataaagtgacgaagacatggacgctactatgaccggccgatgtggttccccggcaccgtagctcccgactacctgtactgatcaatggtcggggactactggtaatacccgttcggtgtcagaaagtccttagagttccatcagtttga

SEQ ID NO: 318840 - DNA, 351 bp, Zea mays
gaatcccgttcgaggcacgcgtcacgcgtgcgagatggttcaaatggctgtccttgctcctactggagatatgactgctggcagaagaaccggtaaattgttgcttaatagctgtcacgaacaactagcacatcaaaggaaggatagagaaatggcaaccccacaacttgaattcagatagcaataaactaacgaggacatgttcgaaatgaggaagcacagacttgctgcactgggacaggatctttcgactaccgctactgatcaaccatttggctctactggcacatccacatttgtcgtcagagcattctcagagtatagaggggattgagaaaggctcttgatcct

SEQ ID NO: 318841 - DNA, 194 bp, Zea mays
gagccatcgacacgatcgcgagcgcaagcacgtacgttgtcggaagctcaagttagaagaagcaccagtgcctgatcgatggcggcccatgctctcctctccggccggcagctgctgggccgccccgtgcagtcggccgtctctaggtcgtcggccaggaaagcgcccttcgtcgtcagggccagctccagccc

SEQ ID NO: 318842 - DNA, 214 bp, Zea mays
acgaaaaaataaacacgttcgatagcgctttctcattcgatgaccgaagctcaagatagaggaagcgccaattcctgatcactggaggactatactatcttattcaagcacggcaactgatgtaacaccaattgacaataagacgggtgtacctcttctgagatgaaagcttccctttctcgtcaggtccagatataccctttcaacctagcac

SEQ ID NO: 318843 - DNA, 426 bp, Zea mays
  unsure (1)..(426): unsure at all n locations
gttgtccactgccaccaggcaaaccagccgcgccgccgccggcgatgaccaccgcgcggctcgtctcaacatcccccgcccgcctatcctccacgtcggcttccccgattcacagaacctcgctgtgtgttgtcggtcgtgcccctgctttctccgccaggccgctcggattctcgcttcgtctcaagccgtcgcctgccatggccgccgccggcgtcggcggcaacggcccccctaccgcgcatggagactcaataggtggttcatgtgtttgatactggaattttttgctctctgtgcagcttcgcgtttgatttgttcctcagctgtgcccatcacttcatagttcatatntgctcttctttacggtagctatttcgactgactgtatttattccaagcacattttttttttatgatcgcgtt

SEQ ID NO: 318844 - DNA, 284 bp, Zea mays
gttgtagactggcacgaggctttccagtacgcgccgccgacggggaagaccagcgtgcggctggtgttaacataccgcgaccagctatgctccacgtgagctttccggagtcacagaacctgacctgtggagtgtctgacgggccactgctttcacggccagggctgtaggattctggttcagagtcaagacgtacgcctgtcatggcggccgccggcgtacggagaacgggccgactacagcacatggagactaagtcggtggttcatgtgatagatgctgga

SEQ ID NO: 318845 - DNA, 89 bp, Zea mays
aaaaaaaaaaagtggtgctatataaatttcagagatcaacaatagaatactgaaaaaaaggagagacctgaaaaacaaagggcaagcgg

SEQ ID NO: 318846 - DNA, 425 bp, Zea mays
  unsure (1)..(425): unsure at all n locations
tggttctcttttgcagggcgagtnncatcgtcgttggccttcccctttggtcctcttcccaagcgcccagagatnntagtcgcctctttnttcttggtgtaacctcgaaaattttgggggtagaagaaggggcgcgtttagttttcttcagacccagtatgacccagtggattgggggtggtttgggcttctcttttgtcaagtagccaattgggagggcgaaccaggaaagaccactgtagaaggcacctcttcgcgccgccttgttcaacgtaagtggcaagcaagagggtgggcatcaaaggggcacccgatgggcggcaaccatgctatcgcaagcgtgtgtgcgggagagaccagaggtcaagacctggcaaacaaggacaggggaaaggggacccgtgatctccatgcaaggagaacat

SEQ ID NO: 318847 - DNA, 329 bp, Zea mays
ctcggcccttcttcataggtttttcgattcattgcacctgaacgctggacatgtgctggtctataatcatcgcatcacttacgattcatcctcgaattgacatgtgatctgaaaagaaagggtgcttagaacaatccatgacgtgcatgagttactttcatatcactagggcgatctactcaagcactatgccatctgtatctcgatcttccgctgatcacatactatgccctaatttaaacgcctagcatcatcatgtctaactgaagatcaagatatcactctacttctatctatattaatatcatttcatatatcatcctattacc

SEQ ID NO: 318848 - DNA, 404 bp, Zea mays
gcacagaacacttagctttctggaaggctggaacagaaagaaccctaaaccctagcaatggcggcggcgaacctgctgtcgcgctcccttctccccaccccaaacactatccggacgagccaccccaccccgcggagcccagccgtcgactccttcccccgccgccgtgcccgtctgtacctgtgcgccttcgtcttcatggtctacccgtaccgaccgccacagcccgcggtggtcggcgtgccgaagcactgcttccggcgcggcgccgacggatacctgtactgcgagggagtgaggctggcagacgcgatggcggctgccgagcgcagtcgctgatatgcctacaggcagcttcacatactacgcaacttcgccgcttaccgcgacgctctccaggggct

SEQ ID NO: 318849 - DNA, 126 bp, Zea mays
tcgtcagtagtcgtcgcgtttgcagctaggcagatctgagttagccggcggatccgatccgtgcgcgtgcgcagtgtgtgtgtgtgtgtgtgtgtgtgtgtgtgtcggtggagagatggtcacaga

SEQ ID NO: 318850 - DNA, 423 bp, Zea mays
gcactcgaatccatccatccatcgatcgccttcctctctttttatatcgcacccccccgcttccgctcgctcgatcgtcggagtaggcgggcggcatgctgcaggccagctcggagaggccggcgggcctgctgtgggtgcccgggacgagcccgtggccgacgatggacgcggggccgtcggcgagggcgcaggagatcgcgcggcggcgggaggagatgctggggatgctgcgcgacctcccggagtccgagtacgagctctcgctcaccgacctcgtcgagaaggccggggccgaagccgaagccgaagccgaagccgcgcccgcgaccgtccccaccaaggcagaggacgggaaggacccgggcgccgcgcggtcggcggcagctgcggtgaggcacgagcggagggcgtcagcgcggc

SEQ ID NO: 318851 - DNA, 150 bp, Zea mays
agctttgccctagtgcgagactctggttctcaatttctgaaggtcgaggcgtgaaagagaaactgcggaggtcgaaatggcggcggccgtgcggcgagcggaggagctggcggagagggagacgggcggccgccatggcatccatggcgc

SEQ ID NO: 318852 - DNA, 425 bp, Zea mays
cgaagaaacagataataactcgttgactaggatggcagttcgaactacgtgtttgggtggtaacagggtcccttctccaaccttcttttagattcggtctcatcttcgttcctgccattggttggaggaactgccctatcaccattctcattggaggagagtgttgatgagacatccataacgggcctgtcagcaatctcagttgtagtaagagagccagacagttttgtttcaagagctttcctatgcacatcttggaactggccatctggagcaattccctgtgattgtgaagctgctgagtgataggcaggcccaggcttggagctcaagttttccagaccatcagattgtgaaccacacttgagctgcgtgggagggacgctcgaccggtggctgggcagcggcagtggttgtatccattc

SEQ ID NO: 318853 - DNA, 172 bp, Zea mays
aagctagagagtacagcaactagggagccgcgcagcaccacaggacacgcagcagagcagctggggaggtcggcggaaggacacacgacaagccctgacaagagagacagcctgtcgctcatagggcacggagggagtggcctcgtgcgaggcgtgaccctcgtgcgcagag

SEQ ID NO: 318854 - DNA, 258 bp, Zea mays
ccgggctgaccactgcaccactgctcacttcgtactgttgaccgggcttttccatatgcaggaacgctagctcctgatcgtaaacgctagatagtcacagacacgcgagctaaaaagcgactccaacacgggatgcgcttagcgcagtcgaaaatctatcatgccgtttgctctagacaacgaaagacgcgaaatttccttacgcagagttgacctacagctattaaaaatttgggtacggaatgactgttaacatac

SEQ ID NO: 318855 - DNA, 112 bp, Zea mays
taccctgcccactgctcgcttagacttttggcgagctttgcatcaccaggaacgtcgctctgctggtgaggaagatatcccagacgcgcgagcttcctagcaactccacacg

SEQ ID NO: 318856 - DNA, 97 bp, Zea mays
ggattctgtacttgtaccattttacgtgggtcctcatgtaaaacacgctatcagaatacttgcatcacaagaggaaagagtagtttagttccgtggg

SEQ ID NO: 318857 - DNA, 288 bp, Zea mays
ctcctgcccctctgcgctggcgggccgtagcgccgcgagcgagctgggccgtgggcggaggaggagtcgaggctgaccgaccccgtggtcggcggcgacgagcggacgcagattcggcagccgtgcgcggaatgcccgtggaaggaggggagagagggagggcgcatgctcagctgagctgagctgagccctgataggctagctgtctgcggtgctgtagaagaggtttcgtatgcgtgatggtcattggatgttactccaggtacagttcgtacaatgtgcttgggc

SEQ ID NO: 318858 - DNA, 248 bp, Zea mays
gtctgctcattgatggaaggtttccagtattctggtccagtcagagcagagccttataccatgtgtgcaaactcttgccatccgtcacgagcttgcagatgttgacacttgccggcggggtgtccaggacatgggcattgctttgcactatgagctgcgtgtggcgaaatctgatcgtagccgttttatcgcaaagcgctcaagagaaggtcgccctcggcgtgtgcacattggtacgtgccctggtg

SEQ ID NO: 318859 - DNA, 252 bp, Zea mays
gttagcttgaacacattcgtggcgaatttcataccgagaacactagcttacgtgtcggaaggctttatgcacaatgcacggaagagggaaatgttgaagacttgtgctataagaaagaaagagaaaaagcaatgttacccctgtagtactcaagactcatatgggcaagcttcatgggcattctcgtcattgcatacaaagctatatctcgcccctataaatcgagaatcagtactatgcataaattcacct

SEQ ID NO: 318860 - DNA, 433 bp, Zea mays
cagaaatgcacacaatcactttgacgtttcacgggcgctgcacacagacacaccaagcgtctgcaccaatggcttactaccaggaggtggactactgctcggaggaggtgaggtcggtggccccggccggcttcggtcgtcacggaagctgcgtgcatcagcacgtcgtcaaggagaagatcgaggaggtcgacacggtctgacgcgctggctccaaccaccaccaccaccaccatggtcaccacggcggccacggcttcgtggtgcgcgagaccagggtcgaggaggacattaacacctgcaccggcgaggttcacgagcgcaaggagagctatctcgacagggctaactgagccgcccggctgtcggcatccacgctcgttcgtgcctgcctgcgtgccttatgtatgtctgtagttgactggttgtgcaa

SEQ ID NO: 318861 - DNA, 414 bp, Zea mays
ctcctcctactcctccgcccctggtagtttcggcaatcagcttggtgccgacggcttacaacagcagcagatgcagctggatgcaccacacgattcacaaaatcaacagcagcagcaacagcaaatgccaatgacatataatcagcagcatatgatgccacaaactcagcagcagcagcagcctgcagtgaagctggagaatggaggcgtcctgggtggggtcaaactggagcagcagatggggcagccggatcagagtgtttccacacagatgcaacgcagttcgagtggcggtgtgaagcttgagccgcagttgcaagcgctgaggagcttgggtgctgtcaagatggagcaccaaagctccgatccatctgtggtcctgcagcaacagcagcatcaacagcaacgacatat

SEQ ID NO: 318862 - DNA, 174 bp, Zea mays
cgaagaaacagattataacttgctgactatgatggcagttcgaactacgtgtttgggtgggaacaggggaccttctccaaccttctttaacattcgggctcatattccttactgccattggttggaggaactgccctattaccatatttattggaggagagagttgatgagaca

SEQ ID NO: 318863 - DNA, 228 bp, Zea mays
ggattcggagaggaccctccttcctttcgcttggttattttaacgtcccatgggtgactcgcattgctctgattctgatcacaatttggtggggagtaggtgagatagtgagattgagcttcttgaagaaaatgttgttcttcagcttaacatggcatatgaacatatgtgacgtgtacatactttataacctaaggtttgtagatccagggatcttatttgcgttcg

SEQ ID NO: 318864 - DNA, 373 bp, Zea mays
tcggtctgcagcaacagctagtcagcgacgtgccgtccgccgtcggcgcgtcagcattccctttccgcctgttctccgcggaggcgcgccggaacactaagagcggtcgaggcaagcggagcgccgccaagcccatcaagtcctcggccccacctcgacctccctactcctctttcgtcatatgcggcggcgtcgcggccaccacgttcacgcggattccacttcgcgatgcgcctgagtgcacccaggtcacgctcgaacgattacccaccggcccgggcaacccgggggcgcccgctctcacgctcgggagtgtgcaacggctggagaacgaggagttcgatgttgggtggaggcccaactctgtcgcgcg

SEQ ID NO: 318865 - DNA, 303 bp, Zea mays
ccggcgttccaccgcttaatttgcaggaccgccaccccccgcggcgcctacgatcacctcaggcgtgcgcggatatggggcgccgcggctcctccgaccgcctcgaggcgctctccctcgagatcgagcgcaagctgcacaaggccctgatgtccaactcacagcgtcttcagatacttcagcaattgtttgctgacatcgcattgaaagtggatgaccgcgctcgagatgcaattatgagtgagaatgatgatggcattgctccagcagatgaacgggaagatgggtggctatgcttctatg

SEQ ID NO: 318866 - DNA, 536 bp, Zea mays
  unsure (1)..(536): unsure at all n locations
tcgcagtcgactcagtcgagtcgagagccagcactactactgcacgtcagctaangctaggagcccagcagtcagtncggcgggcgaatgggcggctctcccaatgatccctcctcgtnncagctcttggnncggtggcngcnnctcaggnnngcctgctcgccnnncctcggctnnngccgtcgcctccnnntccttcgctcgnntcgtctggctccccaagaagaaagaatcaagtacccgtnacaagccctaccgggnnattgggggggtggcctgactcgtcngtnacgtcgactgccaacctgggagaaaggggcaanggggcatagggggcgtgtacccagtnnntcgtcgaccaaagtacgntngcgctaacccgtcgaccgggatacccagctccaatcttaccaaccgagtgatgaaactggggtctccctaaccggcgaaacgtctaccgtnncggtgganacccactnnngggcttctgggatccctgggcccccgtcacccttncgcttgggaatcccctcggc

SEQ ID NO: 318867 - DNA, 62 bp, Zea mays
gtctccttcaccgttcgtccattccttcgatccgcaggaggattaggaacttaggatcgggg

SEQ ID NO: 318868 - DNA, 171 bp, Zea mays
atggcccttccctcatcgccccgcggctttgaatctggaggtcatgcccaagcccaagcgagcgggtgctggaggcgcatcatagggaggaggccatggagatgagcgacctggacctgtggaagcacgagaagccgtcaaggatctgccctttgcccccgtttctcccgt

SEQ ID NO: 318869 - DNA, 190 bp, Zea mays
aggagggggcgtcgatgtggcacgaggcgctattgctggagctgaaggtccacgtgctcatggacgcggttccgcttaggacgcagcttcgtatgcgtatacctgaccaggagccgacgatacccttaacattctatgaactgctccggatctcagtggatggtagacctgatcatcttcctgtattata

SEQ ID NO: 318870 - DNA, 325 bp, Zea mays
gtaacaaacgcgttcgcaggatccgacccttatgcacagttggaccgtatcccgaggcttgtgcgccataaaattaccagcctatcgatggcgatgaagataattgtgaccacgcatggtgaaaactacattatggtctggaaggtccgcatgaacagttaggaaaaagggcgagatgatggtaatctagttatctggtgtaacctgtactgtactctactgaataagatggcttggtaccgtggcgtgtcacctgatcttgtaagaacaggctgtaaatatgtcatttgtgcacttgcagtcctctttaagatactattagcat

SEQ ID NO: 318871 - DNA, 98 bp, Zea mays
ctcgtgaacaatggcaagaacaagcgacacggatacgcgctacaaggcgaaggacgcagacctgttccacaaagcgcgggcacggctgcagcggtcca

SEQ ID NO: 318872 - DNA, 452 bp, Zea mays
  unsure (1)..(452): unsure at all n locations
ggtcgaccagcgttcgaaaaactactgncattagcagttgagcaaagctggcgcattacatactgaattttgtcagtttgatagttgttcgaaaaggttatttcagaaacctgtctgaacattgtaatgcatatgaacaacaatcacaattgtagctgcgtttctttggaagcacccctttaattccattctgttgtttgaaagttgaaactatggcttatgtatctgccaaggatgaaccaggacggatgcatttactggagatcacacttgccatgggctattccaaaagtcctccttcaatctctacagttagtctctatcctaatatttccataaactaagtctngttttattatactttgctataattgaacttgtctcattaacaggacgtaccatatcttccaaaaatacattggtcaaaaaactcaagactgaaagatgttatt

SEQ ID NO: 318873 - DNA, 438 bp, Zea mays
gccgaaagggtttctccaaaaccctctccaacaaaatcgcaaccgccggcgaggatcggcgccgccatgtcccagatcctccgccaccgcctgtcggctcactaccacggagtctgcggccactgctgccgccgcctcagctcctccgtctacggcggcggcgggagtcgccgcgccgtcgccgcgccgccgcaggacggcgagggcagccgagcggtgagggtgtctgtgtggtgggacttcgagaactgccacatccccaacggcgtcaacgtccaccgcgtcgccccgcgcgtttccgccgccctccgcgccgccggcattcgtgggccgctctccatcaccgccttcggggacgtgctgcagctcgcgcgctccttccaggaagcgctcgccgccacgggcgtctgcattttccacgtcccaagcagtgggaag

SEQ ID NO: 318874 - DNA, 51 bp, Zea mays
ctagttctagatcgcgagcggctactcttcattacataattttgatgctat

SEQ ID NO: 318875 - DNA, 169 bp, Zea mays
tcgcaaattcataaagatgcatatatataatatagctccgcctccgatcctcctctctgcgtgcaaaggtatgccatttcagcagtgacgagcatcgtggatacatgcaattcctctgcacatggatggattgggatgtaacttggaactgttaattttttttactttg

SEQ ID NO: 318876 - DNA, 162 bp, Zea mays
cacacacacacactctacagcaacagcttagcctctcccacaagacagcaacatggctgaggaggaggccaagaaggtggaggtggaggtcaccaaggagcccgaggcggcggcgaaggaggacgtatccgatgacaaggccgtcatccccgcgaccgaccc

SEQ ID NO: 318877 - DNA, 439 bp, Zea mays
  unsure (1)..(439): unsure at all n locations
aagaatccagtgtaaaatatcaagggttaaacaccatggtatattttgcaagattccctatgtatcatgtcaagaagaaatagtggactctgcgtcttaaccgtctgtttccttgtcatttttggttcatggtaaccattttctagtttattttatgagtctgctttcgtggtaaggtttaaattaaggtcagtagtgatgtgtaaataattgttgccctagcaacatcacttgctgaatcagcctgttttgcttttcttctaacagtggaaagctgcaaaagaggaacttcgcgacgaagacgaagaggagcctgaaagtgctctggaggcattagaaaggaagcggcaaaaggaaatagaggaatggcggaaacaacagatagctagtggagaagctcanganaatgccaattttgttcctgttcgtggtgattggt

SEQ ID NO: 318878 - DNA, 365 bp, Zea mays
  unsure (1)..(365): unsure at all n locations
agggctgctaccacgatcacctggcgcccgcgcgccatggatggcgccgttgagctgctcccgaccccggcgcggcggcgctgcacgggataaacccctacggcttcgcccctaaccctttcttcaataacttcctcccccagaactccgctgccctagctgcctaccaactgcagcagcagcaggctcatcacttcgactcccatgcctaccaccaaagcccctaccggtaacaccatgcaccgctctaccaaacccgncgacgctgtcaaacctgcgccgacaccgggcaaccagcaagccgtgctggaccgggctcaaaaggccgcgagggacgctctggaagagctcgtgaaaggtgggga

SEQ ID NO: 318879 - DNA, 184 bp, Zea mays
gtccacttatgatgtatccatccatggtttgattgaattgcaaccgctacagcaacccggtgggaaccatgggcccctttttcttgaagcagggggaccggcggaagctggggaccaccgaaaagcgggcgctggccaaactgatggcctcctccggctacacgttccctgggttggtgcaccc

SEQ ID NO: 318880 - DNA, 255 bp, Zea mays
cattacttatgaggtttcaatccatgatttgtttgaattacatgactacaatccacagggaggcccatcataccgacataatgttcaagcagtcggaccaacgaaagctttaactcacattgaagaaaccgatacacacgctgttatccatgaatcccttcacatgatataatttttaagcttatacatatggtgattgaactgtttcaattatgctattacttgatctgttgacagcatttactgaaggtcttg

SEQ ID NO: 318881 - DNA, 399 bp, Zea mays
tcggaaccaaatacccagcaattacaaaatcattttcccattgagaacacacaacataatggctgattataggtttcttggtcaagaaactctaatagcattgtgccttctcctctcttttccaccgggcatagcctccatccattcatccacactgaacatgagttgcatcttagaggagaaggctgcgcttctatcaatcaaggcaagcctcctggatcctaacaactacttctacttgtcatcatggcaaggtcaagactgttgcagctggaaaggaatcaggtgcagcaaaaaaactggcaacgtcgtcaagctcgatcttaagcgcataaatccaggaaactttgtaagtgagataagctactctttagttaatttacgacggctgagatatct

SEQ ID NO: 318882 - DNA, 208 bp, Zea mays
gcgctcgtctccggcgtcctccaccgcgctcgcctctactggaagctctagcgagcgaacggtggcatagcatgcttttgtcttttgaactgcacatgatacacacgacacctcaaactcgaaccccaagttagtttgaagaactcaaaaaaaaaaaaaaaaaaggcagacaatctaaaagatacaaagataaaaaacacaagcatgc

SEQ ID NO: 318883 - DNA, 426 bp, Zea mays
agacgacttgtttcattgattcttgaagagatcgagcttcttttgcaccacaaggtcgaggatgtcttgcaactgcggatcaagctgcggctgcggctcaagctgcaagtgcggcaagaagtaccctgacctggaggagacgagcaccgccgcgcaggccaccgtcgtcctcggcgtggccccggagaagaaggccgcgcccgagttcgtcgaggccgcggcggagtccggcgaggccgcccacgcctgcggctgcggtagcagctgcaagtgcgacccctgcaactgctgatcacatcgatcgacgaccatggatatgattattatctatctagcttgtggtggtggttgaacaataataagcgaggccgagctggctgccatacataggtattgtgtggtgtgtgagagagagagagaaacaga

SEQ ID NO: 318884 - DNA, 449 bp, Zea mays
  unsure (1)..(449): unsure at all n locations
ngtggaggggcgatggcggcggctgatgtggagtaccgttgcttcgtcggcggacttgcctgggccaccagcaacgagtcgctggagaatgccttcgcctcctacggcgagatcctcgactccaaggtcatcaccgaccgggagacggggaggtcccgcggcttcggcttcgttaccttctcctccgagaactccatgctcgacgctatcgagaacatgaacggcaaggagctcgacggccgtaacatcaccgttaaccaggcccagtcccgtggcggcggcggcggcggcggcggcggtggctacggcggcggtcgcggcggcggcggctatggtggcgggcgccgtgacggcggttatggcggcggtggcggctacggcggtcggcgcgagggtggtggcggcggctacggaggcggtggcggctacggcggtcggcgcgagggtgg

SEQ ID NO: 318885 - DNA, 214 bp, Zea mays
ggtcaaagagatggttacagtcttggtcttattatgcataattatacccctgtcctcagggaggctaaacattgcatatctaatgcacttacaatgattagcaagaaacatttacagtccatagcatatccaaacacaggcgctgtactgtgaaagaagcctactgcttgatgaaatctagatacagcatttctacaaatcacatttcacctgc

SEQ ID NO: 318886 - DNA, 279 bp, Zea mays
gaattcccggcgctcgccagacggacgattgaggctgttgatttgacgcttttttttactcgcatgccgtagtttcaaaccaggtgagggcattttgccggacgcgcctgactaaatacgaccacgggagccacactccgcgcttgctttgctgccggggcatggacagagcgctagctcgcctacccatcgcgatcacacagccctattccgcagcgagtacaaattccctgctcgtctgcttgcacggtgcaggcggtcagatcttgaccgaattta

SEQ ID NO: 318887 - DNA, 459 bp, Zea mays
ctttagaactcgatcttaattctcatcaactcacttcccagctgtcggaaaatttgtggacaaactcccaggactcgccgtttattgttgctcccaaccaccagaaaaggaagcacgtcacccatccttttttcacgttactatcggcaccgcccatccaacatgtcgggcaccgcgcacgactccagactactgtacaaggtgaataatattcgagccttccatatccaagatggcgaggagcaagagttgacgccttcgggccctcaaattctctcgctgttgatggttcccaccgctgcgccggcaaacgcctccgctggtggcacgcagaccccagaggaggatttctacttgcatctctctattcctcccgagctggaccttgccatcccagctaccacccagatcttccaccaaccacccgatagctacctcattcctcgctgggacgtgggt

SEQ ID NO: 318888 - DNA, 166 bp, Zea mays
tcgcaatcttaaaaccactttattcaagcttttatttcacaccggggatggatctcagtggggggggatatattacatgcttgtgcgtccaaccgaggagaatgtagttatatacgagattcatccatactcgtagaaacatacactatataatcatggcacacac

SEQ ID NO: 318889 - DNA, 79 bp, Zea mays
gctgaaaggattttttcaaaactttgtttaacatagcattaaacttttactaggggcggggccttatgttcccacatct

SEQ ID NO: 318890 - DNA, 358 bp, Zea mays
cggacgcgtgggctttctcccccgtgtcccgttgctaaaagcttagagaaaaacctaatcggacagcactgtggccaagcagggcgcgggagatcgtacgccggcggcgaggtcctgcggtggcgggcctcggcagagtggtggtgctagcggagtgcaactgttgggttggtgggtaagagtgagaaggacatgaaagcgctgcggcgatccagcaccttgtgctcgccgacaggcgtgtcctatccttcgtactcatcgaggatccacattcggacgctcctcgccgacgtcgtgtactcgtgctcgtcctgcttcatagcagcggctgctgctgggagcgcggtggctgtggtgt

SEQ ID NO: 318891 - DNA, 216 bp, Zea mays
aggtgtcgggcagcctttcggagcagatttagtggataggccgggcgatcttgagccgtgccaaggcacgcgcttgcatgttgaccgatacgccactcgtattcactgatgacatttataacacctgcgtggtggatatctgtgtgtacgacatgctgatttgactcggtagtatctcgggattgtacatgatacgacatcatcaacctgctgatg

SEQ ID NO: 318892 - DNA, 379 bp, Zea mays
caagcaacacgttgctctgatggctaccgtgaatagtgggaagacgtacattgccggcgctaccgctccagaaatgaaatggggtgatgatggcgtgaagttacgttcggctgccgtatctctatcgatttcatgatttattgtgcaaaatataacaactaaaaaaatgtgatacaactctcggattcagcggttcgcatagagggatctattactggtctagtcattgaaagaaggttaatagttgggttagtcgacaaaagcgacaaaagcactggatgagactgcaaggtttcagtcaagtctgtaaacaattttggaagtggatatgtattgttatgaagactgcattatgattgaaatttataaatattattat

SEQ ID NO: 318893 - DNA, 414 bp, Zea mays
agcaaatgtaacttgaatacgataaaaacaaaagtatcattttcactggcctggacacctgatgactgactgaatttatttctgagtttagaaaaggacaagctctgcagtttaactggttgtatgagaaaggggcttttgtgttgcagtctgacggaaaattctcagttgattttacaatggttgaggatgctgtagaaagcctgagcagggagatactgacaatacaggcaaagggcgataagccttctgcccaatctcttctccagtcccgtgcaacattgacacaaccattgagaatggcattggagaggatagagcacatgcaggtacctgttgacatagccccggtattcagcacggcaaacaagctatttgcagacatttaactatttgggctcagaatcggtgtgc

SEQ ID NO: 318894 - DNA, 253 bp, Zea mays
cgcatcccttagcctgacgctggcgcttcagctttccatgtccgccgccccgccccggcgcgtggtcatctgctgcggcggcgtggtgggcgcgtgcacggcctactttcttgccacccacgccgtgttccccaccgttcagacgctcgttgagaggtgcgccccggcgtgcgccgactcagggaaagcctgctgcttcctggcgctggactggtgcgactccactccggctctttccaggctcgcgcgggcc

SEQ ID NO: 318895 - DNA, 363 bp, Zea mays
gaaccaacaagattgtttgcttcgtgtttagccttttcatggtttgataaattctcgggcactcgagttagacaagacattactccgtattatttagaattaggggcttctgattggtcgtactcatggcaatgttggtgcctgatcttagtttctcggcatcgatctctagtgtgaaacttccaaagtacggggcatcaaagagtgagactttctttgttaaaagcccccaacattccgtgcaaaagctaggccagcggaatctggcaaatatggtactaataatggccggccaccaaaaatggtcccaacacttgagttaaggaggaccagtggtggtctttgaagatcagggacagttaa

SEQ ID NO: 318896 - DNA, 193 bp, Zea mays
atcttggcctcgtcaatccatcaccacttggcgtctctgagctcctcctccggcttcggggcggtgtcttgccttctgctcggtcgaagaagaagatgaagaaaacatgtgttcgtgatccgtggagtcgtcgtctgcggcgtcggcgggcaagagcgtgtgcgtgatggactgccgcggggccgctgggcca

SEQ ID NO: 318897 - DNA, 432 bp, Zea mays
gttcggagcgcacacacacacaaccagatctcccccaaatccacccgtcggcacctccgcttcaagatgcagatctttgtgaaaaccctgactggcaagactatcaccctcgaggtggagtcgtctgacaccattgacaacgttaaggccaagatccaggacaaggagggcatccccccagaccagcagcggctcatctttgctggcaaacagcttgaggacgggcgcacgcttgctgactacaacatccagaaggagagcaccctccaccttgtgctccgtctcaggggaggcatgcagatctttgtgaaaaccctgaccggcaagactatcaccctcgaggtggagtcctctgacaccattgacaacgtcaaggccaagatccaggacaaggagggcattccttcagaccagcagcggctcatctttgct

SEQ ID NO: 318898 - DNA, 254 bp, Zea mays
caagcttccttcgcggtctcccgtcgagcaaccatggcggcggcggttaccctcctacggcttactctcgaccgactctcctaccacctgcgctccgtacctttctctcgtatggcgtatacgcgcctacgtatctttgccttccatcgacttttctactacctggaccatgtcttctgctttgcttacggcttcgcggtcgtagcccaggttgtaagccagccgtacgccgaagaatctgtagaagatgaatc

SEQ ID NO: 318899 - DNA, 129 bp, Zea mays
taccggttcggaactcgagccacgactcacacttccgcttaaagctaacgatagtgatttcactttcagttacggctactaccaaacgggtccgggcatctatggcatgcagtcatcactcttccatat

SEQ ID NO: 318900 - DNA, 68 bp, Zea mays
atatatgtattattacaaggcacatacatacagctgcagagaacggatgcgtgaacacccgttgtctc

SEQ ID NO: 318901 - DNA, 101 bp, Zea mays
acacccagcgcaaagcgatggcgtcgctcaccatgatggcgttcttcgacgccctcgaggtggccgcgcactagcgccgtaggacacttcacgtggtcaag

SEQ ID NO: 318902 - DNA, 246 bp, Zea mays
cgagcagcttccgctggttcgatcagcttctcggcgtgacccactcattcgccagtggagtgtcctgcgcgagccaggtctcgcctgccgccagcggtgagatgtggaagggagagggtagaaataaactaggcccaagatcgatgaggtacagcgacgaaaaatgagagtgcaagagagataggggactcggaggtcgtgtgggccggggctccaagacctgaggggcttcgttgcgcatgaagc

SEQ ID NO: 318903 - DNA, 217 bp, Zea mays
cttcactgccgcaaaaatcgcatcagaatgaaccagttgaaatggatgctaaaccagttgtatatgcagaggaacgatttgtcgtatgtcctcctagtgccagtgggattcatgtgcatgttgaaattgctaaagatggtctactgctcatttctcctgtgaccggtgaatgaggaatcagtacggtgctagactggatcagaaatactttgagcag

SEQ ID NO: 318904 - DNA, 251 bp, Zea mays
  unsure (1)..(251): unsure at all n locations
gtcgccggcgaggtctccggctcgttccccggcaacgacggtctcatggtagcggtctggangattaatacggtcgcggttgatatcgaggaagactccgagaaagtcgaagccctaatcgagaaggttgacgtgatcaagaatgatgttgattcaattgtggatcctatcatcggcaaggttgtcaagtgcaaagatatttagagacaagtggtgaactgaagatgtgagacattagttgggctggtctg

SEQ ID NO: 318905 - DNA, 97 bp, Zea mays
ggaggagcagccatgtcttcatcggtgttcgccgtggcgagcacatttctgtgcactcgtctggcggtcccagctccacagaacgtgcgcgtcgtgg

SEQ ID NO: 318906 - DNA, 305 bp, Zea mays
ttttaaccggcaaatggcccatgccgcaggaattaattaatatacaacaccagcaagtacggttaaatgataagtgaaaaagaacggtctaatgaagccaagcatgaaagatcgatcgagcacctcgctacgagttacttactgcaactaacctactccggccgacacggcacgaaggcgccggagccgaatgctaacaaagaggatgctaggtgtcctacccgtacccggaggagaggctggtcacgggcaccgtcgatcgatctgcgactgcgatcaaccgctgtaggtgtgagggtgatgca

SEQ ID NO: 318907 - DNA, 194 bp, Zea mays
ggaagaagaggggaggcgcgacaaaaagggcgccgcgccacgcatcgtccccgactcctggatcgtgtagcctcgctctccttctcccgatctgatccgaagcgctgctgtgactacgacgacctaagggcacgatgcatttgaccaacctgctgctggaggagcccatccggatggcctgcatcctggagcca

SEQ ID NO: 318908 - DNA, 86 bp, Zea mays
tgcggcggcagccacatcgagtaatttatcgagtcaggtgagagggcggtagcagatctcggcgtccgtgtccatgtgtgctgccg

SEQ ID NO: 318909 - DNA, 184 bp, Zea mays
atgtcacacagacgtgcgtgcagttacgagctacattgaaggtctaacacacattggcagcgaggtatactgcattcacatgtgggcgccatgagagagctgtgcagacacgcgcattccacgatgacgcttcacacctgcatacacatcacgttgaagagcgcatttctccaggacgacgcca

SEQ ID NO: 318910 - DNA, 183 bp, Zea mays
acgatctcgcgaagaggattcagcaagaagcatgcttacgctgctgctgcccgcactcggatccaagcggccacgcccgcacgcccagtccaaccccaacccgcgaagctggcgcgcgaggcggccgacgcgagcgcccgcaagcgcaaggcgggggactgcggccaggtccccgacgccacc

SEQ ID NO: 318911 - DNA, 95 bp, Zea mays
acgcattcagagctacccttaaaaacattcttttccaatccggtatgcacttactatgggggggagcacaatcaacacaagatctgattctctat

SEQ ID NO: 318912 - DNA, 70 bp, Zea mays
gatacaaaaactaactgcaaactttgatttaacaacacacccggaaaaccctaaggggggcttccttgca

SEQ ID NO: 318913 - DNA, 113 bp, Zea mays
gaaacagcagtagcgttagcttcacgatttggttgccgtcgtagcatcgccttcatcgggaggggtcttttccaaccgtgccgatactacatacaaagagatgatcattcaag

SEQ ID NO: 318914 - DNA, 206 bp, Zea mays
acattcactactcgcttcgtggattcattatctaagtctaccatgggctgcgtctgatggtactggctcatggtatggtcacctaagcctattccacagaactctccattacctcaccaagacctgaatcgagcttgcccttagtcccttgattcccatggcactagatctcttctttctgacacgcgctcttacagacgagcatc

SEQ ID NO: 318915 - DNA, 90 bp, Zea mays
gattcccggccgacccacgcgttcggatcctgaagttttgttgcaagttttactttatactgcatatcaacgtaataacaggggggctaa

SEQ ID NO: 318916 - DNA, 317 bp, Zea mays
cgcaaggcgggctaatgagagtggcatctgaaacggctcgtgctagccccgatgcttgccatccatacatggcatgagtgagtcgatcgcatcagctgacacattgccagaagagcactgatcaacacgacgtacatgggcagcagcagcatgctgatgatagggtaagcacgaccagcgttgcagtgccagtgcagggcgtcgagtttagcgcgagcatcgagcgtatggctatagctgcacgagagctctgaggcgatcatatccgctgcagcgcctggacactgctgacgtataagctacgattgactgcgcgc

SEQ ID NO: 318917 - DNA, 88 bp, Zea mays
attagattggatttattcaaccctgttattatcgcgctctttgtacacgacaaggggggggatatattctagctgcaggtgaaacttt

SEQ ID NO: 318918 - DNA, 437 bp, Zea mays
ccggtccagcactttcacgctcagctccagcaatggctgcctcctccatggcgatctcctccacggcgatggccggcacccccatcaaggtgggctccttcggcgagggccgcatcaccatgcgcaagaccgtgggcaagcccaaggtggcggcgtccggcagcccctggtacggccccgaccgcgtcaagtacctcggccccttctccggcgagcccccgagctacctcaccggcgagttccccggcgactacggctgggacaccgtcgggctgtccgccgaccccgagaccttcgtcaagaaccgcgagctggaagtgatccactcccgctgggccatgctcggcgcgctcggctgcgtcttccccgagctgctctcccgcaacggcgtcaagttcggcgaggccgtctggttcaaggccggctcccagatcttc

SEQ ID NO: 318919 - DNA, 94 bp, Zea mays
acgggttggcttataactttcctccgtttcttgttcggattcgtgaggttctcctatggacggattattggttaagctgatagagatgtcggta

SEQ ID NO: 318920 - DNA, 162 bp, Zea mays
cgaactctcacgccctgacaaaaccgtccttcatttatacgcacccaccagatgaaaagggccaaagccaaaaggcattaccgccgcgacaactatggcagcctcgctccaagccgtggccaccctgatgcaagcggcctagatcggcggtcgggcgccctt

SEQ ID NO: 318921 - DNA, 66 bp, Zea mays
acgactagatctagatcgcgagcggccgccctttttttagacctacaacctatcctaaaagggggg

SEQ ID NO: 318922 - DNA, 55 bp, Zea mays
acggctagagagggtcatttaggacttttatttccatagctagaactagatgcta

SEQ ID NO: 318923 - DNA, 423 bp, Zea mays
ccgcgtgcctagcgccggctaccgcgactgtggcgtcggcggctgggaccagcggccgtgagtcccctctctgaaagctccgtctgtcttcaccatctgtgtcttcaccatctgtgcaggttcggcgaaaacatcataaccttttcttccccaacaacgcatactcttagctagggtttcaacgcatctgtcgacgggagctagggcgtcgccgccgtcaatgtcgcggcactcccactctttttcgtcaaccgcatcgagcggagggccacctgtgtcgccgctttcttgcatttgttttgcttcgcatttcgaacaggtaacggtccatcatctccatatgacctccttgtatcctccttcgttccgtgatgacggcatacaaactgaataagattctgtatttcgaatacgattctggag

SEQ ID NO: 318924 - DNA, 100 bp, Zea mays
caagcgcgtatcatttcctacttttattgccgcagcggctactgcaagtacggggcgggagactactacgacagcggttacaacagcaagaccatcactg

SEQ ID NO: 318925 - DNA, 418 bp, Zea mays
gctggctcgagcaggagagaaagaaagagacgatagcgcccgaaccccactcggggcgcccgtgccgatataatccaatcgaaaccgccacactgtttgccgccagcccgctagtaacctgcttaatttaggcatacgtgagactctgagagaaggtactgaccacacaagggaggccactcccgcccggttcgtccgcgtcgtcgccgatccgtacgcaactcccgtgatccgatccggacgtacggccgctctctctccgggctagctggcgatcgccgactgcatggggccggcggtcggcgacggcgaccgcggccccggcgccgcggcggagcacaaggtgaacctgtcggcgcggcagccgttcgtggagtcggtgcggacgtgcctgcccgagacgtttttccccgacgac

SEQ ID NO: 318926 - DNA, 154 bp, Zea mays
cggacgcgtgggcgcgtgcgtcggctgcttgcttccacgtgtaacttggctgccgtcgacacgcggacgcctacacggtacgccgccatcgccatggctgcccagttctgtacaaccattgtcctctcgtgacattccatagaggactgacagc

SEQ ID NO: 318927 - DNA, 298 bp, Zea mays
gcgtttacaaggagttcctggtggcgacaattaggatgagcaaaacctcaaggcattgggttgccacccgcgaagcgaagagaggatgccagcggctatcgcactgtatcaggcagtgtcttgcctgtgtagttttgtactgaagttgtgaacgattagcttcattgtgtctgtttaaaccaccgtcactttaattcatcgcgttcggctgcacgtggtcgttgatgacgacacgatcagaaaccgttgatgacaacatgatcagaagttgtgaaaaaaaaactgtcatgcaatggaa

SEQ ID NO: 318928 - DNA, 428 bp, Zea mays
atgaaattatcttccgttcaccagtgaggcatgcttatatatttgagcaacttcatcaggagaaatcaagcactccagcattatcctccacttgcagtagtatccagcaggggcagtgctcacatttcaaagatattcagggtcatttatcatctaaagggcacaaagtcccaaccatttactttggaagaggtcggtcttcattgttgcctagtggttcatcagcagatccactcctgcttaatttatgtaaaacgatggagggccagagccagcatagctccgaagataatatatcatctggtcggtttcagctaataaaggaggatttgataaatgcaacggttgacgcgagtgacatttttgagtcatttgatagttgcccatattatctaagtgatcataccaaatgtgccctcatgtcatca

SEQ ID NO: 318929 - DNA, 439 bp, Zea mays
  unsure (1)..(439): unsure at all n locations
gccaccatcgaccttcaagtctcgctacgtagcagtgcaataaaaaaagcagccgcaatggcgagcagcaccatggccctctcctccacggccttcgccggcaaggccgtgaacgtgccgtcgtcgtccgccttcggcgaggcccgcgtgacgatgcgcaagacggcggggaaggccaagccggcggcggcgtccgggagcccgtggtacggccccgaccgcgtgctgtacctgggcccactgtccggcgaggccgncgagctacctgacgggcgagttcccgggcgactacggctgggacaccgcggngctgtcggcggacccggagacgttcgccaagaaccgggagctggaggtgatccactcccgctgggccatgctgggcgcgctcggctgcgtcttcccggagctgctcgcccgcaacggcgtcaagttcggc

SEQ ID NO: 318930 - DNA, 386 bp, Zea mays
aaaaaaaaaaaaaataaaaaaaaaatttaaaaattaaacaataaaaaaaaaaaacaaaggaaaagagcaaaaccataaaaataatactccacagccttcaccgtctaggacattaacgttccgtcaacgtaaccctttagctattccctcttgaccatgcacaacacagctcatgaacgccaagccggccttacaatccggtaacccgtgatacgttccccacctcaagctgtacctgggcccactgtctttcgagcttggcgagctacctgacaaacgacttcccggacgactactgctaatacacccacatgctgaatgtcgacccggagacgttctccaataaccaatagcttgaagtgatccactctcgatgggtcatgctg

SEQ ID NO: 318931 - DNA, 293 bp, Zea mays
cggacgcgtgggaaaaaaaaaaaaaattaaaacattaaaaaaaaaataaaatataaatgaaactagaaaaaaaaaaaaaaccaaattaacaaatacaagcaacacataagcctgcttcctactatttcatcatattttacttctgcctcaaatcctattaattcttcgaactgtataaaccattgatcttcactaatcctctttatataaccatcttaatcccctctatataccccctttactaacttaatatgcctattttcccatcattcccttaactacatctgtttcta

SEQ ID NO: 318932 - DNA, 374 bp, Zea mays
gtctcccttttctttttgtagtatagtgagagtgacgcgactagtggtatacaaagggaaatggtgaatggagcgcaaggtagcgattcttctgcttgtgggcgtctatgtttaggataacatggctgcgttgcttgttgcctagaacaccctcaagatcattcccttcaagcttccgtccgttggccctttatatgtcctctttctcatgaaatcaatttttatttgctgtatttattttcacttccttatggatattcgcatttttcacttctattttaatgagccctttgttattcttcactaattctccttcttttttcaagatattagcttcttttttaatcacctttttttatccaaccttttgttct

SEQ ID NO: 318933 - DNA, 332 bp, Zea mays
  unsure (1)..(332): unsure at all n locations
atcaattgtaaatagacatggtaataaccgagaactgatcgggcatagtacgataaagcagcatgtgaaatcagtgccagctccagtacgtgttgttaatgatagtgtcaagtgtttcagcatgcctagagcctctaaggtggagattccttggcctgcctattcaccagcggaggatcctttgcttgataaatctaatacagaggtaattctggagcttgaggataaagttcatgatggtgatgacaaanagacaaaaactgttgtaaaaaaggtggtttcaccattcccaactaaagcggncttctctgaggaatcctttgaagcacggg

SEQ ID NO: 318934 - DNA, 449 bp, Zea mays
atccctaatggagcgaagacaattgaaactgcttctgggcatattgctccagtgacgggccgtgcgctgtcacctgatagcaactactcttgagacaggttctagagataccacagatatactatggaggaatcataatacagatatcctaacataagacacgtgatcaagaactctgatctacttacactactgcaccagtcagtatgttctctaacatcagttatcatgattagcaggaactaagatactatgagacttgaagacgtacatgcattccttatcatgctaggatattacacttatgttcaacgtagcataatgagaaggaatgtatacatgcaattctcatcttaacaagagcttaccactgaccagagctctcatggaaggaattctgatcatgggttcgaacctaacctaatacttttagttactattcaccatat

SEQ ID NO: 318935 - DNA, 442 bp, Zea mays
  unsure (1)..(442): unsure at all n locations
ggcacactggtctggaaatcagtagcctgttggctgctgttgctattaatcagttgggagagagggagatggccaggaggaacatcggagtcgcagtggacttctcgtcgtgcagcaaagcggctttgcggtgggcgtcgacgaaccttgccaggaacggcgacaggctcatactcatccacgtgaacagctcctgccagaacgagcggngcgccgttcatctctgggagcagagtggttccccattgatccctctggccgagttttcagacgtcgccaggacatacggtgtgtcaccggacaaggagacgatcgagatcctnactcaagcggcaaaccatagagggatcgaagtctttgcaaaggtgttctacggcgacccagcanagaagctctacgaagcagccgacctggtcccgcttagctgcatggtcgtcgggag

SEQ ID NO: 318936 - DNA, 348 bp, Zea mays
cagcaattcatcagctagaagttcgaaatgggggtcaagtttttagtccttctcggtgttgtcctggcctctcttgtcttccaggacgtggcatttgctagagagctcactgaggccaataatgaggatgagggaaagaacatgaaacaaggaggaatgactgaattaaaggatgagaaatggggaggtggatataatggaggatatggatatggaggtgggtatggtggtggatatggaaaaccgggctatggtggtggatatggtggaggatacaggcctaaatatggcaggggctacaggaccggatatggatacggtggcgggtatggtggatgatacggtggc

SEQ ID NO: 318937 - DNA, 431 bp, Zea mays
tactccatcaactagagcctcattttgacttaaaaagatagcatccaaacttgtgctacagtaacttatcccttctcgcaaaccgtttcaagagcacaaagagcttattaagacgctttatctagcttatttacttaacatcctctaataaattattgactgagtaaaaatacatatgatggttaaatttcaatcattgcccatattgaacatccaaattttgttaaccagcaaccaagtgaccaatgccttaaaagaaaatctgaatctctatctggttcataagcaaggggtcattcaactacattggtgcaacctgctctaggaaatcataatgggaatggaggtgcacacaatgtccttcggatggctaacgttgtacatcgattcaagagcttagttgaatctttggaaattggtgttgtgctatc

SEQ ID NO: 318938 - DNA, 257 bp, Zea mays
cggaattctacccacgcgtcatgagtacttgatcaactagaagctcgtattgacttcaagtttttagtcctactttcaggttccggaacctttcttgtcttccacgacgtggcattagctaaagatctcactgaggccaataatgatgattatgtacagaacatcaaactattaagaatgactgaattaatggttcatatgtggtttactggatataatgtacgatttgtatatatacctacttatattagcagata

SEQ ID NO: 318939 - DNA, 455 bp, Zea mays
tcgcgacttgtttcattgattcttgaagagatcgagcttcttttgcaccacaaggtcgaggatgtcttgcaactgcggatcaagctgcggctgcggctcaagctgcaagtgcggcaagaagtaccctgacctggaggagacgagcaccgccgcgcaggccaccgtcgtcctcggcgtggccccggagaagaaggccgcgcccgagttcgtcgaggccgcggcggagtccggcgaggccgcccacggctgcagctgcggtggcaactgcaagtgcgacccctgcaactgctgatcacatcgatcgacgaccatggatatgattattatctatctagcttgtggtggtggttgaacaataataagcgaggccgagctggctgccatacataggtattgtgtggtgtgtgtgagagagagagaaacagagttcttcagtttgctatctctctctgcat

SEQ ID NO: 318940 - DNA, 438 bp, Zea mays
gcagctttagaataatctgatgaaagtatctccatccaccaaattgatatagggaatgctaggatatgctagcccaaaagagacttatgagagaggaaagtttattgtcaaaaattcaccaccccaaggatagatgcaggaagggtgtaaagcctatctcttggatgattcagctgcttcactgttcatgaggtgtcatacatgcagtaaaggtgtgctggacttttttcttgtgcttccaccttgcgtggtagacatgcaggtgtgtgttggggattgttaattctcatttcccctctgaaatagccccagctcgacctccatcaagccacctcttgttatgctagtttggagcccaaactgaattgcttgtgctctcgacgatttcctggtttcccctatgtgccttgctactcatctacacccacgtcacccccc

SEQ ID NO: 318941 - DNA, 440 bp, Zea mays
cctggacccagcaaaaccggtgaaacttgcctggaacttgaagaaagatgttcacttgcatgattaaattgcaaatcagaggtacccatggccacaatgtaaattcgaaaggttttttcatcataataaaaaattgcaataattcagtgatcaatgggtaatggagcagaactctcaacttcatgattggctgttcgcttcgattaaagccaactggactgctgcagctacaatccatagagataaaacactgtagaagcaatagaagccggtacggattaaagccaagtgaacaggctaagacctctctctttctctgaaaatgtactaccaagaaccctccttatctacttacaatgacacctttcctttcttcacctgcccgtgacgcggagctgcctttgcccttccgccgctgcctagatgtttcatttcatctt

SEQ ID NO: 318942 - DNA, 351 bp, Zea mays
gcacgccgccgcttcgtctcacctagagtcgcccgagcacaccgtcgcctcctcctggcgcctgagcacgtcgtcacctcctcttgcttggagtcgctcgagcacgccgactcctcctcttgcctaaagtccctcgagcatgccgacgcctcatctcgcctgaacacgccgacgcctcatcaggtgaggggtgagccacctctgcccgcatcttcatgccccttcgacttttggtttgtcatcgctgagtttcccctagatctagggaagaaagggcggatctcatgtgtgtgggcgttctactcgagggtggaagaatcctgggcacatgtagggcggatcgcacctatt

SEQ ID NO: 318943 - DNA, 261 bp, Zea mays
cgccacagcttgcgcccgcattggcactcgtctccgcctcctcgtcctccggcaccagcgtcacggcgctccccaggaatgggcagcgggcgtcgtcctccttcctcggcggcaagacgctgctgagacaggccgaggcggcccggccgtcgttcgccgtgcgcgccgcggcggaccccaacaggccgatctggttccccggcagcacccctccgccgtggctcgacggcagcctttccggcgacttccgctttgatccct

SEQ ID NO: 318944 - DNA, 443 bp, Zea mays
  unsure (1)..(443): unsure at all n locations
cggatagcacgggatcctcctccgactcaggctccacctcatcgggaatcgaccgccgccgccgccgccaccgccatcggagcagccgccgcaaggagggcacgtcctcgtccgcgctgaaggcgcgcaaggaccggaggtcccgccacaagcgccgccgccacgagcgggagcggcggcggtccgcgtccgacgacgacagctacagcacaagctcttatgacagtgaccgtgaggtgtctggcagatctcggaaacataagaagagcagcagatcaagaaagtttagggagagggagcggagcaaagatagacatcatagacgagacaagagtaaacacatagaggtaaatttcctatttattcagaaactactaaactnttatgatggcttaacttaacatgtcagtggtagaagtacattntatctatacttncacaca

SEQ ID NO: 318945 - DNA, 417 bp, Zea mays
cacatctgacggcggaagctagggcgtcgccaccgtcaatgtcttggcactcccgctctgttcagcaatcgcatcgacaggtaacagtccatcatctccgtatcacctccttggatcctcctctgttccgtgacttccacagcacgctgccaggagccctatcctcaatcatgtctttcccgccgagctacacaccttcaggagcccatcccctcctccctcaaacgacgccgggtgacaagcatgaaaagtagtaatgacgacatgcttccaaatcactttcaacagtttcttctacttctttttgtttgccttatgatgattatctactgtcagttactcagttttatgatttgactagttactttggtttgcggagctggatggaacaatctttcagggtgcttcaacattaga

SEQ ID NO: 318946 - DNA, 230 bp, Zea mays
tcgcacctcttaagctcaaagccaagtctgctagtggtcctcttgaaccagtcaactgtaagcgtattctgggtgctcatcatctgacgactcagtaagtcaacagtgtgcggcttaatgctcaagctgggctccatgtgtctagcgcactcgtctgtctgtcgtttgcttgtccatggcttggcactcacttagctgtccggcatacgattcgcaagtagtacctggtg

SEQ ID NO: 318947 - DNA, 401 bp, Zea mays
  unsure (1)..(401): unsure at all n locations
ggtcgactcgcagaattattcagtcaggaaaagatcttagcaattgactaccgggaaaagaagaccctggtgacgtaaccggaacccatagtcggcttgcgactatcgcgtaaattagacagggtaagcaaatttattattcggcgagtggattaatgaatgatctaactaggtctataatgaattgggtcacaataaatgtagtaatttactaatttagcatgcctatattgtgataatcgatttaggtaaatcggtaaatcaagtaattaagatacatagttaaagagttaataaaaagctaggattaaaatagatctagtgtaatatgtcaattnggtaatggatgtagtcgatgccctgctgtgaatccatgnatgcttaattttggtttaaggttc

SEQ ID NO: 318948 - DNA, 306 bp, Zea mays
acttcctatgttagtccctagtccacatcgtcgttcagctcagtagccgtataccagggacagaggagagaaatcactggattgcgtgacaaagaagcgtagtccaatatgacacctgccagccaagcactcgacaaattccctgaatcggagaaccattaccgatctcgtgtattcgagtcagctattggaatggtcgcaagcgctcaatgtggaagaatggaattagatgaagaagaaagagaggttcagcgcgatgctcactaggtgctcaataaattgcgagtcacgggactctcgtcgact

SEQ ID NO: 318949 - DNA, 427 bp, Zea mays
  unsure (1)..(427): unsure at all n locations
caatcctatgccctatatcgcgcttacagaagccaccacagactcggcttaaggctaggtgcttagtgcaatcatcgccgccatgaaaaacaggggaaaaccaagccgccgcacccggagttcatccacaccagctctcaacctcgggggttttgctaagggagcttcgttgggacgcacagaaggagattgtgccctcgctggggaagtctggagattcctcgttgacgttgagggaagccgcggagttactgcacaacgtgtctagcatcatccatgtctcaatcttcggtaagaatctgcaccattagtttgttgtatgcctagggtcatttagcatgtagccacacgatcgtttggacaccagaatttgtgggcgagtttcgtcgacgatggcgccgncgcgggagcagaatgcgtcatgatc

SEQ ID NO: 318950 - DNA, 357 bp, Zea mays
ggacaatggagatcctctccctccctgcctagctatttttcgccgctcgtgagatggcggcgggtgaaatgccctgacctgcgtgcgtgcatatgcccggggaacggacccgccggggctgaccgttgctagggcccggcgtcgtgtccggcagcgggaggggcggaacggcgacgccgtcggagtcgcagtcgcggtcccggcttcctcctcatctccattgccttcggacgggccaaggcgccagtaggcagtagcggaagcgtggacgtgagcgagcgcatccgcgcggccattgagagcttgtgcaagacttaaccgtttccgcgtttcgtggtgcgtcatgtcgtctaattc

SEQ ID NO: 318951 - DNA, 126 bp, Zea mays
gctacgactatacaatcctagtgcaaacaagtgatttgtttgctgaaataatgatctgcaccatacgagtgtgcgtgtataatcgtacctttggagaaataaataaccgggcagtcgggcttatct

SEQ ID NO: 318952 - DNA, 324 bp, Zea mays
ccaatttgggagacttttacctacatttattcaaataattgatttggcggaagaggaggaggaagagtattggatggttgtatctgccatattcgagggaaaggaaacttgcagtctaccatctgaatcgagttatgcttataaatcatcatctgaaccttcaaggtctacatcattaaacgaccccattaacaattaagggcatttgcttaaaaccattcctcaattggaagaaccaggtcggccttgcccattcttggccaaagaaagtgttaattccaggcactgtgccaaaggcaatcctgcttaaggtggccataatat

SEQ ID NO: 318953 - DNA, 327 bp, Zea mays
ggtgagcagaaaaagaagaggatcaagtctgatacagattctgcacgattttctgctgcatctaggaggaatcaacttgaccaagctgcaagccttaaaggagagcagattggtaatcaggggactctgcaattcctcgaggctgggacagctcttcatttccttgggaaccccggcacactttgcctccatcaatgcatctttaccggggattgtgtgtgcagccaacgggtctggcaactggttgctgctagggtaaaatcagatgacgaaaaagacgagtggtttgtcgtgaaagtcatacatttcgataaggagacaaaagag

SEQ ID NO: 318954 - DNA, 127 bp, Zea mays
gatctacacacatacatagtttcttctactacacgacgacgaacatggtgaagcctgcgaagatcggagagtggggtggatacgcccgcgatcgtcgggatctgaaggctactacggaccggctgat

SEQ ID NO: 318955 - DNA, 404 bp, Zea mays
gtcttgttgccggcggcggcggcggcggcggcgcggagaaattcggcgaacgatggcggactccggaagcctgaggaagcgggaggagaaggaagaggaggacgacattgtctgcctggatccttccttcttcgtggaccgcagctacgagatgacgaccttcaccttcggatcccacgagttgcgcctcctctgcctccgcgccgcttccaattataaagaaaaatatagagttgcagtcatgttctgagaatgcacatgcagtgttgacagccgagaaactagagtggggaaactcagatcatttaagcggtattattgaaaaacatcctggtggatttgatcttgttcttggagctgatatttgcttccagcaatctagcatttcctgcctctttgatact

SEQ ID NO: 318956 - DNA, 375 bp, Zea mays
cggacgcgtggggcacgtgcctcgcccgcttagctatagctgcctcgtgtctgtcagggtaggtgcatggtacgtacgtagcagggcttagctgcagaagtttctgatcgatcgtctgagggctccagaagaagtttctgatctgagggcctgattaatcacacaccacccatcgatcgaccaagcatcatctacttgtaggctctacagatgatgatgcttttgatctttgcttctttttttagtgtgtgtgtgtgtgtgtgttcttggagtttctcttgactgatcccgatggaaagggggctacagaagaagcctttgacgaggaggctgatcatgagtagatattgtgcagcaggttgcccaccttttgtc

SEQ ID NO: 318957 - DNA, 286 bp, Zea mays
ccaactcgacccacgcgtacgatgaatcgatgaacatgatgagatatttatgttacgctgtattcccttttcattatagggagggtacttcatacccttaacgtgactacacttatttctcgagtgcctctccgtaacgacctaattcttagataaccgccctgataaacattccaaccatcatactcaaatcggacccctttacctcaataataataataaccgtctttacattcacttatccttctgacctttaaataatctcataatatgcagctcgctctac

SEQ ID NO: 318958 - DNA, 401 bp, Zea mays
cttccaccggaatcgcacgcgaaaatcccgctcgagcttccaccgtgtccctccgctgcgccgtgcggcggtgccgggtcgcgccgtgccatggtgcccgccttctcggtctggtgcgcgcccggatcctcgcgcccgctggccgccagccccggccccagcgtcgtcgtcgtcgcctcctcccaacttcccgcgtcgtcgcggagcagcgaacgcaggagagcaccaggcctcacgctcgccgaggacccgggtgtcggctgtagggatggcggtggcaggtggagagcaggcatctggttcttcctcttcatgccgccgttcttcacagggaacaaggaggagaaggacgctgagaacgcgatgaggctcaaggaggagctcctcgacgccattgcacc

SEQ ID NO: 318959 - DNA, 142 bp, Zea mays
caagcttccggttttgtctgcagaacatggttagtgtcatgtagcagggcaatgaccgttcactttcgtcatcgtatttgtttccggtccacttgcctaaacttttgtaatctttgttggcttggccttttcgaatatatcc

SEQ ID NO: 318960 - DNA, 394 bp, Zea mays
gtctatactttgcagatcaaccaattttgcttcaatggataacactgcatcacctgacatggtttatcttcacaaatgtcctgtccacttccgaatcgacttcttatcgcaactgttgccttcatcatactctcgatcataaaccatatataccatcatggttagaacgatggcctcaacgctactcatatttcttataaggcatgcttctcttgtcaagccactctcacaagcaggcaatttcataattgcacggcacattcatgatctacagcttgatcacggtcacaatctgtttccagatcaataactcaggtccccatacacgtcactacaggcataccgtcctgtcttgttcctgaaaacatctcaccttgacaagattccgctcctt

SEQ ID NO: 318961 - DNA, 379 bp, Zea mays
ggaatgcaaggaaggagagacacaatcggcggcaacagcgattgatttcgtccgccgcacctctcctctctctccgccgccgtcgccgccgccaacaagggcgaaaccttccgatttcttccacttctgctgttagggttccgcctccacctgctctgctctggtatcttctgcgcaatgccaatgctgtaatggatcgatcgtcagattcttccaatccaccaggtcttgccgtgcctgccgcctcaaagccaccacagatggccgcaaataacaacccttggagggcccctctgccaccgctgctcaatgctcgcgctggttttggtggcgatacaagcctcttctcaacctcgctgccggttcttcctcatgaaaa

SEQ ID NO: 318962 - DNA, 409 bp, Zea mays
gggaaataaaggagctctcgcaggcactcggtactgacatgagtgatctcatgctcgggataccttggcaaaaccacctgcttacgatcttgcagtcatcatcacgctattagttgaggataatttcgcgcacaagagcacgacaagccgagatttttgggggcgtcggcgtcgacctgtaggcgatggcggcgtactaccacggtggcgccggcacggacatccaggccagcaccgacggcctgcagacgctgtacctcatgaacccgagctacgccgtcgggctacaacctgtggaccccggccatggctggcggcgccgcggacatgtcgccgcaggcgcaggcgcagactcccggcgccgcgggtgctgctggggtcagcgccgtgctcagcctgtcgtcccgcg

SEQ ID NO: 318963 - DNA, 217 bp, Zea mays
cccacgcgtacgcgcacgcgccatcctcaccactgtgatcccattctcttactgacacccaccctcacggaacagctaactctacaatctgactcaatccacccaccgctctaccttacagtccctgacctttctctcgctcatccaatcctcattctcacctactgccacctcaacaaacctctccttctcgtcccagtacaccacagctcctcct

SEQ ID NO: 318964 - DNA, 101 bp, Zea mays
cttccccttccgttcccttgcgttggtgtttctattcatcgctgacgattgacgctagattgccgcgaccctcggaatttcagttcgcggttggggcatgg

SEQ ID NO: 318965 - DNA, 420 bp, Zea mays
ggaatttccacctaggcgtacggtctccctcctcgcttgcgctctgtttcggtgtttcctgtttcggtgtttcctgtcggtggtggcgacgactgggcggccgacgctgccaccgccctacgccagaatgcagtggcggaaatttgatgagttagagcttattactggtctgatactcctatacgatgtcactgaaacttccaattccgcaagggctttccttcttaagaagtgttggatggtttgaggaccggaaggttgattcagcagccaaacagcagttatccccaacgttgaaactccagacagataaggagacgtacagacctggtgattcagtcactgtgactatcgaaatctgtagcccagctagtttgaaggatgatgttgggcaggcagtgtcaggcgaggatgccccct

SEQ ID NO: 318966 - DNA, 332 bp, Zea mays
agcttatgcaagctctgatgacgtctttagcctctactaagcagagcaagctgtcagggaaattttgacattgccttctaaacacaatcatgcgatcatcatacttctaatacctgctgataatttgctgcacaatatcacatactgccgcgattttacacggcgtatgcgtccacctgtaaacgatgtcagagtactaccacgattgccctgactcttacatccaggccagcacctacagcctttaaaaactttaccttatgaacctgaactacgccattcgtctacaacctgtggacccatgccattgctggctgcgccttttacatttt

SEQ ID NO: 318967 - DNA, 243 bp, Zea mays
cgacccacgcgttcgctgccccttgcgttcccttgcgttggtttttctattcatcgctgacgattgaggctatgttgcctttaccctcggaatttcatttcgcggttggggcatggatgaagaggaactcacctccggcggctgcgactctgcgttgctggcgccggaaccgcgcgaacaggctgtcgaagaggggaggtcaccgcgagacgcggaggcgttcgaagactctgtggaagaggc

SEQ ID NO: 318968 - DNA, 469 bp, Zea mays
accggttctcggaatctcccggctgcagacgatgcgcgttgcatgataaaataacctgcgtcactctctgaactttcgttcagtcagctcatgcccatgcatggagcagatgaccatgatacacgatgttatgactacatactcctacttacactacattgatatatcgcacttatctcgattgccgatatgctggacgtgcgctacactctacatgctgacatttctaataacgtcctgccagccttacggctaagtgttgcatacagctaatcgcaccaaagcgtacaaaacacgagtataccaacggcgccgacaccgaagcttggacccaacgtgaacgccttgtttgcccgtgtaccgaaccgaggacctgcaaacccaggcccttgcgatggtccagcgccgttggcgccaaaggctacaatgccgatctcctcgacgtccaatacggctgcctcaatttcaa

SEQ ID NO: 318969 - DNA, 355 bp, Zea mays
ccgacgcgtacggcagaaggctcgcgtttcgattgacaccaccgactccacgggtgagcgactacgacgaactggacgactcaccaacctacatgataagtacgagcaccgtcaggaggtaccaactctatgtaaaaagaatagcacgacgtatcgatcacggagaaaacatctgaaaaacctaatatacgccaccgaccaagctaggagctacgccatctataacgcggaacaacagaatcaagaactggactccaacttacatgtcttcatcaaacccatgacccagatccaagtcaccggaagcttatagatctacctcccaaatcatcactgaccaaagtacccgtccaaa

SEQ ID NO: 318970 - DNA, 282 bp, Zea mays
gcgtccacgcgtacgagcgcgagcttctactagcatctatactgcactccggtgaggaggcggaaggtgcccggtggagtctaagtgcattgtaagcctgactctttgacaagtcaacggcaccggttgctcattcagtatgtgcgctctacagctgctatacacacatcacgttcctcaccgtacataccaaacttgtgccttccaacgacactgggcgccagaactgacgacctgctagagtggagttctgccactgatcgattgaagacgactgttatc

SEQ ID NO: 318971 - DNA, 399 bp, Zea mays
  unsure (1)..(399): unsure at all n locations
atgcaatcgaaaaaaaagttagatacataagtatcatcangatgcactactggcctgggatctaacttgtacctgatgacgccttgtagtaactgctatcagtctgtgtcatgtacacaacctagatacaagcatgaatgagtggctacaactcgtactaacctgatggaaggagtggatacaactctgataccatcaacggtggtagcagcccctagctaggcggaggatcggagcctgtatcagaaatcgaaataatataagactgtcttcaacggatcacactgtcgctcccccacgctaaatttgggggctacagtgcacacgctagccgatcaacggctcacgctaccaggcgctctacgcggatgtgccccctaaccaacttctctctccccc

SEQ ID NO: 318972 - DNA, 202 bp, Zea mays
cccacgcgtccgctagttctagatcggtaggctacctttcgtacacagttaaggatgggactccttactctgctaatgtcaaaactacagacttatgaacacatgaattccaatcaacattttctggctgaaaaaaaaaaaaaaaaaaaaaaaaaaaaaaaaaagaaaaacgatataaaagatccaaagctaaaaaacgcaa

SEQ ID NO: 318973 - DNA, 64 bp, Zea mays
actctgctaacctcaaaactacatacttattaacacatgaatttcaatcaacattttctgtctt

SEQ ID NO: 318974 - DNA, 381 bp, Zea mays
atgcaatcgaaaaaaaagttagtatacagtaaacatcattaggaaccaatactggcctgggatctatcttgtacctgatggcccttgtcacagctgctatgatctgtgtcatgtacacaacctcgatacatgcatgaaagattcactacaactcgtactaacctgatcgaaagagtcatatacaactctgttaccatcaacaacagtgcgcagtccttacctatgccgacgatcgcaacctgtatcagaaatctaaatactataacactgtcatcaacgaatcacactgccgatccaccacactaaatttggtgcctacactgcacactctagccaatcaactattcatgctaacacacgctatactccgacttgcccaat

SEQ ID NO: 318975 - DNA, 421 bp, Zea mays
cccagtccaaggtcatccccatggtaccgggaaacaccatggttcggagcagggaaagagcttcggctgggcaccatggggtttcccagtcccaggtcatccccatggtaccggtcgagtttttccctcctctctggccggcgttctgcctcaggcttgcccaggctatccctcctatcgacggatctgtggtcgccgtacccctgctccttccaacgccgcgccttgcttggttccatggccggagttccacccatccgcgcgattctccctgcccctgcgtcggtcgcccatctccctggagtttctgcccgtgccgtgcctctttactgtgctcacccaagttgtcgtcgcagctccagctcggctctgtccatactccagcttgccccctctgtttgttctcgctgatgggtcgggt

SEQ ID NO: 318976 - DNA, 372 bp, Zea mays
ctctccttttgctcggaacgcacacaccgcccgtccccgatctccgatcccctcgtcgatcgaaagatgcagatcttcgtcaagaccctcactggaaagactatcaccctcgaggtggagtcttctgacaccattgacaacgtcaaggccaagatccaggacaaggagggcatccccccggaccagcagcggctcatctttgctggcaagcagctcgaggacgggcgcacacttgccgactacaacatccagaaggagagcaccctccaccttgttctccgcctcaggggaggcatgcagatcttcgtcaagaccctcactggaaagactatcaccctcgaggtggagtcttctgacaccatcgacaacgtc

SEQ ID NO: 318977 - DNA, 219 bp, Zea mays
cacctcatcactacctcacccacccaggcccccaagaactacccatcaaccatggcgcgcggcgtcggtgtccgcctcccacctactaatcaccgactcgctcccaaagcccaagccttactccctgcgcccgccgaggatccctctcgccaagccccttcccgcatcggcggcgctcctggagctcgcgggctcacccgcgctcgccgacgacgcgcc

SEQ ID NO: 318978 - DNA, 435 bp, Zea mays
gactagttctagatcgcgagcggcatctatagcaaccggtccaacactttcacgctcaggcgctcagctctagcaatggctgcctccaccatggcgatctcctccacggcgatggccggtacccccatcaaggtgggctccttcggcgagggccgcatcaccatgcgcaagaccgtgggcaagcccaaggtggcggcgtccggcagcccctggtacggccccgaccgcgtcaagtacctcggccccttctccggcgagcccccgagctacctcaccggcgagttccccggcgactacggctgggacaccgtcgggctgtccgccgaccccgagaccttcgccaagaaccgcgagctggaggtgatccactcccgctgggccatgctcggcgcgctcggctgcgtcttccccgagctgctctcccgcaacggcgtc

SEQ ID NO: 318979 - DNA, 412 bp, Zea mays
gttctccgcacgcgcatgatcggcatgcacgatgacgacctgctactaagggctcttagggatcgcaagctctggctcaatcaatacggatgcaagcttaccaatgtcatctactgctccgttgtagagccatcttactaatcgagatcgattttctaggacacctgcacatggtaaatacctcataggctgtacatagctggaccacctgcttttaccgtcgctccagcgattcatgcgatgccgacagcagatgcacatgctaaacggcaggcatgtacatgtatgactaagaaatccggctgtgcaatcagcggatcaacagggaagatgccgtgcactacgaccgtgactttgacagtgatcccatacttgtatgtggcactgccaaagatttggatagatgctacgt

SEQ ID NO: 318980 - DNA, 306 bp, Zea mays
tcattcgtgactccgcccactagaccatccattctttcgacaacaaccatgtcacctcatttcatgagtgttatgacaccatcaatcaactcactggcctttgcattacaatgatctcaatgataaatcactgcccctaccctacttacttagcttgcatcacatatccctatcctcatctggcttaatacctaagaggtccacacctatcccacttcctatcacttgcgcagcctcaattactaatatcactctccctgtatcacagcattaatcgcagactgtgtcatatttacacacaacatc

SEQ ID NO: 318981 - DNA, 339 bp, Zea mays
gccgagctacacgaggagaacacgctgttgactgcgcactcgcacaacaacctgcaggagggacgctaagaggcatagttgacggtgacatgcaccacaggacctgaggacagtagcgtctgggaaccaacgaacacgacaatggggactgcatcagtgacatcatgcatggctacgaactcgacctgagtgccgctgtctagtatgactgtgacgcgtgcacgcactataagttcgacagcctgtagaagatggtcaaccgcactgtccagatgtacttgacggtcgacacgctcagagggctgtacgacctgaggacgacagacctggatgcgctgt

SEQ ID NO: 318982 - DNA, 251 bp, Zea mays
ggacgagcatcagtctatcgctacttacgtctagggactaatactcggaaggtgagcgcccatatcactccagggagcaccaagccggtccagctcatctttcaccccaccgacctccgtgattagtcactcagcagcgccgtaacggccgtatatctggccacaagatggtacagcatgctgatcttaggtatgaatccgactcgcgtcggaggcacaatccagctcatagaccaattaatgcgcacatt

SEQ ID NO: 318983 - DNA, 346 bp, Zea mays
  unsure (1)..(346): unsure at all n locations
cttccccgccggcgcctgctaggcgtccgcgaggagggccagcgatgaagggctcctgccactcgcaggcggnggcgcaggcggtacggaggcggcgctgggggtgtcttctgccgctcctcgttggcgccgccttcctcgccgagatcgcgttcctcggccgcctcgacatggcgaagaacgccgaggcggtcgagagctggaccacctccttttaccgccgctccgccgatttgggcgatgccgttggcggnggcgcagcctcgagggcaggcggcgacagcgaggacgaagagatccggctgtgcgagcagcggctcgagagggaggatgccgtgccctacga

SEQ ID NO: 318984 - DNA, 436 bp, Zea mays
gacccacgcatgcgtgcacacggtggtaatacaagaagatatccaccatagctggcacaactagatcctagggtgcgtccaactccgcatcaacctccgtcatcagctcaagctgcaagagcactaccaacaacacgtgacccgaactagacaagctccgccccctagcccaccacaccgctcagcatctcccgctgcaacaagcccgcacctgagcttcttcatccccttcctcattcccgtgacgccgccgacaggtccacctgcactgccacctgaagacgccaaacgtgatgcacctgatgatatggagacacaactgaagctatgagaggccaccataccgcctgcgttgctcgttgagctctgcctgcaatacgcccagcacggactgatctatactgtacctatacacctatttactacgacatgcaca

SEQ ID NO: 318985 - DNA, 405 bp, Zea mays
cggacgcgtgggtgattcttgaagagatcgagcttcttttgcaccacaaggtcgaggatgtcgtgcaactgcggatcaagctgcggctgcggctcaagctgcaagtgcggcaagaagtaccctgacctggaggagacgagcaccgccgcgcaggccaccgtcgtcctcggcgtggccccggagaagaaggccgcgcccgagttcgtcgaggccgcggcggagtccggcgaggccggccacggctgcagctgcggtggcaactgcaagtgcgacccctgcaactgctgatcacatcgatcgacgaccatggatatgattattatctatctagcttgtggtggtggttgaacaataataagcgaagccgagctggctgccatacataggtattgtgtggtgtgtgtg

SEQ ID NO: 318986 - DNA, 404 bp, Zea mays
cggacgcgtgggtgattcttgaagagatcgagcttcttttgcaccacaaggtctaggagatggtgcaactgcggatcaagctgcggctgcggctcaagctgcaagtgcggcaagaagtaccctgacctggaagagacgagcaccgccgcgcaggccaccgtcgtcctcggcgtggccccggagaagaaggccgcgcccgagttcgtcgaggccgcggcggagtccggcgaggccgcccacggctgcagctgcggtggcaactgcaagtgcgacccctgcaactgctgatcacatcgatcgacgaccatggatatgattattatctatctagcttgtggtggtggttgaacaataataagcgaggccgagctggctgccatacatatgtattgggtggtgtgagt

SEQ ID NO: 318987 - DNA, 387 bp, Zea mays
cgctacgtagcagtgcaataaaaaaagcagccgcaatggcgagcagcaccatggccctctcctccacggccttcgccggcaaggccgtgaacgtgccgtcgtcgtccgccttcggcgaggcccgcgtgacgatgcgcaagacggcggcgaaggccaagccagcggcggcgtccgggagcccgtggtacggccccgaccgcgtgctgtacctgggcccactgtccggcgagccaccgagctacctgacgggcgagttcccgggcgactacggctgggacaccgcggggctgtcggcggacccggagacgttcgccaagaaccgggagctggaggtgatccactcccgctgggccatgctgggcgcgctcggctgcgtcttccccgagc

SEQ ID NO: 318988 - DNA, 408 bp, Zea mays
  unsure (1)..(408): unsure at all n locations
gcaaccggtccaacactttcacgctcaggcgctcagctctagcaatggctgcctccaccatggcgatctcctccacggcgatggccggtacccccatcaaggtgggctccttcggcgagggccgcatcaccatgcgcaagaccgtgggcaagcccaaggtggcggcgtccggcagcccctggtacggccccgaccgcgtcaagtacctcggccccttctccggcgagcccccgagctacctcaccggcgagttccccggcgactacggctgggacaccgccgggctgtccgccgaccccgagaccttcgccaagaaccgcgagctggaggtgatccactcccgctgggccatgctncgcgcgctcggctgcgtcttccccgagctgctctcccgcaacggcgtcaagt

SEQ ID NO: 318989 - DNA, 421 bp, Zea mays
cggacgcgtgggtgattcttgaagagatcgagcttcttttgcaccacagggtcgaggatgtcttgcaactgcggatcaagctgcggctgcggctcaagctgcaagtgcggcaagaagtaccctgacctggaggagacgagcaccgccgcgcaggccaccgtcgtcctcggcgtggccccggagaagaaggccgcgcccgagttcgtcgaggccgcggcggagtccggcgaggccgcccacggctgcagctgcggtggcaactgcaagtgcgacccctgcaactgctgatcacatcgatcgacgaccatggatatgattattatctatctagcttgtggtggtggttgaacaataataagcgaggccgagctggctgccatacataggtattgtgtggtgtgtgtgagagagagagaaacag

SEQ ID NO: 318990 - DNA, 367 bp, Zea mays
cgttctgaaaagatagtctcaatgaggagacctgctaatggcaagcgcatacgaggaatgctgccgaatgatgctacaaaacggtgctcaatctgatagctagattagccattcattatagttctatagccctgtgattcacaatatcacgtacatgcgttgtcaggacagagcctgggaacgacacatcgtacttatagatctacactagagatacttgcagacacgattgagatgagcgaaaacatggacaagaagagctgtctggactgatgcaggctaggaccttcaatgcctatgctcgatgcagatcgcgtactaaggtgacaatgtgtgcaggggaatacactatcgtggcagcatttcg

SEQ ID NO: 318991 - DNA, 223 bp, Zea mays
agccacagaatctagcgccctgacaggcaatccaatgaatcgatcctaaagggcaatgcaaaggacgccacagtcctaagcatgaacatcctacgagcgccaacatactgattctaaaccgcactcatgctcatgatctcggatagacaagccggtggcagaagaaatacggcgccagctgcagcatgcgcacgccatatacaacgtgaagcagaacacgcac

SEQ ID NO: 318992 - DNA, 336 bp, Zea mays
gggcgagctgcccatatagttcactcttggaacgcttacttagcgtactagagctcagggcattgtgatggagggtctcacgggctcactctaagaccgccttaacaagagcagcacgcgggggttcctcgcctacaccagcgtcggggctgactgcgcggctgtcctagcctgctacgtgctctctgtcgcagactcgccagcatctgcggcacgcaacgatggcgcgcgcctactgctgtcctcgcgctcaccgcgcgtatgacccgaccttacgttcaacaggcgggtgatggtcgtcaacgtcatcaggttcctctggatcacgtttggcac

SEQ ID NO: 318993 - DNA, 289 bp, Zea mays
gtccgtcgtagccccacatcgtataatttttaacttggctagtcctgatactcgtacagttactagtgacacttgatcgcaggacaacaacaagataatgagctaccatctatccttcgcatctgtgtgcctgcatctgctgctgtcagcaacgctctcttcagtcatgactcatcctcgttttatctgtcaatggattatgtatattaacatgcataactagtacacgcctacccctgggatcaagaatggcgaataataccaacggaggcacctccttgtcgtggtc

SEQ ID NO: 318994 - DNA, 153 bp, Zea mays
cccactcattctttgctttcttctctaactcttcctcttttctatctcagtcattactaatagtacacactgatacaactaatattacatccattccatattacttaaatactctcatcttatttcataactctttattatacactcatattt

SEQ ID NO: 318995 - DNA, 261 bp, Zea mays
ctctcctaatcataagggcacactgggaggtccccgaaggactgatgcctggatggctcctgccggatcaacgaggtaatcgtacgttggatgacaccctacatttctactaccgacaagatcgccgacactatcctcgcattccacgtacgtacggagatatcttccatacgcatcttccgctacatcatatccatagacacgggaccctcgtacctgctcggcgagaagctgcttacagaaccagaccggtttcagcca

SEQ ID NO: 318996 - DNA, 401 bp, Zea mays
caacatcaaagaaaagaggtatattcatacccaactttggcaggtgcatcacatactaattcaccgtcacaagtgccaccaaacggtgcaaagatgatgtggcagatgccagttcctcctgtgtctacaacatacaggaaagctattggagagcataatgatacaaaccagtcctgcatgaagttccttagagaaggcagtgtgcagtcttctccaaatggatttctatcaagtgatgctgctccaagaaccagacaaggcacttttgaccttcaacttccagccgatcattatatagatgacgatgacacatcagataacaagcccatagatttccttggtttggcatcagatgcaaaaccccagaatgatgctgagcttacattagttagtgcagaacg

SEQ ID NO: 318997 - DNA, 429 bp, Zea mays
gaggctgagagctcgccttgcatgcacgcgcacacctctgcttgggtgtacgtggacagcggcagcagcggactaagagctccatgcatctgtctcctaggtgtagagatcctgctcattgtacggtagctgccaccgtctcatcgtcaaccatgtctgctgcttacaccgtggatcctcatactcatcctgctcatcaacagcagcagtgcagcaataaagtgtcgtccatggaaatggagatccccggcgaccttatcatccggatcggcgagtccgttttccctctacacaaagcggtgatggtgcccaagtgcggctacatccgccgtgccgtcgaggcggctgcggcagcggtggcggccaagcccagcagcaagggcggcgccgacgccgaccccgaccccgatccggcgggcaccgtctagc

SEQ ID NO: 318998 - DNA, 421 bp, Zea mays
tcccggacttcattgctgagcctgacgcttcagatggcacatagccaccgttggggcgatcatcgcactgagcaggcttccggggctgccacagccacatgaagactgatcgttaagtctctacgtactaaacgacgccctggtacttccaaccgataacgccaagcttgttcgacgtgaatgcctcctggtgaccgatcggctaattgttatacatactaccgatgtctagtgtgtacatgctgtcacagacgacatgctgaagcacattaactagatcaagatcatggacctgtcaagcgccgattacgccaagctcatggtggagatcatgatggaagccaacgatgctaggatgatctacatcgctctgatagtcatcaccgatgcacgaagctatggtcagcagatcataaccgtc

SEQ ID NO: 318999 - DNA, 218 bp, Zea mays
aatttccggtctaagtctatccctagatgggcaccgtccatgtcgtccagacgtttcgcatccatactccttctgtccacctgggtgactgggcccttctacagtatatgcttcttacaactcacgcggcaccatacctgcgcatcgcacaagaaatccaattcgctcgcgcacaggaagactgctctcgagagccgcatgatcatcttctcccgaac

SEQ ID NO: 319000 - DNA, 385 bp, Zea mays
cgcatcagatctagcgccgcctccttcatcccgctggccggcgagctcctcagcacgatggataagaagaccaaaggtataggttggggtggtgctggacataagttactggcaatgatggctatgaatattcattcttaaaaaaggaaaccaaatgcaagggggattgggattacctattcaccaatgcctgaaagagattgaattattattggatattttaacacaaaattggagggattacaccacctgtattaacctggatattatggaaagggcttggttcttttaacttacttaacattttaaagagtgggggttactttaagacacttttcatatgtgtgttgaccaacaagtgggcatgtttctaaataccattggg

SEQ ID NO: 319001 - DNA, 416 bp, Zea mays
tacggaacgctatcccatcttgttacacaaaaatatccgcgcgaccccgaccttcgcctcggactccgggcagcaagcagcagccagcaggcatggggatacctgtggtggttcccgtcgaggcggactactcgtgctactactccctcgacgcgccaccgagggccgccgccgacgcggcgagggcgccgagccgcgcgcacgtcgcggcggccgggatgtcctccacggcgtcctacttcgccgggatgcagctgaagcgacctcgcggaggtggccgcctaagcagccgatcggcccaagagagcggcctccgagtgaggcggcgcgctcttgtgcaagagcctcttacggctcggcgtgccggagctcagagtcatcgccggcgtcgcacgactcgtgttcaggcccaagca

SEQ ID NO: 319002 - DNA, 323 bp, Zea mays
atccacgcgttcacacaactccacatcacacatttcacatttctgtaacatcatcaactgccagggacttggtctacttcttccttactacctgcataagttgatcctacacctatatattctgaagaagacatcgatattaccagcccgtggaagaccaatgttctacctggcctcaacaagatctttgacaaggatggcaacaacgctgcatctgcacgcttcttgaaacccttcaacaaagagcacattgacaaggagattgaagacaataagacatatctgcagcccaatgtcgtggaagcctactaaacatctactcc

SEQ ID NO: 319003 - DNA, 375 bp, Zea mays
  unsure (1)..(375): unsure at all n locations
gctatgcgctcgggcgtccgactcaaggacatcaatactatatgtctcttgctgagctcagtggatgcgtgggcgtgcacactatactgtagacaactacctgctgcatgaatctctgtcattgttgtccgatgataccggtggtcgtgtacaaccacatggttacctaacacgattagaacagcatggggcaccagaaccgcgggggccacgcggagtaggcgttcgcgcggacggcgaacgatggcgcgctggccgctcatgnggacacgatgagcatccgggcagcgcgcttcaatatcagcgacagactgtactcgcgcgaccacgagaccgtgctgccgctggcgcacggtagacccctcggtgttcccg

SEQ ID NO: 319004 - DNA, 381 bp, Zea mays
gagctgcttagatccgtcgcatcactgtttaccctcatgccggcgcaatctcatccggggcaccgtgaacaaccttcggaagcgcatgatctcccttatactgcgggcacctgtatcaccatacgtgccttgcccccacttcttgccgctcttctatccgcaccgcctcctctgcgccatcaaatgcgtcgctacaaaaccattcgccgtcgaggactacctagtctgcacatgcggtcttacccaagcacaggcccttaaggcgtccaagcatgactcccatctgaaggatacctcgtaagccgactcggtcgtcgtcttgctatgcaatctcagcctgtccagctcctagatcaccgacttcgtgaccagggtccccaa

SEQ ID NO: 319005 - DNA, 399 bp, Zea mays
agccaccatcgaccttcaagtctcgctacgtagcagtgcaataaaaaaagcagcgcgcaatggcgagcagcaccatggccctctcctccacggtcttcgccggcaaggccgtgaacgtgccgtcgtcgtccgccttcggcgaggcccgcgtgacgatgcgcaagacggcggcgaaggccaagccagcggcggcgtccgggagcccgtggtacggccccgaccgcgtgctgtacctgggcccactgtccggcgagccaccgagctacctgacgggcgagttcccgggcgactacggctgggacaccgcggggctgtcggcggacccggagacgttcgccaagaaccgggagctggaggtgatccactcccgctgggccatgctgggcgcgctcggatgcg

SEQ ID NO: 319006 - DNA, 367 bp, Zea mays
gggacacgcgcaccgctccggccatgtcctggaggcagcagtgaaccggacagaggaagagatagagagaagtagagaacgcccgccacggcgccgtcaacgccacacccggccgaaccgaaaccgagactgcatcctacttcgcggcgcgccgagatgagcggcatgagcctcttccatcgtctgcctcctgtcgcggaggctgaggaccgctactacgtgtatgcagcacacccggacccacagcggcagggcgtgctgacgctcttcgtcgcggagctccgcgacgacgtgaagcgccgatagattcacatcctattataccaccagcacgtcttccatcactgtctactcgattacacaggac

SEQ ID NO: 319007 - DNA, 322 bp, Zea mays
cgcgcgtacgtactctcctgccgcacgccttccatctaccactttccagccatggccttatctaacatctgccgttcactggtcgaacatatgcttggacacatgacatagagcgtcgccctctgcactgacacccatctatccgaccgtcatggaactcagctgattgcgtacctgaatgcatggtagctgttaggccccagatagttgtcgcgctcatacagtacctatgacgtgcatctagctcggccctatctcggaaacttgcgccacacccggatggtcatgactggcactagcatcccacacatcaatgccatct

SEQ ID NO: 319008 - DNA, 431 bp, Zea mays
  unsure (1)..(431): unsure at all n locations
gacggatgcatccacgcgtgcgattcacaatgcttatgccttactgtaaattactcggaccagcttgtgactaccggaggtctatctccttagctgacgagaacacgctgctctatacgcgtctgctggcgaggtaatccgtaagaagctgtcgctttccctactagctgttagatccaattctacaacttcaatgcaatgcaagctccatccttcaccgctcagggaccagagagacacagagacgtcctgtaaggccgggcctgctctacacactggtgaccaaggaatggcattactctgaactagagacacgtntcttgattaacacgacaggaccaaggccagcagacggaacgatttaagctgcgatactagagctgacacagaatgcgctagatcttgtctctgctgatcagactggtcacttc

SEQ ID NO: 319009 - DNA, 305 bp, Zea mays
tctgcgatcagcgctactgtgtctcgtactgctgaaggtcagtcatagcgacatcggaggacgcttcggtggtacctgactggatgttgcatgtgaacatcttaggcaactggtacggtcgggcgctgctgccagaaccgaacgtgaaggtgtgctgccgagccaaccgaagctacgccatagatctgacacgacagtaatgggttgctggcgcacggaaactcgcaagactagtaccagcactggatcaacgacatacgctggagcacgtgcataagcgaccatgaacgttaagcgacgatcgc

SEQ ID NO: 319010 - DNA, 407 bp, Zea mays
cttcaagtctcgctacgtagcagtgcaataaaaaaagcagccgcaatggcgagcagcaccatggccctctcctccacggccttcgccggcaaggccgtgaacgtgccgtcgtcgtccgccttcggcgaggcccgcgtgacgatgcgcaagacggcggcgaaggccaagccagcggcggcgtccgggagcccgtggtacggccccgaccgcgtgctgtacctgggcccactgtccggcgagccaccgagctacctgacgggcgagttcccgggcgactacggctgggacaccgcggggctgtcggcggacccggagacgttcgccaagaaccgggagctggaggtgatccactcccgctgggccatgctgggcgcgctcggctgcgtcttccccgagctgctcgcccg

SEQ ID NO: 319011 - DNA, 439 bp, Zea mays
ggccactatggtccttcgcactattcttttgcgcgggctgtacttcccctggggatcagcctcggcgtgccttatatgggggcgagctgaggagcaaagcggacaacaagaggctttcgatcgatctccctacctatctctctctctctgctatcccttccactgcttacctacccactagcttttagtagaaagaggagggccgggacgtggtgacaaggctaggctagcttggggccggcggagatcgatcgtcgacgtcgacggccatgacatggtgcaacagcttcaacgacgtgcgtgccgtggaggacaacctggccaccgccgacgtcgccaagaaacagcatctgcaggcctgcttccacgtcaacctcatcaggacctgcccctcctgcggacaccgtgcgcagtatgacgaacagcgatcggatcgtcc

SEQ ID NO: 319012 - DNA, 290 bp, Zea mays
gtccactatggatcttcgtgctattctttcgcgcgggatgtccttccactggggatcagcccacgcggtgccttatatagaggcaatctgaagagcaaagcggccaacaagaggctatcaaccgatctccctacatatctctctctctttggtatcccttcctctgcttaactacccgctaactcttagtagaaagaggatgtacctgacatactgacaaggctaggctagcttgtggccgtctgagatcgatcagatgtgacgactgacatgacatggtgcaacagctt

SEQ ID NO: 319013 - DNA, 317 bp, Zea mays
  unsure (1)..(317): unsure at all n locations
gttcgagcggctcagcaaagaagccaccgtgcccagcgacaccgtcgcattcgccaacgttgagggagcggcccccgccccggatgttgcatgggtctccgacctcatcaactgagggaactcgtggaactaccagctcagaagttcgggggggggggggggggngggcgggagcgacgaacgctaatgcggcgacttcttaactcgctagctcttacacagttatgtacctgatccttgtacagatgttgctgatgtgtgaatagaatcgtaagcacgtcaaagggagccaagggctgaaaagggacacctacctt

SEQ ID NO: 319014 - DNA, 431 bp, Zea mays
tcggttggccaacatcgacttccggagcttggacctggttgtcaaaagggaaagaaacaactttgtttaaccgggttaccgaccaattaaaaccaaattggtattcctggtgataccggggaacctaaactgctgccgttgcaaagccaaaataaccaaggcctggactggcttaaaagaggagttctgcatcgagaaagtgaagttcgatgccaagaaagagaagaaaggtgtgtgggtgcgtggaagttcgacgccgagaagctctgcaagaagtgtggtccaaggccgggaaaatcgtgaaggggattgtcatcgctgaggtgtggccaataccagccccgcccaaggagtgcaagcctgaggcaccgaaatgttgcgactgtgagaagtgcaagccgaagcctaagccggagccaccgaaatgttgc

SEQ ID NO: 319015 - DNA, 111 bp, Zea mays
aaaaaaaaaaaaaaaaaaaaaaaaaaaaaaaaaaaaaaaaaaaaaaaaaaaaaggaaaaaaaaaaaaaaaaaaaaaaaaaaaaaaaaaaaaaaaaaaaaaaaaaaaaaaag

SEQ ID NO: 319016 - DNA, 420 bp, Zea mays
cacttgctctccctccaacaagctaattaaggccggtcgtcatccctcttctagctcgttttattatccatggcggaggagaagcaccaccaccaccacctgttccaccataagaaggacgaggagcaggaggagcagctcgccggcggcgggtacggcgagtccgccgagtacacggaggccacggtgacggaggtggtgtccacgggcgagaacgagtacgacgagtacaaggaggagaagcagcataagcacaagcagcacctcggcgaggccggcgccatcgccgccggcgccttcgcactctacgagaagcacgaggcatagaaggacccggagcacgcgcaccgtcacaagatcgaggaggaggtcgcggctgcggcggccgtcggctccggcggcttcgccttccacgagcac

SEQ ID NO: 319017 - DNA, 421 bp, Zea mays
gacctccgccaccatgccagtctggccatgtgttggccgtcggctccctggaaccagcgccccagccaccaacctccgctcacttcgacgacggaccgtgccgctggtccatccatggccgtgagtccacctccgccgagctgctagtctctagctcctccgaccattctgctcgcccgacaacttgtcacaactgggtctgctccatcggctcctcgtccggctttaacatcaccgtggccagcagccacttcaaattcgtgagcgcccaacgccgccccctggttcactccctccgtacgcacatcgcccttgtccccggtccatgtagcgtgtctctacgctctgcgtcctcgccgtcattatttttggagttcgtcgtaacgcgctgccgatggtctgcgtatagcgggagatcttc

SEQ ID NO: 319018 - DNA, 438 bp, Zea mays
tcggttggcggcttcaatacagggctttggttcttccaacttttgaaacccttcccaaccggtgagggatcgatcggtccaacgccaatttcccaagccggaaccgggggattcggccgcggcccgggttgctgggcccccgggcccggggccggcgtacaagacgaagttgtgcgcgctgtggcagcgcggcggctgttcccgcgacacatgcagcttcgcgcacggacacgccgagctccgccggttccccggatcgcgcacctcgttcccaccccgcgccgggagaagagattatagagctggtgactttagagataggtttgataggaggcgctcacctcataggaggcattcccctgatggagattccaggggccatcgctcccttcgtgaccgacggccaaattcccaagaaagggaatctagctattcacg

SEQ ID NO: 319019 - DNA, 424 bp, Zea mays
  unsure (1)..(424): unsure at all n locations
gccagccgccgagcgctcgagccgggtgcccggcgcccgtgtgacccgtgaccggctgaccgaccgcagtccgcgtcctgcgttcacgcgtgtacgcgccgcggtggcgttgtccgccccctgtccgcccctgacagacgcgaccagctcaccacgccgctatggcgcactggcgcggttcaagtgtccagccgtcgtccgccaagttgcccggagcaccgtcgcgcgccgcagtccgcagacaaggacataaggtgtctgacagtctgagcacgcggatctgagcagagcagctgtctgagcgcgctgctaaccatgcggtcacgccgctgtatgagcgcacctacgcgcagatctgagcagacaagacaccggtcatcctnctgaacggcatacccgaacgtcaccgcggttcgcctcggcc

SEQ ID NO: 319020 - DNA, 440 bp, Zea mays
gtcttcacactcctcgccatcacataaaaccagtgcaagcagaagcagcgcaatggcgagcagcaccatggccctctcctccacagccttcgccggcaaggcagtgaacgtgccgtcgtctctcttcggcgaggcccgcgtgacgatgcgcaagacggcggcgaaggcaaagccggcggcgagctccggcagcccgtggtacggccccgaccgcgtgctctacctgggcccgctgtccggcgcgcccccgagctacctgacgggcgagttcccgggcgactacggctgggacaccgcggggctgtcggcggacccggagacgttcgccaagaaccgggagctggaggtcatccactcccgctgggccatgctgggcgcgttgggctgcgtgttcccggagctgctcgcccgcaacggcgtcaagttcggcgaggccgtgt

SEQ ID NO: 319021 - DNA, 328 bp, Zea mays
ggcagtcaggcgcatgctgcgcgcggctccgcagcaccccttacctttcgccgattgcaccggccgtgccttcctccaccaccagccgcggcacacccgcggaaccgtcgctcgagctcgcgcctgaaccccccaaactctgccaaatttcgccaaatccagccggtcggaccccgcaacacatcgccaaaaccaaccgggccggccgacacaagccgcagcccgtggcgatggacctggcgtcgagcgaccttgcggcgctgggcgcggcggagctggtccgcgtctcggcgtcgatcccgcgcgcggctccccgcaccttcgcgct

SEQ ID NO: 319022 - DNA, 83 bp, Zea mays
gccgaaacaagttactaggcccttggaaccagcaacagaagctgtctcgtcttatcatggagacctgccagcaacatggcggc

SEQ ID NO: 319023 - DNA, 439 bp, Zea mays
  unsure (1)..(439): unsure at all n locations
gcgaatggccgatgtgcttgacccggcctccgacgcgccgcgcgcgcgccgtccgccgccacctcccccggatagcccggaggaccgctcgccgcagctgcccccgcctccacccgggggcccccccggcggcgagccggaagcggagtcgctctccgccgccgccgccgccgcctccgctgggttcgtcccggccccaaaggtatcgggaccaccgcagcggcggagggcggggcgggagcagccccagcccgccgccgtaccggggcagccgccgccactcgccgtccaggagatccccgtcgccgccattcaagcggtcgcggagggacgacgggtacgaccgccgcgggggccgcgggagcccgccgcgttacgggtacgatgataggaggcgaggttatgaccatgagcgangtggcggcagaagtgggtatga

SEQ ID NO: 319024 - DNA, 428 bp, Zea mays
ggccactattattattttaccatcacctacccgctgccttcctccttcttttccctttcccatcgtcgaatcctcgccccttctcccgtcggctgttgcttttgcttcgaattcccgatttgcttgccggaaccctagcgacgccgtggtgacgcgacgccgacgcgtatggagatctccttcgaggcgtgggagggcgtgcagcggcatggtcaggacctcgcggaccgcctcgcgcagggtttcacgggcctgctccaggtgccgccgcagttcccgtggccgccgtcgccgcacaagcggatgcccttcgacatcgacctccccgtcgtccccttcggcgccggcggccccctcggcgtcccggtgaaggacttccccttcctcgccgcggccgtctcctcggtcatcgacatcggcggcaggct

SEQ ID NO: 319025 - DNA, 415 bp, Zea mays
gaaggaccgagtgctcatgccccagtatcttcagggtctgacagaatcagcggtgtgttatcaacagatgcatctgaacctgatcatttgtctgagtgcataccatcacaggatacatccatgatttcacagcttgacagcaggaaagctcatctgagtgctctgcaacaggaaagggttgagaaagtaaaccaaggtccggaagatatctctgcaaatattgggccagtggaaaaggaacatgttcatggggatctgactttgcaatctgctagtgccgtactctctattagctgcaatggttctaatcaaggaactaaatctgaaaccaatcttcaaccatggactgctacagatgataggatggcttttggagagcagaatgcggaaaagtctcacttagaactcattggta

SEQ ID NO: 319026 - DNA, 250 bp, Zea mays
gtatgcttgattcacactgctgatttggcattgtttgaacacattataacgaatggtctttccatactcttagcaagactatatgttgctttatgtactatctatttacactaacactgttcttttttacgcttaaaaataaattgcatcttcctactttctttgtgtatgactcctcttctctatcctatttcttttctacaaaaaaaaatagttatacactatacctattagttacctgcaagtttta

SEQ ID NO: 319027 - DNA, 443 bp, Zea mays
atcgtgcaagccctcgctgctcgccccttctcgcccacgtcgtgcccccgtcgatccatcgtttgtgttcccccttactccctgcgccttcctctcaccctctatcgcctaaaaaccctagtccgtgcccagccactaccgtcgactgcgcgtggtcgctggccgcgtgcgtcgacccaactgatggcacgacctccctcaccttcgtcgctaacctgatccatggaaggcgaaagatcccctgattacccctctccttccaccttgctcggctccaccctgcctcgactggccgctctactgcaccgtcgtcaccgtcacaaccaccatgcggaggcggatccacgtcgtctaggtcgacgtcccgttgctggagactaggcgcaggcccatcaactaacacgccaccgtcctcgcaccgcatgaggtgctcacgatgcggg

SEQ ID NO: 319028 - DNA, 409 bp, Zea mays
gagggtcaaacatgcactactattgccatgaagatccactcacggctgcatgcaatccgagattgtcaatgatgcatacatgctggctatctgtatacaggcacttggactacaatctttcacatgacatgaacgccttccataaactggtcattgacgatcaacagctgctacgtacatcaagttcaacacctagatggctaagctggcctttaacctatgaacatctgctgtttacgatacgagatctacgttctttgtagcaaatgacaatgctagtccattgacagaatgtgctgtatactggtctaccgcttccagcataactaccattcggaaaccgccactctttgagtatgctgacagttccatgacaaatacttgtcgcacaagctttgtcttacactct

SEQ ID NO: 319029 - DNA, 429 bp, Zea mays
accttcaagtctcgctacgtagcagtgcaataaaaaaagcagccgcaatggcgagcagcaccatggccctctcctccacggccttcgccggcaaggccgtgaacgtgccgtcgtcgtccgccttcggcgaggcccgcgtgacgatgcgcaagacggcggggaaggccaagccggcggcggcgtccgggagcccgtggtacggccccgaccgcgtgctgtacctgggcccactgtccggcgagccgccgagctacctgacgggcgagttcccgggcgactacggctgggacaccgcggggctgtcggcggacccggagacgttcgccaagaaccgggagctggaggtgatccactcccgctgggccatgctgggcgcgctcggctgcgtcttcccggagctgctcgcccgcaacggcgtcaagttcggcg

SEQ ID NO: 319030 - DNA, 372 bp, Zea mays
atctaaacggagctctaagcgtctcggcaaagaggagcgcaaccgcactggggatgaggacagtaaggctcttgtccatggccatcccaacccaggacgcgaacaaggcggaggagatccaattggggtacacgcgtgcaacgatgatccatagatccaataacgatatgcaggcctctgcgtcccggatcgctcgtggcggacaggacggtgtgctacacgtcggcagactgccatgtgagcctccgagctaacggatgggcgagacacggctatactaaggctggcactcaggctgactgacgccgcagcgtgcaacattcggcaggaactgagagttagacgtcatccattcctgctggtccatgctaa

SEQ ID NO: 319031 - DNA, 383 bp, Zea mays
tcgtgcgtccacgcgttcggtttcttgtgttcgcagatgaggagatggtgcggtcaaagagggctgctacatcgcttcatcaaatataaaatgtcaagatcgcacgcggccggcgacaagcagatcccatagagaagggaaccctagacgaaggtagctagatacggttgaggtctgagcacgagaccgtctcatcaagctgttcgagaagaccatgcccgtgccggagacggccgtcatccgcgaggctgccaaggacatccaacagagcgccagaagcctcttcggcaccactgactcaaaatgacaggagaacaacgttcaagactccacaagctcgcctacgtaacacgaggtccattacaccgaatactcgtcggaag

SEQ ID NO: 319032 - DNA, 392 bp, Zea mays
aaaaaaaaaaaaaaaaaaaaaaaaaaaaaaaaaaaaaaaaaaaaaaaaaaaaaagaaaaaaaaaaaaaaaaaaaaaaaaaaaaaaaaaaaaaaaaaaaaaaaaaaaaaaaaaaaaaaaaaaaaaaaaaaaaaaaaaaaaaaaagggggggccgttttaagggacccaagttaacttccccgggcttgcaacgtaaaagcttttttaaggggaccccaaaattaaattaaggggccgggttttaaaaacgtcggaacgggaaaaacccgggggttcccaaattaaatcgctttgaaaaaaatccccttttgcaaagtggggttaatagcaaaaaggcccgaacgaatggcctttccaaaaatttgccaaccctaaagggaaaagggaaccccc

SEQ ID NO: 319033 - DNA, 448 bp, Zea mays
  unsure (1)..(448): unsure at all n locations
ntccggcttggcgccttgcaagatgtncctgggaggccaactcaaaatgggccttcaacttgaattaatggcaatctggcactatggaaccggcaagagttctcttcgatgagggagacaattgtaagggctgttgtaaccaatcttcatttgctggatcttggaatgcaggtctctctattcaaaagactgcttcagatggtgagaaacttgagagcagaatcagatcgaatgcatgctttggcatgtatttgtcggactgctctttgtgttgatctttttgcaaaggagagtgtccgaagaggtcagaagcctgttcctggaacagatgtgatatcgctctttgaagatgtgagggtgaaagaagatctaaacagcgtaacaagcaaaaacttgttcagagaagagctagtggcttccctagtcgaaagtngtttccagctatctc

SEQ ID NO: 319034 - DNA, 413 bp, Zea mays
tcgcgctccatcagctacatggagccagtttactaatgggcatctacttgtaatcagggagtgctgacactatggtatcggcaacagttatctaagatgagggagacatttgtaaggtctgatgaaaccaatcttgatttgactgatcttggaatgcacttttctttattcataacactgcttcatatggtgagaaacttgagagcatactcagatcgaatgcatgctttggcatgtatttgtcggactgctctttgtgttcatctttttgcaaaggagagtgtccgaagaggtcacaagcctgttcctggaacagatgtgatatcgctctttgaagatgtcaggctgaaggaagatctaaacagcgtaacaagcaaaaacttgttcagagaagagctagtggctgccctagt

SEQ ID NO: 319035 - DNA, 412 bp, Zea mays
gctggcttctcctccccctcttatcaagtcctcctcgggttagggttccttagggttgtgtggaggggcgatggcggcggctgatgtggagtaccgttgcttcgtcggcggacttgcctgggccaccagcaacgagtcgctggagaatgccttcgcctcctacggcgagatcctcgactccaaggtcatcaccgaccgggagacggggaggtcccgcggcttcggcttcgttaccttctcctccgagaactccatgctcgacgctatcgagaacatgaacggcaaggagctcgacggccgtaacatcaccgttaaccaggcccagtcccgtggcggcggcggcggcggcggcggcggtggctacggcggcggtcgcggcggcggcggctatggtggcgggcgccgtgacggc

SEQ ID NO: 319036 - DNA, 265 bp, Zea mays
ctggcccagcatctactcctgtagctttactttttcgtcaaaatgaaaagaaacactgctctgtaactggttgacagtaccactcatagcataatgggtatactgctgattacggtggacctagactgatttcgatgtagagccaatatcaccaacgtccttgactgtctcatagaggagttctgcatcgagaaagtggagttcgatgacatgaacgataataacgtggtgattgtgcttggaaagttcgacgtctagaatctct

SEQ ID NO: 319037 - DNA, 276 bp, Zea mays
accactccttccgacccaaacgcgccaaggcggcaggctttccttcgtctcgtggttcttcacccactggttctgggaatttttgggcgcccattggcgagcaacttgcttaaaacttagggttccacgaatggggaccttgatggactaaaattttgcgtggagagccaagacatttggaaagacaattacatgttgcaattggataaccgctccggcgctcgacgggcggcgttggcgtttcggcaatgggatatatactcatgtgccatcgcg

SEQ ID NO: 319038 - DNA, 246 bp, Zea mays
tcatatatatatatagaatcaatgttagagtagcttcctaccataagcggcatgtggacgacaagccgccgtacgccgccttggacgacaccatgaccaccatcactaataatatggtgaaggagcaactctcatactacaccttcagcttcatctatcttccatagcataactaccgtgtatggaatgccatgccctacgtcatatacaactatacttgctagaagctgttcaccatcgttacca

SEQ ID NO: 319039 - DNA, 118 bp, Zea mays
tcgaaggtattagctgaacactctggataggatctttatttaatgccgggtattattggaattggacccttcttaatctggaaaggtggttttcctttggaccaatccttatggtttc

SEQ ID NO: 319040 - DNA, 446 bp, Zea mays
ccggtccagcactttcacgctcagctccagcaatggctgcctccaccatggcgatctcctccacggcgatggccggcacccccatcaaggtgggctccttcggcgagggccgcatcaccatgcgcaagaccgtgggcaagcccaaggtggcggcgtccggcagcccctggtacggccccgaccgcgtcaagtacctcggccccttctccggcgagcccccgagctacctcaccggcgagttccccggcgactacggctgggacaccgccgggctgtccgccgaccccgagaccttcgccaagaaccgcgagctggacgtgatccactcccgctgggccatgctcggcgcgctcggctgcgtcttactcgagctgctctcccgcaacggcgtcaagttcggcgaggccgtctggttcaaggccggctcccagatcttcagcgagggc

SEQ ID NO: 319041 - DNA, 337 bp, Zea mays
ccggattcccggtcgaccagctccgaccggcagcggcgctgcgcatggccacccagcagtttcgccgctccgatcccgccggcgcccggtgcacacaggcgccgcgtcgccagcacgcgtcagagctggacttgcgactttcggctagccgggtcggctcggagcgctgcggcggagcgtctttcgactctgggccagtcgtgcaagcacgggaaacgcggagggcccgagagcgaactgaggggacaacgttcgcgatcggcggacttctcgggctgacgcggaggactgcgatgactgtcgtcggaacgaagggagcgtagaacgctccactctc

SEQ ID NO: 319042 - DNA, 83 bp, Zea mays
  unsure (1)..(83): unsure at all n locations
ccccgaggagtcggaggatgagaagcgcgagcgtgtncgncgcgagctccagaagtatcgaaggagcaagcggataagaggga

SEQ ID NO: 319043 - DNA, 346 bp, Zea mays
acgaggagcagcaccctggtacttttactattttctcctgcgaccaccataagcgccgctgggtaatacatcaatcatcacttgatcagcaccagatcatagatctcagcgtatgacgtggatatcgcgaatagcggcggctgcagacaaacgatcaccatgctactgtcgctgatcatcgttcagaacatggagccgtactaccaagatctgtggtaactgttcttcatgcagtcgagcgacagctactacacgcgcgccatcaaccggttggtggagacactgtactatatgaacttcctcaacaagacgtgcatcaacgtcctgctcgactacatcgaggtca

SEQ ID NO: 319044 - DNA, 468 bp, Zea mays
  unsure (1)..(468): unsure at all n locations
ggaatttcccgggntcgtacccacgcccgtccgttcgctcttccaccagcaggccacccgccggctgttccaaccctacagccgtggcctaccatcgttgcccccggaaggctcaaccttccttcccgggggcggcctccctcctcccaaccgtccgtacccccacttcttccccagccgacctctggccgccgccacccccgagccggcgagctcgggctccctccggccgcctccatcccttccccgaccggcgccttcctgctncccttgccggcgagcgcgggctcaagcgcgccccgactagccggctgctactgctcgacgccggatgggggagacgacgcgacgctcgctcgtggactggcgcccatgggacgaagctgcggactccctcgatcggccaccgtcgtgccctctctgggcgcgcccactactgcggtgcccgtccagctgccagggacgccc

SEQ ID NO: 319045 - DNA, 431 bp, Zea mays
gaattggtagaacctagagtcgcctggacgcctaggcgtcgcctaggcgacgccataataaccttgcttttcagtcattggagtatattttggttcttgtgttttactgcatatctgatttttgttcccaatgcatcatacatatctaggttgcagctgttttgtgtggatataaaatgagacctgaatggtttgaataaataaaacaaagttaggagtccccgctgattgctttgcaatttataatgaaggaaatttatctatgcttaatgcattcaagttccaacaggatttggattttttttattttactttgctgtgtttctatttcatgaaggcagatctggtgcagcggtgaaagttgtctcgctgagtcaccatgcctctctgcatttgcaaaggaaaggtttgtctctggttattccttccca

SEQ ID NO: 319046 - DNA, 374 bp, Zea mays
ggctggtgccttcatgatctgccacaactgttgcggccgtggccacatggcttatgagtgtccgtctgccggtctcatggaccggttcccccctcgccgtttctgaaggaaggacatccaagggctgttcagatggctgttgttttcagcccattttgtcaggagcacctgttttgctttgctttatgtatttctaaacccgaatggattctagatatttcagattcataactcgtcagcgctatttgtaattctggatatgttacccgactccgatgttcttgatgataatgtttgaagacggggatacttgcccttacgaactcaaaaaaaaaaaaaaaagacaaaaaacagaaaaaaaaaaaaagggcggc

SEQ ID NO: 319047 - DNA, 299 bp, Zea mays
cgaccgactcgaccgaaacagcctggatgcccgagctcggcttcgccttccaggtatatgtacctctgtgcaccagctaggtcatgggggtcctgctctaccatggacaggcccaactccgcgcgctcgccggatcccctgctaggcaccgactgccggacctcgtgctctcgtgatctcactactatgtgccgcatcgtcgtcagtgcctctggtgccttgcatggcgcgctgctcccttcaggctactcgcggtagccatctgctctgctcgaccactagactcttacatggtcatg

SEQ ID NO: 319048 - DNA, 154 bp, Zea mays
  unsure (1)..(154): unsure at all n locations
ctttccgggacgaccgangcgagccacacgtccgcgatttgcgagctcggcttcgacctaccgctatctgtatgtcagtgcacgagctcgggactgctgggactgctctaccatggccgatgcccaacatcgtgcgctcgccggatcccctgct

SEQ ID NO: 319049 - DNA, 132 bp, Zea mays
acagcgatcatattggagtcgtactcgtacataagccacatccctctgctagctagctagctccggctagagtggaaagtgcatgatgggaagctccgactacgcttccgtctccgacgaccacattgcaag

SEQ ID NO: 319050 - DNA, 333 bp, Zea mays
actaggtctagatcgcaagggccttcctctttttcaccacatccttcttctgcaccgtgttccagcgaatttagaacacggcgctttattactacgaccgcataacaccaaactcgttattgacaaaactttcccacaccgccaaccatagcaccccatcaaccaggccctcatatacaacgacctcaacttcattaaaactaccaccctactcgcacttgcaactaacaatggtcttaccgtcatagataatacacgaacgctcgccctgggtaaccaggacaacccctgttaaaaagccgatgcccttaagaacttttttgccaggaccga

SEQ ID NO: 319051 - DNA, 228 bp, Zea mays
ggccagggaccaatcacagtcatcttctcccgttcacgtaacgtgcactagggtttatggtttagggcgacgcgccgccgtcctacgtccagcggccaggttttcttctggccctctgcgctgactacaacccaccacctccgggttaggttttggatttggagacatggcggaagtggtggacaagctcaaggactacgatatcaagaaggagggagaagcagagat

SEQ ID NO: 319052 - DNA, 147 bp, Zea mays
  unsure (1)..(147): unsure at all n locations
ttccttggtcgagcacgcgtgcgcnacgcgtccgctgaaaagacctctcgtcatagatgagttatctgatgactcagatgacgaggggccgatggggttaatgagaaaggttgaggagaaaaaattgaaaggagttgatactccggt

SEQ ID NO: 319053 - DNA, 329 bp, Zea mays
cggacgcgtggggttggcttctcctccccctccggttcgggttcgggttcgtgaggttctccggggttcggggtcgtgggtgggcggatcgagatggcggcgtcggatgttgagtaccgctgcttcgtcggcggcctcgcctgggccacggacgaccactccctccacaacgccttcagcacctacggcgaggtcctcgagtccaagatcatcctcgatcgggagacgcagaggtcccgcggcttcagcttcgtcacctttctccacggaggaagcgatgcggaacgccatcgaaggcatgaacggcaaggaacttgacggccgcaaca

SEQ ID NO: 319054 - DNA, 315 bp, Zea mays
aactaccgactcgtgccactcgtcagctcagacgtatactcatcttaaccaaccgcttccagtcctatccccctctaacatggccatcgagcaccacctctggatctccctggtcctgatagacatgctcaaccatgtggccactcttcagggtcaccctactacctactgcatatacctcgtgctgaagtagaccccggcctactcggacaccatgacgagctgcttgtagcccaagaactgaaaccctttgggaaacttctgaatccccagactctggacacacagcaactactgctctacatcgctgaactc

SEQ ID NO: 319055 - DNA, 153 bp, Zea mays
aaaaaagaatacctaaaatagactgaaaactacttagaatagaagcaaaagcggcaacaacaagaaggagtgggcgtacagcgtggccgaagccgatgaccagttcgagcggttgcactacgcggtgctgctcgacgtcctcaatcgcatcgg

SEQ ID NO: 319056 - DNA, 404 bp, Zea mays
cccaatcccatgcgcccctctgctctcacggtttgatttccctttcagttgggccggcatggccgcggtagcagctgtgcgcctgcaccccggcctcccccatcgccggccctgacactgggtaaacgtggtggctgaagctgctgctgaggattcgggatcttcttgctgccgccacgagctgcctgcgtgatattgacacggcgcgctcccctggctcctgggcatgacgaggggaggcggtggacaaggaggcaaggaggagccggggaaggtgatgggtccgctgttcccgcggctccacgtcaccgacgcaggcaaggccggcggcccgcggcctcggccaaggaccaggatggccctctacaaccagttaaccgtgccgtccaaccgtttaagttccc

SEQ ID NO: 319057 - DNA, 224 bp, Zea mays
aactacccactcgacccacgcactccttacagccaaacaattcaccccgttaatacattctactacgacaatctactacctgcgccaagtagcgatactattacacacgactttaaccatacctagcctcaaatacaaactatcacatgatctataaattcacatactcatgcatcatgcatccacatatatcttatataccgaagtctataacacttaattac

SEQ ID NO: 319058 - DNA, 369 bp, Zea mays
  unsure (1)..(369): unsure at all n locations
cccacgcgtccggaagtgtcggccacatcccacatgtgaactgcccactgccgcagtgcggcaggcgcggaccccaacctatgcagtacgcagtangcatcaagcgtcctgtgtggctgcatccaagtccaagcgccgtccggccaccagcacaggtaccgagccaccaaggtaggagccggccacggtgcagatcccaggctgccagccaccggcgtccagcactccggctgccagctaccggccacccgcagcgcaggccacactgacgggcagcagccgcacgacgctatggctgccgacgaacaccgacgggcaaaacccaaaatccaacccaagggtgggttcaagctactggaaggcaatgca

SEQ ID NO: 319059 - DNA, 303 bp, Zea mays
cttcaaccgaaggagttaccaagtatttcaatcctgcttttcctagcttcacaatgcgcaaaaagcgcacttaccctttcggatcccacaatagtccatctttctgtcatcattgcacctgctccagagtatcagccacctcctactgcctctgctccaccaatgagtggaaccagacttccagttcatgattgacacaacaactttgttcacaaaccccatgactttgtgaccactatccttcccaaggtttctctcctagccaaatacccttttttcaaggccaaaccttttattaaaaac

SEQ ID NO: 319060 - DNA, 366 bp, Zea mays
gcagcttctcccctcccccccctcgtctccgtacagagagggctcctcgctgccgtgtgccgggcttcactgtcccctctcgtctcctctcctctcccatggctcagcgcgacaagaaggtggaggagccgacggagctgcgcgcgccggagctcacgctgtgcgccaacagctgcggcttcccgggcaacccggccaccaacaacctctgccaggcctgctttctgggccgcacgggtttcttcttcggcttccgcttggcggcggcggccttcttcttcttggcttccgcggggcttcaattcgacgaccagcagcaaaatcccaagccctgtgccccggccgcgttcgggcccaccgaggaac

SEQ ID NO: 319061 - DNA, 190 bp, Zea mays
cgactcgtcccacgcgagccatctgatctgacaaaccacatattccatgtttgccttgagaagcccccgaaggtgaggacttgtatcttttgactactgcagaatcttgaattggagcagcccaagaatatctaaaatctgcatttggtgcacgtctggccaagcttccttctgaaggtctacacgtttt

SEQ ID NO: 319062 - DNA, 177 bp, Zea mays
  unsure (1)..(177): unsure at all n locations
aaccccgggccgacccacgcgggcggaggaaagcngcagaagcaaacaaggacaacttggcagcnncagacggcaccaacggggcaactcacggaggcnangaagaaggcanngaagagagcagcaagaacagccangaaaacggcggacaggncnacacggacggcgcgaacanga

SEQ ID NO: 319063 - DNA, 175 bp, Zea mays
gcgcgattcgctcgctcgatcctagcttcccttcttcgaatcgcaacacaccatggccattgacacgcgagcctgcgccgtcacgcgccatctgctggccaccgcctgggcgccatcggccaaactccgttcacatatctctcagctcgcgctaccgtaatcctgctaaatgctt

SEQ ID NO: 319064 - DNA, 139 bp, Zea mays
agcttgtgcttgctctggggggaaggagagttagagatcgagagagagagagagatctagtacgtaatcgagtacgtggtcctcgaacgaagatgttagcggcgttcagcggtcaagtggtggaagtacctacggagct

SEQ ID NO: 319065 - DNA, 426 bp, Zea mays
caccagaccagcagcagaacgaaagggatctccggtccccaggccccggctcctccccttccgattccaatctggtctcgccgggcctggcggcgagggagagatggggaagaaccaggcgtacaaggcgatgcagcgggcgcggttggggtcctcgtccggcgcgccgggcgccgccgacgcccccgaagacggcatggtcggtccccttcctctctcctaggagatctctgtttcccatctgcacttccgagttccaggctcgcaatccatcctgatctgattatttccgcagccatattactatgctaattatatacgatagagtaggcttccagccgctgaggaattttggctaccattccactttcgctttgggtgaaagataaagaaaaagaactttggctaacgagggccgtcgcagac

SEQ ID NO: 319066 - DNA, 205 bp, Zea mays
aactagacttcctagacagactagaccctatttagaattcgtaatatccacactaaactgatccgctcagggctgactcttactatcaacagaagtattgacaaaaatctgtatatccaactgatgatctacacactccaactccatctcgtcatcaagataaacctgcacataaaggtactgatatatttactgatttttacag

SEQ ID NO: 319067 - DNA, 188 bp, Zea mays
  unsure (1)..(188): unsure at all n locations
cgnccggcgcgngcggcacggcctgtccaagatctaagagcgcacatacccatgcggggaagggacaccctctcctagatatgcagatatgcccgcacatggcgtttctgagtagcagccaacatatctaccatgtatagcagcttctcctagcaaatcatactagcacgccaggagactccatgcca

SEQ ID NO: 319068 - DNA, 283 bp, Zea mays
  unsure (1)..(283): unsure at all n locations
cccaggcgcccncggccgcggcgcgcgcncttcactccttaagtcagccgccgcctattgctcgggctcccgggcttcgcttttccgaccagccgaggccgacgcccttgctccaccgaaccaggcatcctgccgagccacgcgacgccgagcaccctgctctcgcgccctgtgcgcaagccgcgcgcactgccctgcacctgcgtctgcacgagctgcgtcgcccattcgcaccgagcgcgctgagtcgatgcgcgcagccgcgccttgctcatacgtgcac

SEQ ID NO: 319069 - DNA, 390 bp, Zea mays
gggagacgcagaggtcccgcggcttcggcttcgtcaccttctccacggaggaggcgatgcggaacgccatcgagggcatgaacggcaaggagctggacggccgcaacatcaccgtcaacgaggcccagtcccgcggcggccgtggaggcggcggcggcggctacggtggtggccgtggaggcggcggctacggcggtggcgggcgccgtgatggcggcggcggctacggcggtggcggcggcggctacggtggcggcggtggctacggtggtggtggtggcggctacggcggtggcaaccgtggcggcggctacggcaactccgacgggaactggaggaactgagcggtggggcccgcgcggccaagttatcctgttcgctaccgggatg

SEQ ID NO: 319070 - DNA, 154 bp, Zea mays
  unsure (1)..(154): unsure at all n locations
aagacgactngnnncancgagccttgaagatatcgagcttcttttgcaccacaagggcgaggatgtcttgcaactgcggatcaagctgcagctgcggctcaagctgcaagtgcggcaagaagtaccctgacctggaggagacgagcaccgtcgc

SEQ ID NO: 319071 - DNA, 253 bp, Zea mays
caattctcggatcgacccatccgtccaggcgtgctatcctggcggtagcgctggatatggctagcgcggcaccggtgactatccaagaggcggccgtggatatggtggcaactacggaaacaatgctcgtggtggctatggtcgtggtgctgactatggactcgcatgtggggctgaaggcagttttgctgctggaggtagcgacagctttgggagcagtaactttgctgacagtgctattggtgaaaaccct

SEQ ID NO: 319072 - DNA, 265 bp, Zea mays
taggtgtctcgtgggctcagaagcacatcatctgactgttcttaccaggggatcagatcttggtcctaggcgaaaacatggtgtcggtgattggcctggtgctgacgttcaagccatttttctccctaccgaatccaacgaggcattcataaatctgtgtagatgaagcccgttcctgtgaattgtatcgatgcactgcctgattacagttgggtttcaaactgcaagaattcatgacttcatgtattggtgtgtggtccatact

SEQ ID NO: 319073 - DNA, 203 bp, Zea mays
accatccattccaattcaaggtatcctaaatcatcaacatatgtctcgagaacacgaggacttataccttctgcggatcaatcatctatcatccaatcccctacaaaaaaaccattgccacatgttggctaattccacgactcactgatatttttcttacttgattgtcttcctgctatttataattaatcttcaacttacat

SEQ ID NO: 319074 - DNA, 288 bp, Zea mays
  unsure (1)..(288): unsure at all n locations
cccaagcgngcgcccacacgcccgccccacctccacgcactcacccnctcacacggggaagcgggcactccagccgagcgcaaacgccgcaacgcacccgaacgctgcgagcgcacccagctcacaggcggccagcgcacctacctgatcggactctgcccgacgagcttgctggctatgcctcctcaagctcggttccatggccttcctcgccttcgggcagctggagctcacctgcgctctgcagctcgagcagatccctggtcgacaggccgcgcacttcagtga

SEQ ID NO: 319075 - DNA, 165 bp, Zea mays
tcgctaccgaataaaaacataaataaaagatccactgtcgtctgcatcattgttttatatatatacatatatatatatgtatatggatctatctaaaaaaacgacaagaaccaaaccaacaaaaccaacacaacaaaccaaaacaacagcaacaacaaccaaaaa

SEQ ID NO: 319076 - DNA, 363 bp, Zea mays
cacaatatttcatcgattccttccttgtcttctcacctctgacgattctgtttctgaaatctgggtcctgcaaaatggttccatggtcacggaattcgccatggtcagagtcagagagagagagagagagtcgtactggtcgtcacctgtcgaagattttcggtgtctcctgagccacagctgctgctgctgctggaaccatggagatggaggccgtggagtcgcacggaggcgccgggcgccggacgcccaagagggatcgcggcatctcctgtgcctgcgtcttcatcctggcgagtaactgcttccagttcatcggctactttgccgtgtcgacgaacccggtgaactacctcaaggacc

SEQ ID NO: 319077 - DNA, 387 bp, Zea mays
ctcgtagagagaaggaaaaatatccccaaaccctagctcccgatctcgatggcgaaccctcgcgtcttcttcgacatgaccgtcggcggcgccccggcgggccggatcgtgatggagctgtacgccaacgaggtgcccaagaccgcggagaacttccgcgcgctgtgcacgggcgagaagggcgtgggcaagtccgggaagccgctccactacaagggctccaccttccaccgcgtcatccccgagttcatgtgccagggcggcgacttcacccgcggcaacggcaccggcggcgagtccatctacggcgagaagttccccgacgagaagttcgtgcgcaagcacaccgtccccggtgtgctctccatggccaacgccgggccccac

SEQ ID NO: 319078 - DNA, 88 bp, Zea mays
aggtgagagaagcatgccatcccacacctattcctgcactgcacacacaatccctccccatgtgctctgctgcaactactactatata

SEQ ID NO: 319079 - DNA, 182 bp, Zea mays
ccggccctgcgccttgctctcaggctcggctcgtggctcccactcccggagcgcagggggtcggttccgttccctgccggctttaaccccgaaaatccggccgacgctggacaaggtcgtaggctccagcaaggtggtgctgttcatgaagggcaccagggacttcccgaattgcggttttt

SEQ ID NO: 319080 - DNA, 94 bp, Zea mays
gctggcgttgtcctgccccttttaacaagtccttctccggttaagggttcctacggttttgtcggggggcggatgccgttgctgatgatgaata

SEQ ID NO: 319081 - DNA, 438 bp, Zea mays
  unsure (1)..(438): unsure at all n locations
ggggtcgcacatgaagaagaccatctcctaggagcagacggtcaaagcggtcatgaagtggcgggagactgccaacgataatgtgccgtagcgccaggctgaatgcttactctacgtgctgacgagcgccatcactacgccgagctcacaatcgcgcgacgtacccgagccatgtcatctatccggttcacactgctacacaagtccctgttcaggtcgtaagtagccgaaagcgcgccagcgattccggctcatgagctcggngacatgtacccggtggcctaccaacatcagctggacaagcttgaacccgagaggcttaagccctgcttgtacaccgtcgttaacattgacatctctgatgccgatttttcttttaacatgcggcgaccttgaacaaattctgcgtccttactcttgtatagggatgcaaaggcc

SEQ ID NO: 319082 - DNA, 196 bp, Zea mays
gcagcgtctggacccccgtccgccgttgcctatcccgcttccttaggtccgaagccacttatcgccgctggggaaaattccaaccggccgcttgtccatgaagaaggtccgatccttgaaccccgcgatgtaaccgccggtccagcttcctgaccagcccctacgcccgtgatagcagcgccccccgcttcgcaag

SEQ ID NO: 319083 - DNA, 395 bp, Zea mays
tcgccggtgtctattcctgctgcttcagctcgtaagcagctgtccgccgttgatgagaatcccaaccggccgcttgtcatggaggaagtccgcatctcgaatctcgacgaggaaccttccgctccagctcccgcaccagcccctacgcccgtgatagcagctcccttcgctgcgcatgccgcggcggttgaccatctcgccctctgctccactggtcggatcgggccgcatgcgcccgtcgatattcctactaataagatactgtcgctacccgatgcatctccagccaacgcgcccgtgttcgctcgccgggtgttttctgccgctgtgcccgccatggtgcctactaagaagactgctactgtcccctgcccatctttagccaaagcccccgt

SEQ ID NO: 319084 - DNA, 443 bp, Zea mays
gttctagatcgcgagcggccccctttttttttttttttttttggaagaaaagaacaggctactgtcttctctatctcaacagggcgacgcatttcaataacaccctacactgtttatgttgtacacacctatctagaaaagacagaaaaaaactgaagagaaagctgattagttacacggagggaccgatctaatcagttgccatcaaccataccgagaaggagctaggcaatgatctacaaaaatgctaccagggtgaaaacttcaaatcaagtgacaagcagaaggttgttttcatgcccattgttgtgcacagtgggtcgcagcggatcattcttccaaacaccatcaacaataaacttaatctcatatctaccagggtacagtctcagatttaaggaaaacatgccgttttctgatctttccaactttctttgacttgt

SEQ ID NO: 319085 - DNA, 444 bp, Zea mays
gttggcttctcctccccctccggttcgggttcgggttcgtgaggttctccggggttgggtttggtgggtgagcggatcgagatggcggcgtcggatgttgagtaccgctgcttcgtcggcggcctcgcctgggccacggacgaccactccctccacaacgccttcagcacctacggcgaggtcctcgagtccaagatcatcctcgatcgggagacgcagaggtcccgcggcttcggcttcgtcaccttctccacggaagaagcgatgcggaacgccatcgagggcatgaacggcaaggagctggacggccgcaacatcaccgtcaacgaggcccagtcccgcggcggccgtggaggcggctgcggcggcgggtacggtggtggccgtggaggctgcggctacggcggttgcgggcgccgtgatggcggcggctgctacggcggt

SEQ ID NO: 319086 - DNA, 444 bp, Zea mays
gcgatgagcgcctctcgcgacgccagggcggagagctagccggccgggagcccacacgcagctggaagcaccagaccgatcgtgccggccgagcggcggcgcaggcgcaggcgcttacatgggagtagaggcgggcgggtgcgggcggagggcggtcgtcaccgggttctacgtctggggctgggagttcctcaccgccctccttctcttctcggccgccgtcgccgccgcagactcctactagcaagctaccaaccttctttctttcattcccttaggtagctcagccgtacacacaacaacacacaagtcatcagttactagctagttagtagcctatacaacacatacatacatacaaaggtgagtgaggttcgcgtgcaagcagagccaatcgtgccgatcgagctatatacatagccggcggcgagggatgggaagagc

SEQ ID NO: 319087 - DNA, 248 bp, Zea mays
taaacgctctatcgcttaacacgacctcctcttaaacctatacaacctcctttaccatctgtacggatccagttcccatcgacccttactccatatccacaaccaccttctaacattactaccgatacttctacaccaacctctcatcgctagtttgactgtaccaagagacctccatgctcaccttccagggccagaactttccacggcccctccgccattgccgtcaatctcggatctatcccttt

SEQ ID NO: 319088 - DNA, 334 bp, Zea mays
tagacgcgagctcgacgagctctgcctctgcccatggacactccgtgccctgctacctctgtctttcctggcgcgcgctggtcgttcctaccaatttccttggcctcgctcggtacttctctggtcgtgcttactcccgctatgtgctcaagcacgcccgccgtcatatcttcaccgtcctgcttcatagcgcgcccttccactttctgctcgctcgcgcacaggtcaaaaccccctggtggtcgcgcgttttcttacaaacagaccactaattccgcgagctcccttcctaacggtccctggctccagctcgggcggccctgttccccatggt

SEQ ID NO: 319089 - DNA, 223 bp, Zea mays
ttaaggccatcttcacgataatgctcgtgcttcaagctcgaatacatgcaactaatgggaaaagtgacatcttacattgatagaatgtgaaactttaaacaataatcccacatcatatccagttaatactgtaataacaacattctagcattatgtattcaaactgcctactgatcatatgatcttaccatatgctcacccctttataaactctccaagatca

SEQ ID NO: 319090 - DNA, 363 bp, Zea mays
tccaaattgaaacaatttcaagcttttctgagctcggcttttgttcctaagactgagtcctattccagctgacgggatgtcaagccctattgaccgatatactaggccatgctatgaagggtttatacataactatgaaaggaaagatagcaaatcttatgcagacaactcataaagagataataagactaagattagctctttcaagaaaaaagcaattaatgcgacgaacaaattaaggcattcattgagaaggagaagcaaaacaaataccgaaaggcgggattacatcaatgacataatggacattaaagagcttcaagatcttaaacattccgaaatgcttaattgatgaaaatttgc

SEQ ID NO: 319091 - DNA, 369 bp, Zea mays
cccccgtctcgtactgctcccgactaccaccttaaagataaaaaaacttcaaaggaggtttcgggcgcaagaccgcccatggcccggcccgcatgtgcatggcagtgagcttactggccaatgaggtgtcggacctgagcatcggctagccggccgtgaggtcgctcccgatctccgtcgtcgccggcgaccttgccgacgcgctcctgatggtggcccgctctggcgcaccatcctgcgtcgcggtgactggaccagcgcgcgccgtcttcggacgggtcggcctagcagacgtgctctgcttcctgtgcacctacccctaagcgctcgtgcgcacctgcgtcatgttctacaagccggtctacgtgc

SEQ ID NO: 319092 - DNA, 157 bp, Zea mays
tccaacttctagggctagtcacgcttccttggggcatcgatggcatgcgtcagcaccttgcagagctgccccattgccagaacagcacagatcaacaccagacccatgggcagcaaaagcagcctggcgaaagggtcaccaccaccaaccttacagt

SEQ ID NO: 319093 - DNA, 260 bp, Zea mays
  unsure (1)..(260): unsure at all n locations
ttaagatcataagctactgagatttccaacttctagtgctagtcccccttccttccgtgcatcgactacatgcntcagcaccttgcacagctgccccattgccagaagagcaaagatcaacaccaggtccaacggcagcaaccgtagcgtggcgaaggggtcaccaccaccagccttccagttccagtgcagggcgtctactttcgcggcggacaccagcctncggctcgagcatgacgagaaccccgaggcgatcatct

SEQ ID NO: 319094 - DNA, 345 bp, Zea mays
cgacgcttcaagtctcgctacgtagcagtgcaataaaaaaagcagccgcaatggcgagcagcacgatggccctctcctccacggccttcgccggcaaggccgtgaacgtgccgtcgtcgtccgccttcggcgaggcccgcgtgacgatgcgcaagacggcggggaaggccaagccggcggcggcgtccgggagcccgtggtacggccccgaccgcgtgctgtacctgggcccactgtccggcgagccgccgagctacctgacgggcgagttcccgggcgactacggctgggacaccgcggtgctgtcggcggacccggagacgttcgccaagaacccggagcctg

SEQ ID NO: 319095 - DNA, 151 bp, Zea mays
aaacgctgtaatggaccatggcctaactcattgccaaccctcttgttatttacaagctccaaggccagatttctctagttttcatctcctatcatactaccattgcttaacctgacctgaacaaaattgaataccttatggcagtgttcaa

SEQ ID NO: 319096 - DNA, 184 bp, Zea mays
cccacacagaagcggcggcggcggagcaaacgcaggctaaggcgagggtgtgagggaaggagcggcagcggtggtgcacgtcaacttctaccgcaactatggtaagacgttcaagaaaccaaggcgtccttatgagaaggagcgtctcgatgctgaactgaagctggttggtgagtatgggctg

SEQ ID NO: 319097 - DNA, 176 bp, Zea mays
  unsure (1)..(176): unsure at all n locations
atgcgcgcaaagagcacgctctcctactcatgcagcgtgccgtgctgncactgacggcgatggttacggagcgtgcagtttgcgcgtgcacgtgtgcgtctcagggctgctacctgctactgtgtgcctctgagtgtcttagctgtggagtaagatatcggctgcgcctgacagtt

SEQ ID NO: 319098 - DNA, 169 bp, Zea mays
  unsure (1)..(169): unsure at all n locations
atcggtccgacgcgtcacgcttcccgtgctcggctcgtggtcttctctcgtggtatatagccacagctcatgnggactgggtctcgggaggggcggatgcgccgattgcgagctcgtcctagaggacctaacgactgcggcttgccggagctcgtctggatggactcgg

SEQ ID NO: 319099 - DNA, 226 bp, Zea mays
  unsure (1)..(226): unsure at all n locations
atttcgacttgcgtactcaatcaaggcaactttctcgaccactcaaatgctgccgacaaccgcggccngtgttcgcgccgccgtcgaccacggccggcccctgcttctgcccgagcgagccgcacgccatgctcatcctggctatgacctacatgcggctgcgctagctgatgtcctgcactcgcacgtgcagtggtatacgagaggccgtcacgacggacccgct

SEQ ID NO: 319100 - DNA, 126 bp, Zea mays
ctagctagctaggataccgccataccacaagtcttcttcacaagtttaggagtgacagcaacaggagatcttgatggcctctgtcagcgtgctcaagtcctccttccttcccaagaagtccgaatg

SEQ ID NO: 319101 - DNA, 217 bp, Zea mays
gctcagcatccagtcagtcagtcctcgatcttctatcctctactgcctgcatcgattccatctgcgatcgattccattccatgcatcgaagctgcatcagggccatgacgatggcagctacgacgactatgatctcagcatcagcgcatgcgtcgacgtcgcagctgccgacggagttccggttccacccgaccgacgaggagctcatcctgcacta

SEQ ID NO: 319102 - DNA, 225 bp, Zea mays
cacgagcgagcaagtccctaatccccatttctaaatctctaaccctagcgtactgagcttggcgtggcggcggcagtgtcccgggctcccagcggcacagtcgtgcggcgcgagcgcagcctctgtgcctaggctgcgcctgcacgtcggccggcggcacgcggtggctaataggctggaggcactgcccgagcggctgcccaccagtggtccagctcccactat

SEQ ID NO: 319103 - DNA, 251 bp, Zea mays
cttctgccgctttttccgattccccctgtggggccctcactttatgttctaggtcgcccatcaaatttttccttgctttaaacatcttctttatcatcttatgagttcaaaaaataattggtatctaacttaaaactgaatgagaatttggttgttagcacattacattggttgagaaaatgatatcttgctactgcattttttaacccaaatgctatttcaattccttattataatgaaattcacaattt

SEQ ID NO: 319104 - DNA, 386 bp, Zea mays
caccactctacgcaagcaatccttcggacttcggtgggggaaatggaggccgccgccgccgccgagacggggctcgcccagaaaccggttgtgctgtacccttcgccggggatgggccacctggtctccatgatcgagcttggcaagatcctcggcgcgcggggactgtccgtaataattgtcgtcgtcgagccttccttcaacacgggcgctacggcgcctttcctcgccggcgtttccggggccaacccgtccatttccttcaacggcttgcccaaagtcaagcgcttccggccggtaaggaccaaccccaagaagggcttaactttcaaggcaaccgggttttccaaccggaacttcgggaagttcttggcggcgggttccca

SEQ ID NO: 319105 - DNA, 453 bp, Zea mays
  unsure (1)..(453): unsure at all n locations
gcccgcctctgccgccgtcgcaggcgccttctccctccgctgccatctgtgctccgaatgcaggcctttggcgctcctccctccccgaaaacctcgccctcctcacgcttctctcttccccatccgacgctctcgccaccacccccggcaccgtaccgcctcgccgtccccgccagctcccgctccacgtcatccgatccacttatgcttcctttctcgcttccagtcttccaccatgtcatcctcactgagtccgcctncccgctccactccgagccaggcccaagccccgtccacctcgcgttcggatccctcgattccgacctcggcgcgccacagttgtacgtgtgggggccgtctcgtgagccgtgagcccttcttacgatccgaggccaaccccatcccactgcgaagcataaagctgagttctaccggcccaccacgcggcatggt

SEQ ID NO: 319106 - DNA, 291 bp, Zea mays
gtcctcgctgatgtcctgaacgcagctagcgaggaacttgagcaagagccaagaggcgcccgtgtgcggttctgccacgtgtcacgtaatcgacgtttccccgccttccgcggttctgccgtcgtgcgcgcgtcacgccgtcacctgaccctcatgacagcacgaatcccaaagcagaaggccaaaaccccgtcatcccagccccagggcccaggctcccggatcgtctaatcaatcccgcattccccattgcacgccgtctccgctagggttttactccgcagccacacc

SEQ ID NO: 319107 - DNA, 296 bp, Zea mays
gccgtctcccttttgcgtgagcaaagaaagagagcgagaagcagtcgccatgtctggcatcatgcacaagatcgaggagaagctccacatggggggcgaccacaagaataaggaggaggagcaccacaagaaggccgaggagcaccacaagaaggaggagggggagcaccacaagaaggacggcggggagcacaaggaaggcatcgtggagaagatcaaggacaagatcaccggcgagcacggcgacaagtccggcgcccacaaggagaggaaggacaggaggaagaaggttaaga

SEQ ID NO: 319108 - DNA, 344 bp, Zea mays
atggatgatgcggattggatcggatcctgcttcttctagctagcgctgatacgtgcgtgcgtgggatggttggcagggcgaggggctgaccctgttctacaacccggcggcgacgaagatggccccgaacgaggtgttcggcgtggcgttcaacggcggcttcaaccagcccatcatgtgcggcggggagccgaggcagatgacgctgcaggagcggggcaaagccgacccgcccatctacaccatcaggatacgcgtgccgcagcacggtggagagcccgccgtctctttcatttcatctcatctcactagttacctctcgctgatttctctcgctgcgtgcg

SEQ ID NO: 319109 - DNA, 163 bp, Zea mays
cccgttcttctatcttcctctttattcatttttgctccgaaacttgttttgttaggtgacctgttacattttcatctcgactcgtctcgactatactctcaccgtcaccacctacactctatactacctagctattaactacggccaaacaaacaactcgatc

SEQ ID NO: 319110 - DNA, 166 bp, Zea mays
ctagcgccagcaccacccgcccaaactcccttagagagagagagagaggaggaggccgtcgccgccgctgttaccgtcggccgaggcgccaggatgttcgggtaccagaatggccttgacgtcgaggccgcgacatccagagccgacgccactgatggagcgcgcc

SEQ ID NO: 319111 - DNA, 260 bp, Zea mays
  unsure (1)..(260): unsure at all n locations
cccccggactcttccccagactcgactgagatcgctcgaccgtcatcggcgccgttccacgtcgctcgcggagcctcccgcccgacagtcttcggcctcctacatcatnnctccatggcgactggccccctcggaccgtgctcgccgtggagcctcctggcagcgcgagtgccggcgtgcgccatgccgctgctccgtggtgccccgctgttcgagaaggctggccgaccatgcagtcggcagcccgcgtncgtggaagc

SEQ ID NO: 319112 - DNA, 68 bp, Zea mays
tcgacccacgcttacggcgtagactgtctccctcttcctgtcagtattagagttataataaagcaact

SEQ ID NO: 319113 - DNA, 163 bp, Zea mays
aattctcttatccacccacccatccacacttccccttcctatatataccatctaatcttttactttaacaacatactcctacacatctacgccaccgttcatactttacgaaagctcttccctacccacaaccaaaactaccctcttacttcaacctcacccc

SEQ ID NO: 319114 - DNA, 458 bp, Zea mays
  unsure (1)..(458): unsure at all n locations
gctttccctgctcggctgctccctcctacagctcgcccctcaccctctcgactccctatcctagctctctcttgtcgccgctctgctcgttctccatggcgccgacgtggagctcgcccagccctcccagctcgatctccttcgagccgtaacggccccctagcgtgccttcccagccgctcagcaccgctccagctcgccgtggccaccgttgcacatggccatgtcaagctggccgtccctgctccttccatcatcgacctcacacagcgccgacctcggccatatcctcatctctgcatcgacgcgctctgaccctgctgtcgctggtgaaggtccacacgcgtcgtcgtttgcatcctggttttctccctgctcgatgcgcccacgtcatcgtcttcctgctcgtcccgtgacgccgctcatcagatctgcgcangggccctgcgcgacgtcac

SEQ ID NO: 319115 - DNA, 381 bp, Zea mays
ctagtgccaactgccaaccaccggcagccgtccgttttccgcaggcgcgaccttccggacagagccgccgcgtcgcgccgacgagcggtccttctgcctagtttctccgcccagcgagcggcgggttcctcggagattcccgctggccgcggggatccatttggtgagttgggagccggagctccgatttggcggtttccctttgggaggtcgtctgattgaccggcggcggcggtttgctttgtggatgcagtgactgctcgcgttgcgcctggatctggtttgggacggaggagtgaaacgcgacggtgatcgtgcgaggtggggacgccatcagtgctctgtctggggtcggtctgttctttggctgcagatctggaa

SEQ ID NO: 319116 - DNA, 352 bp, Zea mays
ttttggttttttttttcaaccaaaacagagcagcagtggcttatcttattgaacagttttttgctctctgtctctctgcggcggcttttcttataagaaaaaaaatatttggtaaaactgtgtgtttagaagaagaaaaaaatgatatcttcagaatcagaaccagacaacgcctcaaggactgactaaacccttggcaatctccaccaggagaacgatctccatccagcatccaacgcggtgctttgaagagaaggcagtggacactggtgagtttgtgacttgttgttggtgcacgtgaagagaactttttttttcacccttcggtggacatcggccccgatccactttt

SEQ ID NO: 319117 - DNA, 250 bp, Zea mays
  unsure (1)..(250): unsure at all n locations
cccggcancactcagcaccagcttcgctttatggccacccacgcagctctcgccgcctccggcatccccgacaacgccccactgcacagcatatcggccgcgtcatccatgcacggcgtgcagaggctggacttctccgacttctccaggctcaagcctgagtcgtgctccgtgagcgctgccgcgcgggaagcgtccttctccgacatccttggcgcgcagctcgtctccaatgccacacgagagaacg

SEQ ID NO: 319118 - DNA, 85 bp, Zea mays
caagttgttcaaggaatccagcgaccaggatatggagcacgctgaaaagctcatggagtaccaggacaaacgttgaagcaaggtg

SEQ ID NO: 319119 - DNA, 185 bp, Zea mays
tcagcacatctcagcctttacctttctcacactctcttcactcagttcgaggaatcggtgcatttagcgaagcggtaggtagcatcactacgttcttccgccaagctagttagtgccaatggccactgctgtagcgatgctcgtggccctggccctagccctagctctgatcgtggctgctagcg

SEQ ID NO: 319120 - DNA, 397 bp, Zea mays
agcaaccggtccagcactttcacgctcagctccagcaatggctgcctccaccatggcgatctcgtccacggcgatggccggcacccccatcaaggtgggctccttcggcgagggccgcatcaccatgcgcaagaccgtgggcaagcccaaggtggcggcgtccggcagcccctggtacggccccgaccgcgtcaagtacctcggccccttctccggcgagcccccgagctacctcaccggcgagttccccggcgactacggctgggacaccgccgggctgtccgccgaccccgagaccttcgccaagaaccgcgagctggaggtgatccactcccgctgggccatgctcggcgcgctcggctgcgtcttccccgagctgctcttccgcaacggcgtc

SEQ ID NO: 319121 - DNA, 430 bp, Zea mays
gagccccagatgaagtattgtttcagcctttcaggtagtgtggtcagggcatgcacgaccatggttagttgttttattgtgagctttacctctttgcttatggcatggcttaaattttaaaatttactattgttatcaaccaaatccaacttagcaagctatcattcaatttactgcatttttaattgttgtatttcaactttatttttttctctcaaacgcgcagaagagctacacatcattatattaagagaggaaaaaaggtccaaagtggaccaaagtacaatgcctaatgggcagacccgaccagtttgaaaaccttaaaaatcaggaatagccaaagccctaataaaagccgcagcaagggccagaactatattcttaagattagccctattccaaccacttaacttattttaaaaccaacttt

SEQ ID NO: 319122 - DNA, 281 bp, Zea mays
ctcggcccagagaggggggtggggggataactgaaaggcgttcgtctttgctcaccataaaagggccttgtcgggaagctcccactactttttgttaggacaagactcacccccatgccgtgtcatgccattgccacccatccttgggagctgcagctgcctatataataccaacagtgccgaagcaagaacatccaccctgcaccaccaccgccgggcaccagcgtcgtcgaagctgctcactccatcgccgctccaagctgtgagtccgagcatcaaca

SEQ ID NO: 319123 - DNA, 447 bp, Zea mays
ctccatgtcctcctccagacctccacgatccggcctcccccacctctcgccggccgaggacgatgcgccggcatcagagcgcgcgccccggagccgaaaagcggggggcgtcatgaagcccccggccggcgccagcggcaagggcggcgcggtggacccctctctgccgcggttcaggtgccaggagtgccgccgcgccctcgtcgtcgtcggggtcgagtcctacgccgacagactgcccgcacacgccgcgcccggtaatcatgcatcttctggtcaagggcatggtaatggttgcaggcagaatgaccacctttaaggtggggctatttaaccggaccaattttaagggccctagaattcttcaaggccaaccaggggcagaaccggacattgctgatccaagccattcaccagaaccattgaaggggcaaaatttagggcttc

SEQ ID NO: 319124 - DNA, 146 bp, Zea mays
  unsure (1)..(146): unsure at all n locations
acccacgcgtccgaggatgagcacctgcacatccatactctacttcgaggttcacacanctatctctagcactgcagacacctgtcaaatctctacaaagacacactcacacatgctcaaagaccatacacctacagaggacacac

SEQ ID NO: 319125 - DNA, 395 bp, Zea mays
cggacgcgtgggcgccagggccgcagagctttccctccagctcctccctgaactctgcccctcggatggcgtccggccggagttccttggcctgaccccatgctgcgttcgcccatggcgttttcccctgctcggcgtccggtcctggctcacccgagctccctgcgcgactgccgctactccctcctgcaactcggtgcctctcacctgctccctctgatctctctctgacccgcgcctgttccacttcgtggctcagggccccagttggttgggccttgaacttccattgcttaatggccctggtcaaggttttgggcgccaagttccttaagttggttcttccattggttgcttgtccgggcggcctggttcttttcctttcttccggtttc

SEQ ID NO: 319126 - DNA, 393 bp, Zea mays
  unsure (1)..(393): unsure at all n locations
gtccgaccaacccttccgcaaagatttggccggaaccagcccaccccataaagtgttagatgctgtcattgccaaactgggtgaacgacaaaccgtgtgtttaataaaatttttttcctcatggactaggtaactagtcgactaggtaactagtccttactaaatgtttgttcttcgtataagtttagactttagaccaccattttgttcggcaaattcttgtacaatctttaagtatcttggttctggcctggtttgggtgtgttgtgtaactgagcanactcgtattaattttacgcattttttgtgaccttaatcttaactggaattagaagaaaattttggaacagttctccttaaaaaaaaaaaaaaaggccggccgttttaaaggat

SEQ ID NO: 319127 - DNA, 260 bp, Zea mays
ctcttgtcactcatcagcacggttagtatagctagccaccatgaaggtagagcgcgatctccagatgagcgcggggcgacggcgaggacagctacgcctccaactcaaggcttcaggagaagtccatactgaagacgaggccggtgctgcacaaggccgtggcggcggcgcacgccttgtcgctctcctcaggaggacccggctgcggctccatggtcgtcgcggacctcagatgcttgtcggggcccaacacactgatc

SEQ ID NO: 319128 - DNA, 462 bp, Zea mays
ctctgttgtaacacccttgttctcggtgctctattgatagtgtgtgccctacgtttggaggaagtgatcctggggtacgggcagaagttgtccattcattgaaagaggaattgaatctgatgtgtggcctctcttgctcgcggcatccataagttaatactgctctatctgtaacctttacttaacattttggattcgtcctttttaaaataatagttggaatgtaacttactgccttactttttacatggcaaatggaacaatcaaggtgaaccggccaattggccagttttgaatggtaattaacttggaaaccacttttaattaccttggaaaggccgccgtatttggtcaacttgatggggggtttgaagtgggaatctttaaaattcaagggttgaacttgaccttccaatggggattttatggccttaaccatggttggggctcattagttggggg

SEQ ID NO: 319129 - DNA, 125 bp, Zea mays
acgagatcgtactggaccaacctgggtttaatcgttgatcacacacagacacaacattctggggcaggggcctggcgaacccggggccacaaaacggccccatcgtggcccgtttcggttcgggt

SEQ ID NO: 319130 - DNA, 277 bp, Zea mays
tcgctccgcgctagcttaagaccgtacatctgcacagaagtgcgacctacgactaccacagggcaaggtccacacatggcattccaactctacttcatcgtgccccggtttcactgtcttctgggctactcctcgcccagatcctcggtggcagagctgttcgtcctgatggtgggcataaataaggtttcgtatcagggcattctctgcgactacatcggctctgacaccaacacgttcattgtgactacgacgactctcatactgttctcggggc

SEQ ID NO: 319131 - DNA, 242 bp, Zea mays
tccgggctatctcatgacagtacatcggcttttacgtgctacatacgacgacgacggggcaaggtccactctatacattcgagctgtcctccgccttgccccgtttccacggcctccctggctacaccactcccaggtccacattggcagctctaccttccgtgagggtgggcatgaagaggtcgtcgtcacatgtcatccgctgcgactacatctgcttcaacaccaacctgatcattgtt

SEQ ID NO: 319132 - DNA, 116 bp, Zea mays
ctcgaatctcaagtctagcatgtgccctttatcactctttacctactcagggagtaatcatatgatcggcatagttatttgatgggcccatagtcaccctattgtcacctaatacc

SEQ ID NO: 319133 - DNA, 421 bp, Zea mays
acgaagcggccggatgggagcagcagcctgaccctgacgcgatgagcccgcgcgcgatgctgctgcccgtctgctccgccgcgcccagctgctcccccctctgcccggtgacggcctcgcacgtcgtcgcgcgggtggcgcggagggtggacgtcggcgccgcgctcaggtcctacgccgactcgctcgtcgcgcaggtgcccgaccgcccgccgctcgccgactcctccatactctgcccctacatcgccgcgccggacgacatcgcgcgagccttcggcgcccccgcctccgagctcccgccgctccccagcgccgaccccagccctgggctatgttgcacgggcaccgaccagccgctggcggcagtcgcggacctggccgcaactgccgtggtcaactcggctcccaccgacgccgt

SEQ ID NO: 319134 - DNA, 297 bp, Zea mays
  unsure (1)..(297): unsure at all n locations
caattagctagcttcttctagctctagctaggctcgtctgctgcaagaaggtaacagtagcagcaggcatggaggggaaggaggaggacgtccgcctgggcgccaacaagttctcggagcgccagcccatcggcacggcggcgcanggcacggacgacaaggactacaaggagcccccgncggcgccgctcttcgagcccggngagctcaagtcctggtccttctaccgcgccggcatcgccgagttcgtcgccaccttcctcttcctctacatctccatcctcaccgtcatgggcg

SEQ ID NO: 319135 - DNA, 209 bp, Zea mays
gttctagatcgcgagcggcgccctttttttttttttttttttattttatttattttgtttggttttatttattgtttggtgtttaaaaattattttttatttttttatttttgaaaaaaaaataattttttatttttttttttattagtttaaaacagataacaaaaaaaagtaacaatcaagatgctattattttatataattttata

SEQ ID NO: 319136 - DNA, 228 bp, Zea mays
ccacgcgtccgcgcgctcttgcttgccaccctccgcttcaactccatcgcaacgcactcaggatagggttcaaagtgtcgctatcgcccgcatctcacctcccatacctcttcaacacaccacctcgcttacactccaaacctgccaccacaaccgcctctttgctctctacctgtccccaccctacccacgcccttcctttgctacgtttccctcccccactaccac

SEQ ID NO: 319137 - DNA, 441 bp, Zea mays
  unsure (1)..(441): unsure at all n locations
ccctcttctctctccgtcttcctcttcttaccttgtcgcgtcatctcatcaagaaagtttgctcgacaacaggaaaccccatctctctctctctctctctctctctctctctctctctctgccttctgtttccaggacgtcccaactgcccagcgccgaccggccggccaccatgaagccgccatcatcactggtgcactacttcaagctgctggtcctgctggcgctcgccaggctgaccatgcacgtccccgacgaggacgtgctcttgtccctcggcgcgctgcgcctcgacggccatttcagtttccacgacgtctccgccatggcgcgggacttcggcaaccagtgcagcttcctgccggccgncgtgctccaccctggctcggtctccgacatcgncgccaccgttaggcacgtcttctccctgggcgaaggctc

SEQ ID NO: 319138 - DNA, 434 bp, Zea mays
cccacgcgtccgtgcgttggccacaaccacaaccttatcttctggccgcgcgcctgcttcttccgcacaaattgtccagctccctctgcgtttctctctgctcgcctcggcctccaactccggccatggtggccaccggaagcgcgtctcccggctccagctcaacggtctgcgttctccctgctctcccaagctgcgcgcccctgtcctgttccctgcgcgcgctgttcctgctcgctttggcatccgcgccatggagccctgcagggacgggccggtaaatttagaggccctgtactaaaattcagaagaggtcctatttcatagaaaaaaaatacaatcagaactatattgtaatagaattcatatattctaaattgcaaaacatttactagatgtgtttgaaaagcagcaagctagctgctaactaagtt

SEQ ID NO: 319139 - DNA, 137 bp, Zea mays
  unsure (1)..(137): unsure at all n locations
taaaccatnncntcctcctcggtccgcaactctctcatgcttcgatcaccatcaccgtctctctcatcctcatctaaccaccacagcacctactccttctcattccctaacccaccactcttcccataccttcattc

SEQ ID NO: 319140 - DNA, 245 bp, Zea mays
cggacgcgtgggcgcgctcggctggaggctgagttctgccgagatctcggagctcgagtccgcagcgatggcggctccgaggaagatgatccagaatgtcttccagactgcctgaccgtgctgaatacatgtgtgtgtatgcatgtttctgcaatcgtctttactgaaaaatctgaaaccgggcagccgtgaaccttttcttctcgtaagattcataatatagatagtcactgccatgttctatt

SEQ ID NO: 319141 - DNA, 247 bp, Zea mays
tcgaggtagcgtctgctactcgtatgttattacacttcttgcaaatatgctcaggcgggtacgcactgaagccgagtaccaagcaaatgacataaactaacatgcagactagacaacccaactgaatacatgtatctcaatgcatcattctgcaatcatctttactgaaaaatattaaaccgctcgatacacgaaccttttcttttcgtaagattcataatatagatagtcactgacatgttctatt

SEQ ID NO: 319142 - DNA, 329 bp, Zea mays
ctcaattcggcggttccaaaactaggagctcaacattgcattatcaaatatctcataatctatacaactataactctcacattctaacttcatcaaattattctaataaattaataatctctaaataattcttaaaaatacaaattgctaattaattcattttcaatttacaaaaatttaaattcaaaaaaatgtgtcttaattatatcatatacaactactacacattcattcaagccattattccattttcttacaaaatattatatacaaattgatcaacccctatcttacaaatttcttccaaaatacaacacacctttttatac

SEQ ID NO: 319143 - DNA, 402 bp, Zea mays
cgaccttcaagtctcgctacgtagcagtgcaataaaaaaagcagccgcaatggcgagcagcaccatggccctctcctccacggccttcgccggcaaggccgtgaacgtgccgtcgtcgtccgccttcggcgaggcccgcgtgacgatgcgcaagacggcggcgaaggccaagccagcggcggcgtccgggagcccgtggtacggccccgaccgcgtgctgtacctgggcccactgtccggcgagccaccgagctacctgacgggcgagttcccgggcgactacggctgggacaccgcggggctgtcggcggacccggagacgttcgccaagaaccgggagctggaggtgatccactcccgctgggccatgctgggcgcgctcggctgcgtcttccccgagct

SEQ ID NO: 319144 - DNA, 410 bp, Zea mays
cacgtcctcgcctaaatccacacgcacctgatgggatctatagctgccctggcgcagtccaagtctcgcccatggaaggaatcgtcgctggaagaaatcctcgccaaaatccacgctggatgggatctgtgtgggcaccgtgggtcgcctaaatcgatgccgcaccattggcaccttccatcctcgacgccttccatccatggatggaaatcgtcctttccatcggcggcgcccttcttctccccacacagcgccctgcctccccatccttctctgcatcccatctgcggtgcagccatacgcgctcacggtagagcaccgacgggggatccgacgcctgctcctgcatccctgcagagaggcctcctcgtcctcgcccttggcggcaccgtgaggtatggctacattcg

SEQ ID NO: 319145 - DNA, 281 bp, Zea mays
tcgtggcttctcctccccctccggttcgggttcgggttcgtgaggttctccgggggtcggtttcgtgggtgagcggatcgagatggcggcgtcggatgttgagtaccgctgcttcgtcggcggcctcgcctgggccacggacgaccactccctccacaacgccttcagcacctacggcgaggtcctcgagtccaagatcatcctcgatcgggagacgcagaggttccgcggattcggcttcggcaccttctgcacggaggaggcgatgcggaacgccatcg

SEQ ID NO: 319146 - DNA, 410 bp, Zea mays
ggcgcgtgcttcttactggcaacttggcaagtggcacggccgcacggatgcgtctgcatcgtcgaggcgaggacgaggaagcagatcgaagcacccaaccacaccacactggtggtgagtggttgctggcgatggccatggaagcgatgatgagcgggctcaactccggcgtggtgctcagcctgatcgccgtgctgtggacggtggtgtggcagaacctgcagcacctgcagctgcagcagttcttcgcgcggcagctgagccggcgcgcgcggcggctggcggcgatggtggacccgtacctgtcggtcaccatcgccgagtacgagggcgggcggatgaagcgcagcgacgcgtacgaggaggtcaaggcctacctcagcgacgccagcgcccacggcgtgcgccac

SEQ ID NO: 319147 - DNA, 255 bp, Zea mays
cttctgctgaatgcacgctctctcacttggcatcatcatcttcatttggtggagtgtctgggacatgatcatcatctatcatctttattaggtggagtttcaggggcatgatcatcatctggctgacattgcattgtcaccaaaacatgctggtgttacttttttttagtaaaccagcgaaaccacatcaactattataatgaaaacacatcggtggaactgcacaaaggggaatacatgatactaatgctacaa

SEQ ID NO: 319148 - DNA, 380 bp, Zea mays
ctccggggttcggtttcgtgggtgggcggatcgagatggcggcgtcggatgttgaggaccgctgcttcgtcggcggcctcgcctgggccacggacgaccactccctccacaacgccttcagcacctacggcgaggtcctcgagtccaagatcatcctcgatcgggagacgcagaggtcccgcggcttcggcttcgtcaccttctccacggaggaggcgatgcggaacgccatcgagggcatgaacggcaaggagctggacggccgcaacatcaccgtcaacgaggcccagtcccgcggcggccgtggaggcggcggcggcggctacggtggtggccgtggaggcggcggctacggcggtggcgggcgccgtgatggcggc

SEQ ID NO: 319149 - DNA, 403 bp, Zea mays
cgtcctccagcccacctccgtggcgcccctctccctgctccagctccttccgaccagggagctgtcgcactggtgaagcagcaacgctcggcttcccctagcctccaacccttccgtcgtctttctcctctctctaatctccagcacatgcccagctcctctccacgccacgcgactgcagaccgaggagcagtccgcgccaggtgaaggcaaggagtccatctcccgcgacatgctccaggccagcggcgtgggtctggccgtggtggtcagcacggtggctatccggccatgtggagacgagcggtggtgagcagggcatccttccattgatttcctccctcggctccctccttgcttcactctctccctcagatttgtctgcgcgcagtcgtgggttcct

SEQ ID NO: 319150 - DNA, 210 bp, Zea mays
tcgtcctcacagtctttacttcatctacgtatgactatgcctaaatcccatagctcttgaagaactcgacacatacgatctttcttgttctacttaccacttatactcaacgcaccatggggctcgcacatctcgcatgcccctatataactattcctgcttctaaattttcattttactctgccctttcaacatactcgttcatctaca

SEQ ID NO: 319151 - DNA, 240 bp, Zea mays
atcctcagccccgaatgcgtgcctagtcaacttgcaccatgctcacggtaccataacctggcaccgttctctttaaattccactacctaagaccgatttacaatgttcgagcagaggctacacgatcacacacaccctggccatctctacaggtgctcttgcttctacaatactattgatcccctcgctatcgctaccaatccggagaaccttcaacgtttcaacgactctaaactctac

SEQ ID NO: 319152 - DNA, 393 bp, Zea mays
ggcttctcctccccctcttaccaagttctcctcgggttagggttccttagggttttgtggaggggcgatggcggcggctgatgtggagtaccgttgcttcgtcggcgggcttgcctgggccaccagcaacgagtcgctggagaatgccttcgcctcctacggcgagatcctcgactccaaggtcatcaccgaccgggagacggggaggtctcgcggcttcggcttcgttaccttctcctccgagaactccatgctcgacgctatcgagaacatgaacggcaaggagctcgacggccgtaacatcaccgttaaccaggcccagtcccgtggcggtggcggtggcggcggtggctacggcggcggtcgcggcggcggcggctatggtggcgggcg

SEQ ID NO: 319153 - DNA, 233 bp, Zea mays
cagaactggcgtgggcgccaataactcagaagagagacttggctatatagatatagctggtgctaataaataggagtataatcgtcatatcgatcggttgcgtgtggaatgccaatcatgtgtgtaatctgttggcaaataacaaacctctgttcctccctgctgctgttgtccgtgcgatcatgattcagaactggcgtgggcgccaataactcagaagagagacttgctgt

SEQ ID NO: 319154 - DNA, 431 bp, Zea mays
ctcgcgcttccgctttcgttctcctggtcctggccatggccttcgaacgggagccgctcctgcagcaacgacggaccggcgtcggcaatgcctgcggtgccaaggactcgtcctcggcgccggcgccgtcggctgccgcgctgccgtcgctggctaggaccgtgctcaagttcctgatgtgggcggtgttcctcacctgggccgcggggatcttcctctacccgaccaagcccgtgcaggccgtgttcaggaagtgggtcgggctcaccagggactccatgttcggcatcgccgggggtattttcctgaccttcagcgcgccaattctgatcattgcgcttctcgcatatgtgtacatctccttcttcccgagtgagcatgtggtggagaaaaggaagctgcgctcactgagtttcaggctctgggacttt

SEQ ID NO: 319155 - DNA, 405 bp, Zea mays
  unsure (1)..(405): unsure at all n locations
ggaagctgcaggagggagacgagcagtcggcggtgagagcaacccggcccggcccgggcccaatggagacgcaagtggcggctccgccacaccaccaccagcagcagcagcagaaggcggccaacctggcgcgtaccttcaccaagctgctccgccgcaagcgcgccgaggccgcggcgcagggcggcgcgcccgaggcgcccgcttctgtggctccgggagacgcgttggaggaggagcggacggagcctncgcccgccatcccgtccctcagcaagctcaagctgtcggggaacctcgccgncgactactcgttcgacgccttcttccgcaacgccgncgagaagaaggcggcggcggcgggagggggagcggtccggcagcctgcgggtgcgggggaagtga

SEQ ID NO: 319156 - DNA, 394 bp, Zea mays
cggcagtgacagagaaccagagaattcataagcccatagcaagctaaagcacaggagcgcgagagcccagcaggcgccaagaaaagcaccgcccggctggtccgcgccagcgcagtatggtgacggcgatcgcggtggcgtcggcggggctcgggatgctggcgggcgtcgcgatggccaacaggtcttcgccgccgtccgcgggcgccgcgctgtggaggcccggcgggggccccgcgctgcgctggggcggaggcggaggcgccccgcgctgcgaggcgtgcggtgggtcgggcaaggaggactgccgcctctgcgcgcgctggtccgacgccggcgcccgcgggaagaagattagccgctccgggtgcggcgcgtgcgccggcacgcgccg

SEQ ID NO: 319157 - DNA, 175 bp, Zea mays
cgccactcgcgcgcccgggctcctttccgccacgctcacgacgatgccgtccccggcgtggtatcttctcctgaatccctccaaaccctcctgcttccgacgactctcgggcccgcgcctgagccggttacatgtctcctgcgacgcgccacggggcgcgcggaaggcccgaggc

SEQ ID NO: 319158 - DNA, 249 bp, Zea mays
gccggtgagccgcgtcaagcgtgcagcttggcgtatggcctcagcatcggcgtcaagctgccgggcgtcgggtcgaacctagaggagtccaatgcagaaggaagccgaggctggcagatgtctggtcggtgcttggttgactcgaacgagggccacacgtggtggcggctagtacccggaaatccggcgcacggtggatgccagatgcttgcgtgaccgtgggctacctggtggtggaaccacgagctc

SEQ ID NO: 319159 - DNA, 415 bp, Zea mays
gtcggcacctccgcttcaagatgcagatctttgtgaaaaccctgactggcgggactatcaccctcgaggtggagtcgtctgacaccattgacaacgttaaggccaagatccaggacaaggagggcatccccccagaccagcagcggctcatcttcgctggcaaacagcttgaggacgggcgcacgcttgctgactacaacatccagaaggagagcaccctccaccttgtgctccgcctcaggggaagcatgcagatcttcgtgaagaccctgaccggcaagactatcaccctcgaggtggagtcctgcgacaccattgacaacgtcaaggccaagaaccaggacaaggaaggcatccctccagaccagcagcggctcatctttgcttggaagcagcttgaggacgggcgcacgct

SEQ ID NO: 319160 - DNA, 382 bp, Zea mays
ggtctctcacgtcgcgccgtgactccctgctcgctcgcgcacagctcggagcttcgtcgccgcgctcgtctgccgcgcccgctgcttgctcctctgctgcgcgctccacctcgtctccatggccgagcgctccttcttctccacgcgttcagccagcgcctgatgcctctccctttctaacagcgcccacactcggagctcgtcggcatggtctgccgcggtgctcgccccagcctcgactcccgtccgggccttgctgtcgtgctgctatggtgcctaggtcctggcgcgctcgtcgtcggctcggcatctcctcgagctcgcccctgccttcctgctcggttacttgtgctcgcgtcgacctcagtcaccggggccgact

SEQ ID NO: 319161 - DNA, 396 bp, Zea mays
  unsure (1)..(396): unsure at all n locations
gggattcgctgttcttcggccggcgtcgcgctcacgtgcgcgggattcctgcctggcttcgctctgtatatttaaccaatcctcagctctcatcttccaaaagttctcacctgcgccgacggtcaccggtcggtcaccatgatctcacggccgctatgcgcgctgagagagaaaaatcgagtggaggagagagaaaattgggggctgcatgagttcatccgaagccgatccttggaccctgctatacctattgcttagcttccgcggctgtacaccatcgagcgccaagagcaccgtgccggcgtggccgatatcccccaggcaggaacttcaccttcgaactgaccacggcgcatggacctcggcgcgaggacacgtgtcatctgnaaagcaagt

SEQ ID NO: 319162 - DNA, 314 bp, Zea mays
gccaattggcagaaatggagaagatccaggtttttcatcccgcaaaaagcgcattgaggatccagttcgcacaaatgttgaagatgcaggcttctcatctacgaaaaggctgtctgagaagcccatcagtgtaaacggagaagaggatcgtgaccattgtcatcaggagtcatctaaggaaccgagttgcggagttgagcaggatggtcaaggttactcatgcgatgaagaggctgtgaaaaagccagtttgtatggatagccacgatgcccaaagttcagatatctctgctgccactattgcttctgggggaa

SEQ ID NO: 319163 - DNA, 407 bp, Zea mays
  unsure (1)..(407): unsure at all n locations
cccgtcctcctcccaggcgcgaccgcgcgagacgcctgcccgagtgtaaccgtcgccgtcgagcccccatccgcattgcgtttttcgggcgcgttcaggcgggacgcatgatgcgctgctagcgtgttcaggccttcaaaacgcagcacacaccggtccgttgcttgccggcccaccgctggcggcgcgcggatcctctcccaccgcgtatctttccgtttggatccccgagtcggagctcgatcagatcggtgcctctgcctgcgtgcgtctgctctggtctactatatatgaccacgggcgcgggctgacgctccatcgcccacacgtcgaagcangtgattggcgatccttgtccgtcctcgctcgctagctgatcgacatggccgacgacgacccaagaacga

SEQ ID NO: 319164 - DNA, 395 bp, Zea mays
cggagcgcacacacacacaaccagatctcccccaaatccacccgtcggcacctccggttcgagatgcagatctttgtgaaaaccctgactggcaagactatcaccctcgaggtggagtcgtctgacaccattgacaacgttaaggccaagatccaggacaaggagggcatccccccagaccagcagcggctcatctttgctggcaaacagcttgaggacgggcgcacgcttgctgactacaacatccagaaggagagcaccctccaccttgtgctccgtctcaggggaggcatgcagatctttgtgaaaaccctgaccggcaagactatcaccctcgaggtggagtcctctgacaccattgacaacgtcaaggccaagatccaggacaaggaggg

SEQ ID NO: 319165 - DNA, 311 bp, Zea mays
gctagccgccggtctattgctctgatagcttgctccaggacgtacgtacgtacgtagggcgatgcatcgatcgctagctagctgactgaccatggcgtccatgtgctctgccgccatcaccgcccgttccttcacggccgggcccgctcgtgcagtggtcaccacgaggtcctttaccgcgcgtgcctctctacgcaaggccactgccaccgccgctacggccgatgccgacagcgtactgcttgccggtcgcggcgccatggcccaggaggagctgctgggcagcaacgacggctgactagtcttcgagc

SEQ ID NO: 319166 - DNA, 313 bp, Zea mays
actcggtgccttacaccccactctttccccggaccaacccataacccatccgcatcgctgcccggcgcgccccaaccccaccaccggtctcctccgcctcctcccgctctgccgtcgcgcttgtgctcccgcgctcgtccgcctcgccgtttctgcctgctccacctccgccccgctcccatcggccgatcggtcggaggccgcgtcgtcgcttgagagatgcctcttgttgacggcagcggcgatggaaacgggggcgatgccaccagcctctgccccgccgcgcgccgtgccagtgatgaagggggacgga

SEQ ID NO: 319167 - DNA, 418 bp, Zea mays
tcgacccgaaccatggcctactctgatccatctgacactcttgcctcctcgtcatcttgggctccgccttcacctacgcccgccccctgatccggatcgaccacgccgaccacagatccctttcctgtccgtcggctcatcgtcagaccggccaccgatcctacatgcctcccaggccttcaagcagggaaggagccttacgagctgcatggatgatgctatactacaatgctggcgctactacgatgggccaaagcctgctaatctgcaagtctggaacatgactatgcatatattagatagcacgcgcttacgatttcttgctctcgctctacactgaggtttccttctgggactgcatctcccgcaagataagatactcattcagacctgagtggtcgtagcagtatactgcact

SEQ ID NO: 319168 - DNA, 426 bp, Zea mays
gcggctgaaaattcgatggagggaaacgccttggctctcgggatgcccgcggatgctacttgtgcgggcatgcgttgcaactctggcaccgattccgttccttccttgcggcggcggcggaaaaacaggagcttctccatccttcccttcgttcgtgctcttcttcttgttattccgtttatcggtctggcgcagaaagaaacaagagatgcgatctagtctgctaccggagtccccgtacgtacccagtgctccgcggcttcggcaggggtgctgctggctgcagacgctgatctgtatccacccggcaaccgccgtccgggttcttcattgtaaccggggaagaatttggggctggtggcttgtggtttcaatgggcttcaccagaaaccagaacctttttggcaatttccttggggttcaaaa

SEQ ID NO: 319169 - DNA, 244 bp, Zea mays
acatattacctcactctatatcactatatcatctacgcatatgctccaattctaacacctatattctggtttactatttaatcgcactatccatactcttgtaatgccattgcctcaattatttccattcacaacatgatcatttacatacataatttaactcaattctttcatgaactatattacttttaaaaaagcctttgaaccaacaatattacaacaaagtcttcatacttaaacttca

SEQ ID NO: 319170 - DNA, 203 bp, Zea mays
accacgcctcctcctacaccagcttttcatttttaatctattcattgcctccgcttcgactaggtgctataggactggtcgaacggtacccttccatacctcccggatgtcctcaagatactactccatgacaagccctaaaacttattcctaatcctgcctaatcaccacgcaacctacgacatactccattactgacccta

SEQ ID NO: 319171 - DNA, 130 bp, Zea mays
cccggtcgactccacgcgtccgcccagcgaccgtctccaccagcgattccgctctatcctatccatggcctccgcttcgactcgtggctgtaggatgcatcaaaccctaccgctccagacctcccggttg

SEQ ID NO: 319172 - DNA, 368 bp, Zea mays
gcctgccatcagttcaatttgtttttctgctattttattgcatttggtcaaagttgatttcttttacatgcataacctcatgaatgcatgtaccttctctatgtaaatatatgatctaggtatctgataaagtttgaacacctttattttggtttactagttaatagcactatttttactctgggaatgccatggcatggattattgccattcacaaagtggtcatttatgtacatagcttaggtaattttttcatgaactatcttggttttcagaaggcctttgaagcaacaatattagaacaagtcttcatatttaaactgcatgttataggttttcacatttctatagggaaaactggaatatta

SEQ ID NO: 319173 - DNA, 418 bp, Zea mays
  unsure (1)..(418): unsure at all n locations
ggaaaaatatccccaaaccctagctcccgatctcgatggcgaaccctcgcgtcttcgtcgacatgaccgtcggcggcgccccggcgggccggatcgtgatggagctgtacgccaacgaggtgcccaagaccgcggagaacttccgcgcgctgtgcacgggcgagaagggcgtgggcaagtccgggaagccgctccactacaagggctccaccttccaccgcgtcatccccgagttcatgtgccagggcggcgacttcacccgcggcaacggcaccggcggcgagtccatctacggcgagaagttccccgacgagaagttcgtgcgcaagcacaccgnccccggtgtgctctccatggccaacgccgggcccaacaccaacggctcccagttcttcatctgcaccgtcgcgaccccttg

SEQ ID NO: 319174 - DNA, 400 bp, Zea mays
aacccacctgtccatatgactggtagtggtaggcctaatgctccgccataccgtcttccagttcttccaatggacgatgatgaaatctcatccaaagttcttctagcagttgaactttgctaattgaagctgcaaaaggaacttcgatagatcagcattacgaggcacagcagtgaaagccccatgtttaccttttccacggcttactcctcttggcgaacctccttcaccaagagctgcacatgtagcaactgctgttgaaccatggtggtcattcagggtggaattggtccagctggcttatccgctgaggaccttcatgtcttgatcttaaacaacaacgaccgcgatggcatagagtggtggttcaaggtcctggtccatggtatggatatgtgat

SEQ ID NO: 319175 - DNA, 232 bp, Zea mays
gcaagggaacactgtagctaactattcacctttcgcccacacgactattctatctagagtacaggcgacttcaaaacagacacacagtcccgcgctgcctgatctctgaccttgttgacaactaccgaaactccaaccacctgatcgcggacaccgtatcttcctgactgagccttgaacccaccgttcaccaccagtcccgcactttcctctagtgtgacactgacgaaca

SEQ ID NO: 319176 - DNA, 201 bp, Zea mays
ataacatacgtctctttgggcgaataatctgtatattattctctatggaaagaaccctcgcgcccgtgctgtacgtttcgtcgtggaaagaaccctggggtgtgtatttgtttcatcaatcatgccagccgatttgaatctcgtttcaccagcatgatctgatttgggtatacaagtataaaccgcaacgagcgatcttgt

SEQ ID NO: 319177 - DNA, 422 bp, Zea mays
  unsure (1)..(422): unsure at all n locations
attgcatattatgtagtaggcactgaatgtaaattccttggcaattggcattaactgggttcttcattatgccattgtacttctgcttttctatttaaacattggtgcattgcatattatgtagtaggcactgaaagtaaattccttggcaattggcattaactgttttcttcattatgccattgtacttctgcttttctatttaactgtttcatgcagtgaggttggcaccagaagaggagtcacacaagcttactgggtttgtgcataacgctgtcacttgcatcgggatggaaacaaacataccggtaatgtaaatttatatttacattgcagctgttgaagcatgtacattgcanagatactactattaggtttagatcacaattaatagatttgtttgtgacataccgtgttttttg

SEQ ID NO: 319178 - DNA, 377 bp, Zea mays
cacgcgtgcgccgatgtggaactattggtgtctgctttatctcgaatagtaacaccagctggaacctgtactatcgttgggtacattgaacgtgaccccttttacacccgtggtgagtgatcaagttggtacagagtgcactcctcgacttcaacgcaacccagctgtgtccagggaccttgttctatactgtaacttctacgaagtaatcggctcagatcagagtaaccataaacagtcatcttatggactatctactctaattatcatggaggaattttcttaactccacttataatcttaatagtatacgcttgtatttacatatcactacgtgtttataatataaccaaacacatctcagttatgattcatac

SEQ ID NO: 319179 - DNA, 405 bp, Zea mays
agcaacagtagccccatcctcctcgttggtcgtcgtcgccgcctcacagcctcgcccgtgaccccgcccggcgccagatgcatacgaccaggaggtcagcgcccccgcctagcactagccgcatgcagcctggtggttagcacctcacctcactctagcctccagcctgcacctacaagggccccacaggcagcgcccctgcctggtagccagccacagtcggctaggcggtcaacgcccttgcccgccgcccatgccacacaccggcatccggccagccactgcttcactgtgctccagtagatggtgtgacgcccccatccctcgctctcgctcttcctggctctgatctgatccaccttctgcgttaggctcgattgcttaccggccatggtgcagtccatc

SEQ ID NO: 319180 - DNA, 241 bp, Zea mays
cctagctgtaagtagagaatcgatgtacaccgcctcagcacaggcactgctgcgtctggtggtaattaaagggacaaattcgagacaacactgccggatcaagcgagccaactctagaatcactcattacacacatagcttggacaaatagaacataatgtactaaaggattctaaagctagcaccaagtctaacatgaaacgttccaagatgcatgaatcttctcatggctacagcattg

SEQ ID NO: 319181 - DNA, 519 bp, Zea mays
  unsure (1)..(519): unsure at all n locations
cagtcccctctgcntgtcagcaagaagggaaagaagcctacgcgcttatagncttgtcgagccagtgggccaccgccgctcgtcgtcttagcctnncctcaagtcctnnccttcgcgggccttcccggcttccacggcccccgccacgccggaccctacacnncggcagtccctttcagtggtgagccacnncggcccgtcgcccggcgcaccggcgccggggctccaattctgcgccgtccccatgtnnccatgtccnntacctccaacnnccgccctaacgactcnntgacgtcnnctatccggttcaagcccccattcaagggagtcnccaatcgtgtcactcgcgaggatgaatnnccgtcgcttacccatgacccggacatnngatcacnnctacgctncgacacncgacccgtcgtnncatcgtgggccgctcggctttccgcgggggcttggtcctggcgccgtaccgagccctctccaaggaccccccgccgtgagcattcgccatcgtgg

SEQ ID NO: 319182 - DNA, 258 bp, Zea mays
gtttcgctccccggcgccgtcgtcatgatgccgcagcagcagcagcccggcatggccggtcctcctccacaggccgaccccggagcgccgccacactggggcggcatcccgccgcctatggcccctcagcatcagtacgcgccaccaccgacccatcaggccgccgccccgacggagctgtggcgccaggcgcgctagtcctacgacccgactgaggccgagtacggacacgcgcagaggccgtcccaggccgcgtat

SEQ ID NO: 319183 - DNA, 380 bp, Zea mays
catgtatacatcagatgattccaaatctgctgaaatgtgtttactagccttctgcgactataattgtatcacattggagtcccagaggatcgggctccttttatagccccaaggtgccctctcctggtatgcaagcatcacatgtgctcactacaactccgagactccacgaccacactgtttagtgatttgagagagattcgagcgcatttatgaactgtgactctatcgtcctattattgagctcttgtatttgctttcatgtgtgttgctgatgtgttatatacttgcgtgcgttctactgcctcccttactctgattttggattgtgatcatatcgtgtacggcgtgagagacttcgacttattaagatttctcac

SEQ ID NO: 319184 - DNA, 353 bp, Zea mays
gcggtgcgtcccaccacgctcgatttatatttactgcaacacaagccttttagctgtgtcgaccgctgactattggatcacaagcactgcccattcttatttacacgacttggcaaaaccactttaacacaccacatgggctactccatctactgcctatgagcgcccaactaagtgtctactctatactacgcttgcttcccttaactgagcctgctcaaggccaccactatgttcccttagctcacgattccctggatcgaacctttctactacatctcggtctccaagaacgcctacaacacgtgataagctctttggcacgtagacacgctgaaagcttattggaacaa

SEQ ID NO: 319185 - DNA, 407 bp, Zea mays
agccaccatcgaccttcaagtctcgctacgtagcagtgcaataaaaaaagcagccgcaatggcgagcagcaccatggccctctcctccacggccttcgccggcaaggccgtgaacgtgccgtcgtcgtccgccttcggcgaggcccgcgtgacgatgcgcaagacggcggggaaggccaagccggcggcggcgtccgggagcccgtggtacggccccgaccgcgtgctgtacctgggcccactgtccggcgagccgccgagctacctgacgggcgagttcccgggcgactacggctgggacaccgcggggctgtcggcggacccggagacgttcgccaagaaccgggagctggaggtgatccactcccgctgggccatgctgggcgcgctcggctgcgtcttcccgg

SEQ ID NO: 319186 - DNA, 251 bp, Zea mays
ggctcatgcatactcctggcctgtatataggtaagccgacgaggctgacgacgccgtcgagctgagaccctgtgatccggcacgtggcaccggcagataatacaacgaacacaatctgacacggattccaacttcctgagctaaatgcagcgactacgcaagcactacaaggacgccaacgagcactcgaaccaactgttccaattcaaggccaacctacgacgcgcacgccaacaccagatgctgcaccc

SEQ ID NO: 319187 - DNA, 171 bp, Zea mays
gtgccgctgcttcgtccctctatctatctagccttcccggtcctgcatcccagctgaggttggcacgctcaacacgccggtcgcgtcggcggcggctactcttctgctgctggtcgcgccgctcgccgacgctgccgacagcatggtcatcgtctactacagggatccgag

SEQ ID NO: 319188 - DNA, 220 bp, Zea mays
cgacccacgcgtgcgcggatgtgctgtcacaatggtttagtttttacacctacccagctccaaatgggacaggtatcctttgaaccgactgatgatcgcgaccacaaacgctcgcgaactcgactctactttgcgctataaccaccaaacctatcatgtccaactccctttcgtgacagtaccatgattactcaactatcagcacccttgtcgaccccag

SEQ ID NO: 319189 - DNA, 244 bp, Zea mays
gacgagctcgccccggccgtcgggaccggccttcctcattgactcgaggcaacgaaggggccggatgggaaccacaaccttacccttaccccattagcccggccggcatgctggttcccgtctgctccgtcgcgcccagcttggtccccctctggccggtgacggcctcgcacgtcgtcgcgcgggttgcgcggagggtggacgtcggcgccgcgctcaagtcctacgccgactcgctcgtcgc

SEQ ID NO: 319190 - DNA, 415 bp, Zea mays
cacctttgttttgctgtaattttaaacaaataagtatcctgatgatagtgatgttttggtagatcatctgataatctctattactctatatgaccatatgcacttgacatccagaaaattggtttgacattcaggcaaagtaggaatgactggggactggcttgaacatttaacttttgcagtgtatttgcttccattttttcttttgcaattaaacctggtcctggtaagcaagcacgaaatgaccccaacttagcggcacaatagtagttgttacatagcatgattcttgtcatacacgtgcatcagcattgtttattgagccgtctcgctgaggagggggctcaagttccccagaggaccagtgcttgatgggttgacgtcgctgggccctaaggttctctcgatgctgatt

SEQ ID NO: 319191 - DNA, 391 bp, Zea mays
gcgccatggccaccaaagcaggctcctcactgtcgccatgcatcaggctcgtggaggaatccctgctcctcccgacgcaagacgccggcctcttcgcaaaggccttcgtgctcatcttcgcccacaccttcctcttcatcgcggtcgccgtccacttcgctcacccactcgccacggacatcctcgccgacatcaaagcacaaaggagcagcagcaggaccactaccactaccggcgccgcgagctcaaaccactccaaggagcttgcgttgctagcgatctacctctgctacctcgcgagcaaactcgccacccagctcgtcaccgccctcgccaccgccacgacctactccggcgagcgcctcacgcgtaaagtggtcatggagaggat

SEQ ID NO: 319192 - DNA, 257 bp, Zea mays
  unsure (1)..(257): unsure at all n locations
cacgcgtncgatcccagagaaatagcgctggtggtgatgggactaccacgggcattggtttggctcggggaatcatcaatcctgggttggttgccagtggcaattgttcctaacccagttgctttgaaaaggggtattgacaaagccgttcatgagctaattaagatcttgaagagtaaatgtatccctgtgagtacaaaggaggacataaaagtaaatcttacgttctggaaaatagtgttcgtgtgtgtaaaaat

SEQ ID NO: 319193 - DNA, 74 bp, Zea mays
ctccccatctcgcccggcggtttcggtcttaacgatcttcttgcacctcgtggcggggcctgttcccttcgatc

SEQ ID NO: 319194 - DNA, 324 bp, Zea mays
ctgacacgtacttccgggtcctatcgttcctctccgacgccggtcgatctcatggcgggctccatggacgtcgtcatcaccgcccttacgctagcgtacgagactacgcataggccggctgcccagggccgtattctatgcaccgtcgcacccgatcgctcacgatgccgatcgctacgcctccgcccctacggacagcgatcagcccgctcctcggctcggtccaccaaggctgtagcggcagcactagctgatcctctcaaggtcatgatatcaagagctactacgtccggcaagggcacacagtgcgagctgattaagacc

SEQ ID NO: 319195 - DNA, 148 bp, Zea mays
tgcatacaagcacttggacgtgacacgggcccttcacacagtacacttcaagcgttggcaccaatggcttactaacaagaaggtgactaacggtccgaagaaggtaaggccgttggccccggccggtttcggcggcaacggcggcggc

SEQ ID NO: 319196 - DNA, 334 bp, Zea mays
gcccagtcgtctcccacgtcctagcacaacagagtagagctagcaaaggtatctgccatccaccatggccgtctccatcgccggcagcagcatccgcctccacgttgccccgcccagtcgccgccgcgtcagcgtggtctccgccgccgccgcggcccggctcgaccggcgctcggcggccctgctcctgctgtccacggcggttccagcagcatcggcagcgacagctcccccagcgagcgccgcgggcatcggtctcttcggcatcctcaagaagctggagcgcgcggaggaggcggcggccgaggcggtgagggaggtggaggaggcggtg

SEQ ID NO: 319197 - DNA, 262 bp, Zea mays
gggactcttgagcactaaacataagttggtcgaaggaaaatcatgatgagcgaagggattgatgtgttaacgttttgggcatgccaagaactatttttttggttatgagtttgtcaaacatatgttgagtttgtcgctcatttcttaagagctatttctgtgatcgaagaaatttgtttattttagtggcatgaataagaaaaccaagcaaatccatggtagaaacttgtttgtgtgcatattttgagggctttgttttact

SEQ ID NO: 319198 - DNA, 422 bp, Zea mays
  unsure (1)..(422): unsure at all n locations
gggattcgctaatttgctcatgacatcccaaactagtcacacacaaataactagttgagttggcatgcgtgcaaacttgtgaactcaaatgtcataaaaagtgtcaaaaaatcctagtggtgtacacaacggaaagcatggatggtatgggagcaaagtggcatagacacaaatgcattaacattaaagggattaaaaatcctatgctggacaaaggtccccaattcaagtcagcaaaagtaggtaaaacacgtaaatgaatgtaataatctaattataaatgttcagtagaattctatatgtctaatcataccttngccaaaatatctttgtaaagagacttcangttccttttgaggcanatcatctaatctgagcatatctctctttatattactgttctcaatgttctcatcatggac

SEQ ID NO: 319199 - DNA, 402 bp, Zea mays
cggcgtcggatgttgagtaccgctgcttcgtcggcggcctcgcctgggccacggaggaccacgccctccacaacgccttcagcacctacggcgaggtcctcgagtccaagatcatcctcgatcgggagacgcagaggtcccgcggcttcggcttcgtcaccttctccacggaggaggcgatgcggaacgccatcgagggcatgaacggcaaggagctggacggccgcaacatcaccgtcaacgaggcccagtcccgcggcggccgtggaggcggcggcggcggctacggtggtggccgtggaagcggcggctacggcggtggcgggcgccttgatggcggcggcggctacggcggtggcggcggcggctacggtggcggcggtggctacggtggtggtggtg

SEQ ID NO: 319200 - DNA, 378 bp, Zea mays
ggcgcccgctcggcgccctaccccgttttctttttctgggtgctggacaagcgcgcccgcgcatggtcgcgttcgcaggcggggatgtcgaacgcggccgaggacgcgttcctcgacctcgtccgcgcctacgcggcgcggctcgtgcgcctgcgccacccgggcgtgctgtacgtcgtgcaggcgctcgacgagaccaaggccgccatggccatggccactgagcccgtcttcgcctccgtagctaacgcgctcgggtgccttgacaatgttggcaaggtgcccaaggaggtcaagggcatggaaatggggctacttgagattaaacatgggctgctacaagttgcaaagacgttggattttcttcataacaatgct

SEQ ID NO: 319201 - DNA, 397 bp, Zea mays
  unsure (1)..(397): unsure at all n locations
cactcacactccttcatcgggctcggcccgcgcggtcgtgagttcgtgactgcgggggaagtagcgcaggcgaaaaggcggcagcagtggacggcggcgaaccctagcctagctccgcgagtgcgttggcggtttgattcgatggccgtggcgtcgcggctcgcggtcacgcgtgtgtcgccggcggacggcgcgcgccccgcggcggcggcggggaggaggagtgggctcgcggtggttcggctcccgccgaccgacagcagggggagaaggaggaggcgcggcggggccgtcgcggccagccccccgacggaggaggtcgtgcagatgacggagccgctcaccaaggaggacctcgtcgcctacctcgtctncgggtgcaagcccaaagagaact

SEQ ID NO: 319202 - DNA, 113 bp, Zea mays
aaaaagaaaaaaaaaaaaaaaaaataaaaaataaaaaaaaaaaaaaaaaaaaaaaaagggcaacggtttctatctgttccatgcttacgtacctttccttccaatatcttact

SEQ ID NO: 319203 - DNA, 194 bp, Zea mays
attcccggccacgtgaatcgcgtccagccacgcccactccccaatggaatacagcgttcccaatttccatgctgttgtgaccgctgaccgtgcctggtagaacttcgagccaaacgagaccctccttggtcttccagcgctctcatttcgcaacttgcttaccaaagtcattgcccagatttttcccgacgatt

SEQ ID NO: 319204 - DNA, 349 bp, Zea mays
cattgtttttcattgcaagttacgcaccactattcgtgagctagaatgaccatacgttgaacccatacacaatcatcttcaactcctgtcagcattacgtcactcccagttactggatgcatactcttttacgctagtctagtgttgctatgttccatccaactacaatcagctccagctactcaggttcacttgcagcgtctgcgattacctgtcaagactccgagaacatcttcctaagagtaaaagtcataaacttcgggtcagatactgtgaccctgacaatcttcacaaatggtctccaatccagtatcaacgctctttcatcaaccttcactgctctcacatc

SEQ ID NO: 319205 - DNA, 420 bp, Zea mays
cagatatccgctgcttcttccattctcagtcaccaagtcccgatggcgttagggtgcactctgcccaccatgggctgctataaccccggcacaagctccagcgctgtccgtctacgcgccgactactttcggtgatcagcgctccgtcggtgcagaatgcctgtggctgctagcccgagactcaccaactccaggctaaacgagcacgccttacagcgactccagctcgctagtgacgacgagcactaagaagggacaaacggatagctacaccgactagagatcacaaacggacgagaactagctcgccattgccagactcggcctgaccgacaagctcgtagccacgctcgagaagcgcgtgactacgcacctgttccccatacagagggctgagttgattcccgctcttgacggccg

SEQ ID NO: 319206 - DNA, 161 bp, Zea mays
tcctttttcattcccacccacttttccatttaaaattcactacaatatccctaacatgtaacattgtacaaattctaacacctcaccccctctactacacctcatactcaaaccctaaccctacaacctctcacccctctactcctaccaataactccccc

SEQ ID NO: 319207 - DNA, 59 bp, Zea mays
gcagtggcagcaccgcagcagagagaagagagatcttctagcctagtagtagcatctac

SEQ ID NO: 319208 - DNA, 279 bp, Zea mays
tcgacccgaccaaagccactctgatccatctcacactctcgctcctcgcagcgggtgctcgcttcaccttcgccgccgctgatcgatcgacgacgccgaccccagatccctttccttccgcggtcctcgtccgaccgccgccgacccacatgttcccagccttcaagacgagaagacctcacgagctgttggctgatgctatctccatcctggcgctactacaatggccaatccagctagctcaagtctggacatgactaacatagatgagtagcacgc

SEQ ID NO: 319209 - DNA, 274 bp, Zea mays
gactagttctaggtcgcggcgtccgcccctcgagtccaaccccaattctgccgtggccgcggcgctctgaatccccaattttttcacttcccccaagggccgcggggatgaaccggatcccgtccgtctcgctgcggggcggcggggcgaacgaggacgccgcggcggcgtcgccgcccccccgatcccgcggcgctgtcgcggtgggtgcgggccttctgtgtcatccggttcgacctgaagcgcggccagctgttgaaggcctgtttccttc

SEQ ID NO: 319210 - DNA, 95 bp, Zea mays
atcaccaccattatttttacctctactactaatcacccaatgcaagtctcatatctcacatactgtgctataaccaccaccactcctaaaaccat

SEQ ID NO: 319211 - DNA, 58 bp, Zea mays
cgcccagccgctgcctgcccgccggccgactttcgcctcaccaaaagctgctgcctcc

SEQ ID NO: 319212 - DNA, 356 bp, Zea mays
acgagagagagggagagagagaaagagagaaaaaaaaacactcggaaacgatccgcgaacgagtccaccggcgatttgttgttttgttcttcagtgcgtcagccaaccttaactgctacgatcggtcgatcaagggggaggaagtttctggagctctgcccatggcgtcggcgatgaagctgctggggagatctttcttggcgagccctgctgccgcggcgcccggacgggagcggcgaggcgggccctgcttcgccgcggtcggaagggaggggagcgcgcacaggaggaagtcgtcgctgaggtcgaccgcgccggtgggcgcgctggccgaacgggtcgtggtgacgccggcg

SEQ ID NO: 319213 - DNA, 271 bp, Zea mays
ccacgccggcgcttgcatgcagtaatatggccatttcgtcctatacgcaggaagctctggccttgaggtccctggccatgctcgtcaccaacgccgccgtcgctgcagactatgcgtcaccgtcctgccccaggctcacccttcacaacctctgtccttacccggtctggccgctcgtcaccgctaacgccgggtacccctccatcgccggcactgactcccggctcaacgggaacggctagggcctggttaccatggcgctgcctcaagg

SEQ ID NO: 319214 - DNA, 323 bp, Zea mays
atcgcacagggccttgtgctactcgctttctcctctaccatactttccctacagcccgggcgggttcacctaccctaccgtcactcgcccccaagcactatgccaatggcgcgccccgtataactgttcgcgagataggactagaccttgaagcctctaccccttgaagagagcgagagatgtatcaacaggagacagccattagagccactcagctggaccgcaagcggatcaaacacgcgcatgatacacacctactagaaggcagtctagttgccgtccacgtctagctcttcaaccagccagcatactcgaccacacac

SEQ ID NO: 319215 - DNA, 389 bp, Zea mays
aggtcctccactagctaagctagtcgttactcccaatctcagagcgcgccgtcggtcgccagcgcggccaagaacagtgctactagccaagaaagctggggaacaggctgcttccttggacgaggagcaggaagacaagggatctggagccggagccccgatggcggtgacgggaacctcggtggcagcggcggcgacgatgctggcggcggcggcagccatcttcatcaccttcgtgatctgcttctacctcttcctgtgcgcgaagcggtaccgcggggccgtcccgaccatcggcggcgacagggcccggccccgcttcgtgttcgcgggcggcgcggggtgccacggcgggctggacgaggccgtcatcgcggcgctgccgaagg

SEQ ID NO: 319216 - DNA, 412 bp, Zea mays
gtttggtttggagctgtttatgaaggtgggcggccagcggcgcgtgcgcagatcatgcactggtaggactaatttgcaagatcttggaccgggatggttcgcctgttaggtgtgttttttgtgcttcacaactgctaacggaaaagagagggtgcccataatctagatagctttgagtgtgtaaaaattatatcatggtcatagtgaaccatatgtttgtcatatttggagttagactgcaacagtcactcgtagtgaactaggtaagtccatttaactgatgtacagttatgatgattgatagcctaattcagttactctgttttgcattcctgtaccaacttccaaacagtatggtaaagcagtttctgaaactcgttgaatacttaacttatcaaaggaggaaacaatg

SEQ ID NO: 319217 - DNA, 427 bp, Zea mays
cttagtcagcagatattcaatgagctggtggaatgtggatgcctcacggaggcatcgcttggggctttccgtgattgcgatttgcaggatatttgtctgggagactaccctggagttactgaagtctcttaatcttgacaatcgccaaatcacagatactggtttatcgtctcttacaggtctcactggattgacacacctcgacctatttggagctcgcataactgattctggcatgagctgcttcagatttttcaagaatattcagtccctggaggtctgcggcgggttgattacggatgctggcgtgaagaacatcaaggacctgaaagctctgacgttactcaacctgtctcaaaacggcaagctcacagacaaaaccctggagctgatctccggcctgactgcactggtgtcgttgaacgtg

SEQ ID NO: 319218 - DNA, 303 bp, Zea mays
ccacacgagtcgacactcgacttaagcccgctaaccgctcccctatgttccgtccccatattctcggggacctacccggcaactatcagctcaacaatagcgccgcaaaaccaccggctcaacatcatgccaacagtaaccacactcgccgtcatgaaggcgctgctcgtcagcaccacccgcggccacgcgctgttgaagaagaagtccgacgcgctcacggtacaactccgtgccatcctcaagaagatcgcagccgccaaagagtccatgacccagacaacgcgcgcctcctacttctcc

SEQ ID NO: 319219 - DNA, 414 bp, Zea mays
  unsure (1)..(414): unsure at all n locations
cttagcgaccttctccctcgaatttttccttcgtgcttagcgtagcggtagcgccgatcctgttcctgtgccgtgccggcttggaaaataggagggagaagatcaacgccgccgcggtgcggcctgtggagtattaaacaaagatgcgcagagccgcagagcccggcgccggcagctagcagccaacgcgaaacaaaccatcgtcacccaatagccaccggccaactgtcaagcactccttcggtgcttccccatctgcgccgcgccccgaacccttcggaccccgcgagcgaggccgtcgccggcgcgcgcgagatttgagctgaggccatggagtcaccgttccgggccgacgtggtcaaggacaaggcggcgctggtcaccggcggnggatccggcatctgctttgagatc

SEQ ID NO: 319220 - DNA, 349 bp, Zea mays
  unsure (1)..(349): unsure at all n locations
gagctcccgctttttacgatcttttcttcctgtttgggaccgggccgcggccttgggcgttggacaagggccgtcggccggtggaaactgaacccagccccgacgcacctgccggcggcgcctgggctgctccagtctgtggaaaggcgacgaaccaactcgggggaattctagtcttgaggccgccgnctncgccttcagccctccaccgacttaactgtctggaactggaagtgtaccactactattcaattggccctagccctcgcatagcacgatgccgtcgccgccggttgagttcgcgatcctcgccgctgcctgcaggttcaacaagccccttaccgttctc

SEQ ID NO: 319221 - DNA, 416 bp, Zea mays
acgatcgcgagcgcaagcacgtacgttgtcggaagctcaagttagaagaagcaccagtgcctgatcgatggcggcccaggctctcctctccggccggcagctgctgggccgccccgtgcagtcggccgtctctaggtcgtcggcgaggaaggcgcccttcgtcgtcagggccagctccagccctccagccaaggtctgtgcgccgtaccctactatagctagtaatccgtccgtcgtcaatctcaacgatggcaagctcgttcgttcttgagaggactacgtactgctgagtgctgactcgattgttttcgtttcgcagcaaggtgccgacaggcagctgtggttcgcgtccaagcagtccctctcctacctcgatggcacgtacgtacctgcgctcgttgcccgccccgcgcgca

SEQ ID NO: 319222 - DNA, 378 bp, Zea mays
  unsure (1)..(378): unsure at all n locations
ctcacagtctcacactcaacactgggccccaagccgtacggaccgcccctaccttaacccttggattggaagccaaaacaggacctccgttggttccaaccgcttcctgggcttccttcgccccgctccgcatcccgccggagaaacagtcgggcctctacggccttcgagcttgacgaggacgacctcttctccgcaggatccggctcgcccgagccgccgcagccgttgcgccgtccactcatcctgtcctccgtccgccctgcaaaccctagccctgttccacgcctacgccgtccgccggagggcatcctggacgcccttcccgagcgccgtcgctcgccgnctcagtcctcttcatccacgtcctcgtccccc

SEQ ID NO: 319223 - DNA, 338 bp, Zea mays
ttcgtctcttgccttcggcgccttgacttaccgcctgcttgccctgctcctggggctgccttttctatcgcctgcttgtgcctctgcacgccatggctcggggcaagaattcggacaagacccgattgccgtagtatgtcctgcaaacattcggcttcaatgtcccgtcctgctgtccctatccgtccgcagaagtctttcaatcgccagacatatgtgcatagaatagacctaagatcaagcctattcgacatggtgattcacgacccgtctgatcaacttccgttatggcgcccatcttcacaaggaatggagccgctccatttagatcatcccct

SEQ ID NO: 319224 - DNA, 427 bp, Zea mays
  unsure (1)..(427): unsure at all n locations
cttttggatgcgcgcgcctagctgaccttcctgtgtcacgccccgactttgcccaacgccccgccgagctcctccttcgcccatggccgcggttctccaagttcccctgcgcgcgagctctacgcgcgcgaatccgtcgtcgcgtcttgttctctggcggtcgagctcgcccagctctgttgccatgtccctgttcctcggttcgcggcgcccatgtcaaagctccctgcgctcgcccatgtcgtgcgcccgagctcccctgccgtgctcctactgcttcctatgcgcgtagccgtgtctactccttcctcgccgtagtccctgcgcgcgtcgagctttcgtgtcgagctgttgaacatgtcctnccttgcttgtgactntgtcgtcgctagaaccctgactagattcgtgtcattcgcagctcgct

SEQ ID NO: 319225 - DNA, 415 bp, Zea mays
ctgctccttgcttcttccttctctctctcacttgccgtggaggcctcatcgtatgtgtttcgttcttcagaagtttagagcgtccctatctccttccctctgctctgatttttccagcagctggtttccccggatattcttccacgctgcgccgattagcacctggatatgttctccagcgcacagccttatcctgcagccgccctcgcctgattctttgccagccgccgctctgggcgattaaaaatcctgctcgccggccggatctccggcgtcgtctgcccctgcttcccttggcgttcttcccccagtcgtctccttcctctgctcgtcgctaaaattcgctggccgcgaatgcccatggcgcacccccagtccctgctgtctctctgtctctctcttatccatggacgcg

SEQ ID NO: 319226 - DNA, 301 bp, Zea mays
gtgccttctcacatcgcaacccccgctgcccgcccgctccacgcttgccacgccggcctcgctggccacctgccaccagagacgctgctgcgggccgagtccacaccacagccggcatggaggctgcggcggcggcgccgcatctactgcactgcggcggcttcggccgcgtagcgcaacctccaacgcttcaacggccagggcaggtcccacgccttcgggccggcggcaccgaacccaagctggccaacttcaacttcttcttcttccgggggaaggaccagaacccgaatggactttt

SEQ ID NO: 319227 - DNA, 182 bp, Zea mays
agcaagaagagaaccagtgtgctagtgctactgctacggcctagctacctactacgagtcagcgagcagcggcggacatgagcggcgggcgcgaggagagcaccagcagcaggtggccagagctggccgccctgcgcgcgctggcgcgcgacgcggcggcccgggccgggagggagacggcg

SEQ ID NO: 319228 - DNA, 244 bp, Zea mays
gactagttctagatcgcagggccttcctttttttttttttttttttttttttttttgttttttgttttttttttttttttttttttttttttttttttttttttttttttttttttttttttttattttttttttttttttttttttatttatatttatatttttttttatgtatattttaattttttttaatttaaattattataattatttttattcattattcaacatatatgtttttaaa

SEQ ID NO: 319229 - DNA, 364 bp, Zea mays
gctccagctatgtggactctggaatgcatttctgggcttccagatacattgagagctgacttacataagaacatctttccatcatggcatccagtcaataaaagtgctacccaacaattcaagctcctcaagatctgtgtagtcaatacccatcagcttcaagaaaagccaaatgccatactctggtatccttcctctatgccttaaatctaatcaccaaaaccttaaccagaaaccagttcagaacccttcccgtccttttaaaccttattaaaccctgttgaatttgtccaaaaggataaaccgtccttcgaaagctgttaatataacctgttaacaatcatgtaatgattatcctgaccaa

SEQ ID NO: 319230 - DNA, 109 bp, Zea mays
  unsure (1)..(109): unsure at all n locations
ggattgagcacgccgcccgatgcgaatggagttacgaggcggaccgacgcggcgcgncgccgggcagccctagccaatggcacgggccctaggggcgcgaacgccctaa

SEQ ID NO: 319231 - DNA, 266 bp, Zea mays
ggaattcatcgccagcgacgtctccgaccgtcgactccccaaggacatcctcctgcgcgtcggggactacgctagcgcctctcatgaccgcgcaactaaactacatgatatcacactgcaagatgaccattacgctggtacagacctggtccacctgccgcaacggtagtcctgccgatcggttcacgctaagcatgaccatgtgcctcgactacgtacactgggatctcacgtacaatgcactgactaccatgatggcaccagac

SEQ ID NO: 319232 - DNA, 385 bp, Zea mays
gcgggaatgcatcgccagcgacgtcttcgtccgttgactcccccggcccatcctcctgggcctcgagtcccacgctcgcgcccctcatcgccgcgcagctcaactacctactctcgcactacaagctgcccattaaggcggtacagatctcgtcctactgccgcaacggtcgccctgccaatcgtgctaagctcgccatgaccttctgcctgcactaccttcactgggatcgcgtgtacaatgcgctgcctcccaaggaggcaccagacatggagttcccaacgtaagatgagaggatccagccatttgtcgattacactgctgctggaaatggcgataagagctgctaggcgctttcggattgccccgcccacgaaggactaca

SEQ ID NO: 319233 - DNA, 372 bp, Zea mays
ccagcacgatcacccactccctgacgtttaagacactcgctggacccaaaaactgtcgcatgcgcatcctcgcgaccggtcaacgcgggtacacgactcagctacgagtcgatgctccagcgccagatccagagccgattccagcacccactccaacgcgcgctgcagcaacggcccacccgaccaaaaaaccccaactgtaaggccccgacaacaaaccgcttctagcctacaaggcgaatggcggtctgaagctgctcaatccggccaccggcagcataccccgtaacgacgggcaactcctaaccataaaacatgccagcaaaagtcgcatcaacagccaaaccatggcccttggaaccggcgaccttc

SEQ ID NO: 319234 - DNA, 69 bp, Zea mays
  unsure (1)..(69): unsure at all n locations
agccttccgnccaagaccagggtcaaggaggccataacaacttgatccgccaaggtcaacaaccccagg

SEQ ID NO: 319235 - DNA, 114 bp, Zea mays
aagaagacgagtgtcaagtgaacctgaaacttgcggtgtcactggctggtatagcctgagtgtgagtgagtgatcgagctagctgagctccgatcctcgctagctagctaggat

SEQ ID NO: 319236 - DNA, 294 bp, Zea mays
ccaaggcttccgcgagatgatgaggaagcaatactcccctgtgctctccttgtgcctgatggcccttgtcgtaactgctatggtctgtgtcatgtacaccacctcgggacaagcaagaaaggaatggctacaactcgtacgaaccttattgaaagggttgattccaattttgttccattcaacggcgttgccagcccttacttagccgttgaatcgaaccctgtttaaaaattcgaattattttagaactgctttaaacggttcacattgcggttccccaaccttaaatttggg

SEQ ID NO: 319237 - DNA, 277 bp, Zea mays
caaacgcccacaccctccggagcgtcgcagttatcccacccctccttctccccttcggacgtcgatggcggagcgcggcggcgagcgtggcggcgagcgcggcgggtttggccgtggcttcgggcgctgctggcgcggcgaccgtggccggcgcccaagggggccgcgcgggccggcgcaaggggcaaaggaatgggtccccggttccaaacttcggcggcttgttcaggggaaccaggtccaccaggtccaaggggaccaacttcaattggttccc

SEQ ID NO: 319238 - DNA, 324 bp, Zea mays
  unsure (1)..(324): unsure at all n locations
cccacgcttaggccgcagctacctacccctatctatttagcctttaaaancctgcatcgcggcagagatgcacgggtacaccacgacactcgcgtcagccaatgcgctgctaatgcatatactacagaagctcgccacggcgtcctacagcatgtagatcacatcctactgaaagcggatcaacgaggatacgcacccgatctacaccgagaacatagcagcacacggccggacctacaactcacagctgccatcagtaacacatgtaccagaatgccagggacaacctacgatacatctacgcccacaacacaaactccgaca

SEQ ID NO: 319239 - DNA, 336 bp, Zea mays
gcgttgcagcgagcgcggcgggtttggccgtggcttctggcgctgctggcgcggcgaccgtggcgggcgccgaggctgccgtcgccggcccacgtaagaagaaaaaaaattggtccccattaccaaacctcgaccgcttcttaaagaaaaccagatcaacaaaaaccaagaaaactaacttcaattgattccccttaaagaacaacaaaacattcaaaaccttgttcccgagcttaaagaccaagttaataaaaacaaccccgttcaaaaacaaacacctgcccgacaacacaaccggttcaaaggctctttcctccttggccaattgcaacggca

SEQ ID NO: 319240 - DNA, 348 bp, Zea mays
gcacaggggacgccgccgtctccctctccctgccccttcaccacgcccacgcccacggcccgcgcccgctgccgcacccggcgccccaccacctacactgcgcggtcccgctcaggcaccacgccacctccgcgtccgccgtaaccgcgccgtcgcccaagcctgacgttcaggctccttcaatcggccccctgaaccccggccttggcgggccaaggccaacccggtcggccccggccggcgggcgcttcttcaagcgggccggcaccggataccccggaacgcttgcccacccctgccttcggtccggcacccctcgccgggccgagcgccaagcgcgcgcgcttc

SEQ ID NO: 319241 - DNA, 395 bp, Zea mays
gatttgcaaggaagcattgatcggcagatgtagctccatgatagagtctacaactgctgaagcggaagcgttgtctaaaggactacagactatataaaatgacgatttggaggaaattagagagctgggttcaggtacttatggagcattttatcatggtaaatgaaaaggatgtgaatttcgcttgttaaaagattaaaaccgagttgttttgtagaaaaaccatttaaaaaaaaccgttgaattgcggattcctgaaagaaagttttaatcttaagttaattcattattcaaaaggtggttcaatttaatggggtattccggaatgttccaattggaacttaaccactggtaactaatttattaataatggatcttttaaaccagttcttagg

SEQ ID NO: 319242 - DNA, 155 bp, Zea mays
  unsure (1)..(155): unsure at all n locations
cggcatcgtgaaccacctggactgcagcaggaagaaggctgtggagatcggcaaggagctggcaaggaagcacttcatncaccatgtcttcagggagaacgacttcgaggacgggaaccagaacctgtaccgcttcttggagcacgaccccgctg

SEQ ID NO: 319243 - DNA, 321 bp, Zea mays
gccaagaggcatcaccgccgcgactacgatgtcagcctcgctccaagccgcggccaggctgatgcagccggccaagatcggcggccgggcgccctttgcctcgctgccgtaccgcccgtcgtcgcaactcgcctgcagggcgttacggcgtcgaggccgaacaacctagtcatcacaggcgttattcatgaccctagcagccagcgccaagacgggctcatgctggacgcctatgtgctacccgcagagcctcgtcatgaccgtgcagagcgggatcaggtgatgccagttcctaagaagggccttgcgggccatgatctt

SEQ ID NO: 319244 - DNA, 424 bp, Zea mays
gagctcgctcgtccgcgtacagctgagctactgcaatttcgcaacaagttgcaagcaataaccgaccaaggacgacgaacgggtcgatggccacgctctcctcctgcagccgcctgagtagcggcaccggcgccgcggccatccaccggcagccggcccgtgctggagccgtcctcgtcgtcacctgcaggcggagctcctccgcgaccgtccgcgccgaacccggtgcaacggcggcggccccggctgccgtaaacttgaaaaccagggggtggtcgttgccaacttggccgaagttcaagctgggccggcccccgtcttattggagaacaacaaccggcttccggccttggcgggccaagggcttaacctggtctaacacccggccgctaacaaaaatggcccgaaccaaggtgtccggctt

SEQ ID NO: 319245 - DNA, 55 bp, Zea mays
gcccgcggagccatgctcggcgcgctcggctgtgtcttccccgagctgctctccc

SEQ ID NO: 319246 - DNA, 264 bp, Zea mays
acgaagcgtattggcttccgatctactgaagcggttcagccgcagcagactgcgacgggcgacgaggacaacgcaggctctatacatgggatgccagctatgcggcgccgtgccccggttccacggcctgcggggctacgccgtgccgacgtccgcggtggtagagctgacctacgagaagctgatcacgaagtaaggtgtcctcgaagggcatccgctgccactacatccgctgcgccaccaacctggtcatggtgaccacga

SEQ ID NO: 319247 - DNA, 391 bp, Zea mays
gagaagtacccaaagccaagttggatgtggagcaagaagcagggcgcggggcgagagctagacgcggcaaccaccgctgcactgcactgcacccctcgatgctccgagctcagcagcagcagcagcagcgactcgctcgaggcatgacgccatccatgtcaggaaagatatacctggtcggccgaacgagctactgtgcttatccgaagcactgacactccagcggatgcgctgcctgacagccacttaggacgacagattcagacgcgggcgatcaagatggcgcacgagcccatcctggactatgcggactacttataggcggttgcggcagatgtcgccacgacaatggacgaccacatcctagcgccggagctctatagcctgcatg

SEQ ID NO: 319248 - DNA, 403 bp, Zea mays
  unsure (1)..(403): unsure at all n locations
gtctatgctgttgaggagaaaaatccggggaatctaggtgaagaagagacagaacccgtccgtcgcttaccaggtgctgggtgaaaggctcaaaccgactatcgttgtcgcttaatgccgatcgagtcagcttaagtcgtggtttgactcgctagggggttgttgcgacccgcgcaaaccttgccgagaccaacaggagcagggaagggggcgcagcaagacacaacaagatgggatccagagcaagagagctgaccttgtcaagacagaactgctcgcggagatggcggctgaggagacgcggcggcggaggtgctcgcggagatggcgggctgaggagacgcggcgatggaggtgctcgcggagatggcggctgangagacgcggncggagtgctcgtgga

SEQ ID NO: 319249 - DNA, 393 bp, Zea mays
aaatgccgaaaggatggtgacgctcccagagatcctagcaatgtgccgaaagatcggaatcagccagaaagtcggtcagacgtacccgtcagcatcttccggagacgtctccgtgcagcagaatctgggggataacataagcctgatcgaaatgtattttctgtcaatcgatcacgacggccgtgggtttctggactttgagcagttccgggcgatagtcaaaatgattagatctaatccggatgtcgcagacgtttggcgcaagctgtctagcacggacggtatcagcagacaggcccggaatcacattgccaactttcgcgcaatggctgcgtaatagtcagggttctcgcgctacagatgacgagatcctgcgaatgtttcacgagttca

SEQ ID NO: 319250 - DNA, 307 bp, Zea mays
gttctagatcgcgagcggccgccctttttttattttttatatatttctggttttttggttttttttttttttaataaatgatacactttgagcaactttattattatatgtattattacaaggcacaatggcacatacattcagtgatacaactgcaatatacatgaacaccctttggataacttctggtttatctatgcaactgctggaattcattccaaaaacgccttcggagataaaaaccctgtattttggtagtacatatgcatgcattgtcacgaatgatgggcgccaaggtcatattatc

SEQ ID NO: 319251 - DNA, 421 bp, Zea mays
  unsure (1)..(421): unsure at all n locations
ctatagcaaccggtccagcactttcacgctcagctccagcaatggctgcctccaccggggcgatctcctccacggcgatggccggcacccccatcaaggtgggctccttcggcgagggccgcatcaccatgcgcaagaccgtgggcaagcccaaggtggcggcgtccggcagcccctggtacggccccgaccgcgtcaagtacctcggccccttctccggcgagcccccgagctacctcaccggcgagttccccggcgactacggctgggacaccgncgggctgtccgncgaccccgagaccttcgccaaagaccgcgagctggaggtgatccactcccgctgggccatgctcggcgcgctcggctgcgtcttccccgagctgctctcccgcaacggcgtcaagttcggcgaggccgtctg

SEQ ID NO: 319252 - DNA, 435 bp, Zea mays
cggacgcgtgggccgccttgtttggaccgcacgcgcggccacccttctcctcctctgctctcttgacctacctattctctctcgctcggcgcgcgtagaagagaagaggcacttcttcctcctcgccggcttcccctcgcgtgtcgcaagtgcttaccctacaccgtggcccgtggatcgtcgccggacgccaggcatcggcaagcggcagcgcagccgtccaccctgattttgccaagacagactaaggacttgccgccgaccgaccagtctgccgagcagggcaacggttcgtgtttgcgctgccgccggcgaggcaaatggagccatcatcatcgacgccgacgcactgcccctgcacctgcagcatcttcacgcttgcagcgtttcggccgcttaagcgcagcgtatgtctttgcaagaaagatgatgatg

SEQ ID NO: 319253 - DNA, 111 bp, Zea mays
ctggaatgtgatcatatcacaaaggctcaaacgctgaatcaacatgtgctgctcttgctggggccacaatctgagaattcggaagcaaccacgaatctacgccaatggaga

SEQ ID NO: 319254 - DNA, 298 bp, Zea mays
ctagtttagatcgcgacggccgaccttttttcatttttttgatgaacaggaaagccgcaaatcatgacacaaatcacgcgtatacaaccaagagtcgaacatgggctgttcctaaagcctccagtttttttaggctcaaaatgtgcttatagccgatacagatccaaaagaaatgggacagcaggtgcgtgcattagtcagtaggcacacgtacatacatatacagcaaacgacgacgacagcagcgtcacccacaagtgcgcacatcagatctacagggtgaaatccagcaagtaat

SEQ ID NO: 319255 - DNA, 435 bp, Zea mays
  unsure (1)..(435): unsure at all n locations
gctaccgatgcagtcagtctccagcttgctgctcgccggtccttcgcctagctcgcgggaagccgcggagacgacgccgccaccgatgcagccgctacaatgtcaacatgagcgattggtgggcaacatgtgcccttctctctatctcgccgtctacagagggcggatggcggaggtcacggcgctgcttctggaacaacccgccgttgcaatagccactgccacgccgggtattaagggcactgctattatgcacggacagtgcgacatacttgagttgacagccgagaggaacaccgctctacatgtggctgcggagcaagggcgccacgagctgatccgggagctctacttcaggttctcagaccagggcctnctcaatcgcctgaactcggcgctggacacgccgntgcattccgcggcgagggcaaggca

SEQ ID NO: 319256 - DNA, 446 bp, Zea mays
ctttcacgctcagctccagcaatggctgcctccaccatggcgatctcctccacggcgatggccgggacccccatcaaggtgggctccttcggcgagggccgcatcaccatgcgcaagaccgtgggcaagcccaaggtggcggcgtccggcagcccctggtacggccccgaccgcgtcaagtacctcggccccttctccggcgagcccccgagctacctcaccggcgagttccccggcgactacggctgggacaccgccgggctgtccgccgaccccgagaccttcgccaagaaccgcgagctggaggtgatccactcccgctgggccatgctcggcgcgctcggctgcgtcttccccgagctgctctcccgcaacggcgtcaagttcggcgaggccgtctggttcaagggccggctccagatcttcagcgagggcgggctggacta

SEQ ID NO: 319257 - DNA, 319 bp, Zea mays
gcttcttttgcatcacaaggtttaggatgtcttgcaactgcggggcaagctgcggctgctgatcaagctgcaagtgcggcaagaagtaccctgacctggaggagacgagcaccgccgcgcaggccaccgtcgtcctcggcgtggccacggagaagaaggccgcgcccgagttcgtcgaggccgctgcggagtccggcgaggccgcccacggctgcagctgcggtggcaactgcaagtgcgacccctgcaactgctgatcacatcgatcgacgaccatggatatgattattatgtatctagcttgtggtggtggttgaac

SEQ ID NO: 319258 - DNA, 398 bp, Zea mays
  unsure (1)..(398): unsure at all n locations
cttgaagagatcgagcttcttttgcaccacaaggtcgaggatgtcttgcaactgcggatcaagctgcggctgcggctcaagctgcaagtgcggcaagaagtaccctgacctggaggagacgagcaccgccgcgcaggccaccgtcgtcctcggcgtggccccggagaagaaggccgcgcccgagttcgtcgaggccgcggcggagtccggcgaggcccgccacggctgcagctgcggtggcaactgcaagtgcgacccctgcaactgctgatcacatcgatcgacgaccatggatatgattattatctatctagcttgtggtggtggttgaacaattataagcgaggcccaactggctggcatacataggtatngngtggtgtgtgtgagagagagag

SEQ ID NO: 319259 - DNA, 124 bp, Zea mays
ccgacccacacgaaccaagaataccacgcctaccacacaacctcctaccctttccacaccaccaactaacaccgacctactggactactatcaacaacatcttcaccccaaaaaacctcccact

SEQ ID NO: 319260 - DNA, 126 bp, Zea mays
ggcctcttccacttagtatagaggtcaaacctctctccatgcacgacagagctttttgttcgttgccttttaatatcttttttactgtttctaatgataatgagatacgcacgcgcgtttacctgt

SEQ ID NO: 319261 - DNA, 330 bp, Zea mays
  unsure (1)..(330): unsure at all n locations
aatggatttaacgatcggtcaggaccaagtttctaaatagtagtttcttttgcccaagccctggcgccatctaatttttgccattggttgctgtcattgattgttgtcttgcgaatccttggttgttgtcttgctgtcttgagaatcctgtagacagtggggctagaattaaacaacttgaacatctgattgtacaagtaacctcttgtaattttcttttaacacaaaaggaatgatactctagagaaagatattgntgtccattcatgtctgntatgtttccctttcttaacttataaaattaccgtattcttaattttctgcaaaagc

SEQ ID NO: 319262 - DNA, 208 bp, Zea mays
  unsure (1)..(208): unsure at all n locations
ggcgggagcgggggcggcggcgcggtgtggagggagtggaggggaggatgaggaggaggagggggagaagaagaagggactgttgcccgagtggatgaacttgacaacagaggacgccaagacggtgctggccgcggtagctatctcgctcgctttccgaaccttcgtcgccgagccgcgcttcatccnctcgctctccatgtttccc

SEQ ID NO: 319263 - DNA, 268 bp, Zea mays
  unsure (1)..(268): unsure at all n locations
cgnntccggagggcgccagaaggggcagtcgctgtacaggtatggaagagcgaagtatatgaagtcggcaggcgagccggaggatngtccgtgcctggaaccgtgnntcgaccatatcgtgatatcctggagnnggggtggacaaacctnncgccanntcctcgccgaagccttncannagtccgtcgccaaccattcatcnnngcaagcccgaggcccctacgtgatggttggttctcaaagggttcggggtgcctaatggcatttg

SEQ ID NO: 319264 - DNA, 258 bp, Zea mays
cggggctgacggacgactgaaccaccttcagacttcatggccgactgcgcctgcagcggctccggtctcgactaagcctccctggccagccaacctgcgatctccaccagcttcacgctgagcagcctgatatcagcaaggaaccccatgatgagcacgaacctgcagaggaatggcaagaacacctgcatcacgatttctcgagactggctgcggatgcacctaagcgtgataagcttgcggctcatgaactggatg

SEQ ID NO: 319265 - DNA, 251 bp, Zea mays
cgtgcgctcgccagcagcagtcagggtagccggaccggcgccctgcgcgccggtgtcgtaccgtgatgaccgcgcgcctcggccccgcgcagcaaccccacggccccacgcgaccggtgccccgcgcgctcaggccgccccgacggccgagccgaccaaccagctgtggtcgagcagcgcgcgccagagccccgccgacctccagcgacccgacccgaccgaccccaagtcgcgcgtccctagccaagtcg

SEQ ID NO: 319266 - DNA, 391 bp, Zea mays
ctgtctctggccgcgcgcgagctcctctgttgaacgctgctgttcggctccctgctgcgtctgcctgccatggcgtgcccaggctccagctcgccctgcgctaagattccgtctccctctacgcatctctctctggtcgctcgctctcagtggagctcggtctccatctgcatgcagccgtcgagctcccctgctcgctggtcgcccttccctctatccgcttgcgcgcagccgggtccctgctctggtcgtcgggcgcgccaggccctgctggggctcagctccagtcgaacgcgcgcgctggtccctgcactcgcctggcgttcggcccttgcttcccatgggcggaactcccagcgccgcggctacctttctctggtgcttggctagc

SEQ ID NO: 319267 - DNA, 369 bp, Zea mays
ggaccgtgggaaaactgaccctgtggtgctggctcgtcaggtgggaatcagaatcttttggagtaaacctatttcttctgggggatcagaacctacttggaacaacccaggtttggtgacgatgacaatgtaataataagtgggtttggacgcggaaatcaggcagaggagaggaagagtttggtggtggggtggggatcatcatgaatggaggcacaaaacgggaatcagtggggaaggtctgaaaaccatgaaccaaaaggggtttgatggcgcagaagaagaagcccctttgggcgaagtgaccgcaatcaaagcaacaacttggggtcaagagatggtggcagctggggctcttgcaggggaaat

SEQ ID NO: 319268 - DNA, 106 bp, Zea mays
  unsure (1)..(106): unsure at all n locations
ccgtccgtgcgcttcctgcctgcnntgatctcgcactctcaaactccactactactagcagcatcaggaggtgtgagaatagaaatggccagtctnnngtggaaga

SEQ ID NO: 319269 - DNA, 429 bp, Zea mays
agaaaacgaagaagaagctatagtcgtagaagaagttgtcccgcaagctgagaatcgttcggttgagaacaacttctattttgacatttgtgggacagatccagaacctcctgcaacacaagataagccccgatgcatttacccctttccttgttgttttaaactctttatcacttgagatgatgcattaggtgataggagttgtgtgctaaacaattgctgcatttccttggaactgattaccattccttgatacctgttttacttaaagttttctgatgcttagctttgctttagaaaacaaaatggtttggtttaaacaaaagatgatgcttcatatgggatgggaagttttcaaagaaaagacttgatggtgaatccatcttggtcatgatgggttcaacatctaaaaatatgtacctatgtctg

SEQ ID NO: 319270 - DNA, 182 bp, Zea mays
ttttcacattcctgctacacctctaatcgccgggtgacgtccaaatccaccttgttaatacattactttatttccaaactgtaacaacactaaaccctatactacactattcactacatccatatatcaccctacctgatacgatgcaattaccccgacaaaacctttttccaacacatatg

SEQ ID NO: 319271 - DNA, 328 bp, Zea mays
  unsure (1)..(328): unsure at all n locations
nagagagctagcatacatcgctagctctctatatcatatatattacataaatattggcgtatagtaacaaaactgaatggacgaccatatcgcccgctaggtctcttacggaatcattggtaagtggcacaacatcttcgacgattgcggattccgtgaaatccatgctgacccaattaaactcgagcgtccgcacaagcgtccgccacagaagcagaatgcggagaatggaacgaccaccaacgtttatgaaccacaggaattgactaaatacgtgtgcatcaacggacacaacgggctatccctgaacgatcttatgccaaaagga

SEQ ID NO: 319272 - DNA, 272 bp, Zea mays
gactagttctagatcgcgagtggccgccctttttttttttttttggaccaagttgtggggccatataataagagacattggtagctgacattgaatgttatcttgcgaataacttggatgtagactagctgtcttgagaatcctgtagacagtggggctagaattaaacaacttgaacatctgattgtacaagtaacctcttgtaattttattttaacacataaggaatgatactctagagaaagatattgttgtccattcatgtcttgtat

SEQ ID NO: 319273 - DNA, 91 bp, Zea mays
  unsure (1)..(91): unsure at all n locations
acgcccacgcgtccgctttattctaagttaatcttaangaaaaaatggttctttattgtgctgcaagaaataaaacaaataggtaaaaatc

SEQ ID NO: 319274 - DNA, 254 bp, Zea mays
acgcccacgcgtgcgtgcttacacattctatttatttctgtcagtagtatattgagactgagtcaggtgtgtgctagacattgggaaatgtcaaatggagcgcataggagccatgcgtcggattatgctgctaggtgtacgagaacatggcggcatggctgattaccaagaacacccttaagatcatgcccttcaagctcccgacctttgtgattctattatttcctacgtgcacatgatagcaatggggattt

SEQ ID NO: 319275 - DNA, 417 bp, Zea mays
ctagaatctataccatctttcgtggacttgaattctcgggtaagccacatgttaaccgggacagtattcgacatccacacccgtctcctgtgctatcaatttcctgtaaccacttgttggtaaacttctttctgtgttttacccaagacggtgcatgtgattctgtttggggaaaatcacgtatttaccgctcacccaatagactcggatagtacaatgtcatcagaaaaagcaaactgcacacatgaaaccttatgtgttcttgtggcaggtagcgtctctactatgggacatctctaaattagcttaaggcgatatatgatatgcccactagagaaactacatcctgaggcactcacctttacttggactatcttagggttatcgctgatatggatatgggttacatacttctct

SEQ ID NO: 319276 - DNA, 314 bp, Zea mays
tcttctactctgggatgacactctcccacatcaaattgtgctccttttatgaggacaccatcacccttcacattaaccatctctattccaaattttcagatctacacagaatttagaacaattccatccacgtaaaacatctctgatcttgttacaccaaatgctcgtactttctcacctcatacatccactacaaatacaactgatacaacctcggacatttcagctatacatatacattataccactacccctagatcgacattatccacttcaacaagcatatgctgctctcactttgatttgtcttaccc

SEQ ID NO: 319277 - DNA, 355 bp, Zea mays
  unsure (1)..(355): unsure at all n locations
ggaggtcggtagtttagttttcagaagccaaattaaattaaaggctgtctgtctcactgactgactcactcccagaagagagaagaccacaccacacaaacaaacacctctttggtttctacaaatagaggacgcactgactgagctacaccggtaaaagctgccaaggatatatatcccaccagtcaggaatgcccgcaaccagacatttcagtacataacaggagctgaacaactaacgtacaggctgacagcagcagatgtatcatcagcaacagctccacacccataaccagcacctgtcctcgtcaaggccgggcttacctnctgagaagcagttcctnctgcacggagc

SEQ ID NO: 319278 - DNA, 466 bp, Zea mays
ggattcccggtggacgccagcgtccgcccacgcgtccggagaccaactagcgacatagaaagcacaatagtgtaccaacaatgtgagccaaaatattgtgcctccttatgctccttggtctttctgcaagtgctgctaccgcgaccattttcccgcaatgctcacaagctcctatagcttcccttcttcccccgtacctctcaccagcggtgtcttcggtatgtgaaaacccaattcttcaaccctataggatccaacaggcaatcgcagctggcatcttacctttatcacccttgttcctccaacaatcatcagccctattacagcagttacctttggtgcatttattggcacaaaacatcagggcacaacaactacaacaacttgtgctagcaaaccttgctgcctactctcagcaacagcagtttcttccattcaaccaactagctgcattgaactctgctgc

SEQ ID NO: 319279 - DNA, 433 bp, Zea mays
caaaagccggtccaactggggataaaacccatgtatccacacaagtcatgggtactcagtgatatgcagctccagagtacattgcaacagcttttaaagggagatgtcaataatacttcctagtcttctacaaagtgtgttggcaaaccaccaaaggagacctcatggctgtaattgaatccttccaaaaccagcgctgcaacgatctaaacctcctaaacaaagcaaacatagttctcatcctgaaaaaagaaggagcaaatgcatcacggactaccgccctatcagcctcatccactcggtggctaaggttataacaaagatcctagcactccggctagaacctctcatggataaactaatctcgcaatcacaaagtgagctattatcatcatgacgtggtgcatctggaggtgcagaaacaattggatct

SEQ ID NO: 319280 - DNA, 408 bp, Zea mays
gttgctggaacatctaccagaaatcagtatcttcagagaaatgcacacgagagcagtgacagtgaatctgagagtattgatttacactcttggacaagaaatggtggccctcttatgaggacagcctcagccaataaattcatcagctttgttcagaatcttgagatcgacacagaattcagaacaattccatcgagggaaaacctaactgatcttgtgacaccaaatgctggtaccttggcagctcatgcagtgagtagagaagcaaccgataggagcttggacatttcagctttagatatccatgataccgctacccctagatcgacatttggccgttcaacaagcatcgttgtttctgaaggtgacttgttgcagcctgaaaagattgaaaatggtattttggtt

SEQ ID NO: 319281 - DNA, 369 bp, Zea mays
  unsure (1)..(369): unsure at all n locations
atagcaaccggtccagcactttcacgctcagctccagcaatggctgcctccaccatggggatctcctccacggcgatggccggcacccccatcaaggtgggctccttcggcgagggccgcatcaccatgcgcaagaccgtgggcaagcccaaggtggcggcgtccggcagcccctggtacggccccgaccgcgtcaagtacctcggccccttctccggcgagcccccgagctacctcaccggcgagttccccggcgactacggctgggacaccgncgggctgtccgncgacctcgagaccttcgccaagaaccgcgagctggaggtgatccactcccgctgggccatgctcggcgcgctcggctgcgtc

SEQ ID NO: 319282 - DNA, 250 bp, Zea mays
cacacctcgtgcggcggtggcccaaccaaagggcagccggggtcgcttgaggcggtgagtcctcgtcctcgtccgatatcgcagcggaacaaggtcatgggcttccaggtggctgccgtggcaccgacgccgtgcgcgcgctcctcctgcgacttatcgtcgccctcgaccttcttgcgggcggtccttggaagccggcggcgaatcccccggcctcgcgagatcccggcaacccgtaaactgggaaacc

SEQ ID NO: 319283 - DNA, 176 bp, Zea mays
cgcatcagtcactctctcgacttcggtcatccactctttaccaactactacacgctgtgcctcaaaaagccttcgcttttctaaatcgcctttttcaaatcacctgaacggttctatcttccatttcacccaccaacatttcaaaattcctttcaccgttgttaccggtgcccttt

SEQ ID NO: 319284 - DNA, 408 bp, Zea mays
aggagccctgccaagaatggctggacacgatcgaagttatgtgtaacgagatgttagggaactatacgaaaaaagaagatcagttgatgactgcagccttcgactcccgaccgaagcgaagattgaatcaagtaatggatgctctacattttgaatatcctgattatgagcggttgaacaagggcgccgaagggcagaaaagaaagagaattgtcagtgttgtgggcagacaggccgctagaacggtaaaagaagatgaagaaaaactgacgaagaggaaactgagccttgagccgacaacggttgctccgaagaagagaaaagctgcagctctaaagcaaaaggcgactgatattgaagaagaaactcctgcatcaccttctgttgccgatgtggcagaaattctaa

SEQ ID NO: 319285 - DNA, 380 bp, Zea mays
  unsure (1)..(380): unsure at all n locations
ggagcccatccacctggtcctgctctcaccacaccgccgcgccaatggcggctcgccggcagcaccgccgcggcttcccgctggtcccgctcctgctctccctcctggccgccgccgcgtacggccgcctcatctccgacggcggcccgtccgcgcagctcctctcggtgatccgcctctcggggtcctcgatggccgcgggggcggccaacaaggccgaggagaagtgcgagcagtcctacgggttcctcccctgcaccaccaccgtgctcggcaacctcttcctcgtgctgacgtacggctacctcatgtacaaggcggccacgtacctgtcggcggngagcgagctgctgctcgagatcatggggccccggcctcgt

SEQ ID NO: 319286 - DNA, 412 bp, Zea mays
acggcagagagcctcttgctgggagtgaactaaggcgacggagaccgcgagggccgcgaagtatgctgggcagcgatgatggcgacctctgccagcggcgtctccctcctcctcctactcgcccatccggcgccgccaccgcaccccgccaacggcgccagcaggtacacacacagtcagagtcagtggccacgcagctcgatccgcgcccaccctctgcatgctctcaccgtcacgccgcgttccgttcgcagcctgtggcgcggcagtggcgccgcgctagctcctcatcctgctcgcttcgcggtcaataggaagacgctccggttggttaacgtcagcgtcagctgcagcgccgaggcgctgcgctccgactgcgctggcgcggagccggctgagccgcggtctgtgc

SEQ ID NO: 319287 - DNA, 166 bp, Zea mays
tattgccctccctgttcttgttgttgctttcattgataaaagacatataagaggcagataatatagaaagtgggtgcttattatattgtcgatctgtgttctcaattaccatttatcacttctaggattgcttcttcaactttactgtccacactctctccctcat

SEQ ID NO: 319288 - DNA, 140 bp, Zea mays
acactacaccacacccacccgacgactattttacacgcacaacatctagttcattcgatcgttaccatcactcatgaagctgtaaactagccaacacacgaataataatgacggcgtcaacagtggcgagcctctctgtc

SEQ ID NO: 319289 - DNA, 433 bp, Zea mays
cccacgcgtccggcaacatagaaagcacaatagtgtaccaacaatggcagccaaaatagtttggctccttatgctccttggtctttctgcaagtgctgctaccgcgaccattttcccgcaatgctcacaagctcctatagcttcccttcttcccccgtacctctcaccagcggtgtcttcggtatgtgaaaacccaattcttcaaccctataggatccaacaggcaatcgcagctggcatcttacctttatcacccttgttcctccaacaatcatcagccctattacagcagttacctttggtgcatttattggcacaaaacatcagggcacaacaactacaacaacttgtgctagcaaaccttgctgcctactctcagcaacagcagtttcttccattcaaccaactagctgcattgaactctgctgcttat

SEQ ID NO: 319290 - DNA, 272 bp, Zea mays
  unsure (1)..(272): unsure at all n locations
cagacccgtacccctcccattcactcctttcacccaaaaactcattctccttgggcacgattttacataancaacttatcaaatccaataatgcatacaagcccactatctacaangagacacacaacacacataaatcggagcactaccagttcattagacaataacccatccagtccaaatcactcatcaaagaaaataaattcatctttaaaacaaatgctggaagaagaaaaaaaaaagcctcaaaaagaaactgaatttaagttact

SEQ ID NO: 319291 - DNA, 284 bp, Zea mays
taattcccatctcgacgccactcatacgcttgcctactcatcccactccacagctttttcttaaccattactatctaaaacatatggacaggtatacaaagcaacatagctaaggcacactaatacatataacaccaaccctcatttcagcttcctctcctagacctctgacaaccattccctctacaatctctcgttacccatcgacgcgtatatagaaatcacgatcatactagcaacaacaacacgaacgtacagcgtatcttggctcctgacattcacca

SEQ ID NO: 319292 - DNA, 423 bp, Zea mays
  unsure (1)..(423): unsure at all n locations
gcgactccactgccgtctcgcaaagggaattcccttcccctttagctcgccgctctgccgctcgcttcnngtctcccttgtagagggtgctcggggaccngnatggaacttggcctgagtactttaggtnnagagaatcngnngtttttctttgtctttctagcctcggggtctgctttgcgtnnctggtggtgnnngtgaagggggnnagaaatnntcgtgagaatnnctgttctncggatctaggtncgtgcntgagcctcgnnnggaatnncagggngnntttcactacctatagcnnttcgtcngnnatttganaatttnngatgtacctaannntggagtcttaaggggggtggcaannaaagtcttagnncagtagnntcgttcttatttgatgtnnatgaagcttccnnnccttgg

SEQ ID NO: 319293 - DNA, 392 bp, Zea mays
gttcggagcgcacacacacacaaccagatctcccccaaatccacccgtcggcaggtcggcttcaagatgcagatctttgtgaaaaccctgactggcaagactatcaccctcgaggtggagtcgtctgacaccattgacaacgttaaggccaagatccatgacaaggagggcatccccccagaccagcatcggctcatctatgctggcaaacagcttgaggacgggcgcacgcttgctgactacaacatccacaaggagagcaccctccaccttgtgctccgtctcaagggaggcatgcagatctttgtgaaaaccctgaccggcaagactatcaccctcgaggtggagtcctctgacaccattgacaacgtcaaagccaagatccaggacaa

SEQ ID NO: 319294 - DNA, 384 bp, Zea mays
gtgctttatctggcatctgtatcatttcaaatttttcatctgatcctcctgtttctctggagcacaatggatacatatacattgctttctcatggcttgtttgtgagaaagaaatgctctaaacagacccaggtccccaggtgtttcggttgtttatggtggtcatgcattccaatttaggtccttctgttctagttgcacatatttagttctgatgtttatgatcactacagaggcaagtttttccttttaattcactattcccacctatacaacttggtggttgattaagagttgtattctcatgtacatagtctctgattcatgatacttattttatagttgggcccaaaaattaaagatctatattctctaaagtgtgca

SEQ ID NO: 319295 - DNA, 394 bp, Zea mays
aaccggtccagcactttcacgctcagctccagcaatggctgcctccaccatggcgatgtcctccacggcgatggccggcacccccatcaaggtgggctccttcggcgagggccgcatcaccatgcgcaagaccgtgggcaagcccaaggtggcggcgtccggcagcccctggtacggccccgaccgcgtcaagtacctcggccccttctccggcgagcccccgagctacctcaccggcgagttccccggcgactacggctgggacaccgccgggctgtccgccgaccccgagaccttcgccaagaaccgcgagctggaggtgatccactcccgctgggccatgctcggcgcgctcggctgcgtcttccccgagctgctctcccgcaacggcgtc

SEQ ID NO: 319296 - DNA, 213 bp, Zea mays
tcctcccactattatatactaaaatcacacattctagacatcatatacgaatcatacctacaatctcgtacaccatgtgttacacacataccatatctaatttcactgctctatactcaccaactataaacacaacaatcacccacacattattcgtcccataacatattaaacaccccatccttactatctttatcaccctctatctatcca

SEQ ID NO: 319297 - DNA, 422 bp, Zea mays
ctcccatcccccatgcgccgtccgtcacctcgtcctcggcgcgcgcctctgcttcctggtagccgcgcccagcttcctctcttccgcgcgccccctgcttctccttggccggggcttcatcctctccctgctcgccatggctggtcgagctttttttccagccacgaagctcccatggccgccgagctcagcctttgctcctccctgcgtcgcgcgcctggcttgctctccagctcccgtgcacgcccggatcctcttcctcccaggggctcggccgcatctccatctcccagcaagcgccctaccgaagccctcccatggcgttgttcctccctggtgccgagtctctctctgccaatcgcccatggcgcccagccgcttggccttcctggtactcgctctccctcagtgccctgtccctt

SEQ ID NO: 319298 - DNA, 96 bp, Zea mays
aaataaaaaaaaaaaaaaaaaacataaataaaaaaaaaaaaaaaaaaaaaatcagggacggaaaataacaaaaaaaggggcaaccaatctataact

SEQ ID NO: 319299 - DNA, 340 bp, Zea mays
agccatagctcccatcgacgatcatctctagcctgaccattcatttcttgtggtaggctacttactacatatggctgtcaacattctctttttaacgatggaaaggataacatataataactctcctagatactgagttccactacaaaaaaaagacacataagcactctcagactctcattcttcacagcatcgacccatgaccgtacagtctcattctcatctgattgaagaggataccctttctaatgccatttatttacacctctatatcgatcaaccatactccgtcggacagttactacgcctgaaacccaacatttcaaccccaaagttcgaa

SEQ ID NO: 319300 - DNA, 291 bp, Zea mays
agcaaactacacgctctgcgtctccttgctcaccaatactcattcaccatccgaagatttcttcacaggtcatgaactatccaccttcctactccttcactctcttccctttcatttagcctcccgctcttctctatcccctctccattcccaaccatcttttcagttttttccgctattgcccgatacccatccacatccagctcacgactaacctcatcccccctcccttctcttctccttcctcctcctcctcctctccgtcttctacttcgttctcggccattgtca

SEQ ID NO: 319301 - DNA, 422 bp, Zea mays
agccttccgtggcaccaccaaatggtcctgtagaccaaacccttggttaagaatccgcttaaatggggggatcttatcaatttggaaccggagattgaaccttggcctgaaccaaggccccagaaggattcaagtcactttctgaaagacctgggaaacttttttcaagagaatgctgatcagtctgatgagatacagaatttcagaaacatatctgacaaggctgaaaaaatcatggaggaaatagaccggctgcaaaagaaactgaaacagctgcaaggagaggagcgtaatcacgacgagaggagcttgtcacctagacaaatggctgcgtcactgaagcgaaagagtctatcagagcctagatatccagagctgcagattccagagaacattgaacaattctcgatgtcgcaaatcga

SEQ ID NO: 319302 - DNA, 265 bp, Zea mays
cgtgctcataggcgaccgcccgtgctaatctgatctacactatagcgttatttgcgggcgggcttgattcaggcatacccatcacgacactgacgccgttctccatgctgtaatccatctcctccagcttgtgcttgctgcaccagaccaccatgcacgtgctctcgccgtatacgagcctctccgagacctcgctcatagctcaactgttccagagctatgtccagatgcagcaggcctctactcctttaaacgacatgttgcg

SEQ ID NO: 319303 - DNA, 179 bp, Zea mays
gggaacagacactataacgcatcctctcactctctgttctctgaccttaccgggagcgtattagctaatgcggctcatattatgctctgttcaacatgtcatgatgccataccattaacatatcaccttccctacaaacaacacctccaagccaaactggcattcgagtagtcatgtct

SEQ ID NO: 319304 - DNA, 405 bp, Zea mays
ctcaattcaccgcccctgccccctgtttgtctcgtcgctgctacccacccatgctccccccaccaccatggccgcgacctcgtccgtctggtcggtgtggatcgccctgtcgctgacgctaacgcttgcctcggcatcaccagctgacgggcaagggggcggaggagcacactgcccgcccgtgctatgcggcggcgtggagatcgccttcccgttcgggatcgtccaggagcaggcgacggccaccaactgcggcgggatcgggttccaggtccgctgcgtcaacggcacgccgtacctcggatacagccggtacgaccactggctccagatcctcagcgtctcctacaccaacgcctccttgctcgtcgccgacacccacaagctcgagaagctgggagcctc

SEQ ID NO: 319305 - DNA, 410 bp, Zea mays
gattgaagcctcatccaggctgtttgcttgcacgttacaatgatcccaggacaaagagcttcttaatgaggaacgaggtgcttatacggctaattgacttcacactggagttgtaatcgtcaatactggcatcagatcgatgtaacacactgggcttggagcttccagtgagtcattagaaaggtaaatctgattctatttgtgtactttacctgaaaagaagtcgaagggttggctacagtagtgagagttatctcaccaagttacaaggtttaaacaatccctaaggcctggtttggtgaccagggaccacgagagaattcctcctcatggatccctccgtcatcctagtcaccaaacctatcctaagtatttgtaaggaaaaaacttgcctctgaccctactgatgc

SEQ ID NO: 319306 - DNA, 266 bp, Zea mays
aattccctcgtctacccacacatcctgattcaaacacactctacccttttttcttacaccttccaatcatcccacgagaaagatcttttaaataattagccaggttcttatacccttaattcacttctcactctactttaaatcataaatcttcccattaacatcgatctaatacactcctattttaacatccacacactcattataaaactcaatctacatctatccatacactttacctcaaaacaatctaattccttacctac

SEQ ID NO: 319307 - DNA, 386 bp, Zea mays
ggtgggttggcttctcctccccctccggttcgggttcgggttcgtgaggttctccggggtgcggtttcgtgggtgagcggatcgagatggcggcgtcggatgttgagtaccgctgcttcgtcggcggcctcgcctgggccacggacgaccactccctccacaacgccttcagcacctacggcgaggtcctcgagtccaagatcatcctcgatcgggagacgcagaggtcccgcggcttcggcttcgtcaccttctccacggaggaggcgatgcggaacgccatcgagggcatgaacggcaaggagctggacggccgcaacatcaccgtcaacgaggcccagtcccgcggcggccgtggaggctgcggcggcggcgggtacggtggt

SEQ ID NO: 319308 - DNA, 395 bp, Zea mays
ttagtctcgctacgtagcagtgcaataaaaaaagcagccgcaatggcgagcagcaccatggcccgctgctccacggccttcgccggcaaggccgtgaacgtgccgtcgtcgtccgccttcggcgaggcccgcgtgacgatgcgcaagacggcggcgaaggccaagccagcggcggcgtccgggagcccgtggtacggccccgaccgcgtgctgtacctgggcccactgtccggcgagccaccgagctacctgacgggcgagttcccgggcgactacggctgggacaccgcggggctgtcggcggacccggagacgttcgccaagaaccgggagctggaggtgatccactcccgctgggccatgctgggcgcgctcggctgcgtcttccccgagct

SEQ ID NO: 319309 - DNA, 243 bp, Zea mays
cttgctctcctcctcgtctctactgcttcctcccctcaaatacttctaattcacaatgtacacaatcacatgataatcatccactattacatcattgatacaatcaacaaccattccattacttattatacatccttacataattccttacttttcaaactataccattacacaatttaaacacatacttccatttaaaccattactccaaaattcactaaacaattttcactcaaaacttat

SEQ ID NO: 319310 - DNA, 272 bp, Zea mays
acttcttcttacactcctcctcttctctactactacctcccctcaattacttttaattttcaatatatacaatcacataataatcatccattattacatcatttatacattcaacaaccatcccattacttattttacatcctcacataatccttacttttcaaactataccatttctcaatttaatcacatacttataattaaaccaacaccacataatacactaatcaattttcctttcaaaacttattcaatatcactttaactttcaa

SEQ ID NO: 319311 - DNA, 419 bp, Zea mays
gtgccaactgattacgagaaaataagggctatgaatatgatgaagaacaatcaattggttgaacggctaggccttggacaattgaaatcactggtgactgctacagctgcaaacaacaaagaagactgtcctcagcaatcagagagtttatatgatggtgaaaacactgacaattctaatgaagaggaatcccaatgtactaacggtggttgtgccaacatctccaatgatggtgatcagatctcaacaaaagtaacaagaggaaataaaataattgtggcacctacggaggagcgaacaattagagtcactaggcaaagaattgctaaagtaaaccaagaaaatagccacaacctgtctattcataaacaactcagttcatgtcctgctacaaaccatgattcgatagaaactcttgt

SEQ ID NO: 319312 - DNA, 428 bp, Zea mays
  unsure (1)..(428): unsure at all n locations
cctcattcgcgaaaagaaaaacacatggcgaccgcagagggcaggacaggacagggacgccgaggctaggcagtccatctgttggggtggccagtggggatctcgccggccgggaggtctggggggcgggggctgccaaacttcgccatattggtgaatcactgaatccgcccctgccagcaaccgttctgacgtggcggggtggggcaggatccaaatggcggcggcaatagaggaactgcggctcctgggatccatccctgtactggaaggtccgggagaggtcgacggcgtggtgggtgaggaagggcgaccgcgaggcggcggcgacgacgaggagatcctgcgattcatggactcggtggacagctacctgctcctcatggactccctatcctncgctcttcgtcaggtatgcgatcctgcag

SEQ ID NO: 319313 - DNA, 83 bp, Zea mays
cttaaaaaatctgccccacaactccaaccaacatcccaccaccccccccatctaaaatactcccttcacaaaacctccaaacc

SEQ ID NO: 319314 - DNA, 201 bp, Zea mays
cggagaggggcctcctgtagcctctcacttccctcagtcctcgttcgtctgctccctcctctctctacctatctggaggtatccttcctgtggcgcggcagagatggctgcccctgcctccaccacggctgctgctgctgcagcgctgctgctgctgctcctactgtcgctcgccgcggctgcggacatgtcgatcgtgtc

SEQ ID NO: 319315 - DNA, 367 bp, Zea mays
cccactcttctcatttaactccttcactctcatcttttttcttacctcttcaacctatccctcagacaggctttcttctactcacggactcctctactactactactcatatattcattctcatacataatccattctcacaactaatctccataattaaccctaacttttcaccatgatctatacctattaatactacctattcatatctcactttacactcacataatcatacatactcctatctatcatattcatctacataatacatctaactattcttacctcaaagacactttatatcataactcctaattatataccatacctaatcaactcccattaacaatacatttaaactaaaatt

SEQ ID NO: 319316 - DNA, 407 bp, Zea mays
ttccctctgtacgcactcgtcctgtgtccccccgtcttatctcttcgtcttcgttcccgcagcctcctcccaaaccctatcgtagctttcctcctccgtgggcgactaccactactcgtccaagctgaagtactactacccctctcctccgcctcggctcacggtgttctcttctggcccgccttctgcctctccgtccgctgtcttttcatttatttttttttattcttcttcttttattttatttttattttattatttttatttttttttcataattattttattttttattttttatttttatcttattttattatatttatctttatttgtttcctttttatatttttattttttcttatccctctatatattatatttttttttatattttatttttttta

SEQ ID NO: 319317 - DNA, 321 bp, Zea mays
tcttcctcggactcttggtcatactcatgggcttttaaaccaccgtcacgctcacgcctatacgacgaacttctcaagttctgcgggggagactagaaacgaacctaggatctcaatccttttgcgcacctctcatcatactcctatcctatctagtatcccgtccgaccctagtctacactgatccactatccactgctatttctactacatcacctacattctacttcgatgccaatatattcaccttatcttaactctacactatatatccattcgaacccttcgagtcagtactcttcaaccacctttacttcatct

SEQ ID NO: 319318 - DNA, 296 bp, Zea mays
attcccgtctggagccactcttccttgattcatcactcctcccgttgggaatttatcttctagtctgccctcctcttctcatcgtcctttcttactaagccagtggcactttcccttgttgctctaactccctaacgtgtgtcggttctgtcttctagcatattctcctgttgctatcttggattcttacttatattctttcattcataattcctcacactttatcttctctccactgtctttttaaccaatctctattaccaattgtttgaatcaacagttccttttcttactat

SEQ ID NO: 319319 - DNA, 408 bp, Zea mays
cgaccttcaagtctcgctacgtagcagtgcaataaaaaaagcagccgcaatggcgagcagcaccatggccctctcctccacggccttcgccggcaaggccgtgaacgtgccgtcgtcgtccgccttcggcgaggcccgcgtgacgatgcgcaagacggcggcgaaggccaagccagcggcggcgtccgggagcccgtggtacggccccgaccgcgtgctgtacctgggcccactgtccggcgagccaccgagctacctgacgggcgagttcccgggcgactactgctgggacaccgcggggctgtcggcggacccggagacgttcgccaagaaccgggagctggaggtgatccactcccgctgggccatgctgggcgcgctcggctgcgtcttccccgagctgctcgc

SEQ ID NO: 319320 - DNA, 95 bp, Zea mays
tcgtctcgtcacatactccatcgtcatctcatcctcactatatgctgcaactagcatcatgctgctcatcctgcttgcgcttccttcctgtcatg

SEQ ID NO: 319321 - DNA, 299 bp, Zea mays
attcccggatggacgcactcatccgcaagctgtccccctacacactcctttcttctctccaatcactgctccctccatctccgcattctttaatacgaggggggccgatctccccactgctccgataacggtctccccaggaggtgcaaggcttcttctggcaggacattaaacacctcacaaattccgcttgtctcgagccatccacatgtgtatgacccatgtgatgattcctttacccttgttagattcactactctcaaacaaggcacaactcttgacactacatctcaaggtta

SEQ ID NO: 319322 - DNA, 311 bp, Zea mays
cacaccacccaaacatcctctaaacctttccatcattaatcactctactctatcagaggaatcttaccaatatttggcaggcagataaaacatttactaaccaattcacatatcaatcaaccacttctgaaaacattcctaactttactcaagaaaaaccttatcatactgataagatacaaaatttcataaacatacctcacaattcatgaataaatcattgatcaaatagacctcctgcaaaagaaactcaaacaactccaaatagataaccttaatcactactataatatctcttcacctatacaaat

SEQ ID NO: 319323 - DNA, 172 bp, Zea mays
acaccatcccttcttcccaacccagaagtctttttaataattatcgaggcccataaactctcaactcacttctctctctccttcatctcattaatcttcccattcactcaatctaccacacctcaatttttacatccatacactcattaaaaaactcaatctccatccatcc

SEQ ID NO: 319324 - DNA, 352 bp, Zea mays
tctctccactctatcatctcctacttttttccatcatccaactatttcaatcccaggtgcccttttaacccaactcctcatatccaatcctttttcataaactactcatccttttttccaacttccctttcctacattaatccatttaccataatctgttcaccttttacacctaattctttataaatactacctatcttttactgaattctatcctccttattttcaatctccctctctttctcacctaacacctctcaatctcactactcttccaacactttttccctacctcctgcttaaccaattacaacattttctatcccttaatcatataatataactcttacct

SEQ ID NO: 319325 - DNA, 241 bp, Zea mays
ttctctcccctcctttttattcatatcctcaattctacagagtagcttttcaaaattagcgtatccaaactacgtcatctcatgttaactaccacttcttattccacaacctcacacttaccacataccaccactccctccacaacaccttcatcacctaccaccaactcctccaatccaatatcattctccatcataatactcactaatccctcctcttctactctcatcaccttctcca

SEQ ID NO: 319326 - DNA, 263 bp, Zea mays
ctagcctatagcttctatgaacctctcgtgtctgcccgcacaagcatagccaccagtctccatagctctgccggtggcgtcatgaacttccgctgcccctgccgctcagactatgccgctgtaagtatccatacaatgccatggatgcccgaacaaggttcggaatgcgctcaaccccatctcatgcctgcacgacgtctctacctacgcctagtatcacacgatgactgtaactatctcactggacacctactcgctcatta

SEQ ID NO: 319327 - DNA, 240 bp, Zea mays
tccatctttccatctatctcagtcgctttcaaaactcagcacgcatcactataatctatatatcattactcaaatacttaatctatacatctatcttcatcccctttcttattcttcctctttatatatattttcacctaatctatttttgcaaaatatccttcatctcttacctctattcttatctcctcttccttcctttcacctccaccttcatatctatactatctatatattaaa

SEQ ID NO: 319328 - DNA, 233 bp, Zea mays
gtattttgatggctcgttaaagcttcttgtgtaacacccctggtgtttatattccgctcgacaactagtatggagttaagcacgtaatatcagtggataaaacatatgctaaattttaatcatcttctatcgcgattttaatatcgcatctgtttctgtctatttagactcctaaaattttcgcgaatttcggaacgcaattgttctgaaagcttgcgagcctgtgcccaatt

SEQ ID NO: 319329 - DNA, 329 bp, Zea mays
tcccgctggacccactcatccggttcctaatggtggtttcttggcttgtctgactacaattcactcaaattgaagatagaacttattcacacatatggcaggcacagcaatcaaagcacgaatctgacgtagactacgaccaccacgctcataacaaccaaacctcccaaataccatccactaactaaagggaaggtcaatactctaataacatcatcgcctagtaccatgctatcaaccccaactgccgccaccatcaccatactccacgatctcttacttcacctcttctactccatcattcagaatccttcctcctctatccgact

SEQ ID NO: 319330 - DNA, 301 bp, Zea mays
acggcttccctccacaaccacttgctcttcatctacttttctcctccgccttccactgatgctttcccctgcctgccgtcgtgcatcatcatctccggccagggccagggcatcccggtccggcctcctccactctgcgccccccagactcgtcgctgcgtatctgctggccgccatggccaccgtcatggccgcggccgtctcgtccttcccgtcctcctcggccgtcgtcgccaaggcgtcgccggcgtccccctgtgccgccccgcactttcgcccgagggccctacggtccgctatc

SEQ ID NO: 319331 - DNA, 368 bp, Zea mays
caaccacatctatatgccactaccctaacacttttcctccacagctctacctttcctcgggggtccacttactacctcagctcacccctccaccttccgtcttcttccgcctttaatcacgccctcctcaccattcacatgactcactctaaatcctacccatccaacacgtcctctaccactacataccacccctaccgcactcccttcctcggcccactcttccactaaccacccatctacctcactaactatttaaccatctactacatactattcacctaccttctttcatccaacccacaaactctcacacacaacctacatctccatgtaatccactcccactcagacattcttgtcactct

SEQ ID NO: 319332 - DNA, 369 bp, Zea mays
cctcttccttctctcatctatctccttagtattattcgatcaaggcgactacgatggaagagctcttataaagcctggtcgtcaacaactacttcaaccttactcatcacttcaacttcttttactaatattgaaccttcacaacaacacctttttacacttcatcattaactgacgtatattaacctctgaacttcaaggataacatctccgactattctcttaaacctgtctccaacgttataaacaacttcaattctattattaaacctgctctaattttcaattaccctacttcacatacttacatttataacttcatgtttcaacatctttattttaccataaattactttatatttttcattc

SEQ ID NO: 319333 - DNA, 255 bp, Zea mays
tttccatatacacatatcatctctctgctgggagtcttaaaaaatctcgaccactaccataatctttatctctttcatctaccctattctcttctcctacctcttccttctcttaatctaccaaatattcatttaatttataaattacatttataccttcttctaataccttttatccaaatttcaattctttcttcaatcttttttccaaaaatatcttatacttttcttcctcatattgatataaaaactttc

SEQ ID NO: 319334 - DNA, 393 bp, Zea mays
  unsure (1)..(393): unsure at all n locations
cttcctcagctcgctcccggccggagctccctgctgctctctcctgctcagccgcctgccatggagctcgccgagccctcccgagtcgaggcccctgctcccagcgtcacgatccccagctcctctgctcactcggctgctcgcgccgtcgccttgctgctcgcccgtccgcgcggcacttcgtctatggccgctgtccgccgtcgagttcctgtacgcgcgcctctggttcgccattgctctctgcgcgcgcgctctgctcggcgtctccatctcctcctgtgctccagctcgctgtcgggacggtttttcccatggccggcgatgctccagtcctctgcgcggcggtactccctgccgagcacctnccagccgaggcccttgtcttccatg

SEQ ID NO: 319335 - DNA, 187 bp, Zea mays
gctagttctgactcatcggctccctttatctttttttttattctttttttttttttttgttggtttttttttatgttgggttttttttttttttttttttttttttttttttttttttttttttttttttttttttttttttttttttttttttttttttttttttagatctttaatcatttttttt

SEQ ID NO: 319336 - DNA, 193 bp, Zea mays
  unsure (1)..(193): unsure at all n locations
ttcttctctgttctagatcgcgagtcttctccctttttttttttttttgcgtggtcaatttatgaaaggatcttttnaaagattacatgcacctgtataactaaaaaaatgtttgactaataaaaaaatttcataaataaaaaaaaaaaaaaaaaatttaaaattcaatttataaaaataaaatattataata

SEQ ID NO: 319337 - DNA, 196 bp, Zea mays
taaaaaaaagctagaccccccaacaaacaacaccaaccacccaaccacactacaccacaacaccaccccaaaaaaacaccaacaccccaacccaaactaaccaaaacaaccacaaaaaaaccccccacaccaccaaacaccaaccccaacaccccaaaccccaatccaacccacatacacaacacaacctacccaa

SEQ ID NO: 319338 - DNA, 280 bp, Zea mays
ggccaagatccaggacaaggatggcatcccttcagaccagcagcggctcatgtttgctgggaagcagcttgaggacgggcgcacgcttgccgactacaacatccagaaggagagcaccctccacttggtgctgcgcctcaggggaggcatgcagatcttcgtgaagaccctgaccggcaagactatcaccctcgaggtggagtcttcagacaccatcgacaacgtcaaggccaagatccaggacaaggagggcattcccccagaccagcagcggctcatc

SEQ ID NO: 319339 - DNA, 290 bp, Zea mays
cggacgcgtgggcgcgtggctgctcttccagtactgctcacgccagcacaacaggggtcagccaacacttatcctcaactccagctcgcccagcccctctctgtttgtggcgtgctccagtttcccatggcgtcggtcctcaacctctaggcaccagtcgcccctactccctgctcctgttcctcccatggtgtcccagtcaagtttgccctagccctctccctcttggttctttgctggtcacgctcctctccatgggcgcccaggtctcttccccgtggtggcagacc

SEQ ID NO: 319340 - DNA, 199 bp, Zea mays
acccacccaaaaaagatttcaaacaaaaccccccccccccaccaacaccaccacaccacccaccccaccaccaccccacccccccccccccccccatacaacccccaacccccccctccccacaccacccccaaacccaccaccacaccacccccccccacccccaaacccaaaaaccacacacacacccccccccaac

SEQ ID NO: 319341 - DNA, 450 bp, Zea mays
tcccgcgtctactccacttcttcctctaggactaactgctaccccctctcctttccctcgccgcctactcctctccaattctactttaccaaccgcatcagcgagagctagactgataatgaccacttcaccttcctcactcataacctaccatctctactacctttacaactctcaaacacattttttctataatcaatctatataatatcatttccattttaatactattataatatccatatcattctttcttcttttaccatatttcttttttttattcttttattttttttttatttttttctatttattatatttttattctgtttttttttatttttttcttttattatattttattatatattcttttttctatttattttttcttcattattatatatttatatttattttaatatttttttataattttttatatttttt

SEQ ID NO: 319342 - DNA, 282 bp, Zea mays
gcgcggcggctggtggtggtgaggataacctggagctgataccaggtgtcatggagcttctgtccatggggatatctgtcttctccggcgaggttatatccctctgccgcaggcttggttctagggtagcagcgctaggcgcttgagagtcattgcaagagagagagattggtttaataatatattcctccttcctttgcctcctgcgtacaggcctatatataggccaccggttgaccaactaggcaaccactaattaggcaagtgactaattggaattat

SEQ ID NO: 319343 - DNA, 111 bp, Zea mays
actgaaaaccccttcattacccaacttaatcccttcaccacatcccactcaccccatcatccatataactaaaccacccacaatcccctacccaacaatcctcactcacaa

SEQ ID NO: 319344 - DNA, 289 bp, Zea mays
gtagaaggccaactgatcatgtgtttgttgacgaactaaacattgtcaaattcggcgatattatcttccctaataaagtattacatgtcattgatgcttccttatgtgatgactttaacagtgcccaaattaacattgttacctagcctgagacctacccatgcttgatttctctactgcaagtttcactttcttgcacacgtgagattcctggttaaccaacgaccattgaagaagcagctcgcagaattggttcaatccagaccacatatgctagaagaattgaaaa

SEQ ID NO: 319345 - DNA, 277 bp, Zea mays
caccagccagcaccatggtcacttatactaccacatccaacgtactgtcccagtcggtttttaaccaatcttagcctggcacctactccccaatcgcacatgaagttcctaacggcacacactcggccaaccgagacgacacacgcggatattagaacgtctcatactataaacctaaacacaggcatcactaacttactatgccaaaaattcttctataacttcaaacaagagaacttatcaaagcatgtacacaaacaaaatatcaatacacaat

SEQ ID NO: 319346 - DNA, 244 bp, Zea mays
cagctcgcttcatctaccacttccttctccaccaactactcatcttccattaagccggataactttaaatttacgacgtcctccaccgccccgcccgccccttcttcttccacctccccttacaacgaataattcctcctccgccaccttaacaacccctttcaactctccgctatccttaacttaccactaccacccacaccacatacccccggttacctaaagatcacataaaaagcaccat

SEQ ID NO: 319347 - DNA, 287 bp, Zea mays
ctcaagctctagccgaactccctcacgccatcctctttcctggtgttcatccctgcggcagccaccacttgggcgctcctctccctgcccctcccatggcggctccccctggatccctccctgcgcggaccctctcccgtggatggtgccgccccttcctgcagcacgtcgtgctccctcccctggcgccctcgtccccaacgccggaaatgccgctgctgctccaccagccgctactgctcctgaacgccagtgccgaccaccatctcccatggcgcaggagctcc

SEQ ID NO: 319348 - DNA, 304 bp, Zea mays
gtcgcacgggcgctgctcacagacacaccagcgtcggcaccaatggcttactaccaggaggtggacgactgctcggaggaggtgaggtcggtggccccggccggcttcggccgccacggaggcggcgtccagcagcacgtcgtcaaggagaagttcgaggaggtcgacacggtctcacgcgccggcgccaaccaccaccaccaccaccatggtcaccacggcggccacggcttcgtggtgcgcgagaccagggtcgaggaggacatcaacacctgcaccggcgaggtccacgagcgcagggaga

SEQ ID NO: 319349 - DNA, 209 bp, Zea mays
tcttcctctgcagagttattagaatgccacttctcagggttgaaggctctggagaatgaatagacttctgttgaaattgttaagcacggaacagaaatagttcatagagctgtcaccaaatcattccagtccctacatgaaccttacaaagggaaaattgtcggtctgttaatatccacatttgaggctccataatccttaggacccat

SEQ ID NO: 319350 - DNA, 282 bp, Zea mays
gcgcccctggcccctctgtccgatctctttccatagccggcttcgagctcgggctagtcgttcatggcgtggacaccagacgagctccctggtgctcgcccctctccagccgagctcctcctatctctccctcgcgtcttcctctccctgccatggacgccggagttccgctgctcggccatggccgctgtcgagcttcctgctcgtgcctatctccctccatggctgcgcttcatcaagctctctgcgcgccgtgaagcccctgcgcgtcgcggtctccca

SEQ ID NO: 319351 - DNA, 167 bp, Zea mays
ttcttccgctccaataatggagtttcctcaccactttcaccaccacgtccatctccacatacacgactttatactaccacataggccctcctaccccagtctactgctgctacttccaaccacctccaccccacccgtacttcctctctcccttcgacccctatcct

SEQ ID NO: 319352 - DNA, 273 bp, Zea mays
  unsure (1)..(273): unsure at all n locations
ggtgttctgctcttgtttcgtncctcaatcgtaattcggaagtttcgcattggagtcattcgtcggtgtcggtaagctttacgcagccagggcgcatgacttgttgtccgccgcgcctcgccactcagaagcgagggaagtggtagccgaggggggtggtcgtcgtcgctcactcattggaaagggaggattgactntngtgatggacacgttcgtaatttcgaactcttggctgaagaaccttcgactccagccgattatannaaatcttga

SEQ ID NO: 319353 - DNA, 296 bp, Zea mays
aaaaaacaaaaacaaacaaacaacaacaaaccaaccaacacaaaaccaaactttaccaccaaacccaaaccaaccccaaaaaaaaatcaaaaaaacccaaaaccacccaacaaaaccaacacacaccccacacaacaaacacacaaccaacaccaaccccaccatcaaaacccccaaacccaccaacaaacaccacaacccacccaaacacaaaacaaccacacactaacacccacaccaaacaccccaaaccaaacccccccaaaacaccaacacacccaaacccaccaaaaaca

SEQ ID NO: 319354 - DNA, 306 bp, Zea mays
cacgcgtccgctgctacactcgcacgcagcccaactgacaacagtcaatagcccaagtgccctgtcgtcgtgtccacgccctcagcgaaaccctagcactcggtcgcgcacaggcacaacgcagcgcactcgcgccgtcggcattcagccgtcgcggactcgccgcccacccaggtcccaggctgggagagtggcagacacccactccgccactcgtcctcagccaccgaccaccgtccgtggttccccgttcgccaccggccaccgccagtccaccaccctcccggcgcgccgtgcccctacttc

SEQ ID NO: 319355 - DNA, 270 bp, Zea mays
gaggcatcgcttgggctttcttgatgcgatttcagatattgggagaatactaccctggagttactgatgcttggatggaagtagtggcttctcaagggcagtccttgctatctgttgacctctcttgctcggatgtcactgatagtggattcaatcttcttaaagattgctcaagcatgcaaagtttgtcatgtgattattgtgatcaaatctcagaacatggacttaagacattatcaggcttttcaaacttgacatcactgagcatta

SEQ ID NO: 319356 - DNA, 241 bp, Zea mays
cttcagagcgtgagcgctacacgctctcactggcagcaaggacaggctcctcaacgacattctacaggtgctgccgtcgaatcagacgctcacgccgctacccgacctcctcctccccacgcgcacacccacatcacgtctgccatacccaacaacgcaactacacaaatctctacccaaagacaataatacccatgactagtttcacaacttctgttgataaagcacactgcccataaaa

SEQ ID NO: 319357 - DNA, 402 bp, Zea mays
taactcacaactaattcaacttctattctttgaattaatccccacccctttttgactttcttactccaaatacacgattttagtttgattaattcccaccccacaaccccccaccacaataactttttcaatctaattcttcttcaactaccctcctctttaacccaattaatgattcaaatcaaattcttctctcatattttccctttatcttcttcttcttctatctccattaacatcatcaatcattctcttatttacatcttcgtatccataatctccttctttctgtcttatcacacttccttctccttcaacttcatcaccttttccttccatttccttcataatcttccccccaacatcaccatatccacctactccttttacttccacaccttc

SEQ ID NO: 319358 - DNA, 309 bp, Zea mays
ccacgcgtccgcgttcccagctgcacattgaggaactttgtcatgccaacttgtcaaaagacgagccgatggatatatcaaaaatatgtctcaatactctctctgctcaaacactgccagaggaagcaaggcatgaggaaagagttatttgcattcctaatggtgcaaatttggttagaagtgtccgcgtgaaaaatgatcttgaagaaaattctgtggttgaggtttatttcccaattgaacaagacgttggaaaggaggcaacaaggctcagagctattacagatctttttagcaacattattgaag

SEQ ID NO: 319359 - DNA, 284 bp, Zea mays
aagagccaaaaggcatcaccgccgcgactacgatggcagcctcgctccaagccgctgtcaccctgatgcagccggccaagatcggcggccgggcgccctttgcctcgctgccgtcccgcccgtcgtcgcaactcgcctgcagggcgttcggcgctaccccctgcgccaacagaatcacgtactcaatgcacaaccttttcggaaggttgccccgtgagcggctacttcggctgcctccatgaacagtatcttgcactcgctgatttacagctttgtggctatat

SEQ ID NO: 319360 - DNA, 51 bp, Zea mays
gcttctctgcctgctcgtgaaccacatatacacggtatactgcttgcagtt

SEQ ID NO: 319361 - DNA, 148 bp, Zea mays
aaaatccaaaaatcatcacctcctttactactaaacaacactaatacaaaaagaaactacttaaaaacatccacccaccatcaaaatccatactcacaccaaaacaataacacaaatccaaactacaacatacaaaataaactaaaaa

SEQ ID NO: 319362 - DNA, 366 bp, Zea mays
tctctcgtggttctcccgtactctatgtccttaccgccgacaactggtctatcgccgcccggcttaatccagatgctcaagtctgccacttgtcacttcacctgctactagcacctaacagagagatgtctgctaatcttcgagtctgcatcttgctaggccatttctagctttcttgccataattacacagtgctctttggaaaataccattcagatagcatgtactctacaccatcatctgtctccatatttttctgttatactaccatatatcactctatcacatacattctactactgtctcttaccctttctactgcatacatgccaccatcgcatcaaacccactcactaatatacatct

SEQ ID NO: 319363 - DNA, 251 bp, Zea mays
  unsure (1)..(251): unsure at all n locations
aaagaaaccagacactnttctattttttctttatgacactgtacactataccagtcggttattaaaaatattagcccacctataatacttttactcaaaaagctatcactaaacttaataaatattataccattttctattagaatttcctatccaatattccaaaattccctattaatgataaaaatcactaaatctttaataaagtattttctattaatcaacatctacattatatcactagctatcac

SEQ ID NO: 319364 - DNA, 280 bp, Zea mays
cagaaactaatctcattacactctacttattattcgaccttatgctttactacgccagatactaacatgtatcagacagcctatcaacatctctactaaattactggtcccttcgatcgagctctaacaataatttcttcataacatatccatcctacaatcaaacattcagctccacacgacacaagtacaatcatagcctcagtaaatacaattaaacacaaggagggcatatagacccatctatatacaatcttacgtactcaattaccttcaaaat

SEQ ID NO: 319365 - DNA, 106 bp, Zea mays
taaaaaacaactctaaaacacacaatcttataaaaaaaacatacaacaaaactaaaggcagaatttatacaaacaccaagccacccaacaaccactctcctcacac

SEQ ID NO: 319366 - DNA, 169 bp, Zea mays
ttcccggctctacccacttcttcctccattccttcaatcccaaacaccagtttctcatcctgaatccactaatcactgctagaaccttttataacttttgattgaccttaacactttcttctatctctcccacaacttatccattccctcctactaccctcacattaaa

SEQ ID NO: 319367 - DNA, 191 bp, Zea mays
attcccatctcgacccactcaatccatcctcatcactccctctccactctctctccctatctccttccctccacactcactacagtacctcttaaaacatcttaccccctactcaatcctttcacaccccactccattctcccactaccaaccccaaacctaacccttaaacattcaacccccctttctta

SEQ ID NO: 319368 - DNA, 198 bp, Zea mays
cccactcaaccaccgcaccaaccacaccacccaaatcattaaccactacccacaccaaatcatcagaagtttcttaaaaaaattcacaaccccaacaaacccaaccccacaaaacacacacatcacaccaaactcccaattcatcaccccacaaaacccaaacacaactcttcccaaacccccacaaacaaaaccacc

SEQ ID NO: 319369 - DNA, 214 bp, Zea mays
tcccttctgtacgcactcttcctcgacttatttcattgattctttaatatttctatctcctctttcaccacaacctctaagatggttttcaacttcggatcgacctgcatctacttctcaaacttcaaattctttacaatccattttctactcttcaccttcatcaacacttacactgacctttattatactcacaccctctctcactccacca

SEQ ID NO: 319370 - DNA, 75 bp, Zea mays
tccctctctacccactcttcctaatctcaccaagtctgtctctttggattcctttggtgacaccataaccactcc

SEQ ID NO: 319371 - DNA, 102 bp, Zea mays
tcacttacctccctttcctaggcttgctagtccttcaacttcaatgcttcctaaaccgcctccttcaccatctcctacattcttgacacctcaaccttctta

SEQ ID NO: 319372 - DNA, 400 bp, Zea mays
ctctacccactcttcctagaagctggaaaggtgaatggctcaaattacatagtacaaatctcttgcttaagacgcatttattaaacgatcacagctcaatcaatataaccatcctaacattaaacagctcataatatacattaccatccatcacaaactacacaaccttattgaacaactcatagactcacaacaattcaaccaacaagtcttggtcacacaaacttccacctcatcactgaaagctcttcacatcaatacaacatagctatattgatgaatcatacgttttcatctaaaattgtatattcttgccctatatcaataattaccttaacattatacactgctaatattctattttatgatcaccatactaatctaattcaccttatccctc

SEQ ID NO: 319373 - DNA, 241 bp, Zea mays
attcccgtgctctacccacttcttcctagttcccttctactcccactcctcattttattcaactccaacatcttcttcacagaactctataaaaagttcaccgcccattcaaaatcaccatcctcacataaaacaccaacataatatacaataacctcaatcacaaactacacaacctaattaaataacacatacactcacaacaattcatccaacaaatcaaatatacacaaacatccac

SEQ ID NO: 319374 - DNA, 279 bp, Zea mays
tccactcttcctggttcttctactaaaacctatttttatctgaagacaagttccctgatgatctcaagatatatatttaaagatctcatacaaatatctactggtgtcctatcatatgcctatcataccgttgaagatctcataggtatacctacaacactggaaagctttcatcctatgtatcatataaaaaaattctagctctcttatcccaaactacctgtccatctaaagtattgctcaatatatttcaatacttctccaaaatgttactatatc

SEQ ID NO: 319375 - DNA, 163 bp, Zea mays
ataaatccttatatttccaaatataccaaccttcttaactacctactaaatccattaacactcatcatacaacctatctaactcaaacatcttattaaccaaactaaaataaatcaaaagccattcccataataacctctaactaattataatcaacctatac

SEQ ID NO: 319376 - DNA, 68 bp, Zea mays
ctcgctccacgcttcctatgtcataccatggggggtcgttcgatttctcgcagaaacatcctgacctt

SEQ ID NO: 319377 - DNA, 439 bp, Zea mays
ccactcttcctcagaagagagcagaggtccagagtctcttaaggcagtctcggactggatgaagatgaatattattctcagctagcgaggatgccgttcctgaacgtgtcgaccaacgtgaacctgtatggcgtggactccttctccatcctagtctcgaactactatattatcttaatttatctataaataccatatattacttttttacgctttttcatcttctttttttttactatttacatttgttcttttttttttttttctttacctcaacttttttattttttttattcttttttattttttctcttttttatttattttttctttattatttttttttatttttaatttattttaatttttttatcatttttttttttttattttttattattttattatttttaatatttattttttttatttttttttt

SEQ ID NO: 319378 - DNA, 179 bp, Zea mays
aacaaaaactaccaaccacacaaaaccacaacaaacaacccaaacaaaaaacacacaacaaacacacaaacaaccaaaaaaacccaaaaacccacctcaccacacaacaacaaaaaaaaacaacaaaaaaccaaaaacaaacacaaaacccacaaaccccaaaaaaaaacacacacaaa

SEQ ID NO: 319379 - DNA, 423 bp, Zea mays
ccttgacagttggcttcaggctgctcttaatccagggattgaatatactcaccctctggttgttccatacgatgataatatatgaattcccatgctcacttttatctgatggggttcgaaattcacttcggtaccttaaacttcgttgttgtgctctccgtcccacagttgaacttgcccccatgagaagcctaacaagtttacatttgtcctttgtgagcattaaatgggatgggttaaagcgcctcctttccaactcccttgctctggatgaattatagctagtatgttgtgactagatcgtttgcctcaatattccttcttccctgcatctgtttatcatccttaatattttttgattctcgttctctaaatttctatattgctattctttaaatcctttattttttttttttttctttc

SEQ ID NO: 319380 - DNA, 291 bp, Zea mays
tcttcctcttcacatcacgtacccatattgttcattcactaaatactcgagataatgctacctctacagtcggatcacaaaaccacgtggtaccaacctatcactcctactacatccaattctgaacattccatatagactgctcatcatctttactcctcagatatctctacctgatctacaagtcttctctctctctagaatctctcattccagtttccaccaacatcttaacaaatatagaatatagaatctcaatatatatgaaattctgtcctttaatatcatcaa

SEQ ID NO: 319381 - DNA, 206 bp, Zea mays
tcttcctcccactcttcctaaggaatggcctccattccattaatggctttgaagactccgaccgatgtccctatatctactacgtccctacctaatccttctctctataaaactcgagctcgtgcacatggagctgattcttggtcgccccaacctctccatgatctctccctctctcccgccgtagataatctctgtctattctc

SEQ ID NO: 319382 - DNA, 353 bp, Zea mays
tcccatctgtacgccactcttcctctcaccacaatctatctagctacccttttcttaataacagatacaatacatttctcagctgtcttcatacaatttccacaacctctcatctacttcctcacttccttccttcctccaaaaactatcattccatatcatctaatcacatcctaaattatctcaaataccttcataaacaccccaccacatcatacaatacaactacacctaatcattacatatttaattaacaaacaacaattataccaccacataacaatccctataccttttatataactcttaataaacattcatacacttctcataataccccttcaaaccttcaa

SEQ ID NO: 319383 - DNA, 333 bp, Zea mays
cgcgacgtatcactggctcggcacacagacacaccaagcttcttctaccaacggcttactaccatcatgtaaagctacttctcagaggaggtgaggtccatgtccccggccgtcttcagccgccacgcacgcatcctccaccagcacttcttcaaggagaagttctaggacctctacacggtctcactctccgtctccaaccaccaccaccaccaccatgctcaccacgactgccactgcttcctcatgctcgagaccaggatcgagaagtacatcaacaccttcaccgtcaaggtccactagcgcatgtagagcttcctcaccagttctaac

SEQ ID NO: 319384 - DNA, 205 bp, Zea mays
cacacacacacaccaaactccatctaccaacttctcactaccattatttaaagaacttcttaaaaaagttgacggccctcacccccaccatcttaatcctccacacacacaaccttcaccatcacataataaatgaaaatatctatcacctctactcaaactcacactcctacaccaactaccaacaccaacaacatatacacca

SEQ ID NO: 319385 - DNA, 285 bp, Zea mays
tcgaagagaatttgtgcagatcacaccagattgatgaggtgatatgggagcacatcaccgataagagttagcggctatctagttatggattgactcgcttacagcagaatgaaaaagagttagggacactacgccctggtaggttaatttagtatgcacatgatctcaggctctcagctttcgcctccgtaaatattattttatacaaatgtacatcctagatatgtatacaaagatcgttcatggcttaatgaataatattattttatacaaataccttataat

SEQ ID NO: 319386 - DNA, 213 bp, Zea mays
tcccgcctctacccacttcttccatcattctctcactcccatcaccccacctttcccccccacaccaccccccaccaaacgaatcttcttcaaaatttccccccccctataaccccctcccacaacccacaccccaacccccacccccaaattcccaacctccatcaaacacttcatcccatctacatctaatccacccccaaaacacacccc

SEQ ID NO: 319387 - DNA, 361 bp, Zea mays
caacacacacacacatccctccccccacttttaccaccacacacatacccaatccaaagaagattttaaaaaattttcgacaccccaacaaacaccacaatctcacctctacaccacacctactcatccaccccaacctcacttcaaacaacatcacctccttcctctccatctccttcatctacatctctacctatcacaaaccttaccaccaacatccatcatatttctatccattctttcactcattacaataattatctttacactttctactatatctttacttactatctcccataccactatccctacctacaactttaactatcttatcaattctcacatatttttcaccaac

SEQ ID NO: 319388 - DNA, 289 bp, Zea mays
tgtgagttgctaatgaaattttgtacattcaatagagagagagggtagttgatgttaagcgtgttatgtgactgccctttcttttcgctttgcttcctggatccaactgccgccttctcatcctgtcttcgttgattcgctgttcttccatcggatgcctttatctgcctagatcggatcatgagcaaatctcattgtgtaaatcctgataggaggaagagaacgaccatagttgatcgataccgtccctgtattgcttgtgcctgtctcgtacggctcttctaacaac

SEQ ID NO: 319389 - DNA, 214 bp, Zea mays
ttcccgctcgacccacttcttcctactcccttctatctctacctatctctatctagccttcctgtatctcttcagatatgacttctcttgcctccaccacggcggctacctctacagctcttctgctactactactactgtcactcacctattcatcaaacatctctatctctttatacacttatattcacatcatattaacacttttaattct

SEQ ID NO: 319390 - DNA, 186 bp, Zea mays
gattcccgctctacccacttcttcctgagacccctccactaggctaggtatttaagcctcggtccctcttcatcatccatgacttctttcctgactcctgcctgcacttccttctatcgctcgtcctcattccttaccccctgttcctcgaatctccttagtacagctctaacgtcttctgccttt

SEQ ID NO: 319391 - DNA, 275 bp, Zea mays
tcccttctctacccactcttcctacaacccaaaactgacttctctcccattcatttcccaccaacacgtcatccacgtctagctggtcttctcttactcctcctccctttccttccccttccatcacctacttcaattccaccacttctttccattctttctccatcctatcttgaccatctgcctctatctccctcgatctcttcattatccattctcaaattaccaattcctttatcatcactccaatcattctacttcatcctatcctcccc

SEQ ID NO: 319392 - DNA, 393 bp, Zea mays
ttcttccgtagttaagtctgagagaaaaaagcattagctgagcatcatcaatggcttatgctggctactaggccgagggtctgactctgttgtgcctacacttgagccccttcgcgttgcgcgttcacatgtctctaagcatcatggccctaaccttctagtgcgttgatcacgtacttgaagataggtgcatgctcatcttaaaacacgacgacgtactcaaagtcgttccagtgctcacaacactagctatggagtcttacgcttcgtctagtgtctactttatcatctgcgggcctgagactaactcatctataaacaaagatgaatcatcaagaatcccttacgggagtaggagagtttctactagattttggtgtttcagtggtcctg

SEQ ID NO: 319393 - DNA, 306 bp, Zea mays
attcccgtgctctacccactcttcctaggaagaacatccaaataaaccctaatttccttatcatccatcaatatcaatctctgatcttttttcaaaattgtatgtccctaacaagcataaaatcaagcaccatcgcttaccacgctcacaatactctacctaacatagccataacattctagctaatacatcaccaatatcaaaatatttccatactcatcttaaaacactaacaataactcaaaaaactcccatatatcacaacaccatctatgtatacccatatcatcttcttaactttacttt

SEQ ID NO: 319394 - DNA, 215 bp, Zea mays
tccactcttcctcggaagatgatccaaatcgaccctaatctcggtctaatcctcaggatgaatctgatgaactaatctaaagatggatagactaaacaagtatcagaacaaggatgatcgtcaagtggacttcacctaacatcactaacctagtgttattcatgcaaacccattgcatttatcatctccttgtgttttaaaaatctttttcactt

SEQ ID NO: 319395 - DNA, 169 bp, Zea mays
tcttcctggatgaaaatgctaataagacggtcattcaatacgtacacttaggaaagatcacagactttttctacagaatagagggactaaacaaatacaataacaatgatcatcataaagccaacaatccttaccatcactaacatagctttaatcttccaaacatttt

SEQ ID NO: 319396 - DNA, 180 bp, Zea mays
tcccgcctcgacccacttcttcctctcttccctctccgttcgccaaccactttattcacccactaccgctcccactcccttagactttattcaaaactttggtggcctatcacctccccctcactctgctactctcctcgttcctctcctcctcgtctactctcccacacatctatccta

SEQ ID NO: 319397 - DNA, 216 bp, Zea mays
ttatcttgccatgtcaaagttcaattaaaccctcaacgattttcatcataagaagattttctaaccaaatgatccacattctacaataaagttcaaagatttctaaaaatctatccaaaacatccttttttaataaacaatatcttctatatattattataatctctccctatcaaactctatacactaccatattattataaattatccacatta

SEQ ID NO: 319398 - DNA, 218 bp, Zea mays
ttcttcctacagtatctactctcacaagtactgtcttgtactccaattcttcaaacttatcttgacccatttacatatacaataggatgttggatactcaatcgaacatactgacccatggacatctaattaccagctgctaaatattcagcatacttcaaacaacttactctacatacgctccatcatcttcatctacatcttatcctattacaaac

SEQ ID NO: 319399 - DNA, 396 bp, Zea mays
aattccctcggtacgccactcttccttcgtcatcttgcaagttgcatcctattttaatcgatcgtgatctccacatttcgacagtttttctttataaactagctacactaaaaattctaggattcaagagaaaactatgtttcagatcaatcctgtccttgatgaggccacaagatcagtatacacatctctccaccctcaaaccatggttgttgctgacttatgctgctcatctgttcctaacacattactcttcgtatcctaggtgattgtcatcatatctcgccatttcaaataacatgtcctacaacattaccactcacatcttcaattcttcctgaatgaccttcccttaaactacttcaacaatctctttcagcttatccatcatttcaa

SEQ ID NO: 319400 - DNA, 253 bp, Zea mays
ttcttcctgcgcatactaccaccctactactccttttccacccacctcacctgatccctagctcgaactctttgccgtgcccatcgacatctatcgcattgctgcaccccgatggctaccctcgcctccaagaattgcctatgctcgtgcagctattcgttcgatgaccccgatccgatcgagtactctacttcaaccgcctctgctaccacaaggtctcatacatatgtctgttttcaaagcacattatatt

SEQ ID NO: 319401 - DNA, 169 bp, Zea mays
tcttccttacccattacagtcccttcagcatcctcttcacccacccctccctctccttctgtcgttattcctgcacctccgatcgacatctatcacattgctgctccccgattactacactctcctccaagaattgcctctgctcattcagctcttctttcgattaccc

SEQ ID NO: 319402 - DNA, 172 bp, Zea mays
atattactccaatattcccattgttgttccaaaactaccttacctcattcccttacattaataatctacttcattttacttatacaatgctatctatctagaaatgacactttttttacatcaatatattcctttctatatcacaaatcatattacacatcttatactatat

SEQ ID NO: 319403 - DNA, 239 bp, Zea mays
cctccgctcctctctccttctcctcgtcttctcctgtacaggtaccccttttcccttttgctgtccttcttactaccttctggggtccccgttccgttcttgcctcccgtggaatggtttgctcgtatgatcctggttctcgatcgactgcttatccgttggctgcgatgctcccgcggatcttgcttctctactgctctggattcctgatcggttgcttatcactgatcgtagtctgt

SEQ ID NO: 319404 - DNA, 221 bp, Zea mays
cccactcatcctaagacaaaaaacaaacccaaaaacaaattaaaaaaaaaaaaaaaaaaaaaaataaaagaattttttaaaaaactcaaaagcccccaaacttacctacccatccatcctacatcatacctctacaataacaccacctaaaataaatccacaacccacaaaacaacaactacataactaaaaaaccccttactaaacccaacttaaacaca

SEQ ID NO: 319405 - DNA, 365 bp, Zea mays
cggaattcccgctggacgcacgcatccgcagtacgacgtctctcctctgggtctttggcctagacaccgagcacgtactaccatgaggagtgtgacgtctcggagagtcaagcccatcgaggagtgctgctcggaggggcggtcggagcatacggtggccgacgacctggacggcacgctgctcattttcaggagcgcttttctctactaccttcttgtggctctttagtgcctcagctttcttttctccgtgcttttgctactgtctttgctctgttgttttttgttattatatttttcttatttcttattatttttttttttttttgttttttatttttttattttttttttttttatttttt

SEQ ID NO: 319406 - DNA, 206 bp, Zea mays
ggagaaccgtgagcagagagacatggttcgccaccaccagcagcgggcgctgctccggttggtactcatcttgggccggctactccttgccccgcccctcgccggctcgtggggaaaggagggccacatcatggtctgcaagatcgccgagaagtacctgtcggagaaagctgcggctgcggttaatgcgttgctgccttagtctg

SEQ ID NO: 319407 - DNA, 469 bp, Zea mays
  unsure (1)..(469): unsure at all n locations
ccactcatcctgaccatatatttgttttctacagtgtttanttttgtcctgacgtcctnggaataccgtctgttttaaattttggttgtccttaccttactttatttctttttttattttcttttttcttttcctattttttctcttttttattttttttatttttttttttttttttatttatttatttaaattttctttttttttttttttttttttttatttttttttcttatttttattatttatttatttttttttttttttttttctttttatttttttttatttttatttatttttttttttttttttctattctttatttttttatttttttttatttttatttatttattttatcatttttattttcttttttcttttttttttttttatattttttttttctattttttttttttttttatttcatttttttatatttatattttttttttattttatt

SEQ ID NO: 319408 - DNA, 77 bp, Zea mays
  unsure (1)..(77): unsure at all n locations
attcccacagcgaacataaaccaatccattttatatatacatacgatttctttcngctaaacaacttattataaatg

SEQ ID NO: 319409 - DNA, 111 bp, Zea mays
ctccggttcaccattttttgatgagtttagggggctccccgtctcggcccggcttggtgtatatgccagcttagtgatcagtgaacggagtcatgcttgtgagattaggct

SEQ ID NO: 319410 - DNA, 277 bp, Zea mays
ccttcattattattcaagtcgtttaattttataccatcaaatgatccactcatgaaggtttaaaacatatggttcccaaaccaatccaacctttttattatttttattattatttatttttatttttatatcttttattatttatttttaattattttttttttttcatttttttattatattaattttttttttttttttttttctatttttctatttttttatcttattttattttatatttataatattatttattctttttttattatttttt

SEQ ID NO: 319411 - DNA, 60 bp, Zea mays
gaataatatccaccggcgacgggaacgggagtctgctttgccggagattcgaagcgattg

SEQ ID NO: 319412 - DNA, 461 bp, Zea mays
tcccgctcgacccacgcatccgggcaccaccacacgttcacggtagcttttagcttatcgtcgtcggcggctaagatgggatcgcttaaactgcagaatcggctggcctttatctttctcaattttgatattgttttattctttctttacctttttttaatcattttttcttcatttttttattttttctttactttttcatttttttttttttttttttttttttattttttctttttttttttttttttatttttttttctattttttcttttttttttttatttttttatattttttttattttttttatattattgtattttttatttattttttactttttatttttttttttttatcttatttttattttttttttttatcttttttttcttttttttatttaattttttttttattttttattttttatttcttaatttttttttttttttttt

SEQ ID NO: 319413 - DNA, 394 bp, Zea mays
  unsure (1)..(394): unsure at all n locations
ccgactccctcgctcaccagatgtaacttgcggaccaggcaaagccgagccggagcncgaccactaagatcttgcgtgggctccttaacccagctcgtcactgtaccgctcgtgccctacactctcggtccgactaaccaataattcatccatccatctatttatcatctctctttttttatttatttacttactctcttattttttttttttattttttattttcttttatttaatttttttttttattttatttttttatttatttttctttttttattttatttttttttttttatttcttttttatttttttttttattttttttatttttttattttttttttttatttttttttttattttatttttttctttttatattttttttat

SEQ ID NO: 319414 - DNA, 475 bp, Zea mays
tccctccttctagatcacaagcttcctcccttttttttttattttagtttagttttatggaataaaaaaagaaataaggtatgttttaaaaattagggttgtcttataaaaacctttttattatttttatttttattttttttttatttttttttttatatttttttttatttttttttcttattttttttattttttttcctttttatttttttttttttattttattcttttttttattttttttttttttttttttttttttttccttattttatttttttttttttttttttttttattttttttttattttttattttttttatatttttttttttctttttatcttttttttattattttttttcatatttattttttttttttattttattcattatttattttttttttatttttattttttatttatttttttttatattttatatttttttatttttcttttttt

SEQ ID NO: 319415 - DNA, 346 bp, Zea mays
acaaccaaaaaaaaaacaacattaaaaaaaaaaaaaaaaaaaacaaaaaaaaaaaaacaaaataataaacaaaaaaaaaaaaaaaaaaaaaaaaaaaacaaaaaacaaaaaaataaaacacaaaaaaaacaaaaaaattaaaacacaaaaaataaaaacaaacattaacacaaaaaaacaaaaaaaatataacaaaaacaaattaaacaaataaaaaaataaaacaaaataaaaataaaacaaaacacatataaaaacaaaaaaaaaataaaataaaacaaaaaaaaaacaaaaaaaaaaactaaaaaaaaaaaaaaacaaaaaaacaaaataaaaaaaaataaaa

SEQ ID NO: 319416 - DNA, 444 bp, Zea mays
cgccatggcctccctctcctctgccgtcgttaccgccccttccttcgccgcaccatgtccgtctccgcaccgtggtcagaaggaggtccttcaccgtgcgcgcctctctccgcaaggccacctgcaccgtcgtcttgtcaatggctgccagctctccttttttttttctgttttttttttctatgatgtttttttttttttattttttatattttttttttttttttttattatcttatttttattttttttttttttttttttatttattttttcttattttattttttttgtttttgtttttttttatctctttcaaatttattttttttttttttttatttttttattttattttatttttttttttttttattttttatttttttttttttttttttttttttattttttttttttttttattttttttttatatttttt

SEQ ID NO: 319417 - DNA, 125 bp, Zea mays
aaaaaacaacagacaaaaaaaaacaaaggaacaaaaaaaaaaaaaaataaaataaaaacaaaaaaaaaaaaaaaaaagaaagaaaaaaaaaaatgtataacacccaaccaataaatacatcaacc

SEQ ID NO: 319418 - DNA, 294 bp, Zea mays
acgggaagtgcctggacaggctaaggcagctggtttaaggtttactggaggggcatctccaaacactgttaccgttctaatactgcgacagcaagttacatgcataccccataattactgtattaatctaaccttcctaagaatgtacatacgctggagctcttttaaagatccaaaacttttaaactgtgttgttctctctccattgaatacacttgatattgttggagaggtcaaacaacccattatcttcctttttttaaagcactatgaactaatcaaactctaactcat

SEQ ID NO: 319419 - DNA, 461 bp, Zea mays
gcgcattcaccgacaccgccaattccataccttcctccgccacctctgctgagagcggcaagttatatacactcaggggtgatggtccatcaatcttcatcgatctcgtcacgacttactctcgcttcttcttttttcatcacttaccgtgtctatatttttttttttttctattttttttaattttatattttttttactttttctttattttatttatttcattttattttttttttattttatatatttttttcttatttttattattttttttttttttattattatatctttatttttttttttatttttatatatatttttaattatttttttattttttttttattttttttttatatatttttatttttttctttttatttttacaatttattttattttttctcttctttttattattttttttattttttatattttctttcttttttttt

SEQ ID NO: 319420 - DNA, 446 bp, Zea mays
cgacgagcagagggccccccttagctttcggagcaatggcggcgggatacgtggcgtatgacaactagcggactacctttttaatgttgttctttatctgctactccggctgtctcatgttcaatctgctctcacgcttcacgcgcaactagttcatcctttagtccaagtccaccatcatcgtttagttttccaccctctttctccagtttttctgcattttatataagtttcttattttttatctttctttttcttttatctatatttttctaattttttattttatattttttaggtgttttttttatttatttatattttttttttatatttatatattttattttctattatatttatattattttttttattttttttctcttatattattttttatgttatattattttattttattttattttatatttttatttttt

SEQ ID NO: 319421 - DNA, 467 bp, Zea mays
accccagcctgatccacgctctagatatcctcgccatctgggcctgccaggtcgggctcataagcacggtttggggctaccgtattgccttctggccgttcggctaggttttttttttttttatattcttttttttttatgttgatttctttatttttttttttatttttttttttataaaatttttattttatttatttatattttttttttaatattttttttctttttatattttatttattttatatatttttttttattttatatttttttttaatttttttttattttttttttttattgtgtgttatttattatttttttttttatatatatattattcttaatttttttttttatttttttttttttattttatctttattttattttttttttatttattattatattttttattttattattttaatttttattttttttatttcttttattttttt

SEQ ID NO: 319422 - DNA, 449 bp, Zea mays
tcccgctcgacccacgcagtccgagccgcctagtgcctcccacctcccgttcgccctccgcctcgcgtctgacggtgccgatggaatgtaacactttgaggtgctagaatttctttttcttctcctttactatttacccttaccatttatttcactttttccgtatcgactcctatttttttttttttttccttctttttattttttttcttttttttcttttttttcttttttattttttttttttttttttttttttttttttcttattttttctatttattttttatatttttttatttttttttttttttttttttttttttttttctttttattattttttttttttttttttatttttttttctttatttttttttttttttattatttttttttttttttttttttttattcttttttttttttttattatttttctttttt

SEQ ID NO: 319423 - DNA, 56 bp, Zea mays
acaacaatccacacaatcacttctacctctttccttttctgcacacatacacacca

SEQ ID NO: 319424 - DNA, 186 bp, Zea mays
tttttttattttattttttatttttttattttttttatttttatttttatttttttatttttatatctttttttttttatttttttttttatttcttttttattttttttttttatttttttattatttatttttcttattttttttttttttttttttattattttattataattttttttcttt

SEQ ID NO: 319425 - DNA, 133 bp, Zea mays
cggattcccgcgcgagccacgcatccgcgctctcctccctttctttcttatcttttactactagactactagtaactccgcttgtcttattccaaagctgggcgggcaaaaactaggacagctcacaccacct

SEQ ID NO: 319426 - DNA, 311 bp, Zea mays
ggcctcccatccacaagttcttagcttttgcgagattgagatccggctgtggacatgccgacagaggaaggaggacagaaaaatggggattggagatggatcttcaaatgggaaccagcaactggtgcataatgaaatactagatgagaccacaccacttcttccagtcaaggttgatgaatactatgttttttattattaatatttatcttattcttttttttatttataattttattttattttattttttaatattttatttaaaatattattttttaattttatattatttattttatatattttat

SEQ ID NO: 319427 - DNA, 222 bp, Zea mays
cactacacacacacacaccagggcattgttaccaatgactaactaccaggaggctgactactcgctcgaatgacgtcatgtacgacttcatgtccggcttctgcctccacacccacgccgtccagcatcacgtcgtcaacgagaagttccaggaggtcgacacagttcaacgctctcattaccaaccaccaccaccaccatggtcaccactgtggccacctc

SEQ ID NO: 319428 - DNA, 485 bp, Zea mays
cgcatggccacgcccttcctcgggcttcgctcaagaaggaggtcaagtacgacaaggtccggtccatctataaggtccagcgcctgcacttccacgacgacatcaccgtcgtcgtgctctttctttacaagtgcattttagctttcagttcctgtttttttttacttttatctttacttattttctctttgtattttttttattttttttctttttttttttttatatttatttatttattttttcttttttattttatttttttttatctattattttattttttttatatctatttttctatatttgttgtgtggttttttcttttttttattttttttattctttattttttattcttatatttattttttttttttttattttattatttattttttttatttattttattattattattcttttctatttattattttatttttttattttaatattttattttttttttcttctttttt

SEQ ID NO: 319429 - DNA, 182 bp, Zea mays
  unsure (1)..(182): unsure at all n locations
caccggtcggaatacccgccgcgacgccacgcgtccgggccaaccttcgtcacccctcgtagccttcttntaaccctggggcccaaaagccgcccgaggagnaaggcctgagtacgcacaagcggccgcagcgtcgcagtttattcctctcatacttccagccaccgttccccatgtcgctc

SEQ ID NO: 319430 - DNA, 197 bp, Zea mays
aacacacaagatactcaacacctacccatgtatttccatggctaatatatataagctcacatgtcttcacttccatttccatttccattagctgcatacttactaagtaatatttaaaggcccatatctgaataatttacccatccaacaaaacatccttcaaattctcatctatccatctttacctttctcattat

SEQ ID NO: 319431 - DNA, 149 bp, Zea mays
ggtcgacgccacgcgtccggataaaggcttggtctcctattcaattctatttagattttgctctccctaagctgatcgaagaggcgcggataaagatataacctgggtcaaaccatctattatttgatgcatcttcagctattcaacct

SEQ ID NO: 319432 - DNA, 119 bp, Zea mays
tcccgccggacttccataggaactatttgatttcattgctgctgcattttctattatttttccctactgaattttaacagttccgtttcccagaaaggttgcccacccaaccccccttc

SEQ ID NO: 319433 - DNA, 297 bp, Zea mays
gcgcgggttgcgagttgcaggccgcatgagctcgcgctctgcaaaccttcagggccggcgaggcggtcgtcgttcacaccggcggttgccactgccggcgcttgcggtggcaggtcgaggcccccgcgagcgtagtggcgtggatctgcaactgctccgactgttccatgcgcgcgaacacccacttcatcgtccccgtcgtcaagttcaagcttgcagccggcgctgacgagttcatcaccacctacaccttcggcacgcacacggccaatcacaccttttgcaagacctgcggca

SEQ ID NO: 319434 - DNA, 224 bp, Zea mays
gttctagatcgcgagcggacgccctttttttttttttttcatgaaagcttaggcacagatttattaaactggatatttaattctccatatactgaaatactcaagaagaacataatgaatatacacacacatatatatctacatatttattgtaataataccatcaccgttaactacgtcaataacatcacatgaatattttattcgcatctggtaaaagccaa

SEQ ID NO: 319435 - DNA, 407 bp, Zea mays
  unsure (1)..(407): unsure at all n locations
gcagcaacgccccggagctctgactctgaggcctcggcccggcgacgacgacgagtgcgcggtgacgcgagcgcaagagagaacaaagctttgacgcgcacccactcctgccgcctccctcagtcccgactcccgaacacgcgcgcgcaggcccagcacagcacggacgacgacgcagcgagaggctcggaaggaggaaagagtcgccggcggagaccccaatcgatcgaaggcccccggtcgcttcgcccgcgaggcatatcagtgcccccttggccaccgggtaaaagctttcctgggggatacgatcggctctgcggcctgccacggatcggagggcttttgctggtgactccttggggattttcggtcggngtttggagctttcctgggtttgggagctagct

SEQ ID NO: 319436 - DNA, 248 bp, Zea mays
acaccaccaccttgtgcacctttcctttccatgctttccttctctcgtctggaatgtcaatatatatagtgcgggctcttctgtgctgcagtcatcgtcttcttatataatactccaactactcatgtcctcagagcctgcctattccatgatatataagcgtcgccgttccggtccactgcacggtctgcggatattgctgtcgaagcgcacagcctactcttatcaagaaggcacaaacaacttac

SEQ ID NO: 319437 - DNA, 51 bp, Zea mays
ttcaaggccctctacctgtgaatttcctttatctccttggttttttgacct

SEQ ID NO: 319438 - DNA, 403 bp, Zea mays
agaaaatcctaccgtgctcgattcttccctgcgcgtctcctccgcttggagcttccggcgcgccctgcgtccctctgtggccggaactcccttcatggccggagctcggacggcgctcggtcctgccgcctgccccaacgtcgactatctccagctcgcccccgacctcttctctccctgtcgcgtcgctctctctctgctcgctctcctccatggccgccgtgggctcgccggcgtggtccttgtcctggccgccgtggtgccgcgtgcccatgtgccagcgcatgcccagctcctctccgtctgctcggtcttcttcctggagcgagctctcttctctcccatagcgtccggcatttctccctgtcgctccttccatgccgcgctcggactgaagctttcc

SEQ ID NO: 319439 - DNA, 426 bp, Zea mays
ctcgtggttccgcgcacggcaccgaatccttcgtattggtcggcccggcgagcatgggaggaagttgtggccgcggatccgtcggcttgcttcgtggagcggccaccccgccgatccgtgcgaaggcgccgccgccggtcgtctctatccgccggtgctgcgtctgctgggaggaggtcaacgggagttcgtcgattcgccgagagatctacgctcacccgatctgcgtcatttgagcttcaaggtccaagtgcgggtattagaagaacgggtacttaaatcacaattcatactacaattaagtgaattcttcttggagataaaaactcttacgatcttgccaaaacagtaaaggattttagatcccaacgacctgggatgtccagacagaggtaagttgggctttattttaattttatgatgtac

SEQ ID NO: 319440 - DNA, 193 bp, Zea mays
gcgcgaggcggagcggagaaggggcggcacttagtgcttcggaacacagaagctgcgagcacttgtaggaggaccagcgcctccacgaacgccccccagtcgttgcgcttgcaccgcctgacacctcagaccaactacgcgcgcaggacggcacttcgagacacagctcagcgaccacgggagacatcgagaa

SEQ ID NO: 319441 - DNA, 305 bp, Zea mays
acgcccgagtggacgtaagaagggacgagtggtcttgacgccggccagccatggcggagggtctgctctcctattcgcacagtctcgccagccccacatttcaggccccagcacttcccatgagcagagatcctctagaaagtgaggcaaagcgtgtcctaccacctatgtggaggtcctaagtactcgcatagcgcacttacgagcctgccaattggaaccgaaggttggaggtgaatacaatgcgccatctcatgacgcagactttgtcttctttcacaatcaggctcaccattccctaagca

SEQ ID NO: 319442 - DNA, 76 bp, Zea mays
  unsure (1)..(76): unsure at all n locations
cgtctcgcgcctcagtcttggctctcgccttctgggcttctgctgcanntcctccaaggggatcgtngnnatggcc

SEQ ID NO: 319443 - DNA, 239 bp, Zea mays
aaaaaaaaaaaaaaaaaaataaaaaaattaaaaaaaaaaaaaaaaaaaaaagggaagggaaaaaaaaaaggaaggaaaaaaaaaaaaaaaaataaaaaaaaaaaaaaaaaaaaaaaaacaaaaagaacaaaagaaaatgaagcaaaagagaaaaaaaacacataaaaaaaaaatactaagtactcaaataagacactcaaaaacaaaacaatagaaaacgaaggtaagaggtgaataca

SEQ ID NO: 319444 - DNA, 413 bp, Zea mays
ctcaattaggggaatcacgtctggttttcattaatggagcatcgtttgggtctgaactgtgtagaacatcatctccttaggcggagaaacctgtttgtgtggtgacaggacttccagccaagtatggttttctgacccctgtttatgatatcccttcctgttccttgcattcacacacgagtttcaacccctcccccctgttttgttgttcatatatgtttcattttaatacaagtaatagattagatagacacaaatccttcaatgtttagtagctgcattatctttgaatgtggtttttatatgttctggatcactcagatcgtaccactaccagtgtgtgtatgatctggaaaccccgagacatcttgtggctttaattcttagatattttaccacgaaccatggaaaca

SEQ ID NO: 319445 - DNA, 268 bp, Zea mays
gaattcaccgggtacgagcccagcgcgtcacgcgaaaaagtcccgcttcgagccttccactcgtctcctctccgctttccccgtgccggcggtgccgtggtacgggccgaaccatgaacgcccggcttgctcagtctaatgcgcgcccggatcctcgcgcccgctggccgacagccccggccccagcgtcgtcgtcgtcgcctactcccaacttctcgcgtcgtcacggagcaacaaacgcaggatagcaccaggcctcgcgctcgcc

SEQ ID NO: 319446 - DNA, 382 bp, Zea mays
tggtggttttgaaagtgggggagttggagggtcttcacgggtccggaggtcggggagaactagttgggtgccccctcctaaagaaccagttgatagggttgagataataccaactggagatgggtaagagtatccttgcttcgttcttatgtcttacactaatacacgattatggaggtgatggtcactttcgtttggcaaaacaaacggtaagtacaatttaatccattttcgttgattgtagttgacttgctgtaatttctggttataatgtttgtcaaatgtacattcaggaagctagcactggtgcaatgcccagtgatgttcaaatataccttaggggcacagaggaccagatcctgcaaatccatatgtgttgtgc

SEQ ID NO: 319447 - DNA, 323 bp, Zea mays
  unsure (1)..(323): unsure at all n locations
tccgtccggcttttcctcttcctggtggtctctnnctcgtcttctccaaccgaccgcccgattggcngnnattccagtttcgtacnncccgagtaccngntccagctcgttctcgtcccctgggaactcctcagcccccttctctcgtcccgcccttcggcacctttcgtacggccgcnncggcaccacaaaccgcgccagnntctcgagaaaataggaacctcggagggaaccgatgtgatggaggggatgactcnnngccgctgacccgaagacccgatgaagggggtgcccggtgaccaggntnactcgccnnngcgggg

SEQ ID NO: 319448 - DNA, 371 bp, Zea mays
gaatttccggtgttaactggatagtggatatcatcctccatatgttgtgttgttcccttattaggttgaccagttgttaactgggtgtgggtactctaggatagattagccagccgatgtccaactgagcaaggaatatgcttggacacactgatatctctgatgttacaactcaccctccaatcatatggtatggatcactttcttacctaaatatatcttccaaagtcttttatatgcggcatttgattttttataccaaattaagatgagtatactactgcttactgtaagaccacctttttgaaaataatctaattaactatctctaatactattggaatatcattgtctatagatgttactgatgt

SEQ ID NO: 319449 - DNA, 140 bp, Zea mays
gactagttctagatcgcgagcggccgtccctcctaattactccctctgcatgtatacgccgagcatgtttttttggtaagaatcatcaagccccttggcgactcgtttctgagtttcgcagcggcgctagattttatttt

SEQ ID NO: 319450 - DNA, 267 bp, Zea mays
cacgcagatatccaggagctggaaaacattgcattagggagaaatgatgaagatggaaaaagatgaaggaatttatttggcaatagtcaccaccaagttcacgcaataacaaatttggaaccacaggttctttttgcataccctccagagaagcctcttccactcaagtacaaggataccctctctttctgccttcccggaggtgtacaggttcatgctgtcgaacgtactccttcgttcagtgagctgaatgaaattctcctggga

SEQ ID NO: 319451 - DNA, 279 bp, Zea mays
gtcggccacgcgtccgcaaacggccaatcaatggacatgacgaccccagtgataacaaaaaagtcagctggtacagatagatggaaaatgtcatttgtgatgccagcgaagtatggttccaatttgcctcgcccaaaagatccttctgtgattatcaaggaggtgcccagcaaaatagttgccgttgcagccttttcaggtccataatattgtacttctgtcatacccatttcatagctgtatgtgattaagaagctatatattcagagtcaagtacat

SEQ ID NO: 319452 - DNA, 265 bp, Zea mays
cgaccgttaagtctcgctacgtagcagtgctataaaaaaagcagccgcaatggcgagcagcaccatggccctctcctccacggccttcgccggcaaggccgtgaacgtgccgtcgtcgtccgccttcggcgaggcccgcgtgacgatgcgcaagacggcggcgaaggccaagccagcggcggcgtccgggagcccgtggtacggccccgaccgcgtgctgtacctgggcccactgtccggcgagccaccgagctacctgacgggc

SEQ ID NO: 319453 - DNA, 148 bp, Zea mays
agactagttctagatcgcgagccggcctcccttttttttttttttttttttttttattttgtttgttttttaaaaaattctttttattttttatattttttttttttttttttttttttttttttttttttttttttttttttttttt

SEQ ID NO: 319454 - DNA, 250 bp, Zea mays
taacaattatatacccataccctttacatcaaagatgagaaatatcatcaaacagaacaattatttatcaaaggtcctatcatattgcagtttgacatacgtagactatactacaatcataacaaaaaatgaacgttactatcctaaaaaacacaaatatgttctgaacatgatagcgcaacaacatatgacatcttcagcttgacctatagatggtcacctgtccactaaatcaaagggaacacattat

SEQ ID NO: 319455 - DNA, 263 bp, Zea mays
cccacgcgtccggcaaaagccaaaaggcatcaccgccgcgacgacgatggcagcctcgctgcagagccgcggccaccctgatgcagccggccaagatcggcggccgggcgccctttgcctcgctgccgtcccgcccgtcgtcgcaactcgcctgcagggcgttcggcgtcgacgccggcgccgccaggatcacgtgctccctgcaggacgtcgccagcaggtgcgtcgacgccgcgaagctcgccggcttcgcgctcgccacc

SEQ ID NO: 319456 - DNA, 174 bp, Zea mays
tataataacaattatatacccataccctttacatcaaacatgataaatatcaccatacagaacagttatttatcaaaggtcctaacatattccactttgacatacgtcaactatactacactcataactaaaaatgaatcttaatatcctaaaaaacacaaatatatttctaac

SEQ ID NO: 319457 - DNA, 186 bp, Zea mays
aaacttccactatcacttctaaccgaacgctatttaacacaattcttctactacactatacactcttcctacacacaaattacttcaatacacattcccatacactacaccactaccaatcactacccacttcaaactcactccccataccactatcatcctccaccaacaatatctcaccaccac

SEQ ID NO: 319458 - DNA, 265 bp, Zea mays
aaaaaacagaaggcctcaaaaaggaattctggcaagtctagtttgaggtccttgattctaacgaggttgtatggaaaggaaggccagaaagagaagatgcttccggttgcaccaaagctactccgcactatttcgatacactatctggaaagcaatgaatacgttcttgacagctaatccacttcgagcggcgatggttcttcaaacagtactaagccgccgatgcaaaatgctggcgatatgatgaatctgcaccatgctacat

SEQ ID NO: 319459 - DNA, 155 bp, Zea mays
accaaatctactccacactatttctatacactatctacaaagcaataaatacattctttacatctaatccactttgatctactatccttcttcaaacactactaaactcacaatccaaaattctttccatatgatgaatctacaccattctacat

SEQ ID NO: 319460 - DNA, 264 bp, Zea mays
caaaaaaagcaggcgcaatggcgagcagcaccatggctttctcctccacggccttcgccggcaaggccagtaacgtgccgtcgtcgtgcgagttcggcgaggcccgcgtgacgatgcgcaagacggcggccaaggccaagccagcggcggcgtccgggagcccgtggtacggacccgaccgcgtgctgtacctgggcccactgtccggcgagccaccgagctacctgacgggcgagttcccgggcgactacggctgggacaccg

SEQ ID NO: 319461 - DNA, 268 bp, Zea mays
aaaaaaagcagccgcaatggcgagcagcaccatggccctctcctccacggccttcgccggcaaggccgggaacgtgccgtcgtcgtccgccttcggcgaggcccgcgtgacgatgcgcaagacggcggcgaaggccaagccagcggcggcgtccgggagcccgtggtacggccccgaccgcgtgctgtacctgggcccactgtccggcgagccaccgagctacctgacgggcgagttcccgggcgactacggctgggacaccgcgggg

SEQ ID NO: 319462 - DNA, 267 bp, Zea mays
ctatgtgacgatcaatgtggtgaccatgatccaaatcgaactgaacatgctactagaggtaaaggtgggcaacttcctttttctgtccttcacagggtaataatcaatgaaaacaagaagaccccggaacaagtttgtgggacgtcaagcagttctgacaccccagtgcttaaatggatggtatgctgtgaatacttcacacaacccagagagtgtgaagctgcaataccgctacttggcaaacgatgatcgattcaatcacccttc

SEQ ID NO: 319463 - DNA, 200 bp, Zea mays
agcagcttctgcttgctctggggggaatgagagagagagagcgagagagatctagtagagaggctagctaggtggtcctcgaacgaagatgttggcggtgttcagcgggcaagtggtggaagtgccggcggagcttgtggcggcgggcaaccggacgccgtcgcccaagacgaaagcgtcgcaacttgtggggcgctttc

SEQ ID NO: 319464 - DNA, 258 bp, Zea mays
gtctatactacatcctgcagcggacgtttgttgcactcgcaccgggtatctggtagctcgcgacaggactaggatgagctagcctgtgatgaggtgtgtgactccatggacgcggcccatcaggacgcgcgggactgggactgggaggtccagctgccagaccacaggagctgattcttaatgcgccaacaccacggcagcatcgataatacccttgacgatcaagaagaaccagacgagctcgacctgctgctgact

SEQ ID NO: 319465 - DNA, 267 bp, Zea mays
agccaaaaggcatcaccgccgcgacgacgatggcagcctcgctccaagccgcggccaccctgatgcagccggccaagatcggcggccgggcgccctttgcctcgctgccgtcccgcccgtcgtcgcaactcgcctgcagggcgttcggcgtcgacgccggcgccgccaggatcacgtgctccctgcaggacgtcgccagcaggtgcgtcgacgccgcgaagctcgccggcttcgcgctcgccacctcggcgctcctcgtctcgggcg

SEQ ID NO: 319466 - DNA, 128 bp, Zea mays
  unsure (1)..(128): unsure at all n locations
ctgccatgcatggaagctagctaatggatggatgcagagccagaacgatgnaaggggaaagctttacatatatgtgggtagagaatatagatatatgggctatgtgttcaaaaaaaaaaataaaattt

SEQ ID NO: 319467 - DNA, 147 bp, Zea mays
aattaccggtcggctaacaacactaacctagtgttacccagtgtaatacccaaaaatgtattcaaagaaagtagagttgatctgcttagatgttatgccatctactgattataacatggaacatcctaatcgaatgaaaaaaataat

SEQ ID NO: 319468 - DNA, 265 bp, Zea mays
cgctaacgcgatgtccactcaggcattcacgctcgatgcctaacccgcaaggcccggtgatccgaggcggcggcatccgatgtcatggagccctcatgcgtcatccacagtggctcggcagagcggtggcgcgcggaggcgtcgcgggcgttccagcactacctggaccgcgcggcgccgcacacggcaaaacgggcggccgtcacgctcgtggacgctgcggtgtacgcgcttgcggtctactacgtgcgcagcttgtacgtca

SEQ ID NO: 319469 - DNA, 375 bp, Zea mays
ctcctctagtcttacctcgttgcacctcaagaaacttggcgcgcaaccaggagaccgcctcttctctctgtctgtctctctctctctctgccttctgattccaagctccccaactgcccagcaccaacctgccgaactcccctcctttttgttggtttgtcgaattataaattgagcccggccggctgactaccatgaagccgccatcactggtgcactgcttcaagctgctggtcctgctggcgctcgccaggctgaccatgcacgtccccgacgaggacatgctatcgcccctcggcgcgctgcgcctcgacggtcatttcagcttccatgacgtctccgccatggcgcgggacttcggcaaccagtgcagct

SEQ ID NO: 319470 - DNA, 346 bp, Zea mays
  unsure (1)..(346): unsure at all n locations
caagaatttaacattagcacaccacataaacttggcattctaagtttagaagagtcgggagggaagtttgatgagcattatatgcagaagagggatgcaaaactgaaggaaggctggaagctgcagagagaggagaaggaagcaatgttaaaggctatgcatgacagcctagaacggagcaaggctgagttgctaacaaaattctctcggtctgcagatgtccctgactcaacttatgtttcccattgttctcagaagattcctncttcgcgatcagcangaaaaaataaagatcaaggggtntggctcattcttggtggaagagggaatgaatagtgactaccta

SEQ ID NO: 319471 - DNA, 406 bp, Zea mays
cccagaccacagctcgacactcagtacagcttcatcagctaagagcttgcgaagcaggaggcagttcaagaagaagccgatggcggttgtgagcagcagatggacacaggctgaacccctgggccgagcccttcgttccttccggagcactgtaccgtggtctgcggactatggaagctatgccctatcacgacgtctaagactttatactcaagtcatagcgcctggctgtcgacttcatcgccttccgcaaccgcttgctgcaccagtacctgaccctatgtctattcgacaccgaggactaaccttacgaccacgtacacatctgtctaccttactacttaatctcactcacctaccactgccacaagtgcgatcggcaagacaccctcttcaagaatgctca

SEQ ID NO: 319472 - DNA, 82 bp, Zea mays
tccatatcagacgtgccacctccaccatcaactgtctaacacatagcttcctcgatatgaattctatctactaataaagcct

SEQ ID NO: 319473 - DNA, 426 bp, Zea mays
taattccccggtcgagccatgcatacctgcgtctgcttgacgtcctgtgctaggccattaacttccgttcggacgaactctgttaaggagagggatccccagaacgacaagcaccccatcctcaatcaccctcccaaggcctacattcccactatgattaaaaaagtcttaatagctcttgaaaagcttacgaagaaaccttacacgcagcctgaaaaaatcaattagatacacaaccttatacttcacgcatacaaagacatctacaagacggttaacgttggctccattcatatgaacactgccaaccatcccaaatatccacttgcaatgcataaaaacgccattgagatacttcctggtttgtatgctccaaactcttaaccttgctcttccacctaggattcttcaaaaatcgctatcata

SEQ ID NO: 319474 - DNA, 186 bp, Zea mays
tctaaatccaacgtacaataacctcaacgacagctcagaccacattgactgaacccttaagtatgacatatgacataacaaatctgtactacagtgtcctcctccctgcctttagaacatatcaaaacaaacacatgcactcaccgattatacgacacaagctatgcctaatacatcaacgatcac

SEQ ID NO: 319475 - DNA, 373 bp, Zea mays
tcttccaaccaaaaaccggctttataaacctgctacaaacaacttcaacacctggtcaggtcatcagatgtctgctggtacctataaacaaaaatcatcctctaagtcatcaaatcctaacaatcaccaagatctcattaaaatatcatcttttcaacgagaaaatcttttaacaagtatggatacatgttcagaacactattacaccatactatctccgactctgacaaaatgcatccacctgaactatctccacaatcgcctactcaccttattacagaacatctttccacctcataacaccctactgcgactacatcattaaacctcatccatacagtacatacattatcaacaccttaatatcagattt

SEQ ID NO: 319476 - DNA, 423 bp, Zea mays
  unsure (1)..(423): unsure at all n locations
ctgagcagccagccgtggaggaagagatgtacccataccgcattgagcaacgtgaataacgggtggcttaacctgggcgggcctctggccctgctccccaatcatcgggcggggctggggcttgcaagggggtagctcctcctcctccaccaccacgtgctcgtcgatcctgcaaacgccgttcctcgccgtggccttcgcggcgctgctggtctcgttcgccggtttcgtggccgcctgcttcacgtggcctgggcgctgcggctgtacctcgccgncgtcgcgctgctcgtcgccttcctcctcggcctcaccgcgttcggctttcgcgtcaccgcgggcggcggcggcgcgcaggtgtacggncggccgtacccggagtaccgcgtcacggacttactcgcgtggctccagaagcgcatg

SEQ ID NO: 319477 - DNA, 221 bp, Zea mays
ctcgatctccatctcgaccgtcgctcaccggtaagctacgctacgacgaaccatggcatgggtgaccgcccgagcccgggtcgcagccctgcgcccgtcatcctcgtcgggcttccttggccactctaaccaactcggccgaactgctaccgagtcgccgacgaggcatagtctcaaggcggatgccaaagtcaagtagatcccgaaccttacctctcacg

SEQ ID NO: 319478 - DNA, 224 bp, Zea mays
acgcggtccaagcacatcaacttacattagcacagaagagaaacgggcacacgcaagtgatcaaggcataggaatattgaccgtcggcactgggcgacttgatccctgggctgccggatgaaatgaccagcgagtgccgttagctggtagtcttacgaccaactggcggaggatcactccatatcacgccagctgaagtccaatgtctattcaaccagactacc

SEQ ID NO: 319479 - DNA, 352 bp, Zea mays
aaccaatcccgctccctccagtattcttctgcctgctcccaagctcgccatgagccgctgctatcacgctggtgatcgctctcctcgccaccaactcggagaacctcccacatcagactcttcgcctgaccctcacgtaccaccaaattagatttcacatacttaacacctagctcatccacccttcctactggcagctcgtctcctacctccatcactacagcttcatactactagatcctcatcataagcactaaccagcttcactagcccatccgcttgtaaaaccaactcattttcaacatgtcgaactatataaccctaacactcaagaaacattctctcgtcatct

SEQ ID NO: 319480 - DNA, 233 bp, Zea mays
acgtcagtgtccgaggccaaagacgggcgaggcttggtgaaagtgataagattattgtatatactgttcgtgtcaaactgtcggagaggaaactagtgaaactattataccctctagttgtgatccatgctctattgcctcttcccctctacccgtatactacttttatgctgcttgttgttctaaattcctgattgccggccgtcccgccttcttccttgccaagactagac

SEQ ID NO: 319481 - DNA, 96 bp, Zea mays
ggtagttgtgtagtgcccgcgcgcatgagaaactggacaagagcactttattagcacaagttggggatgaacatcgcgcgcattgctttgtggcct

SEQ ID NO: 319482 - DNA, 403 bp, Zea mays
  unsure (1)..(403): unsure at all n locations
atctcaaaaagcgatatctgtcagctttacatggtgtggaaaccgctttgctacgggtgccatggtaactgcaaggactcaccaaattgtttctgcgggttgattcccattggcaatggggttcgtaaatctggcctctggcagaaaactcaggagattatccgtggtcttggtcctaatccatctagcgatcttcgtgattctagcgagacgcctgctgggttgactaacctgggagcaacttgttatgcgaatagtattctacagtgcctttacatgaacacatncttccgatctggtattttctcattggatctggatgttttgaagaagcatccagttttagatcagctggttcggttgtttgcacaactacagtctagcaaaatggctttcattgatt

SEQ ID NO: 319483 - DNA, 185 bp, Zea mays
aattcccggtcgacccgggcgtgcgtcaggatcactcatgctcccactcttaccaattgcttctcgggttagggttccttaggcttttgggggggtgctatggcggggggtgatgtggagtaccgttgcttcgtcggcgggcttgcctgggccaccagcaacgagtcgctggagaatgccttcgc

SEQ ID NO: 319484 - DNA, 145 bp, Zea mays
actctctcaccatcttccttcctactgccttcaattcttaactaaacattaatattatatccgataactctaaacataaccactgcctcacaaaaacttaatctgataatttcaatgatcatcacattcactctcctacctctat

SEQ ID NO: 319485 - DNA, 299 bp, Zea mays
tataatttcaattatgattacattgactctcctacctctatagatgcagaactttttaactaatcataattgaataatcacaataattaaattaataataaaaatactaactttttgtaatcccatcataacaaatatgaatatgatattcttcatcttgataactcattgtttgattccctttatgctccactggagttttacacttaggtatggtctgcaatatctcctgacctatatgcgcctttgtttttcacaaataggtctgctggttgttgcatggattattttcctacata

SEQ ID NO: 319486 - DNA, 312 bp, Zea mays
accagcgactcccgtagctggaactcgctcgtcaaaaggagagctcagatccttcagcttttcctttcactctgcttctagctgctgcattcgacgcatatgctgaccaaaacatccagttctagtttctccactatagtttgatatatatacatatgtatagaaggtgtaataatctatcactcttgctcgttacccaggaaaaggaaacacttcgcttcagctcgttgacagacgacgactcagagcaaaatgggtatactggtgattacggtggacctagactgctgtcgctgcagagccaagatcacc

SEQ ID NO: 319487 - DNA, 53 bp, Zea mays
accattgcccttgaaaccttcttcaaaaccttggcccttcacccccccccttg

SEQ ID NO: 319488 - DNA, 224 bp, Zea mays
tcccggaccaacccggcctgcacacaaactcacgcgcttacaacaccccagccatttagttgatctagctaagcacactcgaacattgctcgatccacatctacggttgatactacccacaactatatcactcctacagtcctcgatcctactgcacgccatacatctcaacccccaattacgccttcttctacccaccacaccattacccaataaacatccat

SEQ ID NO: 319489 - DNA, 446 bp, Zea mays
gattcatctatgcccatttaaggatctatggcgtgccttcaatgcaattggtgaaggcagtgcggtgaaggaaattgtcatgctgccaaagcccatcaaggacaatgcaaacaaggccagaggaagaccggacatgccatttccaggtggtgacatttctattcttacgcgcccacccaacattttggctttactaaatgactatgtgcacgaatgctttgtggatgttgagagggattatctgtgcttgacaaaacagtatcccagacttgcaattactccagaattttctaaggttgggcattttgtacattgaacttttgttgctgatcgatattcaatgtggcttttggcattctctgtcactctagctaggtccttggatgagccacactattgacatgggtttaggtgagtgactcatcacggtgcctttatatggctcg

SEQ ID NO: 319490 - DNA, 108 bp, Zea mays
agtagtagtagtagtagtagtagtagtagtagtagtaggtttttttgggggtcttgtttatgggagcgacggttcagtgatgcggatatgagacggatgcatcttttg

SEQ ID NO: 319491 - DNA, 402 bp, Zea mays
ctggcgttctcctccccctgttaccaagtcctcctcgggttatgtgttccttagggttttgtggaggggcgatggcggcggctgatgtggagtaccgttgcttcgtcggcgggcttgcctgggccaccagcaacgagtcgctggagaatgccttcgcctcctacggcgagatcctcgactccaaggtcatcaccgaccgggagacggggaggtctcgcggcttcggcttcgttaccttctcctccgagaactccatgctcgacgctatcgagaacatgaacggcaaggagctcgacggccgtaacatcaccgttaaccaggcccagtcccgtggcggtggcggtggcggcggtggctacggcggcggtcgcggcggctgcggctatggtggcgggcgccgtg

SEQ ID NO: 319492 - DNA, 247 bp, Zea mays
ccacgcattcaactcaaccaccaacaaacaacattttcttcttcccctccactctctccttcctctcggacggatctctttcaaacctacctattctcttcaacatattaactcctaactaccatataaccctacaaccccccttcaccatctacctccatacctacatcaccatcacatacaatacttatcctcctcactctcttcctatcctcatatacctcatcctctctactctcaccatctc

SEQ ID NO: 319493 - DNA, 350 bp, Zea mays
cacgaataaatctgagctgatttctgtgaaatttatatgcgaaccccttgaaattcgtgtggtccaaacacggcctaaaagaactttgtctagagaaaccctctaggtaacacagacgcgcaaaccttcaagtatcgatctcagagaggacatgcagaagatgatttgcagtttgctgcggggtaggctcctcagggcctttgggactgcttttgtcttcgcctgactccaccttttatttttgtttgaacttgctaccagctggatacttccagagaatccgtacagtacagcccttggctgttgaattccaagtcttcgctaaatgaaccattcagacatcgccatct

SEQ ID NO: 319494 - DNA, 375 bp, Zea mays
ttcccatctctacccactcatccttatcaatatatatctctaactccattttatcatgtgcacattcccaaaacttcatagctggcttaaaaatacttctcttcttctcattcaatcactaaatcactataacatataacccctccactctactttttttacaaaataatcattctcctcatacaacaatcaatactctcatcttcttttttcatacttcacttacacaactccatctcttccaccataataacttccaccatttattctcaatccatcaatatttcattaaattccaccttttaaacaataatctttaccctaaaaacttcctactcctctttaattctctcaaccttatccttcattaatctt

SEQ ID NO: 319495 - DNA, 121 bp, Zea mays
aaaatcctcacccccttccacccacctctttccttatcccacctaataacccatccatatcactccccttctctctccaaccacaccacctacctccttcatctcacccactcttctcaac

SEQ ID NO: 319496 - DNA, 347 bp, Zea mays
  unsure (1)..(347): unsure at all n locations
cccacgcatgcactctatatctcccgacgtctactcgttctctgtttccctccatgccctcaatgtaggctcaatctaaacgctgtccccttccctcatcaaaaccctanctcatcacctcaccaccattctgtccactatcctattccactgctcctctccccatctctcttgccatcacatctgatgttcttctcccacaacgcattcctctacctgtaccccatctactcaccaacctccatgacttcctctaataacgttactacccattacgagtgataacttaagcttcactacatcaagatactcaactatgacatgaaccgcctcgtcattaacttcct

SEQ ID NO: 319497 - DNA, 268 bp, Zea mays
  unsure (1)..(268): unsure at all n locations
tccttaccancttaatctaacacatatcttttctccttgtaactcatcattcatcagcaggcttattcagaattttacacacacancacactcatatcttctatcaccaccatttnttctctcatcatctcctctcatcatcatcatcaacctcactccttatacctaccttacccatctcatttccacatcacccctattctcaacttttctaatcttctacactccctattctttcacttcaccttcatcaacacctattacaacc

SEQ ID NO: 319498 - DNA, 430 bp, Zea mays
gtcctgactttgccatctctctcctcgtctcctttcctctctctctctctctctctgtcgctctccaatcttctttcctcttctttgatcaccagccaggccaaccgcagatataactccttccgattctcccctccgtggactccgcttgattcgacaaaagtatatgaccactcgacgatcacaagaagtagcagattgctagctaggaacttggtgtctccggccgtgctccatttgatcgtgaaagaacacagctgcaacaccgtggctttccgtttgcttgatcgtctcccaatgctgcgaaggaacctaccgaatctctccctccagataagcccgccacccgccgcggcatctgacgcaccggcgacgtattccgaaggaagcgacgaggtagggttcttcgcaaaccctagctccggcgcgg

SEQ ID NO: 319499 - DNA, 338 bp, Zea mays
  unsure (1)..(338): unsure at all n locations
cccactctacccactcatccaatccttcttctccatcattatcctttcttttccactcattctctctctctctctgtcggtctcctatcatctttcccatcctctaatcaccaaacataccaaccatcataaataacctctccccaatctacacttccatcactacaattaattcctctaaacattattaccactcaaccatcacatcaaatcccaacatccatactcttaacctcattaatctcatcaatcttcatttcatcatcaattaacacatctacctcaccccatctacnactctccttcatcctcttaccattctttcaactaacactacc

SEQ ID NO: 319500 - DNA, 360 bp, Zea mays
aattccttctctacccactcatcctgcacacccattaccaacgccaataacaataaaccacacatcacatcccctaatacgatgcaaatatacttcaaaaacccaccataccactataccacatctccaataacaatatccacatatcatcctacacacaccaaacctcaccctcaaaatcaaccccacaaacaccaactcaccaaactcatatcctccatctacctatcatcaattcaccacctatcacaaaccaatcaccactcctctattacatcctacaccttcaacaacctacactcattccatcctcactaacatcaatttttatcttaaacacattacctttccacatttcaa

SEQ ID NO: 319501 - DNA, 408 bp, Zea mays
gtgctctgttctgctgcgcctgcggggcttcagtgcagcgcgtgcgccgtgcggtggcgcccgccagccaccctcgccgtcgggtcgccttgccacgtcgccgcccgcgcccccggcccaccacctgaggccggtcgcccatccataacgcccgcagtccagtccccaccaggcaccagcccacatctcttctcccacagaacagactcccacgccgtctccgccccctccccttcacggctttgcgcgcgtagatcggaggaatggtgagcgcgtcgagcctgctgctcccgtcgtcggtgcgggacctggcctcctgcgtctccgacggcgccgtccgcgtcgcctgcaccaccccggcgtccacgttcacggtctcctcctccttgccgtcgccgccgtccacgc

SEQ ID NO: 319502 - DNA, 407 bp, Zea mays
gaaagatatggcacaatcaagcactcaagaccaagcgactaagctagatgctgccggccgggagctcatcacaacctacgatgagcttaatccaactctggtcgatgaattatgggaagagccaagcgctcttgagttcttgcagtatgttgcgaggaatcggccatttgttgtaagaaaaggtgctcaagactggactgctgttcaaaagtgggactcgcactatcttctcaatgttcttgggaacagtctcgtcaatgtagcaatcactcctttcggcaacgcatatgcagtgttgaaagaagaagatggttcactatcctatgtcaggccactcgaacggctcgagcctttcgacatggtcatccgctacatttcagagcaggagttgaatcagtcaggaccta

SEQ ID NO: 319503 - DNA, 221 bp, Zea mays
cctacaccattctctccctaactctcctttccattcacctcccctccccctcccatcacttatcctttctccatccataaccccacatccattccccacaccaccaatccaatctcttctccacataacatactcccactcctctactccccctccccttaactacttttcactcatatatcttatcaatttttatctcttctaaccttcttctcccatct

SEQ ID NO: 319504 - DNA, 255 bp, Zea mays
ctttctcattccacctccttctcaatcacctctatcttcaacaccaccatactctacccactatacatcttctataccaacatccaatcccaacttcacacacaaccattctcacacaataaatctactaaccttccacatattttctattaatctatatttaaaacacaattatactccctatatcctcaccttaacactaacaacatccattcttatctttcctacattccttattcatatacctatacatat

SEQ ID NO: 319505 - DNA, 341 bp, Zea mays
  unsure (1)..(341): unsure at all n locations
ccggctgcgagcgccacgcgtctcggtggagcgtctcgcgtaccggcttccggctcatcactttcctctcggttgctgtctcttccagcatcggcnaggttcatcnccttcatgcctcgtcatctggagcctcgctcggccctaccagctcgcattgtacccccggccccgccgtgtctgttccctggttcgtcattcaagcgcccaggtcgagccatcgccccgcttgggaaatggcagccacggctcatcncnncgtctcgaacctccatccagcttcctcacaattcccttgtnntccttggcgccttcgccaaagggccccctctccttcaaatctt

SEQ ID NO: 319506 - DNA, 229 bp, Zea mays
gcgactgctagtgctaggaggccatttttaatggcacacactttttttttataaatgtacgggtagccaatttgacttgtcctgccaattccgctcaaccccctccaaatccatctataaaacacacaataataaccataaagtcaatgttcgtggattgccatcatcccttactacaactatgcgctccatcaactaataattgattccactgccaatacctactatg

SEQ ID NO: 319507 - DNA, 64 bp, Zea mays
gcgagtttatggacattgtgatatgtttgggaaggcaaaggacttgtttgaaacgaccggggtt

SEQ ID NO: 319508 - DNA, 431 bp, Zea mays
gtcatatgttgggagcgacaattgtggtagcgtggttggaggacggggaaggggctgatggctgtagactggtgagggtatgtcagtgttaagggccccttggtggcgcctccctctcctagttggcgacgaacagtttgccacttcttccacaagctcgaggacggtcaatgaccttgctgtctcctccttgaggaaggcacgtcgagcttgatctatggcgtgcttggtctccacttcgagctgcttggtgacagcctcacattccagcttttccttggctgcggtggcgatctcgtttttggaccctccttgcttcatgttgcccaggcagacgtcgaccttggcaaggtgctcttgcaccttgtccatgtgcttggtgagatcagcagcgagggtctcgagccactccatttctgtggacatggtgg

SEQ ID NO: 319509 - DNA, 156 bp, Zea mays
aaacctggtattacatttggccaagaaagaaagaatgagcaaaatgttgcagagggagaattttgaaaaagaaaaaaaaaagaaaaaagcttgactggatataccagaacacaaggtagtatgttccagctgggaataaaaaaagcagccgcaatg

SEQ ID NO: 319510 - DNA, 313 bp, Zea mays
atccaataagcgtcaaactttcgctactgaccatggcgatacaatctgcacactcagcgagagaccacaccatggtgctctattgcacggaatatgacagtatggacgcacacgtgaccaagcttacagatttagcagaggacaagctgacgatgcgcatgacagtccataaggaccagccgactacaacgtccagaaacatgttgtacgacaggcacagaatgcttaatattgtccaactgttcggctagccgtcgagctatctgacagctatacttgttgatcaactactgctgctacacacatcggatgc

SEQ ID NO: 319511 - DNA, 386 bp, Zea mays
gggtcttctcaaagagtacaggaggaaaacgaaagtgaaaggagattggagaaagagagagaagttgaagagaaggaaagaaggaaattggagaaagaaagagaacttgccgaagagaaggaaagaaggaaatttgagaaagaaagagaacttgccgaagagaaggaaagaagaaaaatggagaaagaaaaagaacatgccgaagagaaggaaagaagtaaattggagaaagaaaaagaacttgctgaagagaaggaaagacataaattgaagaaagagagagaacttgctgaagagaaggaaagaagaagattagaagaggcggaaagggagagggagcgtaaaaaggatagacttgctgttgaaagagcgacaagagaagcaca

SEQ ID NO: 319512 - DNA, 113 bp, Zea mays
acggacacgtgttcatacgcgtgagcatacacttgaccggacacatttacaggcactgactgagcgagagcgttacacacgcagttagctcgtaacagcatcacagcactatc

SEQ ID NO: 319513 - DNA, 385 bp, Zea mays
aaacactggacgcgcccgcgcgtgcgagaggcccaagaaacccacagcagccgctaggcgtgaggatggcggacaccggtgacgtcgccgccgccgccgaggcctcggcgcgaccggcgggcagcagcagcacccagccgctggcggggcgcgtggcgatcgtgacgggcgcgtcgcggggcatcggccgcgccatcgccacgcacctgtcctccctcggcgcgagcctggtgctgggctacgcggcgcgcgccgacgaggcgggcgcgctggcggcgtcgctcccgcgcgcggtggccgtgcgggcggacgtctcggacgaggccggcgcgcggtcgctcttcgacccggcgacgaggccttcggcggctcgcacattctggtg

SEQ ID NO: 319514 - DNA, 137 bp, Zea mays
tcaaaatgcaccagggacagcgaagcgacctcctttcgaccggcgatcggtcgcagcgccgatgcccccgcacgccaaagccgccggcgtcatacgctccgactccggcgcgggacggcgccagcattgctcgccgc

SEQ ID NO: 319515 - DNA, 411 bp, Zea mays
gttaaaaggtgatatttgtgaagaatccctcatggatactaaaactgctaatggttcttgggattgtagtgaactaaataatgattcctgtgggaaaacttcagccctttgcatgaaattgaatcggcctgcacttaatgttacacaagccacatctgtacctgaccgattatcttcgtctttggagaaagccagtgaaaatgtggccgcaagtggtgtcaaagagacaaaaacatttggctcagctgtttgtgatgttgacagaagtgcagaaccaattgaccgttcaaacaacaatgtgacgagcaacacaatgcgacatagtgagactattgtagtggattcagtgaacaatgtgggggatacagcaagcaactcttcactggctactaaatcatccagtatacaatc

SEQ ID NO: 319516 - DNA, 402 bp, Zea mays
  unsure (1)..(402): unsure at all n locations
ctccctccgtgctcagcttttcttgggcgtacttccctgctcgtcgtgcttggctgccgcccctgcagtggtcgacctcgcctggtcgtttcagcatcgtgcagccatgaagctctgccctcgccaagctcctctggttataccttggcctccagctcgccagaccgcggtcgtccttgctcctcggctggccgcgcacagctttcgctatccatagccgccgtcgaagctcccatggcgccgttcttccctgaagctcccctgcaccgcgtctctctctctctggtctccttccagccgtgaagttccctgcgcgcctgcgccatgccgatcntccagcgtcgcgcgctgcggcgctccagccatggccgccaagctcccctccagttntcccccgcgttt

SEQ ID NO: 319517 - DNA, 161 bp, Zea mays
ctcaactcaatacactcacctacatatacacacatagacaaatatatcctggctcagtcaccaccaacagaaccagcctactccatcatcataccaccccaaccacttattcaacatcttctgccgcaccaactacaactactccctctccatcctctact

SEQ ID NO: 319518 - DNA, 217 bp, Zea mays
aacccttcggccaattatttcggttgttgaaattcgattgggtcctcctttccgcttggtccgtggcgaaggccttcggttggttcccaagttcaaccaggcaaataaaatccttccaaccccgaccaggaaggaaggtagaagaagggcctaaagttgacccttaattgccgccgcggtttcatggtagttgaacccaaaggccccgtttttaatc

SEQ ID NO: 319519 - DNA, 309 bp, Zea mays
tccggtgctcagcggaacagctagctatagcctgtagctagcagctagcttcagtcacaggccggacggtcgggtcacgggcagctagctagctagccgcgcgccggcgccatgatgaacctgaacctgaagcagccgctcgtgctgcccgcgcaccacagcaatgtcgtcggctcgcgcctgtcgtcgtcgtcgccctcggcagccgccgccagcaggaggaccggcggcggcgtgtcctcccggtccggctcccggcggcacgtgcggctgccgaggatcagctgcagcgccaccgaggaggtcagc

SEQ ID NO: 319520 - DNA, 241 bp, Zea mays
ctgactcttatcgagttgatctaggtatccatctcttactaatctaaataggatgagacattgtctatagggggccgtctacatagccagcgatatcaacacaaatgacattctgatcctgaagatggttcacattgaaaatgaccacgatctgtagctattcacctattttaacttaatagatcattctgcagcgtttccaccatgtcttacatcgacgatctacaagcacgtcagtacc

SEQ ID NO: 319521 - DNA, 217 bp, Zea mays
ctgacgcttctcgaattgatataagtatccatctcttaccaaacaaaataaaaagtggcatggtctacaagtggccatcgcttttcaccctgctgaacacgccgagtacctactaatccgctatgttcttcatatggagagtgcccacgatctgaagctgacaactgatcctagagatatgaacattctcctggacgactaccaagtcctacatcgt

SEQ ID NO: 319522 - DNA, 404 bp, Zea mays
  unsure (1)..(404): unsure at all n locations
cggacgcgtgggcgccgnctnccttcccctccgctactgcgacctccccaccccactgccccgcatgagcggcggcggcggcggcggcgaggtcgtaccccacatcggcgagcggcggcggcaccgtcggaggcaaaggcaagatgttcgggcgcgcgccgaagaagagcgacaacaccaagtactacgagatcctcggngtgcccaagtcggcgtcccaggacgacctcaagaaggcctaccgcaaggctgctatcaagaaccaccccgacaagggcggtgaccccgagaagttcaaggagctcgcacaagcctatgaggttttgagtgatccagagaaacgtgagatttatgatcagtatggtgaagatccccttaaggaaggaatgggcggtggaggatcc

SEQ ID NO: 319523 - DNA, 429 bp, Zea mays
taccgttcggaattccgttcgagacacgcatacgaggctgtcaacattacaatgattgatacacctggccttccacctgggttattgaagtgtcctactcgaatacacttctgcttcattcgcatggtaacacacgcgccatatcatctgtctgcactctcacacgcttcaacatgtctatgctacaacagactacgtgcctaccgatcatccgtccataactgaggtgctcctcgccatttacgtatctgacaacacttcataatgctccacatccatggataacaaaaacatccagttcatagaactcatctatatcactcacatcttccaaactcaaaactatcccgagcgccgtcttatctagacctgcgagtgtgtactctacacttctgagacacgcccttgcaaaagtccaaaattttactt

SEQ ID NO: 319524 - DNA, 308 bp, Zea mays
  unsure (1)..(308): unsure at all n locations
ctccaattcttatcacacatcaacatttcacactctacatactctaacaagctttaacatgatcaacctatcacacaatatgttaccagccatcatccctccataactctctattatgtcctctcttacccatcttaatctatcttatcatgatctacatctcataatttcaatgcatttattatctataaatcctttagctatatcacttgttctcaactccacactctatacatctcanatcatatatgcacatgcccttcagtcatgttgccttaaaagaaaaatcaacacaatactacatcatt

SEQ ID NO: 319525 - DNA, 299 bp, Zea mays
aaagtacacttgggcacttggcatcgcggccgaggtccccgaaaaagagccgtgctgggccctaatccagacgtgatattttctcgcgattttgtcacgttagcggccagctacatcctgacgatcctgtcacccgctcgatcggcgggcgctggagcgcgcgcatctagctttgtgcaagtttcacgggatctctagctttgtcggcggcacatgagcagctccaagcacgccgcgggcgccgtaggcggcaaggccgcgcgcgcctgcgacagctgcctgaggcggcgcgcgcggtg

SEQ ID NO: 319526 - DNA, 407 bp, Zea mays
  unsure (1)..(407): unsure at all n locations
ctgccggggacccgaacccccaacccacggttccaaggtggccaatccagccccagccgaccgaaacctctccggtctcccggctctcgaccggcgaccgccatggccgccgcgacagacaagaccgctgaggacatccgccgcgagctccaggagctccagcgtcagcaccgcgagatcaccgagcgcctgcgcgacccccgtggccttcgccgcggcgcccccggccctggtcctggacccggggccccacgcccgctccgcggctttgcgagacccgctgtgggtccggaatcgggggatcaacctncgcagaagcgtcggctgctatcagccgtagttaaggtggatggggctgaacataacgaggaaggcacaaaggatgcggatgccgaggggcatgggac

SEQ ID NO: 319527 - DNA, 317 bp, Zea mays
ttacaaattatgcatgccaatagtgctatggatatattcgaaaataaaacggtgatcgtaaatccatcatggtcatgattgattcaacatcataatagatctacctctgccatctaccaagtttttgtcttaaaaagattaatctcacactcctcccatgacttacaccagaacataaactaagcatagtgtctacatcttagtcgattaacgaccctctcaatgtatgctttatcatcaatgaccctttaactgctcacatgccttgtaatcgctaagcctttcctacttcaaactaaagtcggaataaaataaca

SEQ ID NO: 319528 - DNA, 374 bp, Zea mays
gttctagatcgcgagggccgccctttttttttttttttgtttttttttttttgtttgtatcactatcaacagtgcagaatttccttagagttgcaataattatatccccaatagctcaattgaagcaatttaagcaacaaggacaatggggagccggacgtttccataaccataataacaaggttaaccttgtatagtaagaattgaacctttggatctaacaacaaacaacacatccacaggatgaggaaggatttcacctttgaggccaatcctcacaccgcggaaagttcctcgacgtcccttccccgtccgtcgacaacgccaccgaacctgggcacatccaggccttcaccgattccgtcgggcatgaa

SEQ ID NO: 319529 - DNA, 291 bp, Zea mays
cagcgtcttacccacatgtattgtaccctaatgaaagaatttaactgtcatcgcacgcgaaaagtatgatataatgaataaaccagcgtcttacccacatgtattgtaccctaatgagatatttgaccactgtaatagaatgagatgtgctaaggaaaaaaaaacaaaaaaaaaaataaaaaaaaaattaaaatagtaccaaaactaattaataaacatacataaaacccaacaatattctataccaacattaataaagtgatataaaaaaaaaaggggggacccttttaa

SEQ ID NO: 319530 - DNA, 176 bp, Zea mays
  unsure (1)..(176): unsure at all n locations
atcatcttcatgcagagctaattgtgcatagctttcatatttgttcgtcttgactggggataggtttggggtttagttaaatgacccaatgggttgggggtttgtgttaagcttggtgttgtcttcactgtataattgatattctgctcccatccatgtncttcgttaataaatgc

SEQ ID NO: 319531 - DNA, 240 bp, Zea mays
  unsure (1)..(240): unsure at all n locations
tctatacaggcacctaaattgaattcttttaacttttttctacaacatcctcacttctaaaaccctttccttacccaacttaatcctcttacatcacatacccctttcctcaactttcctaataactaacatgcccacaccactcacccttcccaacacttactcatccttaatgcccaatttaacacaccctctancaacccattaaacacccctattattgttattacactcaacctt

SEQ ID NO: 319532 - DNA, 409 bp, Zea mays
atcatcctttatacctcgctttctctcttccaccatacggtgccttttacggactatttaaacgcctcgctcacgtcttacccctaattacattcccccatggaaccctcatcctctcaatccatccacccatccatcccattcctgaatttatgctactcatatctgtaacttctctttatccacgttaatgccatcgaacaccccgccctcaatctatccacttgtgctcgtctctgttccccctgaggcctataaccactactctgctcatgctcctgcttcaacgcctcagcgatctacgaccaaaccgccccgcacgattgtcactactcgacacacttcgatgtccatgtgtttatcccaatctcccctgctttcctcattcttctccctcttttgcttttaa

SEQ ID NO: 319533 - DNA, 338 bp, Zea mays
gtgtcattgattcttgaagagatcgagcttcttttgcaccacaaggtcgaggaggtgttgcaactgcggatcaagctgcggctgcggctcaagctgcaagtgcggcaagaagtaccctgacctggaggagacgagcaccgccgcgcaggccaccgtcgtcctcggcgtggccccggagaagaaggccgcgcccgagttcgtcgaggccgctgcggagtccggcgaaggccgccacggctgcagctgcggtggcaactgcaagtgcgacccctgcaacttgtgatcacatcgatcgacgaccatggatatgattattatctatctaacttgtggtggtg

SEQ ID NO: 319534 - DNA, 428 bp, Zea mays
acatacgcggcatagcaaatcacctccattcctattccaccctccttccaccggtactcaactcgctaccatacaacatcccttcccgctcccaacaatcccaaccatacaaacacacacacactaaaccactgtcgccctctctatcatcataatctctaaccactacaaccaccaactccccgctcactcctcacctcctttcccctaccatgctcatccatcctacccttcccctaactcccattaccactctacctctgaactaactcatatcaatacgaatacccaccgctactctcactcagagcactctctcacctactttctctactccaccaacttgaaccactcgttctttcccccatccctcatcttccacctagccaacaagctatgctcatccactctcctcttcacactcctct

SEQ ID NO: 319535 - DNA, 399 bp, Zea mays
  unsure (1)..(399): unsure at all n locations
gtcttcacactcctcgccatcacataaaaccagtgcaagcagaagcagcgcaatggcgagcagcaccagggccctctcctncacagccttcggcggcaaggcagtgaacgtgccgtcgtctctcttcggcgaggcccgcgtgacgatgcgcaagacggcggcgaaggcaaagccggcggcgagctccggcagcccgtggtacggccccgaccgcgtgctctacctgggcccgctgtccggcgcgcccccgagctacctgacgggcgagttcccgggcgactacggctgggataccgcggggctgtcggcggacccggagacgttcgccaagaaccgggagctggaggtcatccactcccgctgggccatgctgggcgcgttgggctgcgtgttcccgga

SEQ ID NO: 319536 - DNA, 385 bp, Zea mays
cggacgcgtgggcttctcctccccctccggttcgggttcgggttcgtgaggttctccgcggttcggtggcgtgggtgggcggatcgagatggcggcgtcggatgttgagtaccgctgcttcgtcggcggcctcgcctgggccacggacgaccactccctccacaacgccttcagcacctacggcgaggtcctcgagtccaagatcatcctcgatcgggagacgcagaggtcccgcggcttcggcttcgtcaccttctccacggaggaggcgatgcggaacgccatcgagggcatgaacggcaaggagctggacggccgcaacatcaccgtcaacgaggcccagtcccgcggcggccgtggaggcggcggcggcggctacggtggt

SEQ ID NO: 319537 - DNA, 388 bp, Zea mays
  unsure (1)..(388): unsure at all n locations
aatagtaccaactctcccgaatttaaattaaaattggactttaatgctnatgctgaaggaaatggatcagaatggagaattgctgctggggaatgtccccttcccgtgtgactttcccggctttggaagaagagtgcttgtagtcagcttcgtaccggcaccgatctccggcgtccgcagctggttctttgaaggtccaagagttgttgttgcaccttcgtcgatgaaacaccctcgatcttccttcattcctgccgtccgaactttctcgaaacgccgtccttcaccaatgggctctcgtcagctcacgaacggctccgcgaacttcccccatgtaactcctcgtcgggcgaagtgcgacgagaggatgtccagcgtcgtcatgacc

SEQ ID NO: 319538 - DNA, 381 bp, Zea mays
gcagcggctcatctttgctggaaagcagcttgaggacgggcgcacgcttgccgactgcaacatccagaaggagagcaccctccacttggtgctgcgcctcatgggaggcatgcagatcttcgtgaagaccctgaccggcaagactatcaccctcgaggtggagtcttcagacaccatcgacaatgtcaagggcaagatccaagacaaggagggcatcccaccggaccagcagcgtttgatcttcgctggcaagcagctggaggatggccgcacccttgcggattacaacatccagaaggagagcaccctccacctggtgctccgtctcacgggtggtatgcagatctttgcgaagacactcactggcaagacaatcaccct

SEQ ID NO: 319539 - DNA, 286 bp, Zea mays
cccggttgaaccaagaggtactcggcccatcgtatctcaaaaacaagcatcgaattatcagagcctatccaatgccctatgacaggatcatctccagcggcatacctgttctccacagcaaactgatcacatggccgccatgtcactgtaccatcagaatatctcggagaacttcaacaagctcgacgtctccaacactgtggcctaactccttcacacggctaccgcgtaccgttagctcgacgacaaaccttgcgaccaacacttcgagaacgcctaactgtac

SEQ ID NO: 319540 - DNA, 419 bp, Zea mays
tcccgtgttcaaccaacccttccgaactatttctaaatcaccagcgtccccctttttttttcatttgattcaaacatttagcactgatagtcttcaacattcaatgattacatcaatgccatccatatatagattgcttgcacaaatctaactaagttcatttctactcaacgaccacttgccaatacaattgatgatttttgtcaaatagtatattagaaccactatcctgtaattgttattctcaccaaatttgatagtcttaactgtcattagtatctaccattgagcaatgtacatactatttttacaaaatttaccattaagatcacaaagttcacaaaagatgatccattatagattcatttgtgaatacattctacactatgagtcacattaaatgcgatctcttcttcaca

SEQ ID NO: 319541 - DNA, 427 bp, Zea mays
cggacgcgtgggcggacgcgtgggtcagaatatcacaaattgagataactgtggacgatactctcagtgcatctgtccatccaggacacaaaggccaatacatcagtgagatagtttataacttctcaacctgattaggataaaatggtctgaactacatagctagctgacgcagttggtcaacttatctgtggtgaagatgaaggacattagggctttcaatagtcctgcacaatacacttgcactttcatgtgcaagacatggatttttatcatgatatgaagggcttgtaacataatggctcagccttgaccatttgtagaagcagcacaaagtcattttgaagtacatggatttctgtgaggattaatttttttaatatttacttgtgttgagaaatagaagggagtggtgagagctatctcg

SEQ ID NO: 319542 - DNA, 383 bp, Zea mays
tactctggtactaatatgacctatgattgccaggagaatacaggctttattagtatagacagaactcatgctcactgactactattgactcactgtagcgatcggccaccgacttaaacaaatgacactccatcttgtaccacatcacattcatcacctgatctaatactcacctcatactcctacagctcaactccatgctcgattgtctcagaatataccaagtgtacatcaacatcgtgctgccgtccaaccttccagacatctacgatatacaaatatgcgaacccattagcggatccttactctacaacactatcattctcctgatctcacgcactatctgcatacttgttcgtcactccggctacaagctcttattc

SEQ ID NO: 319543 - DNA, 456 bp, Zea mays
cccggccttcttcctccgccttcccttaacccccatatcgccatacacttctccactcctcccctgattaccacccccggcccccgcctcgatccaatccggttttttcttcgattcggcgcgtggcaacctggtcagtccaatccgtccgtgaagaatttatccgtattttcgtttgcgtcgcatcgtttctgcgaaggatttcctgttcgttttgggggagaaaggcgtcgtccttgatgtctactatcgcgaccccgccgccgccgattgcgcaagagaaggccgccagccggaataagcgcaagtaccgtgccgagccaccttccaccgagttgggcccatacgggctggagtacccgctgacggcggactgcatgggattcgagtttatgtcgcctgagaaggctgccatggcagcagcggtagccgctgccgagggtgtcagccttgacc

SEQ ID NO: 319544 - DNA, 157 bp, Zea mays
ctcactctccctgtatacactcattaatcgcttcagatcctcgattttactctcaacgtgactcatactacttccatctctctatctcccgctccttttgctttcttaccttactttctatccacattatactactttttcacttataactctaaat

SEQ ID NO: 319545 - DNA, 204 bp, Zea mays
actagttctagatcgcgagcgccgcccttttttttttttttttttttttttggttggggtttttttttttttttttttaaaattgcagacgaaaaaaaggaaaaagaaggagtagagaaggagcaaaaaacacgggaaaacgataggagtaattaacttacacgcacgcccacgtacgggcccaggggccgaataaaaatcaag

SEQ ID NO: 319546 - DNA, 432 bp, Zea mays
aagacaagctggcaaaaggatgatccaaggggttcaatgccaggtggtaccggactaggacaaaatagtgagagcccaaaggcaaacagtgatggccagtctgatccttcctcagagggtgtggactcaaacaataatactgcagtttatgctgatctaaacaagtctcctgaaagtgattttgagtactgtgaaaatcctgagatccttgattcaaataaagcttctcatcaccccagtgaacgtattaatgacttgcaaaatatacagatggctgcagatggggtaacagaagtcacagagctggaagaagcacctgggctctcagcctcagccttggatgaggaacccaatgcttgtgttcaaacagtgcttctcagggattcaaacccactagaacacaatcagagaactgtggttcctagatcacat

SEQ ID NO: 319547 - DNA, 93 bp, Zea mays
ccggattcccggtcgaccaagccttcggcaatttaactggaccggaagggcaacttaccttactggaagggcaacggccggccgggaaaggca

SEQ ID NO: 319548 - DNA, 390 bp, Zea mays
agccttccggtggcttcttcttccccttccggttcggtttcgggttcttgaggttctccggggttgggttgcgtgggtgaacggatcgagatggcggcgtcggatgttgagtaccgctgcttcgtcggcggcctcgcctgggccacggacgaccactcccttcacaacgccttcagcacctacggcgaggtcctcgagtccaagatcatcctcgatcgggagacgcagaggtcccgcggcttcggcttcgtcaccttctccacggaggaggcgatgcggaacgccatcgagggcatgaacggcaaggagctggacggccgcaacatcaccgtcaacgaggcccagtcccgcggcggccgtggaggcggcggcggcggcgggtacggtggt

SEQ ID NO: 319549 - DNA, 330 bp, Zea mays
atacacttaatacaatcctaacaactttaacattatactaatcattcccaggtacgagtactcatacatactgagcaacagcctcaatataccacaccaatcactacaaacatccatcattatccatccaacctctgacattcatacataaaactcctcatcgtatactaaactccttatatcctaacactccttattcacatatctccacgatccattctctccaagtaaatattctccaatcctttaatcttataccttcttactccaacactgactaccactattataaaaattacacagaactacctcagtgccattaacatctcc

SEQ ID NO: 319550 - DNA, 273 bp, Zea mays
acccactcatccatacgtctcctactacatttccccatctttcccatcttgaccactacaaataatatattgctacgatcaattactcaatcagaacttcccctactctttcaacaaattcatatccttattcaacccatacccatccttacaatctacaacccccttagttcttacttcatcacctttacatacttcatcctgctatctaaaaacactactcaatcatctcttattctaccattctaagttaccaactccaacataatacac

SEQ ID NO: 319551 - DNA, 399 bp, Zea mays
cctccctgtccccagctcgctcgccctgatgccgcgctcggctcctctgctgactgcgcgccgctccctgttgttttggttgccgtgcgtgcgaaactgctctggtcggctgtttctgtaccccgcgcccagatcgacatggcctcatgcttggcctgccctagatccgtagctagtcactctgtgttctcgaccttgccctatcgccgaaccccagcgccatcgaccttcagctccgtgccttgtccctggctgcgcgcgcgtgcttcactgtttggttgtcgtcgcgcaagctcctctgttgggctcgccagccccttgtgtcctaaccgcgccagtccacgttcgtggtcatgttcatcgagttcaccaacgctctgttgccgattcgaccatcgt

SEQ ID NO: 319552 - DNA, 262 bp, Zea mays
aattcccgggtttttttttttttttgttataattaatacactccgagcaactttattattatatgtattattacaaggcacagtggcacatacatacagtgatacagctgcaatatacatgaacaccctttgtctcgctcctgctttatctatgcaactgctggcatgcatgcaaaagacgcctcgggagataagacccctgttattctgctagtacgtatgcatgcatgtgcacgatcgatgggcgcgatggtcatatcat

SEQ ID NO: 319553 - DNA, 406 bp, Zea mays
ataaaaccagtgcaagcagaagcagcgcaatggcgagcagcaccatggccctctcctggacagccttcgccggcaaggcagtgaacgtgccgtcgtctctcttcggcgaggcccgcgtgacgatgcgcaagacggcggcgaaggcaaagccggcggcgagctccggcagcccgtggtacggccccgaccgcgtgctctacctgggcccgctgtccggcgcgcccccgagctacctgacgggcgagttcccgggcgactacggctgggataccgcggggctgtcggcggacccggagacgttcgccaagaaccgggagctggaggtcatccactcccgctgggccatgctgggcgcgttgggctgcgtgttcccggagctgctcgcccgcaacggcgtcaagttcgg

SEQ ID NO: 319554 - DNA, 398 bp, Zea mays
tcgtggacggcgatgcactacactacactacaccacacccacccgacgacgatcacacacgcagaagagcgagttcgttcgatcgtgaccgtgacgcaagaagctataagctagccaagacaggaataataatggcggcgtcaacgggggcgagcctactctgtcccggtgacgacgacgaccttcgcggcggcggcggcagcgggcggcgccgacgtgctgatcgtcgtgccgaggaaggcggtcgctgcgcgcgttatggttccccgtggctgatcgccagggcagatgcagcacactggcggtagccgcgcggtccatcaggccggtcacgccagctgagatctgcgacaagggcgtggacagcctgaaccaggccgatgaaaccagctcagacg

SEQ ID NO: 319555 - DNA, 336 bp, Zea mays
ttttctagggaatcgggaccaatctatcaacatgcttaacacaccattccgaatcattacgggaataaacgattatttatcttacaataaaccttaaacagaattattcctatcaaccacttctctcattaatctataaactcaagatactacagacacaaagaatagattatagtcagacagatgctcaatatcacatgcatgttcacaagatatagacactcatgactgtaatgcctactctttatatacaccacagtaatgatagttgcacaactcttattgatatacatatgaagaactttaatgtcactgtattctcctatggatctaatt

SEQ ID NO: 319556 - DNA, 386 bp, Zea mays
gctcgttgccctcgctctcctggctctcgctgcgagcgccacctccacgcatacaagcggcggctgcggctgccagccaccgccgccggttcatctaccgccgccggtgcatctgccacctccggttcacctgccacctccggtgcatctcccaccgccggtccacctgccgccgccggtccacctgccaccgccggtccatgtgccgccgccggttcatctgccgccgacaccatgccactaccctactcaaccgccccggcctcagcctcatccccagccacacccatgcccgtgccaacagccgcatccaagcccgtgccagctgcagggaacctgctgcgttggcagcaccccgatcctgggccagtgcgtcgagtttctga

SEQ ID NO: 319557 - DNA, 377 bp, Zea mays
gcgtccgaccgcagaggcagcaaagagaagtcatagcacggctgcacaggagcggccggacgagcgcaggcgccaagaaatcaccgcccgtcccggtccgtcggtatggtggcggcgatcgcggtggcgtcggcggggctcgggatgctggcgggcgtggccatggccaacaggtcgtcgtcgtccgacggcgccgcgcagtggaaggcccgggggtcccggcgctgcggtgggggcggcggaggcgcctccgcgctgcgaggcatgcggcgggtcggggcaaggaggagtgccgcctgtgcgcgcgctggtccgacgccggggcccggggaaaggagcagagccggttcgggttccggggcgtgcgcgggcacgcg

SEQ ID NO: 319558 - DNA, 299 bp, Zea mays
cgtccggtgaggcactacactacactacaccacagagacccggcgacaacacacacacgcgtaagagcgattgcgctcggaacgcgaacgggacgcaatactctgtgagctagccaagacaggaataatattggctgcgtcaccaggggcgagcctctctgttccggtgaccacgacgaccttcgcggcggcagcggccgcggccggcgccgacttgctgatcgtcgtgccgagtgagacatgcgctgctcgcggtatggttcccccgtgctgatgcgcagcgcgacgatgcagcacac

SEQ ID NO: 319559 - DNA, 344 bp, Zea mays
tccgcgggtcgccccacgccatctgagacatgcatgatcattgtgacggttgcgcgcatactgcaccatgttccagacggtctatcagccagacttggtagaagccaattatagagaaagcggcttgccttgcgtacgctctactatccagaagcagctcttgcctcgctcacttaccgaattatagcctgatgtctcatgagagcaggtgccgatctaagctcatacgctgtgatggcctgaactctcgagaccggatactgatgccctgaggctaacaatgatagttgttcgtacgggtggaacagtccacttaacagggcgccggcgactaccctataggc

SEQ ID NO: 319560 - DNA, 327 bp, Zea mays
gcgttgttctccatcacctcctccccgccttaaggggacatcgctgccgattcccaccggctatctacccgccatcagagccccatactcgcccaacctgaaatccttcacctactcacgcctgaatacctcatctcacctccaccactcctcacacgccttgtacttcgtcgacctaaccgcacccttccaatgacagggcgctagcgaagccgcgcatactccctgcatcttcaccgctcgtcaccctaaccgagcccttccaacgacgaagtcgctaccaaaacgccgctcatcctcctcacatcttcctcgctcctgcgccgc

SEQ ID NO: 319561 - DNA, 323 bp, Zea mays
gaccaacgcgtgctgcgatatgcattcatcaatgtgaccgctccgggcataccgttgcattttacaagacgttccacagctagaattgcgacaagtcatttacatagaaggtggcctcactggcgtacgccatatgcagcgatgtacgctctcaatgctcacgtccgaaactataatgcgtgtaatgacgagatctggggctacactgtgctggtacactgtgatggcccgaacgcacgagaccaggtaccattccctgggggtaacaatgctcgttctcaggccgggaggaacagtccacttatcaggggctcggagactac

SEQ ID NO: 319562 - DNA, 258 bp, Zea mays
acgcgtccgcggacgcgtgggttcctcctccaccgcgtcgcgccaaaaacctcggccgcaccaaaaacgtccatcgcggccgattcccaccgcctctgtagccggcatcagcggcccaaactcgcccggcctggaatcctgcaccgcgtcgcgccgaaaaccttatcggccggcaacaagccggacaagccttgggcttcgtcggcctaaccggaccctttcaatgaccgggcgctagccaaacccggcaatcttcct

SEQ ID NO: 319563 - DNA, 230 bp, Zea mays
attcccaccgtctctctaaccaccatcagcgccccagactcccccgccctgaaatcctccaccgcgtccagcctaaaacctcatctaccaccaccacgcctcacacgccttggtcttcgtctccctaaccgcacccttccaatgacagtgctctagccaatccgcgcatcctccctgcatcttcaccggtcgtcaccctaaccgcgcccttccaacgactaggtcgctac

SEQ ID NO: 319564 - DNA, 421 bp, Zea mays
cagttcttgaaccctacaggatccaactggcattcgcagcaggcatcttacctttatgacccgtgttcctgcaacaaccgtcagccctattacagcagttacctttggtgcatttgttggcacaaaacatcaaggcacaacaactacaacaacttgtgctaggaaaccttgctgcctactctcagcaacagcagtttcttccattcaaccaactggctgcattgaactctgctgcttatttgcaacaacaactaccattcagtcagctagctgctgcctacccccagcaatttcttccattcaaccaactggcagcattgaactctgctgcttatttacaacagcaacagctaccaccattcagccagctagctgatgtgagcccttgtgccttcttgacacatcaacagttgttgccgtt

SEQ ID NO: 319565 - DNA, 186 bp, Zea mays
ccacgacatgcgccgccaccgtctgcaccacgtgcaacacgaggtggaggaggaggctgccaccgtcccagagacgacagggagtatgggcatgaagcggtaccggttccacttccaccaccacgacgacgaggacgaggagaagaatatggctgcgagggaagcggtcctgcaagctgatgaaca

SEQ ID NO: 319566 - DNA, 324 bp, Zea mays
  unsure (1)..(324): unsure at all n locations
atcttggcctcgtcaatccaccaccaccgtcgtcgctgagctcctcctccggcttcgcttcgctgtcttgcctcctcctcggtcgaagaagaagaagaagaaaacatgtgtccgggatccgtggagtcgtcgtcggcggcggcggcgggcaagagcgtgtgcgtgatggacgccgcggggccgctgggccacgcgctcgtggaccgcctcctccggcgcgggtacaccgtccacgccgncacgtacgcccgcgaccgggaaggaggcgctgccnnnngctggcacggccgacagccggctgccggtggaggacgagcgggtgct

SEQ ID NO: 319567 - DNA, 258 bp, Zea mays
  unsure (1)..(258): unsure at all n locations
gcgtccgccgcccgtcgcctccagatacgtgccttcggcggaaaatcggtatcgagctcgctttggtcgagtgagtaacgcgcagcgactcctctcccaaccagattttgatggatttcgggcacgcgtggcacaggcacggatatgttagcggatcgggcggccggatcaccgncggcttgctccctctcctcatgattgggcgcgctcatatccctcttttttttttctgcgcacggagactaggttggctcttcg

SEQ ID NO: 319568 - DNA, 253 bp, Zea mays
ccggacgtctcacagcggagctacctttttcgtgcacaagatgaccaacggggaaggggtgctgggacgaggaacgctcctcacccatgccatcccagaccagaagcacgccatcgaggaggagaacctccccgagtgcacgctctacatgcacatccatcgacccaatatcaatcagcaggctctatgacctggacctcgctcgacggaacacaagatgctgcgcaaccacgccttcagttatccatgtcgt

SEQ ID NO: 319569 - DNA, 256 bp, Zea mays
tctcaatcggaggcttccttcagggttcctagctactgacttacgtaacctctacaccataaaactggattcggctgacggctaacgcagagggccatctccatactagacggtctacagcgactcggaccatggaccgcacggtcttaaccgatgcctctcggtccaaactggatcaccactcaggcgtatcttgcactgacgtcgtgattgacaacgacacctgcctataccggcctatggacctaaaaatcga

SEQ ID NO: 319570 - DNA, 433 bp, Zea mays
cgttctagacgcgagcgccggcctttttttttttttttttcaaccatgccgatctttccagttatccggcaaagtcaaacaaacttttattcattctagttacagtattacacagtaacaaaaaagaaaaaaatatatcatatacaaggagactaaattcaactgcaaatatatacaatatgtctatgtttgtatctgttatttttccagaaacaccagccttctccatatacagacattcccttccatacacaagctacagactctacagtcctggaaaaaaaacggtgcccagccacccaggagaaaatcacaaactcatgatcagatatacaggaaaggacagtcatgatctaaagctaaatccttgcaaagaaacatgatggattccatgtacagacctcttcgtatgtgtcgccactaactatactct

SEQ ID NO: 319571 - DNA, 304 bp, Zea mays
cgtccgggcccagcagcaagggcggcgccgacgccgaccccgaccccgatccggcgggcaccgtggagctggacctctcggcgctgccgggcggcgccgacgcgttcgacaaggcggcgcgctactgctacggcgccaacttcgagatcacgccgcgccgagccggccgtgctggccgcggcggcgggggcctacgcggagctcgtcctggccgaggtcctcgcggcgccccaggaccgcgcggaccaccgcgcgctgctcgagtccgtggtcgacgtgctgccctcgcccgccgacgcgcccg

SEQ ID NO: 319572 - DNA, 396 bp, Zea mays
gtcttccgccactactactgctcgtcgcactcgccgccggcgccgccgccggagacctgcgacgcgcactagacctctcggccagggcgtcagctgggccgggcgtgcttctccggagaatctaacactgggccgtcacgaagcgcaggtgcaggcccagatgaaggatgggctaggctgtaatgcaggagattgagttgtgctctagagtgtactcctcctacctgtgtttccctctctctctctctcttttgtctttgtctctctaaagtgtgtacttctattttcatttaattttggtgcatttggtacggtagttgtgacgtgagtatgtatgttcgtcagtgtattccgtacataataataataataataatatgttgcctctttacctgt

SEQ ID NO: 319573 - DNA, 417 bp, Zea mays
ggcaccattcgcactctcctatcaattcaccagcaaaaatttcccagcgccggcctcgcggcagaccggcctccgtatcactgcgcaaccgatggcttcctccccgtggctgcgcaccgccggtgccgcccctgtcccgccgccagaagcagcagcagctgctgctaccgccgccgccacccccgccccgacgtcggagcaacaccgggttaaggaggaaggaaacgctgccgccgcgactgtaccgaagcaggaggaggccaagctccacttgccgcgggacaacgactcagaagcagtaacccaagagcatggacaaaaaatcaatagatatcaagcaatccttgcagcccgtctgaaggctaagtttttctctaagaaggcttttgacagagggaacatttttgaatcagaaac

SEQ ID NO: 319574 - DNA, 411 bp, Zea mays
cgccgtcgactcctcttacggaactctctctatcatctactgcctgcctccttccctgtaaacccgcatgcgcagcagcaccactacggtttgctcaggccccgaaccccacccttggattgctctgattccgaggcggctgttacccgaagtttgcagtatggcggggtacccggaagacaaccagcacgagttgaacgggtacgacgaggaggtcgacgaagaggagggacaccccgggaggcgggtaggccgggatgggggctctgggtacgctgatgctgtcagagaggatgggaagggggcgggtggcgactcgttgggaaagatttttgtcggaagcgttgcttgggagacaactgaagaatcattctccaagcattttgagaagtatggggcaataactgattc

SEQ ID NO: 319575 - DNA, 229 bp, Zea mays
cgtccggtcgcctcgcatttaccactcactcactcactcgctctgcccttcaccccctctccttggtgctccttccatctcgatctcggactctccttcgcacgcatcgcaccgacggacgcagagcatggtcgcccgccgtcccaccacccgcgcgcggctcttggcgccgcatgccgctctcgcccttccgcgccgccggcggcttgccccggcgctgcccgcgcgc

SEQ ID NO: 319576 - DNA, 409 bp, Zea mays
gttctagatcgcgagggccgcccttttttttttgttgttttttctttttttttttttgtttctttttttttttttttgtttttttttttttaaatgaatgttgatgccggatgcctaaccaaatgggcaacctttttatagatcatcccttaacttagcttttctacatcccacattttgcagctacttttccataaccctttacattcctagggccaatttcctttggggtcaaatttccatgagggactagtgtactgttggcccccaaattatccattcctttacattaaggggcaatacctttgaaaaacggaaataaggcttttcttcaaaatgcctatgcccaaagagcttatacccacctagaagccgatccaagccccaaggcaatgtaacacgccttttt

SEQ ID NO: 319577 - DNA, 230 bp, Zea mays
ctctcatcctcatgcccttcgggcttatcccctggtctgtccctgtcgtactttcagaaaagtctgcatcctacttaccttctgccacctctttccatcctacacattatttgcttgcagtcactgatcttctccctctctcacccgagttcccttccactcctcccatccgaactctccctctccactcacctccctcactgtgctccctccatatctcccaaccactc

SEQ ID NO: 319578 - DNA, 170 bp, Zea mays
actcgtccggactagttctagatcgcgagccgccgcccttttttttttttttttaaagcctatacacgtgtcatcataacgttcattagactctaagtagcatataatacatctcttactatcttaaagtcactacttcaataaatcttacacaaaaaattgtcactgca

SEQ ID NO: 319579 - DNA, 272 bp, Zea mays
acctacattgcatacgatgcaggcccgctccacctggctccggggcttttcggccatggtcctacatattgcaccattgatatacgcacgttcgaccatagcttgaccactatctccgtcacctcctacacaccttacaactttgacaatctggtcaagtctctcatatttgtcaccaacaaacctacttacgtaccgtacgatctatacgacgccaccccgtcctacctcaacgtaattaacaacgaccacgtcgatgcatattaagatca

SEQ ID NO: 319580 - DNA, 449 bp, Zea mays
  unsure (1)..(449): unsure at all n locations
ccttgatgctgaagcctctggtttattgtcaccctctaaaggcggacaataaacctggggatacaaatactaggagccttgatgctgaagcctctgaaccttctccaaagcgtagaagagaatccagtatagaatcagagaggactaagagtatggatgtggaagagccgtcggcaagtcgaatgagggattcaacagttgctgcatctactgagaaaaatgctgctgatgtttcatcacatgctaaagagatcccacaaaacattcagccagcaaaggttactgatgatcactacaagagaagtgatggcgcacttgctgctgctagagcgcgagcactggcccgaaagaaaagcgaagaccagcaattgtgaagtacaaggcagaaaagtttaccgatccttgaggtacaatntcatgttntattcaataggatcgtgntaagatgt

SEQ ID NO: 319581 - DNA, 256 bp, Zea mays
ttctctgaagtagcttttctgcgcgcagcattcctagtatgtgggcctttaggttcatccaaactcaatttaagggcagcttttcctttggcctttgaggtgtttatgcttgcctcctgataatccttcttaattgcaccactggtggcagctgatgactttgatcttaacgatgtgcgacggacagattgagtttctgatggaattgaaggcgcacaagctgtggagcttgctgcttcagatccaaaattatttg

SEQ ID NO: 319582 - DNA, 301 bp, Zea mays
gttgtaacaccgccgcccatgcccgctcctcgatggcccttccccaccaggccacgacggtctccgtggaggccgcctttgcgttctgctcagagtaggtccacaccgacgggggcggctccaccttccgcttccccggcttctactcctccgcgtcctcctcggtccttgccaccgtcgcgtcgccgcctcagcaatccaatgtccccgatgaggcgctgaaggtttcgaaccagctgcctcgcataacatcaatagaaggggactgatggggagctcaccagtgtggccctgtttggcg

SEQ ID NO: 319583 - DNA, 419 bp, Zea mays
ctgtcactctctcttgtctccaagtttgtaaccctagccgccaagcttgaagctccaggcgtgctcgtgtagggccgcaggccatccgggctccggcttccagcatccaccaggcgtccttagaatacggtgcagcgagcagcaagtcgccgagcagccgagccaccgccgaacacagggcgccgccgagcagccgagccgccgccgagcgccgagtcttctctgtgtctatggcgtctccatgcaagtacacactacactggcaccgcgattgacagtcagaactttgattgcccgtccaataggtaccgagtgacttcggtacagacgacaaactttctccacacataccgcgccactccgccactcactgtgctgacggatggggtggtgctccccgtccacttcccggcagcttc

SEQ ID NO: 319584 - DNA, 424 bp, Zea mays
cgccgttgcgaggggtcgcctcgccgtatggaagtcagccaccgagactacatgggtggctctacaattctgggacgatcttgctattgtggcctctgagcatgttaagaagggtgaccggatatttgtttctggacggcttgtgtcagatactgttgatgaggggcctgagaagcggcatgtttactacaagcttgcagttcaacagttgaatttcatcgagtcccagccagttcgattatatgaaccagaggcaagccaggatgccctaggtggaaggcgtgctgattattttaactctatctctaattcaactgaggataagaatagggataatatgagctcatctcgatcaaccgaagagctgtggcaagtgttctttgccaatcctcttgactggtgggataacaggacaaattagaag

SEQ ID NO: 319585 - DNA, 437 bp, Zea mays
ggtgggttggcttctcctccccctccggttcgggttcgggttcgtgaggttctccggggttcggtttcgtgggtgagcggatcgagatggcggcgtcggatgttgagtaccgctgcttcgtcggcggcctcgcctgggccacggacgaccactccctccacaacgccttcagcacctacggcgaggtcctcgagtccaagatcatcctcgatcgggagacgcagaggtcccgcggcttcggcttcgtcaccttctccacggaggaggcgatgcggaacgccatcgagggcatgaacggcaaggagctggacggccgcaacatcaccgtcaacgaggcccagtcccgcggcggccgtggaggcggcggcggcggcgggtacggtggtggccgtggaggcggcggctacggcggtggcgggcgccgtgatggcggcggc

SEQ ID NO: 319586 - DNA, 312 bp, Zea mays
atgtttccacgcactcagcttttacctatcctttatacttgccatgattctctcgtttatctacaaactactatctttatctctacatccagacctatacgctttctattttaattcaacatattgatcattccctcccttatcctgtctatcattctctataatatatcctattaaatacccttttattttattcactttccaattacctttgtggttcaaccataaataatcaaaaactaacctctattactactatttaaactccacttactttttcctatatcttaatcaacaattcctccctcttta

SEQ ID NO: 319587 - DNA, 280 bp, Zea mays
gactagttctagatcgcgaggggcctgtccatggcgtccacgttcgtgctacgtagtgcccatggtgctgtgcagtgattttttaccttttctttatgttggccatgattctcttgtttagctacaaagtagggtcgtgtatctacagccagacctgtgggctgtttattttagttcaacatgtggatgattccctcactgatgggggctgttgttgtttgtaatatgtgctattgaatagccttttattttatgaactggccaatggcctttgtggttc

SEQ ID NO: 319588 - DNA, 269 bp, Zea mays
  unsure (1)..(269): unsure at all n locations
acctttaactgatcnatggccttccattctctcctctccgtccttcatcttctgttccaccccctacatacttccgtctctataccgtccaccactaatgctcccttacttcacataaccatctccatccctccatccaatcaaagttcctacattcaactttttttctccttcaaactatccctctattacctcaactgcacactgcccttctactattacttctacccacattacctttcatacccatattactcctattacttcat

SEQ ID NO: 319589 - DNA, 233 bp, Zea mays
gccgatgatcttcgagaccctctccgattagaactcggcgaaaaacaccgtcccctggggcctcatcatcgcgctgccgcacgcccgccaccatcgattttgtccacaacccgaaggcctacaacaagccctgccgcccctagatctcttcttactactccgccggctccgaccacagccaccatcagcaccacggtcgccaaccgccgttgccacggcgccacaaactgcac

SEQ ID NO: 319590 - DNA, 180 bp, Zea mays
ttccagttgttaaatcacctctatggccttgattcaagaggacatcttaaagttattctatcaacaaatcttatttacagtcttgatccatccttgcttctcccatctctaattgacagaaagattgaattccctttacctcatgtcaatactattccactcatcttccatatacacaca

SEQ ID NO: 319591 - DNA, 437 bp, Zea mays
attttgacaactttccataattcactatcaactgcttctaaaggaagttgaaatgcatgtgtcatggtaatgctgataacaatttggttgtttggaaataagaaattgaagtaccatattcgtagcaatttatatttcgtcgcactattttcttcattattgatgatgatggtgctgtacagttactatgaacaactacacagggtggtcacagatgaatttaaggacatcggatatgatctgtacaaaaagactcttttgagttaatgccatagcccgtagtgcaattaggtgtacctgatcgatatctgctgcaatgcacatcaaactgcaatgtgtggtacaggcctaagcatgggcagttaattcaagatttttaagatcaggacgaactaatacagatgcatgtgtgagaagtttcttggagaaattaaaat

SEQ ID NO: 319592 - DNA, 199 bp, Zea mays
  unsure (1)..(199): unsure at all n locations
tccgcgacaacaagcctcctgggtcgtcatcctgctgcggtgggcgtcgccaaggacgctcttcatcgcgggtggccgacgttcctgtctggaccgcgccgggtcgtcggctctctgcttgctgaccagctacgggttggaatgatntgtctcgctcgtcgtgtctcgtgttcgtgtcctcactcgtcttgggtgcacc

SEQ ID NO: 319593 - DNA, 178 bp, Zea mays
aaccgcacaccgcagcggcaagaaaccaccgatagcccaaccgcacaagcgggacagagagcagagatccagggacatccgccgggccccccgaagcaaccacgcaccccacggccgatctcgcctggcaccccgccgacgccgcctaaagctccctatgcccactcccccgcacaca

SEQ ID NO: 319594 - DNA, 240 bp, Zea mays
cgcgcacgcacgcaacgcacacactcaacttcaacagctaatcctctcccacaagacaggacatggctggggaggaggccaagaaggtggaggtggaggtcaccaaggagcccgaggcggcggctaaggaggacgtagccgatgacaaggccgtcatcccctctaccgacccgcctccgtcgccgccgtcggccgacgactccaaggccctggccattgtctagaaagttgcatatgatc

SEQ ID NO: 319595 - DNA, 378 bp, Zea mays
gagttccgtgctcttcttctccctccttctatctctatctctgcgcgcgagctcgccgctgctctccctgctctcccatggccgcgcccaactccgtgcgctcgccggatcccctgctcggcttctactgccgttccccgtgctcgcgttatctccctcctctctgccgcatctcgctgagtccctctgtttcctcccatggcacggttttccttgcatgcttttcgtggcacccattttcttttctctaccgttatctcttttcatgttcattcttttatctttccttatattgtgtttttgctctctttttcatttatattttttttttttatttttttatcttatatttttttttatttttattttatttttttt

SEQ ID NO: 319596 - DNA, 51 bp, Zea mays
cttgtacttcttcagctttgtccttgattttgtggatggttggtttgcacg

SEQ ID NO: 319597 - DNA, 171 bp, Zea mays
aaaaacacaccaacaaaaacaaactccaccttccacttccccaacttctactcctccacatcctcctctgaccttgccaccatcacatcaccgcctcaacaatccaatgtccccgatgaggcgctgaatgtttcgaaccaactgcctcgcataacatcaatagaacgggac

SEQ ID NO: 319598 - DNA, 424 bp, Zea mays
ccagctaagaacaggtcttcgtctcaattatggaaggcaaaacagggcagctcaggtgctgtttcgtcggcatcgtgctcgtcctgggtcttgtccttgagcagtcccagcaggctgaagctagaggcaaatggtgctgcgaaaccgccaccggaaaataccattttaatcgctgcgttgactcgggttgggtcgacaatattgggttctgtgcgagtaatgccggttgcatcattatggaggacagatgtggaggtcgttggccagtgcctgcttgtgattctctttttctgtatgatattgttttatttttatcaagtacttttattttattaatttgtttttatattctttatttttaattatttttttttttttatcttttatttttttatttttttttttgttttctttatattttttt

SEQ ID NO: 319599 - DNA, 379 bp, Zea mays
gcgtccggagcaccatcgacatggacagcacgattctacaccgaacacatccgctacctattaccaggacatcatgaggaggaactaaccccatcatggatactctgcacaatgccaaaacaaaacgctcatcgtcaactgttccttctctaacaccactaacctagtcttacccatgctctaactttccactgatgctgatgctattacgtgcacctgatctctaccttcttataactctaactaactattctatacttcttatcgagaatgttcacttgagctaacatatatcttacaactatccataattcataatattttaaagttactcctactaaccacttctctaaccactcaactcaatctactgtaaaac

SEQ ID NO: 319600 - DNA, 135 bp, Zea mays
  unsure (1)..(135): unsure at all n locations
cgtgaaaaaaaaggcggcttagagcataangtttaaaaaaaaaacacacacgcacacacaaagggcacttttcaaatcgacaaaggcgaaaggttcgcttcttgtggcatctcgctttccttcgagtgccatggc

SEQ ID NO: 319601 - DNA, 411 bp, Zea mays
caaccgaatgatcgtagcctacacttatccttctaatgctatctatatatgcttgatggtgtgtagggttgtctccagaaagcttgcttgttacttatatcccacacacttgcgcgcacgcaacccggcctttgtccctctcttgcctctcactgctgctgcccctcgctattcttctctgatcgatttctgtcatggcttcattctggttcagctgccgctgtagctgtatgacccatgtttgccgcagatgacccatgtgggactattcgggggccttctttcccatatttagttgttgtttgtttagtttgttttttttttgtcttttttttattttattctttttttttattgatttttctttttttttgtttttttttgtatttttttttattttatttatttttt

SEQ ID NO: 319602 - DNA, 432 bp, Zea mays
ctcactggaatctttttttctcaatgttctctctgtcgaagctttgtaccctttaaaggttcatttggctattttcttggttcttgactaatttatattttctatcttttctttttttttttattctcattattttttatttatttttaattatttttatattattttttcttatttaatttattcttatttttattttttatttattattttttatatttatttttttttctttatattctatattttttatttttttttttttttttatttttttcatatattatatattatttttcttctatttttataattttatttattctatatttttttatttatatttttttttttttctattttttatttattttttttattatcattatttttattttatttattttatttttattattttttttatatatt

SEQ ID NO: 319603 - DNA, 250 bp, Zea mays
aaatttacaattccctcaatatatatactaatactttcattcactttcctaaaattccctatacatttaattctccaacaatatatcattctttcaactataatattctttttccacatacaaatccattcctcaatcacaacattcctcatattgttatctacacatacatctctttatactccttatacatctaattatcataataatattcttaaataataaaatccaattatgaataataaaacaa

SEQ ID NO: 319604 - DNA, 295 bp, Zea mays
ctagttctagatctgcttgtgccttgattagattgtttggaaggggttgcttgaaaacgcggataaagagagattgaggaggttcattagactaattccccctgtttacccatacttcgcatgtaaagcttatattgtcgttccctttattcaaattctatatccattgcattctttctcattatattatacatacaatgatcattttctatttacactattcattactatttctcaatgtcttgtttcctgatattgttatctacacttacttctttttatacccttttttatt

SEQ ID NO: 319605 - DNA, 442 bp, Zea mays
agcacgaggcgtgcaaagtattcctgactatacaacgcaatacacaaatgacaatgcagtgcagttggccgagtcgctcaagaccgcactgcttgttcttggctacacatctaccggcctatccttattcgcggcttttgggctgctgttgctagcccagcagattaactctgagaacaaatcggagtaactgacaggcactcgctgaagttgtgtaccttatgccttgtccttctatgctccaatgaggcatatgttcatagttatattcattctcttgtacctttttttgtattatttgttgcatttttctttttatatttattttttctcttttttttttttttttacttttatttatttttttttatttcatatatatttttatttttttttattttattttttttatgttttttttttttttttttctattattttt

SEQ ID NO: 319606 - DNA, 189 bp, Zea mays
gtctgtagtctctattttatatagatgctaacaaccttgagatacagatcgcctacaggggcttttggggcataagaccatacatcaccgaaaccgaactcgtcctccacacggttgcttagccatctcggttgtttagtattttcagtttttttttactgttcttttttgattttaatttatttttta

SEQ ID NO: 319607 - DNA, 151 bp, Zea mays
ccgaatccaaaccatacaagcaaggaatcccccgatggctcatcgggttctcctcctgctctctctcgcgtcggccgccgcggttgccgccgccgtcgacgcggaggacccgctgatccgtgcaggtggttcccggtggagatgacaatta

SEQ ID NO: 319608 - DNA, 119 bp, Zea mays
taccttctcacggtatcacaagttggaaaggttataaggttgaacaagtgactgtctgtcctttattggcgatgtactattacaaccaataattgtagatttatccctcaataaaatta

SEQ ID NO: 319609 - DNA, 315 bp, Zea mays
ctgcaaactacatctaatcctaagaatttctccactgacacagtgaaccaagaggcacgccacacttcctgtcacattgatctcccgtttacttaactattgccctgacaccaacatttcaaacgagccgatattcttgcactcaatacatcattccttagtaacctcacagcctcttactttctcaactaccatatttcacactctcttccaacacaaaccggattcttcaacacatatcatttccaaacgacctatctcactcagaatgtcatgctcatctatcctacaggctccatcatcaacctgaactac

SEQ ID NO: 319610 - DNA, 442 bp, Zea mays
gtcatcgtcgcatttactcgccgttctttcgtagactcgttcatcgcttcgtcctctggtccttccaaaattccaaatcccattctccctgctcgtgcagttgagcagtccatcaaccggcactccagcttctctagcatcaagcgtgcgagctactgctttcagactgtatagccatcttagcagttacaatattccttcattcttttgttcatggtctcatctttatatgtctttttttctttttttttttttttttttttttttattctttttttttatatttttttttttttatttttttttatatttattttattttttttttctatttatctattttttttattttttttaattttttttttttttttatttttttatattttatattatttattatttttatttttttattattttttattattatttatttttt

SEQ ID NO: 319611 - DNA, 438 bp, Zea mays
agggatccttggtttcttttgaagattttgcactacttcttatgtgcttcttaatgcgggggatagaggtatgttgttggtccaaccattgcatgatgtttactatggtcaaattttttttatctattatatactgtgtttattttctattttttttttcttttttttttattcttttttatattcttatttttttttttttctattttttttttatttttttattttttttttttttcttatttctttttttttttatttttaatttactatattattttaatatttttttttttcttttgatttatctttttttttttttttttatttattttttcttttttttttttttttttctttttatttttattttattttatttttctttatttttttttttttcattattttttcttttttattttttttttttttttt

SEQ ID NO: 319612 - DNA, 249 bp, Zea mays
  unsure (1)..(249): unsure at all n locations
ccgttactttagattagaagcaaagggaagcttagcaagaatcgttcgagtcgagaacatggtgcanntttacatgtgcctttggcacctttctctggcgcctccaccaccacaaccttcgtctcgtcttctataaatccctaccccttctagtcttcccttctccaccttcctccttgtttaaacccttatcctctcttcccgttaggtctcccccatctccccttctatttcttatgactctccttc

SEQ ID NO: 319613 - DNA, 60 bp, Zea mays
accgcgatcttttcgccttcgtctcttcgtcctctttctccggcttctccgacacgggcc

SEQ ID NO: 319614 - DNA, 129 bp, Zea mays
gcccgtgcacaggttttcgcccgccgttacctgcggctcggtcggggtcctcataaggctccttagaacaatcgcaggacatccaagagctcagcaacgctttctagcaagaaacccgaccctaccaaa

SEQ ID NO: 319615 - DNA, 416 bp, Zea mays
ctcgcgactgctctcatctgttcccgcttaggattcgtttacaatggcccgtgtgtatgtcggcaacttggatgcacgcgtgacttccggggaactcgaagatgagttccgtgtgtttggagttctgctaagtgttttgggttgctcttataccatctggttttgcatttattgtttttgactactttttttattctttttttttctttttttatttttttttttttgttatttttctttttgtttattatttttctatttttttctattttttttattttttttttttttttttttttttatatttttatgtttttttttttttttttttttttttttttatttatttttatattttttttatttttttttttttttatttatttatttctttttttttttttatattttttttt

SEQ ID NO: 319616 - DNA, 135 bp, Zea mays
cccgatcttttcgccttcttctcttcgtccgctttctccggcttctccgacacgggccgcggcttctacaaggtgtactgtgacgtcttctacaaggtattcgcgcaggagcttgcctatgctcgccggatgggg

SEQ ID NO: 319617 - DNA, 288 bp, Zea mays
actcatccgaaggattatactgctccgctctcctttactcccatttttcatccttgtcgacctgttccattttaagccttcttagaatattctccactctcactccttcctacttaatctcttatcctttaacctcaaactctccattaactattagctccacgtttttttccatctatctttatctattttatattaccacacttctacgatttctactctctacattctctatcaactatcaatattatttatcttacttttactaattatatcttttcaatttca

SEQ ID NO: 319618 - DNA, 244 bp, Zea mays
ttttttttttttttttctttttttttttttttttttcttttcctttttttctttttttttttttcttttttttctttttcttttttttttttttttttttttttttttttttttttttttttttttttttttttttttttttcttttttttttttttttttttttttttttttttttctttttctttttttttcttttttttttttttttttttctttttttttttttcttttttttttttttt

SEQ ID NO: 319619 - DNA, 301 bp, Zea mays
cgtcgagcttgcaactccttacgccttttacactcaacagtcatggtgttcatgttcagggagcatcagcaacacgaggaggaggaggtgcaagggaaggtcgtccaagaagaagtgcatgtttttcaataatacttgtttctttttcctttttatttattttttattattatttatatttcctatttatttttttaattttttttttaattttttttcttttttattttttttttttttattttttttttttttttattttttttattttattttttttttttatatttatttttttatt

SEQ ID NO: 319620 - DNA, 78 bp, Zea mays
cacgcgtccgctacctagcaacgcgcagtaagcagcgtgtgcaaagctactagcgcccggctagcttggccatgtaca

SEQ ID NO: 319621 - DNA, 421 bp, Zea mays
agcaaccggtccagcactttcacgctcagctccagcaatggctgcctccaccatggcgatctcctccacggcgatggccggcacccccatcaaggtgggctccttcggcgagggccgcatcaccatgcgcaagaccgtgggcaagcccaaggtggcggcgtccggcagcccctggtacggccccgaccgcgtcaagtacctcggccccttctccggcgagcccccgagctacctcaccggcgagttccccggcgactacggctgggacaccgccgggctgtccgccgaccccgagaccttcgccaagaaccgcgagctggaggtgatccactcccgctgggccatgctcggcgcgctcggctgcgtcttccccgagctgctctcccgcaacggcgtcaagttcggcgaggccgtctggttc

SEQ ID NO: 319622 - DNA, 63 bp, Zea mays
tcccgacccacgcagtctcactagccggtctccgttctacagagctttcttttcctacacgat

SEQ ID NO: 319623 - DNA, 355 bp, Zea mays
  unsure (1)..(355): unsure at all n locations
cgacgctgggcgacctgggctcgggggcgccggcgacgagccgagctggacgcctgctccgggatcgacaggggaaagggaaggtgaccagccggatcgctaggagctgcagctcgatccggcgggcccatggggggacacctggtgtccatgctccggtggccgccgaacctgggcctgcccatnctggccgtgctgctccccgcgccggccgctcacctccgggtccaggtccaggattggcggcagtggcagtggcagcggtcgcgggccgagcagctggacgcgaacgcgcggcggttgacccagctcgtgcggaacgtttccgtcctggtggacgccgctctgtggggcg

SEQ ID NO: 319624 - DNA, 399 bp, Zea mays
  unsure (1)..(399): unsure at all n locations
ctggaaccgtccctcgttcgtaatctttccgcttcggttcgcaatttctggtcaaggtgggggccaattgggaccaacggcaaacttggcagagaaaggagaaaaggccggaagccggccgggatcggaaaatgggcccgaaaaaccccgggagggaccagaaggaggaggagaaggagtggtggctgaaggatggaggcttgaaggaaagcccgggccgaacttcaggatgcgtgattcgacagagacgatgacacgatgaggacggacggcgacgcgtcggttcgncgcgctccttccagtcccataagtggccgcagagctacagggaaacaactgatacttacacaatcgctgcatcaccgagctttgggtacttgggcccttctacaagcaaat

SEQ ID NO: 319625 - DNA, 226 bp, Zea mays
ccaaaagtacggtagaaaatgatattttatcgttgtagtcgagtatacgggaaggatctctggggaaacactgtacagagtcgacatctaagacggaagagaacgctgacctggcacgtgagtcggacatatggagagaaatctaagcgtaacccctcaataccgtctaaaggctcatctgtgtgcattctgccatgtcatgtcctgacatgtcgccctatatatg

SEQ ID NO: 319626 - DNA, 514 bp, Zea mays
  unsure (1)..(514): unsure at all n locations
attcccgggctcgactccacgccgtctcgctgctcacgctctctctaatattcgttcaacgttggctccacnnttccaattattagtcagatgacaaaatgtggataggagggtgaaaagtagcgtattagaaaatgggatattttnnatggttgtanngtggggtatttaggggaagggggatttagggggtaaaccgcctgtnnacagagtggcagatatttaggggggaagaagaacccgctgacgtgtgcacgtnngagtgggatattagggagaagaaatcttaggggtaaccccgcttaagaccagtctaaaaggctcatnnctgtgtgtatatctgtcanntgtcatgtcnnatgtcatgtgtgtctggtattatgnaatggcttgcgtcgtcgtaaatgtaatggtcgtggaccaatataatattgcgggtgttgcacctttcaacgtaaccttactaagtaccttgctatttgcgatataatatgtacctttagttataataatt

SEQ ID NO: 319627 - DNA, 302 bp, Zea mays
cccaagtgtttgggttgagaagaagaattgtacttccgtgcagcgtacaccccgtctgcgatgaaatgttgacactagtatcatgaacatatccccagtctgggctaactatgggacggctaattggtcacatgctatggaagacgactgggatttatctacaagtgatgctgatggactaagcttagatgcatgtatcaacctagtgccaggatatacgatgctcaccaagtggtcgttaattaacaacactaacttactgtcattccaggttgcaattctgatctgttgcggatcgtgct

SEQ ID NO: 319628 - DNA, 420 bp, Zea mays
  unsure (1)..(420): unsure at all n locations
aggcttccggcaaacattttgggttccttgggtaagggaaccggccaagatggggttccaccggcacaagccttggccggggttattcctattggctttgggccggaaccaagcagaaggcctgtggtgatgatggccttgggacataacttccagggcaggaagaaggcccagaagacgaactcaaaggttcaagaattcaccttgcaatgtgggactttggtcagtgtgatgttaaaagatgcactggtcgtaaactttcaagatttgggcttttgaaggagttgagagtgaccatnggttctgcgtggtgttgttctcagccctgttggaacacagtgtgtatccaaggaagatcatcctattgtgcaaagaaaaggattggctgtggttgattgttcctgggcacgtttaagtgat

SEQ ID NO: 319629 - DNA, 410 bp, Zea mays
cagattatgatttctgtgcacatttctttctaacacactggctattccatcagggtgggttactagaaccaaccatgggattttaccgacccaatgcctttcctccactacttaacaaatttgactcaacatgctcaacaagttcacaacgcattatttaacattctttatatgcaccgctcgcatacttaacctatccactaattgtatcctaagtctcctatactattgaaacaccattcttaattgcttcaaaacttccaatgattgatgcctgatacttcagtgtctccacaatcatcaacctctactggttctttggttacacgctaagacactagatctttaacgccttctgcaaataacatactttacaatgatccgacgcacatattctacctgtcacattc

SEQ ID NO: 319630 - DNA, 343 bp, Zea mays
cacactcgtagagagaaggaaaaatatccccaaaccctagctcccgatctcgatggcgaaccctcgcgtcttcttcgacatgaccgtcggcggcgccccggcgggccggatcgtgatggagctgtacgccaacgaggtgcccaagaccgcggagaacttccgcgcgctgtgcacgggcgagaagggcgtgggcaagtccgggaagccgctccactacaagggctccaccttccaccgcgtcatccccgagttcatgtgccagggcggcgacttcacccgcggcaacggcaccggcggcgagtccatctacggcgagaagttccccgacgagaagttcgtgcgc

SEQ ID NO: 319631 - DNA, 186 bp, Zea mays
cactcattcgttgtacgatataatttcacaactaatatattttcacccttccttcatttctaatgggggtggtttttatgccacatcggcatgatatatactaaatctcacttgctacactaatcctccccttaacttcgtaatcaacagactaaataacagctcttacaccatctgatactagat

SEQ ID NO: 319632 - DNA, 202 bp, Zea mays
ctgaactactcatgcgatggccatgagagctctcccgctttctttttccaggagctgctcgtttggagctgaggataccatgcccagctgcgggggccccagatcattgagagcttattcgaagggatactaagacggctacaagcagtccctcttcagaagcatcaccgaggcgctatacttctcataggtccggtcggag

SEQ ID NO: 319633 - DNA, 399 bp, Zea mays
gttctagatcgctagcgctgactttccttctggttaaggccacaaggatcccggactgttttggttcaatgtgtgtctgtactgacctgtacaagcttatctggccagaatactggctgcctacatcatgcacacccatcacaggccgtggccacaacccatccaataatctctcatgagtacagtgtctgaagcatcatccaatatcttcagaaatatcatgaatagatgatgttcatgtaactatagtcataggacaaggcaaggcctgtttggttgcatcacgcagatggaagcaccttcttgacgatctcatcactgagcgaggcgatctgagcgtagagcgccttgacagactcctacttctgcgcctcgacgttggctagcgcctatacgagc

SEQ ID NO: 319634 - DNA, 75 bp, Zea mays
gttctagatcgcgagcggcccgtcttaaaggtcccagcttaactaccccttccttccaaggtcttacttttttat

SEQ ID NO: 319635 - DNA, 419 bp, Zea mays
  unsure (1)..(419): unsure at all n locations
ccgatcacggtaactggatccggtgccttgggttccggataaattggccttcaaccgtacttcgcgggtggttcttcccggggcttggggcctggcccttttttgaaaccttctttcccggttccaaccaccttcagagaggattaaaagaattagtgccccaaattaaagggaatactgggctggaatggcagcaaagatctattgaattcagttccattatacatagacatcagtcgataaaatcatctttggcttgaacgtatgcctgcattggatgaagcaaattatttggtgaagagagctgcttctacacaggctgcagtttcatctgcaaattctgctcctgcagtcacttctggaggcccacttaagcttgcaaatggcgtatcanagccaccaccagctcctttagctga

SEQ ID NO: 319636 - DNA, 423 bp, Zea mays
  unsure (1)..(423): unsure at all n locations
agctcgtcccgaactcgaacaagacagtcaaggcgtcgatgctggacgaggtgatcgactacctgaagcagctgcaggcgcaggtgcagctgatgagccggatgggaagcatgatgatgcccatggcgatgccgcagctccagatgtcgatgatggcccagatggcacagatggcgcagatggcgcagatggcccagatgaacatgggctccctcggccagccgggctacgcaggcctcacgccgcccatgatgcacccgccccccttcgtccccgtgtcctgggacaccaccgncaccgtcaccaccttcctcgccccgcaggccggcagcggcacggtgccagcggacgccttctacgccttcctagcttgccaagcgcagcagaacgggcagcagcaaccgggtagcatggaggcgtaca

SEQ ID NO: 319637 - DNA, 76 bp, Zea mays
agcttgagcacgcctcacgttggttagttcagctcacaaggcggtccgccacgtggcggaggacctgcggtatgag

SEQ ID NO: 319638 - DNA, 155 bp, Zea mays
gcgagcttctgcataccttctctagtttattctacgccacagtagtcgacaccgtgggcgagtacctcccatggccgctggtatcgtggcctgtggtgagccggatgttacgatggggttaggggatggacactagcctgaacgaggaggcgatg

SEQ ID NO: 319639 - DNA, 399 bp, Zea mays
  unsure (1)..(399): unsure at all n locations
tcgctggaatcagctgctagctatacccttggcacaactgccggcctatgtggaaatttgatcgggtcctttttgggccccacaattcaataccatggggtctccagtgtcgcaaaaagggggtgggaagtaaatggtccagatataaccttaaaatgaactttattgcaaactttaaacctatggtgtgaaaaaggctctaagctgaatgcttactataaggtggtttggaaacaaaggaatttcccgcccaggcgcacccttagcanatgaacagccttttttcccctctagatgactattatgtcagctgtaaatgtangcactattggggtggcacttgtcttgcttcacagggcgcatgtctgaacctgctcggtgtcaggggcccaaaccatg

SEQ ID NO: 319640 - DNA, 284 bp, Zea mays
tcacacaagcacgctatcgtcgcacgggcgctgaacacagactcaccaagcggcactgccaatggcttactaccacgacgtggactactgctctgaggaggcgaagtcggaggtcacagacggttatggacctcacggaagcagtgtacagaagtacgtactcaatgagaaattcacagaggtcgacactgcctgacgcgccggggtcgaccaccaccacctctaccatggtcaacacgacagtcacgggttcatacagcgcgagaacacggtcgttgaggaca

SEQ ID NO: 319641 - DNA, 212 bp, Zea mays
ctcggtctcggtattcccgggattcgaataattttgctacttacctggatatatgttacgtatagatatatagtaaagggcggttattatggcacaaattcgtagggtgtaggtacaggttttgaatttgacatttgatgaacactgtataaaaaccgacttttctatattccaaacgaacatcctaatcagatagacccatccttctcgcc

SEQ ID NO: 319642 - DNA, 347 bp, Zea mays
  unsure (1)..(347): unsure at all n locations
cccgcgtccgatccaggtctggtatcagggaaatccatcgcttgctccncatccctgatcgtcagaggggaattttaaagaacaccgattcctacggcaactagaagccatggagcacaaggacgctggaagccaagcccgcaccggacccatgctatgcatgaataactgccgatgcttcaatcgctcagcgaccatgaacatgagctccaagtgccacaaggagatgataacgaaccaggatcacgccaagctggctgcctcctctatcgacagcctcgtgaacggcatcgactccgtcatggagccggttgttgctggcagcaacacggtagtaactgttgccc

SEQ ID NO: 319643 - DNA, 121 bp, Zea mays
  unsure (1)..(121): unsure at all n locations
ntccgaggtcctatcctactacccttcgcccttttcgacgcgtgtcctactgtgcgtcctagcagggcagacgagatctgagaagctccaagggcagcatgctgccggttcgcgtagctac

SEQ ID NO: 319644 - DNA, 422 bp, Zea mays
  unsure (1)..(422): unsure at all n locations
cttagaacggggagacgtctaactgatttagtaaaagtgggcagcatcgtgatgccaacttacccccctgccatggttttattggtcctctgcttgtttctcgttttccttgggagtcagcttctctgttttatgtggtcgcacacggccttatttgtagtattacaccacagaagctggctgacccccactgacggagaggtgattgatgcaagcattgtgtatgatccttggacaagggaatcgcgggggtttggttttgtcaccatggctgctactaaggaggcagatcactgcatcaaatatctggattgttctgtgttgcaagtactctacacagaacattttattgttttgtcttcaccaccgagaatccgagatcgcctcccatagcctncacatccataaggtcctgcttgact

SEQ ID NO: 319645 - DNA, 163 bp, Zea mays
tcatgttgcatatgtacaagtacatgtatcttcttcaagagtcaagactagctgtaattgagctgatcatacttggtgttgctgcagttcaaaaaacacaactgagacgacgactaaacgctggcgctcctgtgtggaacgacaacaaaaaaggtcactgcgg

SEQ ID NO: 319646 - DNA, 355 bp, Zea mays
gcggcgcattccatcttgatcggctgcatctacctctaagactcgttatccagataaccggttggctttaacaaatggcagacgagacttggaaaaatgagagtatactggagtgctacactcataaataatgcgggtcaccaactccatgttatctgaactttccacaggaattccccctatctatagctgccgatgccgtactcgtggtctatcggacattgagagcgactaggcgtacaagctccactactagtgcatacaccgcgatggcacagtctaatcagagcccgaatcgtacttagcgactaactcttagagctcaggggttgaatctacctgcgcttatggttct

SEQ ID NO: 319647 - DNA, 386 bp, Zea mays
ccacgcgggcgaagccagaatcgctctcgagatttaatgtagagagacgggggacgacgacagcgtttgggcccgctaactgcatcgctcgacggtagctgacgtcactcatacccgtggaattttcaagcttagatggtggctcatctgcctgatccgagctctgctgctttttcttaggccgccgcactgtatcacaactatcacagcacctacgtgttcacaagtctacgcatttagactaccaatacactacattggactatgcacaactaggacgcatccatcaaaccggcacatggatccatactactcgaactatagaaaccacgtgccttacccatactatgctcctgccagatggcaaatcccatccgggcatgcac

SEQ ID NO: 319648 - DNA, 293 bp, Zea mays
caaaaaagtagtaataaattaaaataataattcccgcctaaactatctgatagtttggccagtttaataaccgaccataagcaaccattgggggcccctggataaactgatactttgtattgtatttacaacaaaataatacgcttgataagcatctatgtaattttactcggtaaatctggcttgatttgctgtttggcatctgtcgagcttaacattatttttaatccaaaggatgccaaacgtgtggtgaatgaacggtaaaaactatcagatagttgaggcgggaattt

SEQ ID NO: 319649 - DNA, 437 bp, Zea mays
caaacatagaagcaggatcaactgcgtgtgagcctcagccaaaaaaagtaaaaaataataataatgtttgtgcttcaatttctgaattctgataaaaaatatatcgactagtgcatatagaagtactcactcagtcctaaaataaaattagttttatcttttagttgatttatacataattaatgtatttgttttacgtacatgtctagatttattatcgtctatttgaacatagaaataaaaatcgaaagctaaaacgactaatattttgggataatattttgggacgggtgaagtatcaaatatttactgcaagatttgagtttgggaggaggcgtcgatgagaaaccgtccaaagtggaatagattttactataatctgacagtcaacttaattcatttcttcgagggcatctgcacgttagaaattgatgtta

SEQ ID NO: 319650 - DNA, 419 bp, Zea mays
ctatagcaaccggtccaacactttcacgctcaggcgctcagctctagcaatggctgcctccaccatggcgatctcctccacggcgatggccggtacccccatcaaggtgggctccttcggcgagggccgcatcaccatgcgcaagaccgtgggcaagcccaaggtggcggcgtccggcagcccctggtacggccccgaccgcgtcaagtacctcggccccttctccggcgagcccccgagctacctcaccggcgagttccccggcgactacggctgggacaccgtcgggctgtccgccgaccccgagaccttcgccaagaaccgcgagctggaggtgatccactcccgctgggccatgctcggcgcgctcggctgcgtcttccccgagctgctctcccgcaacggcgtcaagttcggcg

SEQ ID NO: 319651 - DNA, 361 bp, Zea mays
ccgggccgacccactcgtccgcacgcgccagagtgcactaccccatcaggttcacattcaccaccggccgcaccctccaccagcttcggatccttccaattgatgctactctcccgacagcatgcacgcttcctactaatccgcctcgccttcctctgccagccgagaacgccccgaagagtcacggcccacacgccagccgctaaagacctgccgtacaccgacgccgccgacactactgggacgtccactcgaaacgcggagactaaccccaagtacaacaactaccacaacgcgaccctcacgacgtaaatgctgcatcaccagctgaccggcccgatcgacaacgagatgaccatca

SEQ ID NO: 319652 - DNA, 314 bp, Zea mays
catcttcctcgatctccctagctcgctctccaatctcccatttctctctctctctctcgtcttcggcatccatccatccatcccgtcgtcgtgatagatggcggcaggccaaccgtccgtggagatgacgacgcaccaggggccgccagctgccacctattctccggccagggatggcggcggcggcggcggaagaacccccaaggagaagaaaaagccgcggggatcgacaaccggctttccaatcagggcgacccggaacgccaagggggggtactccgccttcaccaacgtaccggccatggccggggccg

SEQ ID NO: 319653 - DNA, 398 bp, Zea mays
  unsure (1)..(398): unsure at all n locations
cacatcccagtcatccgtcacaagctagatgccgcgctctgaccgtatgaccaggcttgtcccccagcagctgctcgtggtggtcgtcggagcagcagccatcaccgtcgcaacggcatcggcggcgcacgtggactccttcagctacccgaccttcgacgccaccacgacgcaggacctcgtggcggcaacaaacacctccatcctgacgtcggcctccctcctcttcggccacgacgccgacttcaacttcaaccgcaccgagggcttcatcctgctctcgcgcaccgtcgacgtctggcgcgccggccccggcggcgggccggcgcgcgaggcctncttcaacaccagcttcgcgctgagcggcgccgcgcccgtcgcgtacgtcgtactccgcg

SEQ ID NO: 319654 - DNA, 336 bp, Zea mays
cgcataccagtcattcggcactagctatatgccgcgctatgaccgcatgacgaggcgggtcccaaagcaactgctcgtggtgaccgtcggagcagctgctatcaccatcgaacaggaataggcggctcaatgtcgactacttcagcgtacccaaccctgtgactgcccttctctccaggacgtccgactgggacgacaccattcatgagcacctcgtccgtgatcgtcgtccgctataacaccaagttacatgtcgacaccaccgaaggtttcatcgtgatctggggcacctgctaacctcggtgtgctctcgcgccatactatccctggggcccc

SEQ ID NO: 319655 - DNA, 170 bp, Zea mays
ggctgggggctacagcacacctgaatctggactagattactcgacaattacacgctccaactcagcttacggtcgtagactgatgacacataaccatcacacggcatccatccgaactaaccaccctgttaacctgatccctgcgctacctagataacctaagacgcgac

SEQ ID NO: 319656 - DNA, 394 bp, Zea mays
aggaaacgggacacatagatatactattttgaagggacatatagtgtcacatgtgcagctttgctagatgcttgctatggcctacaatgaagtcaatgtgaacatgatatatccattaccaggatgtggactacgcatatgggactaaggactgaaagcgaatgatacttgaacacaatggagcgtacatgataaacatggcgtgaaggttgatacattgaaggaaatatggttgagaaccagaggcatgcataggaatgctgaacaagctggaccacatgatctacaatagcaggcttacttacatgaaagacttgtatgcaggctacaagtgtgtgatccgtacaaggaaaaacattagagccatctccaagtaccttagagcacataattc

SEQ ID NO: 319657 - DNA, 125 bp, Zea mays
aagatggaaggcgatcggccacctatgtacacggacggatacgccaattaggtgcggacgtgcggaggtgcggtatcctgtatcggatacttaacagatagggataccccatgatacgtacgaat

SEQ ID NO: 319658 - DNA, 235 bp, Zea mays
ggattcccgctcgaccacgcgtccggacggtgctctaatccgtcatacttggtggttgtgaggtcgaaagcggggagggaatataagatgctggtacaagctgtgggacgacgtggggccatacctcgcccggagacgggcctgagaagcttcgcagtgccaccaccgcccgtccactcgcatcaacaaagactcggacggggcagctacatgcggcgcagtccatgcctctacc

SEQ ID NO: 319659 - DNA, 410 bp, Zea mays
ggagtccggagtcggacctcgactcggcacgcttccgcggctccgcgcccaggccaaggtgtgtcttccagtctccacgctccagagaccacatctctctctccatggcgacggccatctcgctcccgcgcgcgccgctgatcactccccgcgcgtgcaccccccgccggcttgtccacgtgtcggcggcgcgcgcctctcccccgcgcggaggagggcgcgtcggtcgccgctccccgacggtccccgctgtagcgggagcctcctcctccggcttggctccggacacaagcgtgccggcgtgggacgctctcggcggcgtctccgtcctcgccgcggggacaggcaacgctgtggcgctgacggacctgtgggactccgccgagggggtggccgtggttgcgctgctg

SEQ ID NO: 319660 - DNA, 411 bp, Zea mays
attttattatggtgacaattcattgttgccgtgagccgtgagcgtgacattgttgtgcgccttccactgccagtaatggaagcaggcgccggggaagcagcagcaagcgcaccgcgcagactgaccctgccgtggaaggtgcggctcctgctcctctgcctcgatgtcgttgccggtctctcgatgcgtcgcgacggcaccatcaaccgctccatcttcaacctcttcgaccttcgtgccaccgccagcacgcgcccggacaggcagggcgtccggtccgccgacgtggacgtggacgtggacacgtcgagcggtctgtgggcgcgcgtgttctggccgtcgccggaggcgtccgcggccccgctccctgtcgtggtctacttccacggcggcgccttcacgctgctctct

SEQ ID NO: 319661 - DNA, 412 bp, Zea mays
caagtgcatatcatacacaatgggtggaggtggaaagattccgtatcccaaggaagtttggtcacccgccggtggttggtacgcccagccaggctattggaaggccaacactgcgatcatgggtgctttcgtgatcggtgtcgctgccgtcgcattcagcatcagcgccgaccgcgagtaccgtgaccggatgcctgaacctggccgattattgcctagccgatactggagcctacagattcgcgaacacgaaaagcagcaggccgcgcaaaactcctcatgaggagcaggtctacgagccggaaaaggacgaggggtggctttgcggcgtgacagagcagtttccttaatatgtgtcttctatcatttcatcattctctgtggctgtatgacaacgaaaagggcgtttttt

SEQ ID NO: 319662 - DNA, 325 bp, Zea mays
gtagaccacagtcttacctagagtgatctacgtgtttcaccaactatatccaacaagggggaggctccatcctacttcagggtggtcatacgaattcgttatattcacacaacagaatatgacaccagttgaccaagataactctaagaagatgctaatgcccactctaatctgatgagtctgagagggagatcattcatcatcagcaagatgatgatgcaccagtgcactacagatgattcgtggtcgatcttaagtgctcactgtgatataggcctgcacactaatctctatcacaatgcaagctctaagcggcgtactcgtg

SEQ ID NO: 319663 - DNA, 446 bp, Zea mays
ccggcccgactccacgcattcgtgcgatgatcatctctcatccactgttttttttagattcaactgagctcatcattagggcgcgctcccttgacgcggcgcgggcaacaagcatggcgaatattgccgagcagctcaagatcaagttctttggactcctcggacgcatcaccacctgtgctcgcgcctgcgccacccacaaggatgccgctggtgcgacagatgccaagtcatcagagggatcccagcctgttgagatcaggtcaaggggaggtgctcctaccgctgctggaggggccaagggtcacatcaacagtgacaccatctagaggatagggagaggagaagagaagagatcgaatacaatagaagaagctcacccatagttaccacgtttgaaagaactgacgctgtaaatcacagttactcgttgcttgagcgtgtgt

SEQ ID NO: 319664 - DNA, 439 bp, Zea mays
cccgtcccgactccactcgttcgacgagagaactcctctgatacgtagtttcactttcccaagctagccattccttctgtgtaggcgtctccagcccatcggcgcaccctaatatacctacatctattgctaacacctcagatctcaaacgctagccaggtaaaatgccaagatcaaatcaaatgttcacggcaaattctagaatgatggcggtatttagtgccttgacatcgaatccagagcagctgacattcgacgaaaccctcatatttgtcaagaaagtgaaggcccgcgattacatgctatacctgtcattgttcgacattctttgcataatggaactatcccagctcgatgcctaccgagagttacagctgctgtttggaaaccacccggatctgtgcgaagagctcgagaagttcatgccaccggtgcctac

SEQ ID NO: 319665 - DNA, 266 bp, Zea mays
taaccataccttatcataacacaaagtagagtctcttcaaatactaataacaaatttgctcatcgtctcaaaatccaccagaattcattataccagtactctcacatctaaacttaaaatatatctacatctactatacatcgattaagagtcatggcctgcaccataccaatgtccacctacatcaactctagctcctattaatccgactaccagacacatccttaatacacaaaaatagcacgaagcatcttcagacatgtata

SEQ ID NO: 319666 - DNA, 390 bp, Zea mays
cctcagcccactcctctcgtgtacgctagctcccagtcactggaaatccccgagcacggtcaccggcaccgacgagttgagccccgacgtggccatcccttctcagaacacaaagaagagtataatagaagaagaagaagaagttgttcctccaactgagaatcctcccgtggagaataacttttactttgacatctgtggtgaaaaagttgctattcctacgacacatggattgagagtcatggcgggcaccacaccagggtacacctacatcagcgcttggccattggaaaccgcccaggagacatcaccggggtacacggaaatcgttcgaggcatctcgaggcgtgtatgaggaccattggatacaaaattgctcaccggagttct

SEQ ID NO: 319667 - DNA, 92 bp, Zea mays
aggagaagtgcaaggaatcaggctgccttcatggtcaatggtcactcggtacagtgcgtcaggctctatggtgagatcaccataattggatt

SEQ ID NO: 319668 - DNA, 269 bp, Zea mays
ccggcgaagctctctcaagctgggcatctagctcattacctactttactcctacgagatacggatcaacatgggggggggtaccttaagtatatcggcgtcgattaccttcttcactccgactccaacctcgtacgctctaatgcatgacacatcacctccattgaaaaaactcagcacataacaggacctcaagaacttagtactgctcctcttcatcacccactttggtaacactcatgctaaaatatacgctcgccacacactctc

SEQ ID NO: 319669 - DNA, 357 bp, Zea mays
cttgcaaaaccgtatttgcgatccacacctagcaggcgaggttagcactcttcctggggacatggatgactaggagcacgatgtgttcagacataagatttaagttgacggcgaggacgtattcatggatgccgacgactatgctacctaactgcacgaacttgtctatatgaaacacctgctcaaggatatggatgaggaggtcgacagactacgtgagatgcacgccaagggtgcctaggagataccaggtgtacattagtatgcaagcacatgtgtgtacagtgtagagatggaatctgggccagcatcattggaaatgttgtctatgcgtgcactttagaagatatgcagaag

SEQ ID NO: 319670 - DNA, 342 bp, Zea mays
cttgcaaaaccgtatttgcgaaccactacttatcagccgacgttagcactcttgctggggccattgatgactaggagcacgaggtgttcagccataagatttccgttgactgcgaggacgtattcatggatgccggcgactatgccacctaactgcaggaacttgtctatatgaaacacctgctcaaggaaatggatgaggaggtatacggactccgtttgatgcacgccaagggtgcctaggggatacaaggtgtacattcaaatgcaagcacatgtactttcacatgtacaatggacagtgggccatgatccattggaaatgtggtctatgcctgcactt

SEQ ID NO: 319671 - DNA, 221 bp, Zea mays
tcgtccggacgtatacggcaagaaagatcctcttttcataactgtatgattcagattacagcgcgttccaattcagcagcctaatgaacctaatactccaatagttcacgtttaatctctcactgtacaagatcaacatgctaaccaagtgagcaccaagcaacgaactaatcgacaatatcaccacacaacagggcttacactcatacccggagttgtat

SEQ ID NO: 319672 - DNA, 318 bp, Zea mays
gcgaacattatcggattcatgtgttatttaagctgccctggatgggatacaaccgcgggaagcttggccggctatcattctcatcgtattcgcgccgtaccaagcaagaagcctgttgtgacgatggccttcctacattacttccaaggcaagacgtatgcacagacaacgaactcaaaagttcaagaattcagctcgcaatgagggactatgatcagtgtgacattaaaagatgcactggtcgtaaactttcaagatccgggcttgtgaacgagtcgagagtgaccatcgcgtttggaggagttgatctcagccctg

SEQ ID NO: 319673 - DNA, 218 bp, Zea mays
gcggggcaagcacacatgctttaatctgttttaccatttttacttccgaacgcgcggcgggggagctttaatccgggtaccttgactaccatttcaaaccccacaagctaatcattgacagcagcgccgtctcgacgtcagaatacatggcgtcagcctcatccgcgcagatcgcggcggcacccctcaggattgggtaccgtaagccggcgtccatt

SEQ ID NO: 319674 - DNA, 206 bp, Zea mays
gaaaactgtatcatatttagtggcacctcagattgaggaaaaatcaaaccctggttgtcaaatactcctattgacagattcagattacaatgttaatgtcaattttcgaaggcaaaaaaaacaaaaaaaaaaaaaaaaaaaaaaaaaaaacgactacagctctaacaaatccaaggtcacaggactcctgcattcaagttcatata

SEQ ID NO: 319675 - DNA, 354 bp, Zea mays
gtgttcttgtatccctgctagtgttgtctctctcccacatccaccaagtctgctctgtgcagataatcaattgccagtgttgaccattctcacatttctttaccctaccttagccagaacattctacgtagttgctggcctatatgatacttgctccatattcatgtaatactttcctgaagttgaagaagatatctatcatagttgagttccattattcatagacatcagtcgatcaaatcatatatgcttgaacgtacgcctgccttggatgaatcaaattatttgattaatagagctgcttgtacactggctgctatttcatctgtaaattatgctcctgcactcacttat

SEQ ID NO: 319676 - DNA, 330 bp, Zea mays
cacagcaatccacacaagcacttcgacgtcacacgggcgctgcacacagacacaccaagcgtcggcaccaatggcttactaccaggaggtggactactgctcggaggaggtgaggtcggtggccccggccggcttcggccgccacggcggcggcgtccagcagcacgtcgtcaaggagaagttcgaggaggtcgacacggtcgcacgcgccggcgccaaccaccaccaccaccatggtcaccacggcggccacggcttcgtggtgcgcgagaccagggtcgaggaggacatcaacacctgcaccggcgaggtccacgagcgcatggagag

SEQ ID NO: 319677 - DNA, 209 bp, Zea mays
tcccgctcgactccactctcctaccaccgtcactcatcacatcacagctactcgagagagagagagagagaaagatgggtggttcttacaccacctacacttccagcactttcactctatgtacaaccctaaccagatactcaaaataactctacagtctaaccctaacaactgacatggcttacaataccaaactcttatttttcaat

SEQ ID NO: 319678 - DNA, 56 bp, Zea mays
ggcatcaccgtcgcgacgacgatggcagcctcgctccaagccgcggccaccctgat

SEQ ID NO: 319679 - DNA, 360 bp, Zea mays
cttgttcgcagggtttacaagacttctctgtttaaccagtaatcacgcactgtgtgggtcccttaaaccatcattcttgacgaaaggtgactaatctactacgccaatttgttaattccacttggtctccggtctaatccacgtttttgtcatctctttcgagatgaaaatttgatttagcaccattagcagctgtcattatcctcatgcaatatctatttcttattgcttagcacctaacaactcatcatctcttggacatttcaacatgaaattatcttcatgataagaatgtcctactgacttcagtataccactacaaactaatttgaaaatgcttgatcatttctgagatgatta

SEQ ID NO: 319680 - DNA, 313 bp, Zea mays
gagcgctcgctcgatcctagctttcttccaagaagcgcacgcccatggccgggggaccaagcctcgcgcacgcgccactgctggccgcgctgggcgccggcggcgaaccgcggagctgagctcgcaactcaggctgacgtagtggcctgccgcgatccggcccacgtccgcgcgtgccaccgagaagcagctgaagcgcccaatgcgtttcgggtccccgcactggaccccagcacgccgtgcccgaccttcagcggcagaaccgacgggctgctacggaaggcgcatgaagaggagtgctacgtcatcacgt

SEQ ID NO: 319681 - DNA, 424 bp, Zea mays
cccgcgtctcgccgcgtaggcgccacagaaactcgcacgccgctccccgccgtcctgcccgagtcgccgtcgccgccgaatccaatccatggctccgaccgcctcacccaccgcgctgcaccaccgcacgcccctcctactcccccgccgcaccgtcgccttgggtgccaccgtcaccgcgcgcgccgtcagggccgcttctctagccgtcagggcccagccggataccaccgctgcagccgtctgcacctgcgcgcctgagccgacgcccgagttcaagcctgcgccggggttcaaggcgcccgagcccaagaggttcgaggtcaagtccggccagctgggcagcgtcctcggcgcctcgctcgccatccccctacgcctcggcaccggcgtcttcgtcctcgggtactcgccatctgttgtt

SEQ ID NO: 319682 - DNA, 402 bp, Zea mays
tcggttttgaattctcgactcaagcgtcccttccgtggttcattggtcatgccttgtttattttacaatatagctccaagcaccagggtggaattatcaccaagtgaggtagatcaccgactaagtgttcgaccagctcacggatgactcccagaagcgctacaaggagtccctgatattcgaggaggtctacatcatcgtcctctgcgtctacaatgacatcaacaattacttgcctgggccacaccactaccccctgtccaaggagaatctcatggccatgatgtaggagtactacgtgaacctagacggtctcctttaccagaaggagttcgccgagttcattcctaagctgaccgaagtctcgctttgctcgatcaacgagaagcttcttatcacgct

SEQ ID NO: 319683 - DNA, 245 bp, Zea mays
aagtaaggaaggcctgaagacttcctttcacatctccagttactcccatacaggtaggtattcatagccactttcatcgaactaggacgatctcaccgacatgtaagcactaagcaacccaataggatcatcagaccctgcctgatgccaacgaacccaactacatcttcccttgcgacatcgtcgacattgtaaacttggcccgcatgcatacatacgcagcctcttacgagcgccaatggaca

SEQ ID NO: 319684 - DNA, 62 bp, Zea mays
attccctgcgattcctctcccctcgccttctcgtctccccctaggggatcgtcggagaggaa

SEQ ID NO: 319685 - DNA, 313 bp, Zea mays
aatttctaatgatggtgtcgatgcgactactgaacatcattctactgtagataattaccagacaagttaaaatggggctgaatgggttgagctattggtcagggagatgactaatgcttatgacatagataatgctcgggctaatgcgtccagagcgttctaggctttggcgatatcaatcgtatagcgttcaggatctgaatctacacataacctttatatggtaatcatgattctcaaagagctgctgactgttgaactgcgagagaacgctttactgaagcggtcggttgccattaaccatgagcttcta

SEQ ID NO: 319686 - DNA, 158 bp, Zea mays
tcgcggcgactacctaagagcaatggtgggacggaagccgatgcgccggcgccgaaacgaccggcaaccggcggcgcaatcctttggcacgactgcaatcgccaacggactggacgagctggtgctgactgggccggcggcgttcgggttggaacccc

SEQ ID NO: 319687 - DNA, 311 bp, Zea mays
cgggcacgacgccacgcgctacgaaagcactaacgctctcaagtattgcggtttatagatccaggacgacgacagccttcggggccatggactgcatcgatatcaaagtggtctccttactcgaaacgccgatcaccatgcgctaagaccgatggcaagaccaacggatccgagctctgatgccactgcttcggcccccgcactgtataacaactatgacagtacgtacgtgatcccaggagtaaccatacgtactagcaccacagctcataggactaggactaaccaggacttatccactaaaccgacac

SEQ ID NO: 319688 - DNA, 256 bp, Zea mays
acgctggtacagggaggactacagcgtgcactgcttttgcgaggacgacttgaagaacgactgccgcgtgggttctctgaagaaccacttcatcgagcactgcctgtccacggtggacacggaagcaccagccgcggcatcatgttctacacgcaccgcgtgctcggctactccatcaacgcttgggacaacatggaatgatagttggacgagcccgaggacgatgagaacctgaaccacctgaggtataagtacc

SEQ ID NO: 319689 - DNA, 81 bp, Zea mays
gacagtatgagccatccctcatatgggtttatacctgttccaattcctgttggtgccacgatgccgtaccattatggtgcg

SEQ ID NO: 319690 - DNA, 228 bp, Zea mays
tcgtacggctgctcttctagcttatctcttcgcttcctcacccaatgtggccatgaccggaccggtacatatagtcctgcatgtctacatagcacctcatatgtccaacttaagccaggcattgatcagaacatctttacacctgcgatagactctgagtcgcccaccgttgcataaactcgtctccttctcctcaatacaaatgcgttccacgagctctacaagccc

SEQ ID NO: 319691 - DNA, 368 bp, Zea mays
gcggctcttgttcctccctgtttaccgtctcctcagccgcagtggcgaggacgctcccggtacatcgtctcctggatgtcgacatctcacctcatctctacaacgcaggccagccattgagcacctcatcggaacagccacgctcgacactgagtagcccaccgtggactcacctcatcagcgtatgctcgctaatcaggcgttcgtcgagctcggcaagcccctactcagccatgccgagtctccaagccggctgtagacgctcgactttgtttgtgagctactggcatgcattcttgatcgccaatcgagcaccacacccaccgctccagctccgagtccggtagctgacgttcgcctcgccatcg

SEQ ID NO: 319692 - DNA, 281 bp, Zea mays
tcgcgtgcccgcgcattatagatccaggttaccttcacgtgcacacggctgatacctggccggactgacacctaaaactatctcactagccggtccgatacaactgccgcacttccaaaaccttggcgttaccttactcaatcgccttgctctacaatactctttttccggtcttcccaacagcgattactccatgttccaaaagccttctcatgagacgagtactctgactagcgacttggacacgccctggaatgcatcaccaatcgcgacgactatga

SEQ ID NO: 319693 - DNA, 260 bp, Zea mays
agtctagcgcgtggcgtcgactgcggtgtttgactgagcggccgaggagccggttcttcgtcggggcatctcagcggtcctgaggtcgcttagcagcacatattcgttgcgctaggctccgactcggctcggtacacctctctacgcgtgctcgcttgtcacttctcagcacctatactcatcaaagccgacactatgcaagtcactatcgctcttctgacgcatctgtatccgctcttgttcctgtatgatcagtgact

SEQ ID NO: 319694 - DNA, 435 bp, Zea mays
ctccctcctccacgcgctgcgcagcatcacggacgaccagtggttcagggcgcggatcaagaggtacggcccggtgtccaagatgtcggtgctgggctcgccgacggtgctgctggccgggacggaggccaaccacttcatattcaccaaccagggcctcatcctcacgcagacgcgcgcgctccgttccctcctccgccgctccatcctcacgctcaccggcgacgacctgaagcaggtgcgcagcgcgctgcagggctacttaaggcctgagatggtccgggggtacgtggggaagatggacgccgaggtcaggaggcagctcaagctcaactgggttggtcgcagcactgtcaacgtcctgccgatggcgaggagccttacactaggggtcatctgctccgtcgtcttcggcgaagaagcagccgccatagt

SEQ ID NO: 319695 - DNA, 430 bp, Zea mays
cggtccaacactttcacgctcaggcgctcagctctagcaatggctgcctccaccatggcgatctcctccacggcgatggccggtacccccatcaaggtgggctccttcggcgagggccgcatcaccatgcgcaagaccgtgggcaagcccaaggtggcggcgtccggcagcccctggtacggccccgaccgcgtcaagtacctcggccccttctccggcgagcccccgagctacctcaccggcgagttccccggcgactacggctgggacaccgccgggctgtccgccgaccccgagaccttcgccaagaaccgcgagctggaggtgatccactcccgctgggccatgctcggcgcgctcggctgcgtcttccccgagctgctctcccgcaacggcgtcaagttcggcgaggccgtctggttcaaggccg

SEQ ID NO: 319696 - DNA, 446 bp, Zea mays
ctctgcttctgcggcgtcgcgagctccggctcagttttctgctctcccgccgcgccgtggtcgccgtcgaaattcctgacgcgcgtgcccagcgtcgtcgctctgctcgagttggtcctggtggccgttgtttggaaacagactcgaccgcacccagcgccgagcttcttcctgctcatgcccagtcgctctctctctgtttgccgcttgtccgtctccctggtgctcgccgcgcgcgctattccttttgcgcgcctggctagttctagctcgaaccaaaccgtctgcgcctgttcgcccctgctgcgcgcagtcgcgcagctcgcggagctctcttgccgtggccgtcgcgtccctggtcctagcctttagctcagtctctatgcgcgcgagctcgccggtgtgctgctagtctaactgggatctcgcccatggcgtcgatctgt

SEQ ID NO: 319697 - DNA, 345 bp, Zea mays
gagtctgagaacctcacggtttacatttatcaagtgatcgccactggtatggcagggggatctgttgctgctgcgtgccagtgcgtgatcactgctgatgattctgaagcatgactttctctaggaaatgctgctaatacttgtaagggcggataccagccatgacgacgcagttacacgcacgctgctcgggagatgcttacagtaacgctgacatgacttagcacgctgcagcagtcgcacgtccatgctggaaaagatccttgtagtcatgatatggcttctgcgtaaggaatccgcagaagctagcgacgaccggatgaccattgctgtgcgaatgatatt

SEQ ID NO: 319698 - DNA, 176 bp, Zea mays
tcgacgactgggccatcgaggactctttacgttgcgcactacacaggctttctgatcgcggtgaccaattgcaactctaagcggcttgcccttaacctggatgccctcacgaacatacgtctaaacttcataactgttggtacgctcacgagcatggttgacacatgtgagtactc

SEQ ID NO: 319699 - DNA, 280 bp, Zea mays
cgacccactcgtacgctggcgctaaactgctaccttgacatgtctactttcctaagccattgaccctgagccgggatcgtttccactggagcttgtgtacaatataccttcagtcctgaagcgtcacatacgtcgaatactcgcgcataacctattactctgaacaggccgcactccagtcatgtatcacaattctcacatgctcacagctcacttccatatttcagatctggatccaaccacttattacgctgacattctttatcgtcaactattgaaa

SEQ ID NO: 319700 - DNA, 427 bp, Zea mays
  unsure (1)..(427): unsure at all n locations
ggacagggtcaccctggccggcgtgctccgcccggaggacgaggtggtggaccgcgctcttgcagatgcgcccgacacggagctcacccgcctcgccaagaactacttcagcagcacgaaccaagcgtcgctgctctgcctctcactccgtcgggcgctccgccgggcgcggtcgctgtacgggcccatcacggacctcctcgcgctcatcccgcagtcgccgcagctcgccacgccacactgcgactgtgcgttcgacgccttcctcctgttcgaccaaatgcccaatccgttcccggcgcccgcggccgggttccagtgcatgcaacgaagtttctctgggctcaaaaaccacctcgatcttcgtctactcagtgtccgacgcatgcgccgttggctccgctgtgccaagcgcggatcangtatc

SEQ ID NO: 319701 - DNA, 413 bp, Zea mays
  unsure (1)..(413): unsure at all n locations
gcaggctttgacggggtggcgaggatgaaggcgattatgatgaggaggacatcggaccactgctcagcttcgatgagatgtttcacctccacgcggcgtgcggcgtggcgcttccaggcgacatgatggaggcaaaccggtgccgaggatcccacagtcgtggacatcgccgggacgcagctgatgccgaaggaggaggcgctccagctttgcaccggctgtgtccacttctagacttccttgcctcgcctatcacctccaggaagtgatacccaccttggaagaatttggggatgaggatcccacgtcgcaacgttccatagtgcccctgcccccaccgatgtccacggccgtcgcgcccgggcatggcagtccgctcccacgcgatgcaagtccatccncaccgtcgcagc

SEQ ID NO: 319702 - DNA, 345 bp, Zea mays
gtaaatttgagaccttgttattgatacttacgaagtttgttatattaatgcacagtaaattgaaactagattagaatttaaataattaagtgttataataaacgagatatttttttaataaaatattattacaaatataattaaaaattcatttatttgtaaaaatatcagaaacacaaattgattcatctattttctagagtctagtacataaacaaaactttttttaaagtgttgatcttttatgtcataataagtattggatgctgttctcgcactagaccaggtttgaaagttctacggattttatcgtgttactacatccttaatttcttactaggtgag

SEQ ID NO: 319703 - DNA, 399 bp, Zea mays
tgcacaactacatttgcaaatacaatggttcatacaacatacatttccagtgctagccattcagaatgcagcaacggattttgattgtgcatacaaccctagcttatatgttcaagtctcaagaaaacagtttgaactaaaaaaaaaaaacaaaaaaaaataaagaaatataaaaaaaaataaaaaaaaaagaaaaaaaataactaaaataaaaaatgaatacaaatgaaagatagaaagcacattctataacttaaaaaaattgaaagaaccattatatgctccaattacatgaaaagtgattgaagaggtgagggccattttaagtcccggtattacatattggtagcgtatgacatattgtttgcaaactgtcccattcttttaaatcgatcagaa

SEQ ID NO: 319704 - DNA, 114 bp, Zea mays
acgcattccaagctatccttcgctgatatgtttgacttacctcagctggagtcatgcattcgcacggatgacacggatactagagtgacgtacatattcacctggacccgactg

SEQ ID NO: 319705 - DNA, 249 bp, Zea mays
gattcccggctcgactccactcgtctcgaactcatcgatctactcacatacttagtttctcacactacacgacttctaacatgggggagcctgctaagatctgagagtctagtgcattctcatacaagcgtcactacatcaggaccacttagtatcttataatagatggactattgtctgaatacatgctaatccatatacattactgccactgctcagcttgcacagcatatacctaaagtaatgctc

SEQ ID NO: 319706 - DNA, 286 bp, Zea mays
cgttaaccgcgctgctatcccccgctagccgccgcgctgctgcggctcgcctacctcctgcccagtccccgcgccccggcgccgaacgcgccgtctactctcgctccctccttttaccccgagcttaagctcgcgcgtacctgcctacctatccgtaagagaggaagaggggacaaggcccggtcggtcggtcggtcggtgggctctcggatctcgccgatgtctgcccgttcgttcgttgggatctcgcgccatggccgtcgtctcgccgtcctcggtccccgcg

SEQ ID NO: 319707 - DNA, 260 bp, Zea mays
aagggttcagcccaatgcatctccgtgttaaccggcctccttatgaagacagtgatgccggtggtcgtcatgtggcagtgcaaggagcgccacttctaggtcaaggcctacatgtacttcgtaagataccgtagacgagattgtctaatcaccattgctgaagatcaagggttatcgttatcaataaaggtatctgcaaggatggtgatgatcataggtctaagactgctaaggatggacatgccataggccaatagctt

SEQ ID NO: 319708 - DNA, 448 bp, Zea mays
atgcacccccctatctattgtttacgtacgtgctgggccattaacggttcatggatcatgatggtgttcggcttttggccgcagttctgaggtacggtatcttggtgatcgacctcgaccctgacaccaagcattttcttaagcttgcctgaggttagcgataagctaggtagcagcactgatggatgcatgcattttgtacgtttcaatatggacagcagcacttccatgggtcaccacgtttatcgcagtagccgccattcttagcagggaagttgtactcttggcaaactttgccgcagtgaaatggcctgcagtattcacgatcctatggaaagcagaatggtggccgtaacctgcggacgacgccgtctgccaaaagaaacgtttgctcacccgttatatatatatagttgattagtacatacatatatatatatatatatat

SEQ ID NO: 319709 - DNA, 196 bp, Zea mays
ggccgacaccgcgcgtattaggcgacgtccggtgagaaagcctagcgccgagtcgggggcgtttccagggcccttcgacgcgcccgatcacgcgaccagatgcgtggtcagcgttgccgccgatcgagacccccgacgacgggcgacggtagcgacgtggatgacaagagcgacccgctgctggggcaggacccgc

SEQ ID NO: 319710 - DNA, 202 bp, Zea mays
cgaagcggcagtgtttagagaggagcgtcgaacagaacagcatgaagatggtcatcggtctcttcaagtgcctggctctgtcagctgccagcgcctctgcaatgcagatgccctgcccctgcgcggggctgcagggcttgtacggcgctggcgccggcctgacgacgatgatgggcgccggcgggctgtacccctacgcgga

SEQ ID NO: 319711 - DNA, 88 bp, Zea mays
aaacatctactattggggttctcaaagatgcaacagtgtcgatattaccgaattctgaattacgattgttctttgaggttcatttcat

SEQ ID NO: 319712 - DNA, 136 bp, Zea mays
  unsure (1)..(136): unsure at all n locations
gacttgctcagcatgcgtaccagcgcgcgcgcggcgcccaggcaccggcatcttttagcaccgcgggggcacgntattttcgctcgtcgtgtgcgccagcgccagcatgaacgttgtcttcatcggcgccgagatg

SEQ ID NO: 319713 - DNA, 178 bp, Zea mays
  unsure (1)..(178): unsure at all n locations
cgcacgcgtccgcttaccccacacagatacggccgcggcggagcaaacgcaagccagancgtttgtaagagggaaggagccccatcaatggggcacgtcaacttctaccgcaactatggcaagacgttcaagaaaccaatgcgtccttatgataaggagcgtcttgatgctgaactga

SEQ ID NO: 319714 - DNA, 200 bp, Zea mays
tcccagctaccccccgaccgcacaccaccagagacctcagcaagagaaaacccaaaactcaaaccaaacacgagccaacaggaaagcgcagccggcgaaaaacctggagcaccccaacaccaacaacaagcagcagacccaaaacaacagagaccacaagagcacaaaaagacacagaacaacaaggcacaacaacaaca

SEQ ID NO: 319715 - DNA, 102 bp, Zea mays
acaagcgcctatagcttcccttcttcccccgtacctctcaccaacagtgtcctcggtatttgaaaacccaaaacttttaccctacacgaaccaacaagccaa

SEQ ID NO: 319716 - DNA, 231 bp, Zea mays
  unsure (1)..(231): unsure at all n locations
cacccacgcgtccggcagcatagaaagtacaatagtgcacctacaatggcagccaaaatatcangcctcccgangctcttaggactttcagcaaccgctgctacggcgaccattttcccacaatgctcacaagctcctatagcttcccttcttcccccgtacctctcaccagcggagtcatcggtatgtagaaaacccaaaactgcaacccaataggatccaacaggcaaa

SEQ ID NO: 319717 - DNA, 140 bp, Zea mays
taaacgcgaccaaaagtcctcaatactcacaagctcctataactgccctaataaccccatacctaccatcaaagaccactaaaataagtaaaaaccccacccttaaaccctacaagctccaacaagcaaatcacaacaaa

SEQ ID NO: 319718 - DNA, 413 bp, Zea mays
agcaacatagaaagcacaatagtgaactaacaatggcagccaaaatattttgcctggtgatgctccatggtctttctgcaagtgctgctacggcgaccattttcccgcaatgctcgcaagctcctatagcttcccttcttcccccgtacctctcaccagcggtgtcttcggtatgtgaaaacccaattcttcaaccctacaggatccaacaggcaatcacagctggcatcttacctttatcacccttgttcctccaacaatcatcagccctattacatcagttacctttggtgcatttattggcacaaaacatcagggcacaacaactacaacaacttgtgctagcaaaccttgctgcctactctcagcaacagcagtttcttccattcaaccaactagctgcattgaactct

SEQ ID NO: 319719 - DNA, 337 bp, Zea mays
  unsure (1)..(337): unsure at all n locations
gcaacatagaaagcacaatagtgtaccaacaatggcagccaaaatattttgcttcctgatgctccttggtctttctgcaagtgttgctaccgcaaccattttcccacaatgctcacaagctcctatagcttcccttcttcccccatacctctcaccagcggtgtcttcaatgtgtgaaaccccaattgttcaaccctacaggatccaacaggcaatcgcaacaggcatcttaccattatcacccttgttccttcaacaaccgtcagccctattacagcagttacctttggtccatttggtggcacaaaacatcanggcacaacaactaccacaactt

SEQ ID NO: 319720 - DNA, 370 bp, Zea mays
  unsure (1)..(370): unsure at all n locations
ggaattcccgggattttgagcattcagaaacacaccaagcgaagcacattagcaacaacctaacaacaatggctaccaagatattggccctccttgcgcttcttgcgctttttgcgagcgcaacaaatgcgttcattattccacaatgctcacttgctccaagttccattattacacagttcctnccaccagttacttcaatgggcttcgaacacccagctgtgcaagcctataggctacaacaagcaattgcggcgagcgtcttacaacaaccaatttgccagttgcaacaacaatccttggcacatctaacaatacaaaccatcgcaacgcaacagcaacaacaattnctaccagcactgagccacct

SEQ ID NO: 319721 - DNA, 443 bp, Zea mays
caacatagaaagcacaatagtgtaccaacaatggcagctaaaatattttgcctccttatgctccttggtctttctgcaagtgctgctacggcgaccattttcccacaatgctcacaagctcctatagcttcccttcttcccccgtacctctcaccaacggtgtcttcggtatgtgaaaacccaattcttcaaccctacaggatccaacaggcaatcgcagctggcatcttacctttatcacccttgttcctccaacaatcatcagccctattacagcagttacctttggtgcatttattggcacaaaacatcagggcacaacaactacaacaacttgtgctagcaaaccttgctgcctactctcagcaacagcagtttcttccattcaaccaactagctgcattgaactctgcttcttatttgcaacaacaacaactaccatt

SEQ ID NO: 319722 - DNA, 300 bp, Zea mays
ggttcgaattcccgggctctctctctcgccccccccccgcataacatcagctgttcactgacaacaagagcctccacgatgtgagcgagtgataaacttctagcactactggccaacgcacagaagtacactgatcctgcaccttaaccgaatggctccaatgactactactataccagtggatgagatcatgatatataacaggcaacaaaaacagcaatgcccaattactgccactaaagctatcaactacacggagactgttaacataccttaccagttactatcgacaacgtccta

SEQ ID NO: 319723 - DNA, 436 bp, Zea mays
ctagcaacatagaaagcacaatagtgtaccaacaatggcagctaaaatattttgcctgcttatgctccttggtctttctgcaagtgctgctacggcgaccattttcccacaatgctcacaagctcctatagcttcccttcttcccccgtacctctcaccaacggtgtcttcggtatgtgaaaacccaattcttcaaccctacaggatccaacaggcaatcgcagctggcatcttacctttatcacccttgttcctccaacaatcatcagccctattacagcagttacctttggtgcatttattggcacaaaacatcagggcacaacaactacaacaacttgtgctagcaaaccttgctgcctactctcagcaacagcagtttcttccattcaaccaactagctgcattgaactctgcttcttatttgcaacaacaa

SEQ ID NO: 319724 - DNA, 328 bp, Zea mays
cagccagctagctgatgtgagccctgttgccttcttgacacaacaacagttgttgccgttctacctgcacgctgcgcctaacgctggcaccctcttacaactgcaacaattgctgccattcaaccaacttgctttgacaaacccaacagcgttctaccaacaacccatcattggtggtgccctcttttagattgcttatgagttatacttcaataatgaagttttttggatgatgtttgtggcttcccagaaataagaaagtacatttctagattcttaaaaaaaaaaaaaaaagcaaaaaaagaaacaaaacaaaaaaacacaacaa

SEQ ID NO: 319725 - DNA, 433 bp, Zea mays
atagaaagcacaatagtgtaccaacaatggcagccaaaatattttgcttccttatgctccttggtctttctgcaagtgctgctaccgcaaccattttcccacaatgctcacaagctcctatagcttcctttcttcccccatacctctcaccagcggtgtcttcagtatgtgaaaacccaattcttcaaccctacaggatccaacaggcaatcgcagcaggcatcttacctttatcacccttgttcctccaacaaccgtcagccctattacagcagttacctttggtgcatttgttggcacaaaacatcaaggcacaacaactacaacaacttgtgctaggaaaccttgctgcctactctcagcaacagcagtttcttccattcaaccaactggctgcattgaactctgctgcttatttgcaacaacaactacc

SEQ ID NO: 319726 - DNA, 305 bp, Zea mays
cggacgcgtgggcctccctcgaaaccctagcatagccactgccttcccgcacgctaggaaggggaagatatgggcgccgaggaggacgccgctgcacgccgcgagcgtctccgcgcccttcgtgccgccaaggaccttctctccacccccgacggcgccccaaccccttccaccgacggagaacaccagtaagatcaccacccccaccacgggaacttccctccttataagaatcaaggcatgctctcgtttttcgtcatggatcaaggcttttcatcactaactcataagaaatggcaaccatg

SEQ ID NO: 319727 - DNA, 186 bp, Zea mays
gtacgacaccgatagtattaggcgacgccgggtgagaaagcctagcgccgagtccgttagatctccggggcccttgcacgcgcccgatcacgccaccagatgcgtggtcagcgttgccgccgatcgacacccccgacgacgggcgaccgtagcgacgtggaggacaagatcgacccgatgcggggc

SEQ ID NO: 319728 - DNA, 426 bp, Zea mays
tgcagtcattggtacaaaccatcagggcacagcagctgcagcaactcgtgctacctgtgatcaaccaagtagctctggcaaacctttctccctactctcagcaacaacaatttcttccattcaaccaactgtctacactgaaccctgctgcttatttgcagcaacaactattaccattcagccagctagctactgcctactctcagcaacaacaacttcttccatttaaccaattggccgcactgaaccccgctgcttatttgcagcagcaaatactactaccatttagccagctagctgcagcaaaccgtgcttccttcttgacacagcaacagttgctgcctttctaccagcagtttgcggctaaccccgcaaccctcttacaactacaacaattgttgccctttgtccaacttgctttgacag

SEQ ID NO: 319729 - DNA, 428 bp, Zea mays
gcgaagcgcactagcaacgacctaacaccaatggctaccaagatattagccctccttgcgcttcttgcccttttagtgagcgcaacaaatgcgttcattattccacagtgctcacttgctcctagtgccagtattccacagttcctcccaccagttacttcaatgggcttcgaacatccagccgtgcaagcctacaggctacaactagcgcttgcggcgagcgccttacaacaaccaattgcccaattgcaacaacaatccttggcacatctaaccctacaaaccattgcaacgcaacaacaacaacaacagtttctgccatcactgagccacctagccgtggtgaaccctgtcacctacttgcaacagcagctgcttgcatccaaaccacttgctctggcgaacgtagctgcataccaacaacaaca

SEQ ID NO: 319730 - DNA, 439 bp, Zea mays
  unsure (1)..(439): unsure at all n locations
aatattttgagcattcagaaacacacctagcgaagcgcactagcaacgacctaacaacaatggcttccaagacattatccctccttgcgcttcttgccctttttgtgagtgcaacaaatgcgttcattattccacaatgctcacttgctccgagtgccattattccacagttcctccctccagttacttcaatgggcttcgaacacccagctgtgcaagcctataggctacaacaagcgcttgcggcgagcgtcttagaacaaccaattgcccaattacaacaacaatccttggcacatctaaccatacaaaccatcgcaacgcagcagcaacaagcactgagccacctagccgtggtgaaccctatcgcctacttgcaacaacagctgcttgcattcaacncacttgctttggcaaacgtagctgcataccaacaaca

SEQ ID NO: 319731 - DNA, 188 bp, Zea mays
tcactcggctcacactactatcagcacgctatcatccacagccatcccctctcctcactacccttcacttactcgccaccaatatctcctcctactccttcaccctcttccttccactactcactcaccagctctcccaataatcctaactccagatctacatgtcactttcaacaattagcgcatac

SEQ ID NO: 319732 - DNA, 209 bp, Zea mays
  unsure (1)..(209): unsure at all n locations
caaagcggcagtgcgtagagaggatcgtcgaacagaacagcatgaagatggtcatcgttctcgtcgtgtgcctggctctgtcagctgccagcgcctctgcaatgcagatgccctgcccctgcgcggngctgcagggcttgtacggcgctggcgccggcctgacgacgatgatggngcgccgcgggctgtacccctacgcggagtacctg

SEQ ID NO: 319733 - DNA, 444 bp, Zea mays
agcaacatagaaagcacaatagtgtaccaacaatggcagccaaaatattttgcttccgtatgctccttggtctttctgcaagtgctgctaccgcaaccattttcccacaatgctcacaagctcctatagcttcctttcttcccccatacctctcaccagcggtgtcttcagtatgtgaaaacccaattcttcaaccctacaggatccaacaggcaatcgcagcaggcatcttacctttatcacccttgttcctccaacaaccgtcagccctattacagcagttacctttggtgcatttgttggcacaaaacatcaaggcacaacaactacaacaacttgtgctaggaaaccttgctgcctactctcagcaacagcagtttcttccattcaaccaactggctgcattgaactctgctgcttatttgcaacaacaactaccattca

SEQ ID NO: 319734 - DNA, 381 bp, Zea mays
gcaacatagaaagcacaatagtgtaccaacaatggcagccaaaatattttgcctccttatgctccttggtctttctgcaagtgctgctacggcgaccattttcccgcaatgctcgcaagctcctatagcttcccttcttcccccgtacctctcaccagcggtgtcttcggtatgtgaaaacccaattcttcaaccctacaggatccaacaggcaatcgcagctggcatcttacctttatcacccttgttcctccaacaatcatcagccctattacaacagttacctttggtgcatttattggcacaaaacatcaaggcacaacaactacaacaacttgtgctagcaaaccttgctggctactctcagcaacagcagtttct

SEQ ID NO: 319735 - DNA, 440 bp, Zea mays
  unsure (1)..(440): unsure at all n locations
ccaactagcaacatagaaagcacaatagtgtaccaacaatggcagccaaaatattttgcctgcttatgctccttggtctttctgcaagtgctgctacggcgaccattttcccacaatgctcacaagctcctatagcttcccttcttcccccgtacctctcaccagcggtgtcttcggtatgtgaaaacccaattcttcaaccctataggatccaacaggcaatcgcagctggcatcttacctttatcacccttgttcctccaacaatcatcagccctattacagcagttacctttggtgcatttattggcacanaacatcagggcacaacaactacaacaacttgtgctagcaaaccttgctgcctactctcagcaacaacagtttcttncattcaaccaactagctgcattgaactctgcttcttatttgcaacaacaa

SEQ ID NO: 319736 - DNA, 396 bp, Zea mays
atttgcaacaacaattaccattcagccagctagttgctgcctacccccagcaatttcttccattcaaccaactagcagcattgaactctgctgcttatttacagcagcaacaactactaccattcagccagctagctgatgtgagccctgctgccttcttgacacaacaacagttgttgccgttctacctgcacgctatgcctaacgctggcaccctcttacaactgcaacaattgctgccattcaaccaacttgctttgacaaacccaacagtgttctaccaacaacccatcattggtggtgccctcttttagattgcttatgagttatagttcaataatgaagttttttggatgatgtttgtggcgtcccagaaataagaaagtacatttctag

SEQ ID NO: 319737 - DNA, 386 bp, Zea mays
aatatagcgagcatacgaaaacacatatatagtagagaactaacaatgacctaggcgcaatggtcaggatgaaattgctggtactggatctacttgctctcaatgcgagtgcgatataagcgcttactatcttacactgcacatttgatcagagtgctattaatcatgagaaaatgcaagtagatactccaacgggattcaaccagccagctgagcaagattataaactacatcacgatcttgcgtcgaacgtccgacagcaacattacagcacatttactacagcacatttatgggcatataacattatggcacaacaccactcagcagtagcgatctgagacccagctaactactctgaatgctatcagctacttgcattaaca

SEQ ID NO: 319738 - DNA, 393 bp, Zea mays
cccacgcgtccgagaccattagctttatctactccagagcgcagaagaacccgatcgacaccatgagggtgttgctcgttgccctcgctctcctggctctcgctgcgagcgccacctccacgcatacaagcggcggctgcggctgccagccaccgccgccggttcatctaccgccgccggtgcatctgccacctccggttcacctgccacctccggtgcatctcccaccgccggtccacctgccgccgccggtccacctgccaccgccggtccatgtgccgccgccggttcatctgccgccgccaccatgccactaccctactcaaccgccccggcctcagcctcatccccagccacacccatgcccgtgccaacagccgcatccaagcccgt

SEQ ID NO: 319739 - DNA, 422 bp, Zea mays
  unsure (1)..(422): unsure at all n locations
acatagaaagtggaatccagtagcaacaatagagcaacaatggcgaccaagatactttccctccttatgctccttgctctttctgcatgtgttgctaacgcgacaattttccctcaatgctcacaagctcctatagcttcccttcttcccccataccttccatcaatgatagcttcagtatgtgaaaacccagctcttcaaccctataggctccaacaagcaatcgcagcaagcaacatacctttatcacccttgtttcaacaatcgccagccctatctttggtgcagtcattggtacaaaccatcaaggcacagcagctgcagcaactcgtgctacctgtgatcaaccaagtagctctggcaaacctttcntcctactatcagcaacaacaatttcttccattcaaccaactatctacact

SEQ ID NO: 319740 - DNA, 407 bp, Zea mays
attttgagcattcagaaacacaccaagcgaagctacctagcaacgacttaacaacaatggctaccaagatattagccctccttgcgcttcttgccctttttgtgagcgcaacaaatgcgttcattattccacaatgctcacttgctcctagtgccattataccacagttcctccgaccagttacttcaatgggcttcgaacacctagctgtgcaagcctacaagctacaacaagcgcttgcggcgagcgtcttacaacaaccaattaaccaattgcaacaacaatccttggcacatctaaccatacaaaccatcgcaacacaacagcaacaacagttcctaccagcactgagccaactagatgtggtgaaccctgtcgcctacttgcaacagcaggtgcttgcattc

SEQ ID NO: 319741 - DNA, 426 bp, Zea mays
  unsure (1)..(426): unsure at all n locations
ctttctgcatgtgttgctaacgcgacaattttccctcaatgctcacaagctcctatagcttcccttcttcccccataccttccatcaatgatagcttcagtatgtgaaaacccagctcttcaaccctataggctccaacaagcaatcgcagcaagcaacatacctttatcacccttgtttcaacaatcgccagccctatctttggtgcagtcattggtacaaaccatcaaggcacagcagctgcagcaactcgtgctacctgtgatcaaccaagtagctctggcaaacctttctccctactatcagcaacaacaatttcttccattcaaccaactatctacactgaaccctgctgcttatttgcagcaacaactattaccattcagncagctagctactggctactctcatcaacaacaacttttt

SEQ ID NO: 319742 - DNA, 374 bp, Zea mays
attttgagcattcagaaacacacctagcgaagcgcactagcaacgacctaacaacaatggctaccaagatattatccctctttgcgcttcttgccctttttgtgagcgcaacaaatgcgttcattattccacaatgctcacttgctcctagtgccattattccacagttcctccctccagttacttcaatgggcttcgaacacccagctgtgcaagcctacaggctacaacaagcgcttgcggcgagcgtcttacaacaaccaattgcccaattacaacaacaatccttggcacatctaaccatacaaaccatcgcaacgcaacagcaacaacaatttctaccagcactgagccaactagctgtggtgaaccct

SEQ ID NO: 319743 - DNA, 414 bp, Zea mays
  unsure (1)..(414): unsure at all n locations
ccaactagcaacatagaaagcacaatagtgtaccaacaatggcagccaaaatattttgcctccttatgctccttggtctttctgcaagtgctgctacggcgaccattttcccgcaatgctcgcaagctcctatagcttcccttcttcccccgtacctctcaccagcggtgtcttcggtatgtgaaaacccaattcttcaaccctacaggatccaacaggcaatcacagctggcatcttacctttatcacccttgttcctccaacaatcatcagccctattacatcagttacctttggtgcatttattggcacaaaacatcagggcacaacaactacaacaacttgtgctagcanaccttgctgcctactctcagcaacagcagtttcttccattcaaccaactagctgcattga

SEQ ID NO: 319744 - DNA, 288 bp, Zea mays
  unsure (1)..(288): unsure at all n locations
ataagagagatggctttttcaggcaactctttaaggagaaaaacgatgagaaaaaggaaggcagcacaccaagcaagaaagaggaagatgataaaggccataaaaatgcagatgatgataatttctttcgcaggcttttcaaggataagaatgaagaanagaaagggattgttcatgacaggaatgaagatgacaagtgtgaggaaggtgattaaagaaacttcttncgcanattatttaagattaacatgangagaggagaacttgaggacctgataaaaatgatga

SEQ ID NO: 319745 - DNA, 389 bp, Zea mays
acggcaacatagaaagcacaatagtgtaccaacaatggcagccaaaatattctgcctacttgtgctggttggtcttactgcaagctgctgctacgcgcgactcattgttcccgcaatgctcgcaagctcctatagcttcccttattgcccagtacctcttaccagcggtgtctcaggtatgtgaaaacccaatacttcaaccctacaggatccaacaggcaatcacagctggcatcttacctttatcacccttgttactgcaacaatcatcagccctattacatcacttacctttggtgcatttattggcacaaaacatcacggcacaacaactacaacaacttgtgctagcaaaccttgctgcctacttttagcaacaacagtttctt

SEQ ID NO: 319746 - DNA, 66 bp, Zea mays
cgccgcggtggcaggttcccgtcgctcgtcgtgtgcgccagcgccggcatgaacgtcgtcttcgtc

SEQ ID NO: 319747 - DNA, 269 bp, Zea mays
aaaaaaaaaaaaaaaaaaaaaaaaataaaaaaaaaaaaaaaaaaaaaaaaaaaaaagggaagaaaaaaaaaaaaaaaaaaaaaaaaaaaaaaaaaaaaaattaaaaaaaaaaaaatgaataaaaaaagaaaaaaatatataaacttaaaaaaaaaaaaaaaatagataaaaaaaaaatgaaaagggggtgccctttttaagaaattatatatttgtgccgtgtcctgagaaaatctaacttttttaataggcccctgaaatataaattg

SEQ ID NO: 319748 - DNA, 366 bp, Zea mays
accacgcgttcgcccacgcgtccgcgagatctgcaactgcgacaacctacgcgtggtaccgctcgccggcgaccagcagtgcgcgccggccgcttgcaagcggactccggaggcggtcaataccgtaaagcatcagcagcagggcagcgtggtgcctgcttcttccgctccggtcacgacggcagctgctcagtgcatgccatctgcggccacagcagcgcaagccatccgcgtcgcctaggagtcgtcgtcgtacatttcgtgcgcgtgattactagcttgttgacgacgacgccagcgcagggattcagcgcggacggtgacgatacaagcacgatggatcgacgagcgtcgagtcacggtcac

SEQ ID NO: 319749 - DNA, 406 bp, Zea mays
ccaacaagcaacatagaaagtggaatccagtagcaacaatagagcaacaatggcgaccaagatattttccctccttatgctccttgctctttctacatgtgttgctaacgcgacaattttccctcaatgctcacaagctcctatagcttcccttcttcccccataccttccatcaattatagcttcaatatgtgaaaacccagctcttcaaccatataggcttcaacaagcaatcgcagcaagcaacatacctttatcgcccttgttgtttcaacaatcgccagccctatctttggtgcagtcattggtacaaaccatcagggcacaacagctgcagcaactcgtgctacctctgatcaaccaagtagctctggcaaacctttctccctactctcagcaacaacca

SEQ ID NO: 319750 - DNA, 379 bp, Zea mays
caactagcaacatagaaagcacaatagtgtaccaacaatggcagccaaaatattttgcctccttatgtccttggtctttctgcaagtgctgctacggcgaccattttcccgcaatgctcgcaagctcctatagcttcccttcttcccccgtacctctcaccagcggtgtcttcggtatgtgaaaacccaattcttcaaccctacaggatccaacaggcaatcacagctggcatcttacctttatcacccttgttcctccaacaatcatcagccctattacatcagttacctttggtgcatttattggcacaaaacatcagggcacaacaactacaacaacttgtgctagcaaaccttgctgcctactctcagcaacagc

SEQ ID NO: 319751 - DNA, 302 bp, Zea mays
gagaaaatcgtgaagaccttttagaaactgaaatggcaaggcttaccgttacagaagtgaagcgattaggcactgtctgtccaatgcagtctgcgctttagacttcagactgactgtgtcatatgatctcaaatattgaaccagtgactgccgtgaatatatacaagtactgatgagaagatgaacagcaatgatgggatgaaagatactttgatgccaaacactgactctgcaatattgaatgtgtcaatattcgaagacttgatattatagagcaatcctacaatggccttgtacttata

SEQ ID NO: 319752 - DNA, 84 bp, Zea mays
gtcctttttctttttgatagtattacgtttaaaactatgtatgaccgaattatttgtcatcctggactcaattctgctgcaacc

SEQ ID NO: 319753 - DNA, 436 bp, Zea mays
cttcctttcttcccccatacctctcaccagcggtgtcttcagtatgtgaaaacccaattcttcaaccctacaggatccaacaggcaatcgcagcaggcatcttacctttatcacccttgttcctccaacaaccgtcagccctattacagcagttacctttggtgcatttgttggcacaaaacatcaaggcacaacaactacaacaacttgtgctaggaaaccttgctgcctactctcagcaacagcagtttcttccattcaaccaactggctgcattgaactctgctgcttatttgcaacaacaactaccattcagtcagctagctgctgcctacccccagcaatttcttccattcaaccaactggcagcattgaactctgctgcttatttacaacagcaacagctaccaccattcaaccagctagctgatgtgag

SEQ ID NO: 319754 - DNA, 437 bp, Zea mays
gaccaactagcaacatagaaagcacaatagtgtaccaacaatggcagccaaaatattttgcctccttatgctccttggtctttctgcaagtgctgctacggcgaccattttcccgcaatgctcgcaagctcctatagcttcccttcttcccccgtacctctcaccagcggtgtcttcggtatgtgaaaacccaattcttcaaccctacaggatccaacaggcaatcacagctggcatcttacctttatcacccttgttcctccaacaatcatcagccctattacatcagttacctttggtgcatttattggcacaaaacatcagggcacaacaactacaacaacttgtgctagcaaaccttgctgcctactctcagcaacagcagtttctttcattcaaccaactagctgcattgaactctgcttcttatttgcaac

SEQ ID NO: 319755 - DNA, 138 bp, Zea mays
ccggctagacgtacgcgtccggtccttacttcagtgtagtataaggttaaaactatgtatgaccgaattaggtgggatccttgactcaatgctgctgtatccaaacgaacgtcaccatgacaggcctatacagaacaa

SEQ ID NO: 319756 - DNA, 451 bp, Zea mays
attgagaccaacaagcaacatagaaagtggaatccagtagcaacaatagagcaacaatggcgaccaagatactttccctccttatgctccttgctctttctgcatgtgttgctaacgcgacaattttccctcaatgctcacaagctcctatagcttcccttcttcccccataccttccatcaatgatagcttcagtatgtgaaaacccagctcttcaaccctataggctccaacaagcaatcgcagcaagcaacatacctttatcacccttgtttcaacaatcgccagccctatctttggtgcagtcattggtacaaaccatcaaggcacagcagctgcagcaactcgtgctacctgtgatcaaccaagtagctctggcaaacctttctccctactatcagcaacaacaatttctttcattcaaccaactatctacactgaaccctgctgt

SEQ ID NO: 319757 - DNA, 368 bp, Zea mays
caacaatggcagctaaaatattttgcctacttatgctccttggtctttctgcaagtgctgctacggcgaccattttcccacaatgctcacaagctcctatagcttcccttcttcccccgtacctctcaccaacggtgtcttcggtatgtgaaaacccaattcttcaaccctacatgatccaacaggcaatcgcagctggcatcttacctttatcaccctagttgctccaacaatcatcagccctattacagcagttacctttggtgcatttattggcacataacatcagggcacaacaactacaacaacttgtgctagccaaccttggtggctactctaagaacagcagtttcttccattcaaccaac

SEQ ID NO: 319758 - DNA, 326 bp, Zea mays
gcaacatagaaagcacaatagtgtaccaacaatggcagccaaaatattttgcctccttatgctccttggtctttctgcaagtgctgctacggcgaccattttcccacaatgctcacaagctcctatagcttcccttcttcccccgtacctctcaccagcggtgtcttcggtatgtgaaaacccaattcttcaaccctataggatccaacaggcaatcgcagctggcatcttacctttatcacccttgttccttcaacaatcatcagccctattacagcagttacctttggtgcatttattggcacaaaacatcagggcacaacaac

SEQ ID NO: 319759 - DNA, 439 bp, Zea mays
  unsure (1)..(439): unsure at all n locations
gcaacatagaaagcacaatagtgtaccaacaatggcagccaaaatattttgcttccttatgctccttggtctttctgcaagtgctgctaccgcaaccattttcccacaatgctcacaagctcctatagcttcctttcttcccccatacctctcaccagcggtgtcttcagtatgtgaaaacccaattcttcaaccctacaggatccaacaggcaatcgcagcaggcatcttacctttatcacccttgttcctncaacaaccgtcagccctattacagcagttacctttggtgcatttagtggcacaaaacatcaaggcacaacaactacaacaacttgtgctaggaaaccttgctgcctactctcagcaacaacagtttcttccattcaaccaactggctgcattgaactctgctgcttatttgcaacaacaactacca

SEQ ID NO: 319760 - DNA, 357 bp, Zea mays
caacaagcaacatagaaagtggaatacagtagcaacaatagagcaacaatggcggccgggatattttccatccttatgctccttgctctttctgcatgtgttgctaacgcgaccatttttcctcaatactcacaagctcctatagctgcccttcttcccccataccttccatcaatgaccgcttcagtttgtgaaaacccagcccttcaaccctacaggctccaacaagcaatcgcaacaagcaacttacctttatcacccctgttctttcaacaatcgccagccctatctttggtgcagtcattggtacaaaccatcagggcacaacagctgcaacaactcgtgctaccagtgatc

SEQ ID NO: 319761 - DNA, 411 bp, Zea mays
cttcccttcttcccccgtacctctcaccaacggtgtcttcggtatgtgaaaacccaattcttcaaccctacaggatccaacaggcaatcgcagctggcatcttacctttatcacccttgttcctccaacaatcatcagccctattacagcagttacctttggtgcatttattggcacaaaacatcagggcacaacaactacaacaacttgtgctagcaaaccttgctgcctactctcagcaacagcagtttcttccattcaaccaactagctgcattgaactctgcttcttatttgcaacaacaacaactaccattcagccagctatctgctgcctacccccagcaatttcttccattcaaccaactgacagcattgaactctcctgctttttacagcagcaacaactact

SEQ ID NO: 319762 - DNA, 432 bp, Zea mays
gaaagtggaatccagtagcaacaatagagcaacaatggcgaccaagatactttccctgcttatgctccttgctctttctgcatgtgttgctaacgcgacaattttccctcaatgctcacaagctcctatagcttcccttctttcaccataccttccatcaatgatagcttcagtatgtgaaaacccagctcttcaaccctataggctccaacaagcaatcgcagcaagcaacatacctttatcacccttgtttcaacaatcgccagccctatctttggtgcaatcattggtacaaaccatcaaggcacatcaactgcaacaactcgtgctacctgtgatcaaccaagtaacttttggcaacctttcttcctactatcagcaacaacaatttctttcattcaaccaactatctacactgaacccttctgctta

SEQ ID NO: 319763 - DNA, 438 bp, Zea mays
agcaacatagaaagcacaatagtgtaccaacaatggcagccaaaatattttgcctccttatgctccttggtctttctgcaagtgctgctacggcgaccattttcccgcaatgctcgcaagctcctatagcttcccttcttcccccgtacctctcaccagcggtgtcttcggtatgtgaaaacccaattcttcaaccctacaggatccaacaggcaatcacagctggcatcttacctttatcacccttgttccttcaacaatcatcagccctattacatcagttacctttggtgcatttattggcacaaaacatcagggcacaacaactacaacaacttgtgctagcaaaccttgctggctactctcagcaacagcagtttcttccattcaaccaactagctgcattgaactctgcttcttatttgcaacaacaacaac

SEQ ID NO: 319764 - DNA, 415 bp, Zea mays
  unsure (1)..(415): unsure at all n locations
gtcgaacagaacagcatgaagatggtcatcgttctcgtcgtgtgcctggctctgtcagctgccagcgcctctgcaatgcagatgccctgcccctgcgcggggctgcagggcttgtacggcgctggcgccggcctgacgacgatgatgggcgccggcgggctgtacccctacgcggagtacctgaggcagccgcagtgcagcccgctggcggcggcgccctactacgccgggtgtgggcagccgagcgccatgttccagccgctccggcaacagtgctgccagcagcagatgaggatgatggacgtgcagtccgtcgcgcagcagctgcagatgatgatgcagcttgagcgtgccgctgccgncagcagcagcctgtacgagccagctctgatgcagcagcagcagcagctgctgg

SEQ ID NO: 319765 - DNA, 392 bp, Zea mays
cctcactggaaagactatcaccctcgaggtggagtcttctgacaccattgacaacgtgaaggccaagatccaggacaaggagggcatccccccggaccagcagcggctcatctttgctggcaagcagctcgaggacgggcgcacacttgccgactacaacatccagaaggagagcaccctccaccttgttctccgcctcaggggaggcatgcagatcttcgtcaagaccctcactggaaagactatcaccctcgaggtggagtcttctgacaccatcgacaacgtcaaggccaagatccaggacaaggagggcatccctccagaccagcagcggctcatttttgccggcaagcagctcgaagacgggcgcacgctggccgactacaacattc

SEQ ID NO: 319766 - DNA, 141 bp, Zea mays
cgacccacctcggctcttccatcatcgctgttttagaactgttctcctgatccggttattaacaatcgcgacctctcattcgggaactacgcctgaaactctaacttagcatcatcttcatgattagaaagactacctccc

SEQ ID NO: 319767 - DNA, 362 bp, Zea mays
agtcagaaacacatcaagcgaacgtactagcaacaacctaacaacaatggctacgaagatattataactccttgcagcttcttgcgctttttgcgagcgcaacaaatgcgtccattattccacaatgctcacttgctcctagttccattattccacagttcctcccaccagttacttcaatggccttcgaacacccagctgtgcaagcctataggctacaacaagcgattgcagcgagcgacttacaacaaccaattgcccaattgcaacaacaatccttggcacatctaacaatacaaaccatcgcaacgcaacagcaacaacatgtcctaccatcactgagccacctagccatggtgaac

SEQ ID NO: 319768 - DNA, 349 bp, Zea mays
cgactagcaacatatgaaagcacaataagtaccaacaatggcagccaaaatagtggcttccttaaactccttggtctttctgcaagtgctgctaccgcaaccattttcccacaatgctcacaagctcctatagcttcctttcttcccccatacctctcaccagcggtgtcttcagtatgtgaaaacccaattcttcaaccctacaggatccaacaggcaatcgcagcaggcatcttacctttatcacccttgttcctccaacaaccgtcagccctattacagcagttacctatggtgcatttgataggcacaaaacattaaagcacaacaactacaacaacttgagcta

SEQ ID NO: 319769 - DNA, 209 bp, Zea mays
gcggaacaagcaacatagaaagcggataacaccacccacaatagagcaacaatggcgaccattttaaaggccctggttaccctccttactctggctgcatgtgttgctaacgcgacaatattccctcaatgctcacaagctcctatagcttcccttcttcccccataccttccatcaatgatagcttaagtatgttaaaacccagctct

SEQ ID NO: 319770 - DNA, 182 bp, Zea mays
cgcacgcatccgctcacgcgtccgtaacacccccgcggactataacatccaaaaggagtttttaaaagacctcgagcccacgctactcggtggaatcattgaaccctctctgcaagcactcgctcgcaaactacaaccaggacaagacgatcagccgcaaatgcaattcacgactgcaccca

SEQ ID NO: 319771 - DNA, 181 bp, Zea mays
  unsure (1)..(181): unsure at all n locations
tcgaccccgcgtccgctcctctcctctctccggcgcaactaccgactgccagtcagcctcagccatgncggcatttttatgagcatggcttgcgccctctttacgaggcgtccctgctctcctacatcaatgccactccggctctcgcctccctcctctgctgcttttgctatctagactc

SEQ ID NO: 319772 - DNA, 372 bp, Zea mays
agaaacacacctatcgaagcgcactaacaacgacctaacaacaatggctaccagggtattattccatatttgcgcttcttgccctttttgtgagcgcaacaaatgcgttcattattccacaatgctcacttgctcctagtgccattattccacagttcctccctccagttacttcaatgggcttcgaacacccagctgtgcaagcctacaggctacaacaagcgcttgcggcgagcgtattacaacaaccaattgcccaattacaacaacaatccttggcacatctaaccatacaaaccatcgcaacgcaacagcaacaacaatttctaccagcactgaaccaactagctgtggtgaaccctgtcgccttac

SEQ ID NO: 319773 - DNA, 283 bp, Zea mays
cgactagcaacatattaaagcacaatgagtaccaacaatggcagccaaaatagtgggcctctttatactccttggtctttctgcaagtgctgctacggcgaccattttcccgcaatgctcgcaagctcctatagcttcccttcttcccccgtacctctcaccagcggtgtcttctgtatgtgaaaacccaattcttcaaccctacaggatccaacaggcaatcgcagctggcatcttacctttatcacccttgattctacaacaatcttcagtcctattacaa

SEQ ID NO: 319774 - DNA, 204 bp, Zea mays
gaccaactagcactatagaaagcataaagcgtcccaacaatggcagccaagaaggatttttaaaatgctctaaccctatctgcaagtgctgctaccgcgaccattttcccacaatgctcacaagctcctatagcttcccttcttcccccgtacctctcaccatcagtgtctacagcatgtgaaaacccaattctttaaccctat

SEQ ID NO: 319775 - DNA, 187 bp, Zea mays
gaccaactagcaacatagaaagcacaatagtgtaccaacaatggcagccaaaatattttgcctccttatgctccttggtctttctgcaagtgctgctacggcgaccattttcccgcaatgctcgcaagctcctatagcttcccttcttcccccgtacctctcaccagcggtgtcttcggcatgtgaa

SEQ ID NO: 319776 - DNA, 341 bp, Zea mays
attcagaaacacaccaagcgaagcgcactagcaacaacctaacaacaatggctaccaagatattatccctccttgcgcttcttgcgctttttgcgagcgcaacaaatgcgtccattattccacaatgctcacttgctcctagttccattattccacagttcctcccaccagttacttcaatggccttcgaacacccagctgtgcaagcctataggctacaacaagcgattgcggcgagcgtcttacaacaaccaattgcccaattgcaacaacaatccttggcacatctaacaatacaaaccatcgcaacgcaacagcaacaacagttcctaccagcactg

SEQ ID NO: 319777 - DNA, 354 bp, Zea mays
ggaatccagtagcaacaacagagcaacaatggcgaccaagatattttccctccttatgctccttgctctttctgcatgtgttgctaacgcgacaattttccctcaatgctcacaagctcctatagcttcccttcttcccccataccttccatcaatgatagcttcagtatgtgaaaacccagctcttcagccctataggctccaacaagcaatcgcagcaagcaacatacctttatcacccttgttgtttcaacaatcgccagccctatctttggtgcagtcattggtacaaaccatcagggcacagcagctgcagcaactcgtgctacctgtgatcaaccaagtagctctggc

SEQ ID NO: 319778 - DNA, 385 bp, Zea mays
gctagctactgcctactctcagcaacaacaacttcttccatttaaccaattggccgcactgaaccccgctgcttatttgcagcagcaaatactactaccatttagccagctagctgcagcaaaccgtgcttccttcttgacacagcaacagttgctgcctttctaccagcagtttgcggctaaccccgcaaccctcttacaactacaacaattgttgccctttgtccaacttgctttgacagaccgagcggcctcctaccaacaacacatcattggtggtgccctcttttagattgcttattagttgtaattcaataataaagttttttggatgatgtatgtggccaaccagaaataagaagttacattttcagattttaatgtg

SEQ ID NO: 319779 - DNA, 340 bp, Zea mays
catggagctcgccttgggggccatggccagcttggcccctaagctaggcgacctgctcatggaggagtatgtcgtgcagaagggcctcaagcccgacatcgagtctctctccagggagcttgtgatgatgaaagccgccctcgtcgacgcgtctcgggtaccacctgatcagctcaccgaggtggaaaagctttgggcacgcatggtccgggacctgtcgtatgacatggaggacgccgtcgacgatttcatcctgcgtgtggctggtggtgacgactctgccgctgactcaaaattcttcaagaagacccttgccatggtcaaggacgtgatgtcgatg

SEQ ID NO: 319780 - DNA, 337 bp, Zea mays
attttcagcattcaaaaacacaccaagcgaagcgcactagcaacgacctaacaccaatggctaccaagatattagccctccttgcgcttcttgcccttttagtgagcgcaacaaatgcgttcattattccacagtgctcacttgctcctagtgccagtattccacagttcctcccaccagttacttcaatgggcttcgaacatccagccgtgcaagcctacaggctacaactagcgcttgcggcgagcgccttacaacaaccaattgcccaattgcaacaacaatccttggcacatctaaccctacaaaccattgcaacgcaacaacaacaacaaca

SEQ ID NO: 319781 - DNA, 242 bp, Zea mays
agccacacccatgcccgtgccaacagccgcatccaagcccgtgccagctgcagggaacctgcggcgttggcagcaccccgatcctgggccagtgcgtcgagtttctgaggcatcagtgcagcccgacggcgacgccctactgctcggctcatgccagtcgttgccgagcagtgttgcagcactcagcagtggaccgacaccggacagcgactcgctgtctcagcatctgacacacgaacgca

SEQ ID NO: 319782 - DNA, 272 bp, Zea mays
tcgcctgcgcataggcagacagatacttaacgtagcgtactagctacgaggtgacaccacagagtctcaacagatattccttccttgtgcttgttgctcccatggcgagctcaacgaatgcttacattgtgtcgaaatgatcacttgctcctagtgccattgatagacagtttctcatttcagttacttaaatcgagttccatcgtccagctatgccagcttatactgtaccagacatggacgctgtcaagccgttcgaacaatatattgcc

SEQ ID NO: 319783 - DNA, 331 bp, Zea mays
tcgagcattcagaaacacaccaagcgaagctacctagcaacgacttaacaacaatggctaccaagatattagccctccttgcgcttcttgccctttttgtgagcgcaacaaatgcgttcattattccacaatgctcacttgctcctagtgccattataccacagttcctccgaccagttacttcaatgggcttcgaacacctagctgtgcaagcctacaggctacaacaagcgcttgcggcgagcgtcttacaacaaccaattaaccaattgcaacaacaatccttggcacatctaaccatacaaaccatcgcaacacaacagcaacaaca

SEQ ID NO: 319784 - DNA, 357 bp, Zea mays
cagcaagcaacatagaaagtagaatccattagcaacaatagagcaacaatggcgaccaagatattttccctccttatgctccttgctctttctacatgtgttgctaacgcgacaattttccctcaatgctcacaagctcctatagcttcccttcttcccccataccttccatcaattatagcttcagtatgtgaaaacccagctcttcaaccatataggcttcaacaagcaatcgcagcaagcaacatacctttatcgcccttgttgtttcaacaatcaccagccctatctttggtgcagtcattggtacaaaccatcagggcacaacagctgcagcaactcgtgctacctgtgatc

SEQ ID NO: 319785 - DNA, 336 bp, Zea mays
agctcatcgactccagattggagaactcgacaccatgaaggtgctgatcgttgcccttgctctcctggcgctcgctgcgagcgccgcctccagtacaagcggcggctgtggctgccagacaccaccgtttcatctaccgcctccgttctatatgccgcctccgttctatctgccgccgcagcagcagccgcagccatggcaataccccactcaaccaccgcagctaagcccgtgccagcagttcggatcctgcggcgtcggcagcgtcggcagcccgttcctgggccagtgcgtcgagttcctgaggcaccagtgcagcccggcggcgacgcccta

SEQ ID NO: 319786 - DNA, 207 bp, Zea mays
ccaacagcaacatagaaagtggaatccagtagcaacaatagagcaacaatggcgaccaagatactttccctccttatgctccttgctctttctgcatgtgttgctaacgcgacaattttccctcaatgctcacaagctcctatagcttcccttcttcccccataccttccatcaatgatagcttcagtatgtgaaaacccagctctt

SEQ ID NO: 319787 - DNA, 350 bp, Zea mays
gaccaactagcatcatacaaagcacaataatgtaccaacaatggcagccaaaatatcgggcctacttatgctccttggtctatctgcaagtgctgctacggcgaccattttaccgcaatgctcgcaagctcctatagcttaccttattgccccgtacctctcaccagcggtgtcttcggtatgtgaaaacccaattcttgaaccctacatgatccaacaggcaatcacagctggcatcttacctttatcacccttgttccttcaacaatcatcagccctattacatcagttacctttggtgcatttattggcacaaaacatcaaggcacaacaactaccacaacttgtgc

SEQ ID NO: 319788 - DNA, 392 bp, Zea mays
ctttcccccttctcccaattccctccgtcggccgccgctccatcccgtacgaggacaccatgagggagtgcatttcgatccacatcggccaggccggtatccaggtcggaaacgcgtgctgggagctgtactgccttgagcatggcattcaggctgacggtcagatgcccggtgacaagaccattgggggaggtgatgatgctttcaacaccttcttcagtgagactggtgctgggaagcacgtgccccgtgctgtttttgttgaccttgaacccactgtcatcgatgaggtgaggactggcacctaccgtcagctcttccaccctgagcagctcatcagtgggaaggaggatgccgccaacaactttgcccgtggtcactacaccattggc

SEQ ID NO: 319789 - DNA, 268 bp, Zea mays
atgccactaccctactcaaccgccccggcctcagcctcatccccagccacacgcatgcccgtgccaacagccgcatccaagcccgtgccagctgcagggaacctgcggcgttggcagcaccccgatcctgggccagtgcgtcgagtttctgaggcatcagtgcagcccgacggcgacgccctactgctcgcctcagtgccagtcgttgcggcagcagtgttgccagcagctcaagcaggtggagccgcagcaccggtaccaggcgatc

SEQ ID NO: 319790 - DNA, 395 bp, Zea mays
agaccaactagcaacatagaaagcacaatagtgtaccaacaatggcagccaaaatattttgcctccttatgctccttggtctttctgcaagtgctgctacggcgaccattttcccgcaatgctcgcaagctcctatagcttcccttcttcccccgtacctctcaccagcggtgtcttcggtatgtgaaaacccaattcttcaaccctacaggatccaacaggcaatcacagctggcatcttacctttatcacccttgttcctccaacaatcatcagccctattacatcagttacctttggtgcatttattggcacaaaacatcagggcacaacaactacaacaacttgtgctagcaaaccttgctgcctactctcagcaacagcagtttctttca

SEQ ID NO: 319791 - DNA, 348 bp, Zea mays
ttgagaccaactagcaacatagaaagcacaatagtgtaccaacattggcagccaaaatattttgcttccttatgctccttggtctttctgcaagtgttgctaccgcaaccattttgccacaatgctcacaagctcctatagcttcccttcttccaccatacctctcaccagcggtgtcttcaatgtgtgaaaccccaattgttcaaccctacaagatccaacaggcaatcgcaacatgcatcttaccattatcaccctttgttcttcaacaaccgtcagacctattacagcagctacctttggtccatttggtggcacaaaacatcatggcacaacaactacaacaac

SEQ ID NO: 319792 - DNA, 316 bp, Zea mays
cctatctttggtgcagtcattggtacaaaccatcagggcagaacagttgcagcaactcgtgctaccagtgatcagccaagtagctctggcaaacctttccccctactctcagcaacaacaatttcttccattcaaccaactgtctatactgaaccctgctgcttatttgcagcaacaacaactactaccattcagccagctagctactgcctactctcagcagcaacaatttcttccatttaaccaattggccgcactgaacccctctgcttatttccagcagcaaatactactaccatttggccagctagctaca

SEQ ID NO: 319793 - DNA, 388 bp, Zea mays
gcaacatagaaagcacaatagtgtaccaacaatggcagccaaaatattttgcttccttatgctccttggtctttctgcaagtgctgctaccgcaaccattttcccacaatgctcacaagctcctatagcttcctttcttcccccatacctctcaccagcggtgtcttcagtatgtgaaaacccaattcttcaaccctacaggatccaacaggcaatcgcagcaggcatcttacctttatcacccttgttcctccaacaaccgtcagccctattacagcagttacctttggtgcatttgttggcacaaaacatcaaggcacaacaactacaacaacttgtgctaagaaaccttgctgcctactctcagcaacagcagtttcttccattc

SEQ ID NO: 319794 - DNA, 310 bp, Zea mays
agaccattagctttatctactccagagcgcagaagaacccgatcgacaccatgagggtgttgctcgttgccctcgctctcctggctctcgctgcgagcgccacctccacgcatacaagcggcggctgcggctgccagccaccgccgccggttcatctaccgccgccggtgcatctgccacctacggttcacctgccacctccggtgcatctcccaccgccggtccacctgccgccgccggtccacctgccaccgtcggtccatgtgccgccgacggttcatctgccgtcgtcaccatgccactaccctac

SEQ ID NO: 319795 - DNA, 250 bp, Zea mays
attcaaaaacacaccaagcgaagcgcactagcaacgacctaacaccaatggctaccaagatattagccctccttgcgcttcttgcccttttagtgagcgcaacaaatgcgttcattattccacagtgctcacttgctcctagtgccattattccacagttcctcccaccagttacttcaatgggcttcgaacatccagccgtgcaagcctacaagctacaactagcgcttgcggcgagcgccttacaaca

SEQ ID NO: 319796 - DNA, 217 bp, Zea mays
tgccgttctaccagcacgctgcgcctaacgctggcaccctcttacaactgcaacaattgctgccattcaaccaacttgctttgacaaacccagcagcattctaccaacaacccatcattggtggtgccctcttttagatttcttatgagttatagttcaataataaagttttttgtctgatgtttgtggcttcccagaaataagaaagtacatttct

SEQ ID NO: 319797 - DNA, 339 bp, Zea mays
attttgagcattcagaaacacacctagcgaagcgcactagcaacgacctaacaacaatggctaccaagatattatccctctttgcgcttcttgccctttttgtgagcgcaacaaatgcgttcattattccacaatgctcacttgctcctagtgccattattccacagttcctccctccagttacttcaatgggcttcgaacacccagctgtgcaagcctacaggctacaacaagcgcttgcggcgagcgtcttacaacaaccaattgcccaattacaacaacaatccttggcacatctaaccatacaaaccatcgcaacgcaacagcaacaacaatttc

SEQ ID NO: 319798 - DNA, 326 bp, Zea mays
agaaacacacctagcgaagcgcactagcaacgacctaacaacaatggctaccaagatattatccctctttgcgcttcttgccctttttgtgagcgcaacaaatgcgttcattattccacaatgctcacttgctcctagtgccattattccacagttcctccctccagttacttcaatgggcttcgaacacccagctgtgcaagcctacaggctacaacaagcgcttgcggcgagcgtcttacaacaaccaattgcccaattacaacaacaatccttggcacatctaaccatacaaaccatcgcaacgcaacagcaacaacaatttc

SEQ ID NO: 319799 - DNA, 351 bp, Zea mays
caactagcaacatagaaagcacaatagtgtaccaacaatggcagccaaaatattttgcctccttatgctccttggtctttctgcaagtgctgctacggcgaccattttcccgcaatgctcgcaagctcctatagcttcccttcttcccccgtacctctcaccagcggtgtcttcggtatgtgaaaacccaattcttcaaccctacaggatccaacaggcaatcgcagctggcatcttacctttatcacccttgttcctccaacaatcatcagccctattacaacagttacctttggtgcatttattggcacaaaacatcagggcacaacaactacaacaacttgtgctagc

SEQ ID NO: 319800 - DNA, 397 bp, Zea mays
gcaacatagaaagtggaatccagtagcaacaatagagcaacaatggcgaccaagatactttccctccttatgctccttgctctttctgcatgtgttgctaacgcgacaattttccctcaatgctcacaagctcctatagcttcccttcttcccccataccttccatcaatgatagcttcagtatgtgaaaacccagctcttcaaccctataggctccaacaagcaatcgcagcaagcaacatacctttatcacccttgtttcaacaatcgccagccctatctttggtgcagtcattggtacaaaccatcaaggcacagcagctgcagcaactcgtgctacctgtgatcaaccaagtagctctggcaaacctttctccctactatcagcaacaacaat

SEQ ID NO: 319801 - DNA, 332 bp, Zea mays
tgagcattcagaaacacacctagcgaatcgcactagcaacgacctaacaacaatggcttccaagacattatccctccttgcgcttcttgccctttttgtgagtgcaacaaatgcgttcattattccacaatgctcacttgctccgagtgccattattccacagttcctccctccagttacttcaatgggcttcgaacacccagctgtgcaagcctataggctacaacaagcgcttgcggcgagcgtcttagaacaaccaattgcccaattacaacaacaatccttggcacatctaaccatacaaaccatcgcaacgcatcagcaacaagcac

SEQ ID NO: 319802 - DNA, 67 bp, Zea mays
acgacccacgcgtccgtgaacattcataaatcacacctatccattctcacaatcaccaacacaacaa

SEQ ID NO: 319803 - DNA, 356 bp, Zea mays
atattttgagcattcagaaacacaccaagcgaagcgcactagcaacgacctaacaacaatggctaccaagatattagccctccttgcgcttcttgccctttttgtgagcgcaacaaatgcgttcattattccacaatgctcacttgctcctagtgccattattccacagttcctcccaccagttacttcaatgggcttcgaacacctagctgtgcaagccaacatgcaacaacaagcgcttgcggcgagcgtcttacaacaaccaattgcccaattgcaacaacaatccttgccacatctaacaatacaagccatcacaacgcatcagcaacaacagttcctaccagcactgagcc

SEQ ID NO: 319804 - DNA, 353 bp, Zea mays
gaagcgcactagcaacgacctaacaccaatggctaccaagatattagccctccttgcgcttcttgcccttttagtgagcgcaacaaatgcgttcattattccacagtgctcacttgctcctagtgccattattccacagttcctcccaccagttacttcaatgggcttcgaacatccagccgtgcaagcctacaggctacaactagcgcttgcggcgagcgccttacaacaaccaattgcccaattgcaacaacaatccttggcacatctaaccctacaaaccattgcaacgcatcaacaacaacaacaacagtttctgccatcactgagccacctagccgtggtgaaccctg

SEQ ID NO: 319805 - DNA, 344 bp, Zea mays
gaccaactagcaacatagaaagcacaatagtgtaccaacaatggcagccaaaatattttgcctccttatgctccttggtctttctgcaagtgctgctacggcgaccattttcccacaatgctcacaagctcctatagcttcccttcttcccccgtacctctcaccagcggtgtcttcggtatgtgaaaacccaattcttcaaccctataggatccaacaagcaatcgcagctggcatcttacctttatcacccttgttccttcaacaatcatcaagcctattacaagaattacctttggtgcatttaatggcacaaaacattaaggcacaacaactatcacaac

SEQ ID NO: 319806 - DNA, 358 bp, Zea mays
tcgattgagaccaactagcaacatagaaagcacaatagtgtaccaacaatggcagccaaaatattttgcttccttatgctccttggtctttctgcaagtgctgctaccgcaaccattttcccacaatgctcacaagctcctatagcttcctttcttcccccatacctctcaccagcggtgtcttcagtatgtgaaaacccaattcttcaaccctacaggatccaacaggcaatcgcagcaagcatcttacctttatcacccttgttcctccaacaaccgtcagccctattacagcagttacctttggtgcatttgttggcacaaaacatcaaggcacaacaactacaacaacttgtgc

SEQ ID NO: 319807 - DNA, 351 bp, Zea mays
caactagcaacatagaaagcacaatagtgtaccaacaatggcagccaaaatattttgcttccttatgctccttggtctttctgcaagtgttgctaccgcaaccattttcccacaatgctcacaagctcctatagcttcccttcttcccccatacctctcaccagcggtgtcttcaatgtgtgaaaacccaattgttcaaccctacaggatccaacaggcaatcgcaacaggcatcttaccattatcacccttgttccttcaacaaccgtcagccctattacagcagttacctttggtccatttggtggcacaaaacatcaaggcacaacaactaccacaacttgggctaac

SEQ ID NO: 319808 - DNA, 289 bp, Zea mays
caactagcaacatagaaagcacaatagtgtaccaacaatggcagccaaaacattttgcctccttatgctccttggtatttctgcaagtgctgctacggcgaccattttcccgcaatgctcacaagctcctatagcttcccttcttcccccgtacctctcaccagcggtgtcttcggtatgtgaaaacccaattcttcaaccctacaggatccaacatgcaatcgcagctggcatcttacctttatcacccttgctccttcaacaatcatcagccctattacagcagtta

SEQ ID NO: 319809 - DNA, 332 bp, Zea mays
actgcagctgataccaactatcagtcgcgtagacgcagcgaacgcttgctgctgatctgcagcatcggcagtcgtcttagcattgcatcgactggctgcagtgaacagctgctgtctacttgcaggcacaacatctactaccatgtaatgatcacgctggaagccatgatggcttcttactgcgtcaacatcttctgccattacatctggaagctgtggaaaacgtagatcattccatgcgacaacgtcaatgggtgccactttaccgacagctagtgcgatacatatacgcctgtttgcaacagcaccatttgctagcattctacccacat

SEQ ID NO: 319810 - DNA, 326 bp, Zea mays
caatagtgtaccaacaatggcagccaaaatattttgcctccttatgctccttggtctttctgcaagtgctgctacggcgaccattttcccgcaatgctcgcaagctcctatagcttcccttcttcccccgtacctatcaccagcggtgtcttcggtatgtgaaaacccaattcttcaaccctacaggatccaacaggcaatcacagctggcatcttacctttatcacccttgttcctacaacaatcatcagccctattacatcagttacctttggtgcatttattggcacaaaacatcacggcacaacaactacaacaacttgtgc

SEQ ID NO: 319811 - DNA, 348 bp, Zea mays
tttgagcattcagaaacacaccaagcgaagcgcactagcaacaacctaacaacaatggctaccaagatattatccctccttgcgcttcttgcgctttttgcgagcgcaacaaatgcgtccattattccacaatgctcacttgctcctagttccattattccacagttcctcccaccagttacttcaatggccttcgaacacccagctgtgcaagcctataggctacaacaagcgattgcggcgagcgtcttacaacaaccaattgcccaattgcaacaacaatccttggcacatctaacaatacaaaccatcgcaacgcaacagcaacaacagttcctaccagcactg

SEQ ID NO: 319812 - DNA, 349 bp, Zea mays
ctggacgtcagcctagcaattagctcatcgactccagattggagaactcgacaccatgaaggtgctgatcgttgcccttgctctcctggcgctcgctgcgagcgccgcctccagtacaagcggcggctgtggctgccagacaccaccgtttcatctaccgcctccgttctatatgccgcctccgttctatctgccgccgcagcagcagccgcagccatggcaataccccactcaaccaccgcagctaagcccgtgccagcagttcggatcctgcggcgtcggcagcgtcggcagcccgttcctgggccagtgcgtcgagttcctgaggcaccagtgcagcccggcggcg

SEQ ID NO: 319813 - DNA, 349 bp, Zea mays
gatcgcgagcggccgaccttttacagcagttacctttggtgcatttgttggcacaaagcatcaaggcacaacaactacaacaacttgtgctacgaaaccttgctgcctactctcagcaacagcaggttcttccattcaaccaactggctgcattgaactatgctgcttatttgcaacaacaactaccattcagtcagctagctgctgcctacccccagcaatttcttccattcaaccaactggcagcattgaactctgctgcttatttacaacagcaacagctaccaccattcagccagctagctgatgtgagccctgttgccttcttgacacaacaacagttgttgcc

SEQ ID NO: 319814 - DNA, 424 bp, Zea mays
  unsure (1)..(424): unsure at all n locations
tcgaacagaacatgctctttctacagctcgttgaagttttaaattatattggcattcgtgttgtcaagtctgaactaaagcctcagccaaggtggcatgtctgctaaggtgccaaggtactgttatcacatacttaagaggccactgtcaatgaccacacaaacttggttaaattgcatatgggttttcctgtcatcagttctaattcttgtgcattcatattttgaaatgaatgatttaaatgggctacctcacacatgnctttaatggtattcaaggaaccatgttttggttcagaagcttgcatatgcatgacgcatgcagctgacacgcccatatctatccacggggttatattatctgaagattcatatatggataagtgatggtctaagatttggtgacatggattgggaattttggc

SEQ ID NO: 319815 - DNA, 313 bp, Zea mays
ctgcctactctcagcaacaactactaccattcagccagctagctggtgtgagccctgctaccttattgacacaaccacagttgttgccgttctaccagcacgctgcgcctaacgctggcaccctcttacaactgcaacaattgctgccattcaaccaacttgctttgacaaacccagcagcattctaccaacaacccatcattggtggtgccctcttttagatgtcttatgagttatagttcaataataaagttttttgtctgatgtttgtggcttcccagaaataagaaagtacatttctagattcttaaaa

SEQ ID NO: 319816 - DNA, 347 bp, Zea mays
caacaagcaacatagaaagtggaatccagtagcaacaatagagcaacaatggcgaccaagatattttccctccttatgctccttgctctttctacatgtgttgctaacgcgacaattttccctcaatgctcacaagctcctatagcttcccttcttcccccataccttccatcaattatagcttcaatatgtgaaaacccagctcttcaaccatataggcttcaacaagcaatcgcagcaagcaacatacctttatcgcccttgttgtttcaacaatcgccagccctatctttggtgcagtcattggtacaaaccatcaaggcacaacagctgcaacaactcgtgct

SEQ ID NO: 319817 - DNA, 77 bp, Zea mays
cccgtctcgacccactcgttcgcaccaactatcttcatataaagcacattattgtaccaacaatttcatccataata

SEQ ID NO: 319818 - DNA, 359 bp, Zea mays
  unsure (1)..(359): unsure at all n locations
tcgtacactcgttcgtaccaactagcaacatagaaagcacaatactgtaccaacaatggcggccagaatattttgccttcttatgctccttggtctttctgcaagtgctgctactgagaccattttgccgcaatgctcgcaagctcctatagcttgccttcttaccccgtacctctcaccagcggtgtcttcggtatgtgaaaacccaattcttcaaccctacacgatccaacaggcaatcacagctggcatcttacctttatcacccttgttcctccaacaatcatcagccctattacatcagttaccnttggcgcattcattggcacaaaacatcatggcacaacaactacaacaac

SEQ ID NO: 319819 - DNA, 369 bp, Zea mays
gtaccatcaatcatcattcatcttagtagtataggcaccaaatcaaatctgcaacatcaattatctaactccaaaaaccatgaagctggtgcttgtggttcttgctttcattgctttagtatcaagtgtttcttgtacacagacaggcggctgcagctgtggtcaacaacaaagccatgagcagcaacatcatccacaacaacatcatccacaaaaaccacatcatcaaccacaaccacatcatcaccagcagcagcatcaccaacatcatcaagttcacatgcaaccacaaaaacatcagcaacatcaagaagttcatgttcaacatcaacaacaacaaccgcagcaccaacaacaacaacaacaaca

SEQ ID NO: 319820 - DNA, 376 bp, Zea mays
gcaacatagaaagcacaatagtgtaccaacaatggcagccaaaatattttgcctccttatgctccttggtctttctgcaagtgctgctacggcgaccattttcccgcaatgctcgcaagctcctatagcttcccttcttcccccgtacctctcaccagcggtgtcttcggtatgtgaaaacccaattcttcaaccctacaggatccaacaggcaatcacagctggcatcttacctttatcacccttgttcctccaacaatcatcagccctattacatcagttacccttggtgcatttattggcacataacatcagggcacatcaactacaacaacttgtgctagcaaaccttgctgcctactctcagcaacagcag

SEQ ID NO: 319821 - DNA, 342 bp, Zea mays
gcaacatagaaagcacaatagtgtaccaacaatggcagccaaaatattttgcttccttgggctccttggtctttctgcaagtgctgctaccgcaaccattttcccacaatgctcacaagctcctatagcttcctttcttcccccatacctctcaccagcggtgtcttcagtatgtgaaaacccaattcttcaaccctacaggatccaacaggcaatcgcagcaggcatcttacctttatcacccttgttcctccaacaaccgtcagccctattacagcagttacctttggtgcatttgttggcacaaaacatcaaggcacaacaactacaacaacttgtgct

SEQ ID NO: 319822 - DNA, 329 bp, Zea mays
gagacgcacacgctccatagaacgtgttttgcaagggcaacaacactgcaacaccgtcgaccgacatatgtgctatgattaacgctattgctatgtctgcatgtgtcgctaacacgacaaatatacctgaatggtcactatcacctatagctaacgttctactgccatacacttcgatcaactattgcatcattatgagacaaccgagatgttaagacctatcagatctaacaacatgcgttagcaggtaacatacctatatcacccttggcagcaaaacaatctccagccctatctttagtgcaaccattggttcaaaccattagggg

SEQ ID NO: 319823 - DNA, 132 bp, Zea mays
atcaagagtacccagatgtatccgtcgttgctggtctaaacactaatagggtgtttggtctgaggaatgggctagtccattctcttctcgctcttttttttatttggtttattaaatagaatgagttgatct

SEQ ID NO: 319824 - DNA, 411 bp, Zea mays
  unsure (1)..(411): unsure at all n locations
cccagctncggcattagaacacccagcgaacccctttacacaacctaacagcaatggctaccaagatattatccttccttgcgcttcttgcgctttttgcgagcgcaacanatgcgttcattattccacaatgctcacttgctccaagttccattattacacagttccttccaccagttacttcaatgggcttcgaacacccagctgtgcaagcctataggctacaacaagcaattgcggcgagcgtcttacaacaaccaatttcccagttgcaacaacaatccttggcacatctaacaatacaaaccatcgcaacgcaacagcaacaacaattcctaccagcactgagccacctagccatggtgaaccctgccgnctacttgcaacagcagttgcttgcatcaaacccac

SEQ ID NO: 319825 - DNA, 415 bp, Zea mays
aatattttcagcattcaaaaacacaccaagcgaagcgcactagcaacgacctaacaccgatggctaccaagatattagccctccttgcgcttcttgcccttttagtgagcgcaacaaatgcgttcattattccacagtgctcacttgctcctagtgccattattccacagttcctcccaccagttacttcaatgggcttcgaacatccagccgtgcaagcctacaggctacaactagcgcttgcggcgagcgccttacaacaaccaattgcccaattgcaacaacaatccttggcacatctaaccctacaaaccattgcaacgcaacaacaacaacaacaacagtttctgccatcactgagccacctagccgtggtgaaccctgtcacctacttgcaacagcagctgcttgcatc

SEQ ID NO: 319826 - DNA, 199 bp, Zea mays
gtcagcagcttctgcttgctctggggggaaggagagagagagagcgagagagatctagtagagaggctagctaggtggtcctcgaacgaagatgttggcggtgttcagcgggcaggtggtggaggtgccggcggagctggtggcggcgggcagccggacgccgtcgcccaagacgaaggcgtcgcagctggtggggcgc

SEQ ID NO: 319827 - DNA, 420 bp, Zea mays
  unsure (1)..(420): unsure at all n locations
gggtcttcagaccattagctttatctactccagagcgcagaagaacccgatcgacaccatgagggtgttgctcgttgccctcgctctcctggctctcgctgcgagcgccacctccacgcatacaagcggcggctgcggctgccagccaccgccgccggttcatctaccgccgccggtgcatctgccacctccggttcacctgccacctccggtgcatctcccaccgccggtccacctgccgccgccggtccacctgccaccgccggtccatgtgccgccgccggttcatctgccgncgncaccatgccactaccctactcaaccgncccggnctcagcctcatccccagccacacncatgcccgtgccaacagccgcatncaagcccgtgccagctgcagggaacctgcggcgttggcag

SEQ ID NO: 319828 - DNA, 152 bp, Zea mays
gcagcatagaaagcacactagcgtaccatcaatggcagtcaaagaatgttgcctccctagcggcttgatcgatctgcaagggctgctacggcgaccattgatccggaatgtctccaagctcatatatccttgctcgatccgatgtacctgtc

SEQ ID NO: 319829 - DNA, 244 bp, Zea mays
attgagaccaactagcaacatagaaagcacaatagtgtaccaacaatggcagccaaagtgattttgcctccttatgctccttggtctttctgcaagtgctgctacggcgaccattttcccacaatgctcacaagctcctatagcttcccttcttcccccgtacctctcaccagcggtgtcttcggtatgtgaaaacccaattcttcaaccctataggatccaacaggcaatcgcagctggcatc

SEQ ID NO: 319830 - DNA, 332 bp, Zea mays
caactagcaacatagaaagcacaatagtgtaccaacaatggcagccaaaatattttgccgccttatgctccttggtctttctgcaagtgctgctacggcgaccattttcccgcaatgctcgcaagctcctatagcttcccttcttcccccgtacctctcaccagcggtgtcttcggtatgtgaaaacccaattcttcaaccctacaggatccaacaggcaatcgcagctggcatcttacctttatcacccttgttccttcaacaatcatcagccctattacaacagttacctttggtgcatttattggcacaaaacatcaaggcacaacaac

SEQ ID NO: 319831 - DNA, 354 bp, Zea mays
attcagaaacacacctagcgaagcgcactagcaacgacctaacaacaatggctaccaagatattatccctctttgcgcttcttgccctttttgtgagcgcaacaaatgcgttcattattccacaatgctcacttgctcctagtgccattattccacagttcctccctccagttacttcaatgggcttcgaacacccagctgtgcaagcctacaggctacaacaagcgcttgcggcgagcgtcttacaacaaccaattgcccaattacaacaacaatccttggcacatctaaccatacaaaccatcgcaacgcaacagcaacaacaatttctaccagcactgagccaactagctg

SEQ ID NO: 319832 - DNA, 407 bp, Zea mays
ccaactagcaacatagaaagcacaatagtgtaccaacaatggcagctaaaatattttgcctccttatgctccttggtctttctgcaagtgctgctacggcgaccattttcccacaatgctcacaagctcctatagcttcccttcttcccccgtacctctcaccaacggtgtcttcggtatgtgaaaacccaattcttcaaccctacaggatccaacaggcaatcgcagctggcatcttacctttatcacccttgttcctccaacaatcatcagccctattacagcagttacctttggtgcatttattggcacaaaacatcagggcacaacaactacaacaacttgtgctagcaaaccttgctgcctactctcagcaacagcagtttcttccattcaaccaactagct

SEQ ID NO: 319833 - DNA, 306 bp, Zea mays
tacctttggtgcatttattggcacaaaacatcagggcacaacaactacaacaacttgtgctagcaaaccttgctgcctactctcagcaacagcagtttcttccattcaaccaactagctgcattgaactctgcttcttatttgcaacaacaacaactaccattcagccagctacctgttgcctacccccaacaatttcttccattcaaccaactggcagcattgaactctcctgcttatttacagcagcaacaactactaccattcagccagctagctggtgtgagccctgctaccttcttgacac

SEQ ID NO: 319834 - DNA, 203 bp, Zea mays
cgaacatccagccgtgcaagcctacaggctacaactagcgcttgcggcgagcgccttagaacaaccaattgcccaattgcaacaacaatccttggcacatctaaccctacaaaccattgcaacgcagcaacaacaacaacaacagtttctgccatcactgagccacctagccgtggtgaacccttgcacctacttgcaacagc

SEQ ID NO: 319835 - DNA, 423 bp, Zea mays
  unsure (1)..(423): unsure at all n locations
gcggagtgtgccgagagtcatcgtagttatgttcgcctctgcgggcgccgcgccatgtnatgcagtaccggacggcgggcccgcacatgaagccggcgcacccttacccgcgcaaggtggacggcgcggccaagaatcccgcgccggagctcaagctgctggagaagctgcccccgcgcgaccgggatgaagggtcgccgacatcggtgcttgcctcggcgcgcacggcgtcgcgagcggaggtgttaggcagcgcgttcgcgaacagctcgagcgccagcaggtcgctggacctttcagcttccggtttggatgagcgtggtgacggcggcggctcgctggtctcgtcggtggccgcggagcacggctgcgcatcgccatgaacgagagcgccatataccaaggtgctcgttgaagcaaacg

SEQ ID NO: 319836 - DNA, 446 bp, Zea mays
ccaacaagcaacatagaaagtggaatccagtagcaacaacagagcaacaatggcgaccaagatattttcggtccgtatgctccttgctctttctgcatgtgttgctaacgcgacaattttccctcaatgctcacaagctcctatagcttcccttcttcccccataccttccatcaatgatagcttcagtatgtgaaaacccagctcttcagccctataggctccaacaagcaatcgcagcaagcaacatacctttatcacccttgttgtttcaacaatcgccagccctatctttggtgcagtcattggtacaaaccatcagggcacagcagctgcagcaactcgtgctacctgtgatcaaccaagtagctctggcaaacctttctccctactctcagcaacaacaatttcttccattcaaccaactgtctacactgaaccctgctg

SEQ ID NO: 319837 - DNA, 425 bp, Zea mays
  unsure (1)..(425): unsure at all n locations
gagcattcagaaacacaccaagcgaagcacattagcaacaacctaacaacaatggctaccaagatattatccctccttgcgcttcttgcgctttttgcgagcgcaacaaatgcgttcattattccacaatgctcacttgctccaagttccattattacacagttcctcccaccagttacttcaatgggcttcgaacacccagctgtgcaagcctataggctacaacaagcaattgcggcgagcgtcttacaacaaccaatttcccagttgcaacaacaatccttggcacatctaacaatacanaccatcgcaacgcatcagcaacaacaattcctaccagcactgagccacctagccatggtgaaccctgccgcctacttgcaacagcagttgcttgcatcaaacccacttgctctggcaaacgt

SEQ ID NO: 319838 - DNA, 278 bp, Zea mays
agccgctggctatactacagcacatagtttcttacgtggaacacaacatcaatgggttgggtaatatcatctcttcttgcgcttcttgctctagctacgacctcaactaactgcttacttgttccgcaatactcacttgatccaagctacattctaacactgatcgttctaccagttccatgctctagtactcgatcactctactctgcaactctataatctacgtccctaaattcctttaacagtcttgcagcatccactatcgcaactgcatataa

SEQ ID NO: 319839 - DNA, 373 bp, Zea mays
gagaccagcaagcaacatagaaagtagaatccattagcaacaatagagcaacaatggcgaccaagatattttccctccttatgctccttgctctttctacatgtgttgctaacgcgacaattttccctcaatgctcacaagctcctatagcttcccttcttcccccataccttccatcaattatagcttcagtatgtgaaaacccagctcttcaaccatataggcttcaacaagcaatcgcagcaagcaacatacctttatcgcccttgttgtttcaacaatcaccagccctatctttggtgcagtcattggtacaaaccatcagggcacaacagctgcagcaactcgtgctacctgtgatcaaccaagtagc

SEQ ID NO: 319840 - DNA, 441 bp, Zea mays
ctagcaacatagaaagcacaatagtgtaccaacaatggcagccaaaatattttgcctccttatgctccggggtcggtctgcaagtgctgctacggcgaccattttcccgcaatgctcgcaagctcctatagcttcccttcttcccccgtacctctcaccagcggtgtcttcggtatgtgaaaacccaattcttcaaccctacaggatccaacaggcaatcacagctggcatcttacctttatcacccttgttcctacaacaatcatcagccctattacatcagttacctttggtgcatttattggcacaaaacatcagggcacaacaactacaacaacttgtgctagcaaaccttgctgcctactctcagcaacagcaggttcttccattcaaccaactagctgcattgaactctgcttcttatttgcaacaacaacaact

SEQ ID NO: 319841 - DNA, 427 bp, Zea mays
  unsure (1)..(427): unsure at all n locations
caactagcaacatagaaagcacaatagtgtaccaacaatggcaaccaaaatattttgcggccggatgctccttggtctttctgcaagtgctgctaccgcgaccattttcccgcaatgctcacaagctcctatagcttcccttcttcccccatacctctcaccagcggtgtcttcagtatgtgaaaacccaattcttcaaccctacaggatccaacaggcaatcgcagcaggcatcttacctttatcacccttgttcctccaacaaccgtcagccctattacagcagttacctntggtgcatttgttggcacataacatcagggcacaacaactacaacaactngtgctagcaaaccttgctgcctactctcagcaacagcagtttcttacattcaaccaactggctgcattgaactctgctgcttat

SEQ ID NO: 319842 - DNA, 299 bp, Zea mays
attttcagcattcaaaaacacaccaagcgaagcgcactagcaacgacctaacaccaatggctaccaagatattagccctccttgcgcttcttgcccttttagtgagcgcaacaaatgcgttcattattccacagtgctcacttgctcctagtgccagtattccacagttcctaccaccagttacttcaatgggcttcgaacatccagccgtgcaagcctacaagctacaactagcgcttgcggcgagcgccttacaacaaccaattgcccaattggaacaacaatccttggcacatcta

SEQ ID NO: 319843 - DNA, 429 bp, Zea mays
attagcaacaatagagcaacaatggcgaccaagatattttccctccttatgctccttggtctttctacatgtgttgctaacgcgacaattttccctcaatgctcacaagctcctatagcttcccttcttcccccataccttccatcaattatagcttcagtatgtgaaaacccagctcttcaaccatataggcttcaacaagcaatcgcagcaagcaacatacctttatcgcccttgttgtttcaacaatcaccagccctatctttggtgcagtcattggtacaaaccatcaaggcacaacagctgcagcaactcgtgctacctgtgatcaaccaagtagctctggcaaacctttctccctactctcagcaacaacaatttcttccattcaaccaactatctacactgaaccctgctgcttatttgcag

SEQ ID NO: 319844 - DNA, 412 bp, Zea mays
attgagaccaactagcaacatagaaagcacaatagtgtaccaacaatggcagccaaaagattgtgcctccttatgctccttggtctttctgcaagtgctgctacggcgaccattttcccgcaatgctcgcaagctcctatagcttcccttcttcccccgtacctctcaccagcggtgtcttcggtatgtgaaaacccaattcttcaaccctacaggatccaacaggcaatcacagctggcatcttacctttatcacccttgttccttcaacaatcatcagccctattacatcagttacctttggtgcatttattggcacaaaacatcagggcacaacaactacaacaacttgtgctagcaaaccttgctgcctactctcagcaacagcagtttcttccattcaaccaactag

SEQ ID NO: 319845 - DNA, 402 bp, Zea mays
  unsure (1)..(402): unsure at all n locations
atctattctggcttcccagagggagccagagtctcctgtgatcttctccctgcgcacaacccagccaggatcacgacggcgccccagcgccgncaccctggtcccaccaaatcccctccctacaatctgcgcaatctgcccggtagaatccgtagttctaccagtttcactgtttctgagttccgtgatacttggacgtttgtgaaccgcagaataaaggatgctctcgatcttcagaaaaccttccaagaggccgcatacctcgctgaagccgtgggagcaggcatgggcggcaccgtgcaaggtgttctcaacagggtcttccagaaccgtagcggatgaactttctttnttctcaaacacgtaatggatggactaattccgtcttttgcaagctgcaca

SEQ ID NO: 319846 - DNA, 296 bp, Zea mays
tccggttacctttggtgcatttattggcacaaaacatcagggcacaacaactacaacaacttgtgctagcaaaccttgctgcctactctcagcaacagcagtttcttccattcaaccaactaggttcattgaactctgcttcttatttgcaacaacaacaactaccattcagccagctacctgctgcctacccccagcaatttcttccattcaaccaactagcagcattgaactctcctgcttatttacagcagcaacaactactaccattcagccagctagctggtgtgagccct

SEQ ID NO: 319847 - DNA, 310 bp, Zea mays
  unsure (1)..(310): unsure at all n locations
atgcgacggtcgctccgtagaagatgaggccaccgacgacgagcgcggagagggcgaaggtggcggcgacggcgagcgggatgccgcaggagaggatgccgaacttgagctggatggcgtcgaccatggagagcagcaggaagaaggtgcccatggtggagcacccggcggcgagcagcatcatgggctgcgcgaacctgagcacggcgcggcgcctgttcctcggnccggcggcgcgccatgccggcatctnctcgcagtcgtcggacggcgggggcttctggtcggcgtcgccgtaaaagtcgtcggt

SEQ ID NO: 319848 - DNA, 374 bp, Zea mays
gagcattcagaaacacaccaagcgaagcgcactagcaacgacctaacaacaatggctaccaagatattagcccggcttgcgcttctggccctttttgtgaagcgcaacagatgcgttcattattccacaatgctcacttgctcctagtgccattattccacagttcctcccaccagttacttcaatgggcttcgaacacctagctgtgcaagccaacatgcaacaacaagcgcttgcggcgagcgtcttacaacaaccaattgcccaattgcaacaacaatccttgccacatctaacaatacaagccatcacaacgcaacagcaacaacagttcctaccagcactgagccacctagccatggtgaaccctgccg

SEQ ID NO: 319849 - DNA, 444 bp, Zea mays
cagcaagcaacatagaaagtagaatccattagcaacaatagagcaacaatggcgaccaagatattttccctccttatgctccttgctctttctacatgtgttgctaacgcgacaattttccctcaatgctcacaagctcctatagcttcccttcttcccccataccttccatcaattatagcttcagtatgtgaaaacccagctcttcaaccatataggcttcaacaagcaatcgcagcaagcaacatacctttatcgcccttgttgtttcaacaatcaccagccctatctttggtgcagtcattggtacaaaccatcagggcacaacagctgcagcaactcgtgctacctgtgatcaaccaagtagctctggcaaacctttctccctactctcagcaacaacaatttcttccattcaaccaactgtctacactgaaccctgct

SEQ ID NO: 319850 - DNA, 447 bp, Zea mays
ctagcaacatagaaagcacaatagtgtaccaacaatggcagccaaaatattttgcttccttatgctccttggtctttctgcaagtgctgctaccgcaaccattttcccacaatgctcacaagctcctatagcttcctttcttcccccatacctctcaccagcggtgtcttcagtatgtgaaaacccaattcttcaaccctacaggatccaacatgcaatcgcagcaggcatcttacctttatcacccttgttccttcaacaaccgtcagccctattacagcagttacctttggtgcatatgttggcacacaacatcatagcacaacaactacaacaacttgtgctagggaaaccttgctgcctactctcagcaacagcagtttcttccattcaaccaactggctgcattgaactctgctgcctaattgcaacaacaactaccattca

SEQ ID NO: 319851 - DNA, 394 bp, Zea mays
ccaactagcaacatagaaagcacaatagtgtaccaacaatggcagccaaaatattttgcctccttatgctccttggtctttctgcaagtgctgctacggcgaccattttcccgcaatgctcgcaagctcctatagcttcccttcttcccccgtacctctcaccagcggtgtcttcggtatgtgaaaacccaattcttcaaccctacaggatccaacaggcaatcacagctggcatcttacctttatcacccttgttcctccaacaatcatcagccctattacatcagttacctttggtgcatttattggcacaaaacatcagggcacaacaactacaacaacttgtgctagcaaaccttgctgcctactctcagcaacagcagtttcttccatt

SEQ ID NO: 319852 - DNA, 289 bp, Zea mays
ctggacgtcagcctagcaattagctcatcgactccagattggagaactcgacaccatgaaggtgctgatcgttgcccttgctctcctggcgctcgctgcgagcgccgcctccagtacaagcggcggctgtggctgccagacaccaccgtttcatctaccgcctccgttctatatgccgcctccgttctatctgccgccgcagcagcagccgcagccatggcaataccccactcaaccaccgcagctaagcccgtgccagcagttcgggatcctgcggcgtcggcagcgt

SEQ ID NO: 319853 - DNA, 177 bp, Zea mays
gttctagatgcgagggccccccgtgtttaatttatatatgggtgtttatggattcatgcttttggacatatggtaggccatttgtgtttaggactgagctgttgttgagtgtttgcgtcatatgcttctatgattaaaaaaaaaaaaaaaaaatataaaaactacaatctatatacc

SEQ ID NO: 319854 - DNA, 87 bp, Zea mays
cctcactgggatgcaaaattattgtcaatcagctattgatattttggactgccttaccgagatgattgtccgaagatcgcaagctcc

SEQ ID NO: 319855 - DNA, 350 bp, Zea mays
cccataccttccatcaatgaccgctttagtatgtgaaaacccagcccttcaaccctacaggatccagcaagcaatcgcaacaagcaacttacctttatcacacctgttctttcaacaatcgccagccctatctttggtgcagtcattggtacaaaccatcagggcagaacagttgcagcaactcgtgctaccagtgatcagccaagtagctctggcaaacctttccccctactctcagcaacaacaatttcttccattcaaccaactgtctatactgaaccctgctgcttatttgcagcaacaacaactactaccattcagccagctagctactgcctactctcagcagc

SEQ ID NO: 319856 - DNA, 230 bp, Zea mays
gttgtagatcgcgagcggccgcccttttttttttttttttatttttttttttttttaagcaaaggcgcttgactttcatgtaagaaaacatgtcatttactattttgtttatttattacatacacatcaacctaggcatacatgcgagagtcgcgctgtcatgtggatcaagcacacatgatcagaggcctgacgaccggagtgtagcatcagctctctctctcttgcat

SEQ ID NO: 319857 - DNA, 194 bp, Zea mays
ggattccggctgcgacccagcgtccgggggtccacgccgacgaccttaagcttcgctagaagcgccgtagcccacggtacaagtactactacggccgtggcgaggccgggggcgcgatacccgccctctgctacgccgtcctcgtactgctcctagccgcggggatcaccctgctaatgctctacgacgtgtac

SEQ ID NO: 319858 - DNA, 197 bp, Zea mays
cttcgggaccggctgtcctaaattattcacaatcatttgtacaagccagtcattgatatagggcgtcttgccaaactcgtgcagatagcgaacaaatagaccgatttaaccgttctagatacaatatttctcctctgagattcaccacaaacataccctgtaggcgctaaagcgcgggttacttacagctataaggc

SEQ ID NO: 319859 - DNA, 211 bp, Zea mays
caacgaggctgtcctaaattatgcacaattatctttataagccagtcattcataatggccgtagggtcatactcgtccagatagcgaccaaatagactgatctaccagttcgagatactatatttctcctcatagatgcaactcaaacctactttgtacgatctacagcaaggcttactcagtactatgacgcatactatgaatccatcta

SEQ ID NO: 319860 - DNA, 319 bp, Zea mays
cagcccttcaaccctacaggatccagcaagcaatcgcaacaagcaacttacctttatcagcacctgttctttcaacaatcgccagccctatctttggtgcagtcattggtacaaaccatcagggcagaacagttgcagcaactcgtgctaccagtgatcagccaagtagctctggcaaacctttccccctactctcagcaacaacaatttcttccattcaaccaactgtctatactgaaccctgctgcttatttgcagcaacaacaactactaccattcagccagctagctactgcctactctcagcagcaacaatttc

SEQ ID NO: 319861 - DNA, 361 bp, Zea mays
atagaaagcacaatagtgtaccaacaatggcagccaaaatattttgcttccttatgctccttggtctttctgcaagtgttgctaccgcaaccattttcccacaatgctcacaagctcctatagcttcccttcttcccccatacctctcaccagcggtgtcttcaatgtgtgaaaacccaattgttcaaccctacaggatccaacaggcaatcgcaacaggcatcttaccattatcacccttgttccttcaacaaccgtcaagcctattaccacaagtacctttgggccaattgggggccccaaaccttaaggcaccaccacctccaccaccttggcctaccaaaccttgctgcatacttta

SEQ ID NO: 319862 - DNA, 385 bp, Zea mays
  unsure (1)..(385): unsure at all n locations
gagaccagcaagcaacatagaaagtagaatccattagcaacaatagagcaacaatggcgaccaagatattttccctccttatgctccttgctctttctacatgtgttgctaacgcgacaattttccctcaatgctcacaagctcctatagcttcccttcttcccccataccttccatcaattatagcttcagtatgtgaaaacccagctcttcaaccatataggcttcaacaagcaatcgcagcaagcaacatacctttatcgcccttgttgtttcaacaatcaccagccctatctttggtgcagtcattggtacagaccatcanggcacaacagctgcagcaactcgtgctacctgtgatcacccaagtagctctggcaaacct

SEQ ID NO: 319863 - DNA, 129 bp, Zea mays
ttaaaacatcaaatccacaacggagtgccgttaactcctaacagccaattccaaagcctgacaaatccaatccaaatgatccaacatacctaaatcctcatactcatgatactgctctctcaatcattc

SEQ ID NO: 319864 - DNA, 322 bp, Zea mays
accacgcgtccgacaaatcattgttgcattgaatatggtcagcaagggctttaatgagcgccttgtgatggtaaataggccagctattggggtcatgttcaagaaaacccttgatgtagttttgcaagtccttgtttcatttcctagcgtgagacctctgcgatctaaggtgatatcgtttctgcatcgtatgatcgagatattaggtatctcagtgcttccatgtattccaatcgcactgaggcaattgcttcttgataacgaagctaaagatatggtaaaaattctcgtattggtaaaccaaattatctgcaaatttaaa

SEQ ID NO: 319865 - DNA, 392 bp, Zea mays
caacaaatgcgttcattattccacagtgctcacttgctcctagtgccattattccacagttcctcccaccagttgcttcaatgggcttcgaacatccagccgtgcaagcctacaggctacaactagcgcttgcggcgagcgccttacaacaaccaattgcccaattgcaacaacaatccttggcacatctaaccctacaaaccattgcaacgcaacaacaacaacaacaacagtttctgccatcactgagccacctagccgtggtgaaccctgtcacctacttgcaacagcagctgcttgcatccaacccacttgctctggcgaacgtagctgcataccagcaacaacaacagctgcaacagtttatgccagtgctcagtcaactagccatg

SEQ ID NO: 319866 - DNA, 302 bp, Zea mays
  unsure (1)..(302): unsure at all n locations
gcaacatagaaagtggaatccagtagcaacaatagagcaacaatggcgaccaagatattgtccctccttatgctccttgctctntctacatgtgttgctaacgcgacaattttccctcaatgctcacaagctcctatagcttcccttcttcccccataccttccatcaattatagcttcaatatgtgaaaacccagctcttcaaccatataggcttcaacaagcaatcgcagcaagcaacatacctttatcgcccttgttgtttcaacaatcgccagccctatctttggtgcagtcattggt

SEQ ID NO: 319867 - DNA, 306 bp, Zea mays
caacatgtgtgaaagagttgctctatctttcttgaatgaatatgtgttttgcatgtttttctgagactgtcttgtcaattcgtttgaagatctgtctatttagtatctacctaaaggataatttggttatctctagagttcatactattcctgaatttcaatcatgcacagacccaacaggggcaaacagtccatgattatttctcaatgtgtgatgtctgagatcaatacattggaaaaacataaaccagattcattgcttgtaaattttaacaaaatgtttgggagaattaacgtgtttttgga

SEQ ID NO: 319868 - DNA, 294 bp, Zea mays
  unsure (1)..(294): unsure at all n locations
attgagaccaactagcaacatagaaagcacaatagtgtaccaacaatggcagccaaaagattttgcttccttatgctccttggtctttctgcaagtgttgctaccgcaaccattttcccacaatgctcacaagctcctatagcttcccttcttcccccatacctctcaccagcggtgtcttcaatgtgtgaaaacccaattgttcaaccctacaggatccaacaggcaatcgcaacaggcatcttaccattatcacccttgatcctncaacaaccgtcagccctaatacagcag

SEQ ID NO: 319869 - DNA, 369 bp, Zea mays
  unsure (1)..(369): unsure at all n locations
gctgtagcaacatagaaagcacaatagtgtaccaacaatggcagccaaaatatggtgcgtccttatgctccttggcctttctgcaagtgctgctaccgcaaccattttcccacaatgctcacaagctcctatagcttcctttcttcccccatacctctcaccagcggtgtcttcagtatgtgaaaacccaattcttcaaccctacaggatccaacaggcaatcgcagcaggcatcttacctttatcacccttgctccttcaacaaccgtcagccctattacagcagttacctttggtgcatttgttggcacanaacatcaaggcacaacaactacaacaacttgtgctaggaaaccttgctgcctactt

SEQ ID NO: 319870 - DNA, 292 bp, Zea mays
ctagttctagatcgcgagccgccgccctttttttttttttttggaaccattctatcgggttgcgattcgcacacggcacacatgtcaagctagcaactgcacactcccaccaaccctgctcctgcgaccacttatatatctgccatcgcccccttattaccaacatagttcaccagattcaccttacactccttgtacttcctccataccggcccaagcaccacgaagatgattcagccgcgtagaccttacgatgagctgtgcacaagactcaccaatgactacccggtgt

SEQ ID NO: 319871 - DNA, 419 bp, Zea mays
atagtgtaccaacaatggcagccaaaatattttgcttccttatgctccttggtctttgtgcaagtgttgctaccgcaaccattttcccacaatgctcacaagctcctatagcttcccttcttcccccatacctctcaccagcggtgtcttcaatgtgtgaaaccccaattgttcaaccctacaggatccaacaggcaatcgcaacaggcatcttaccattatcacccttgttcctccaacaaccgtcagccctattacagcagttacctttggtccatttggtggcacaaaacatcagggcacaacaactacaacaacttgtgctagcaaaccttgctgcatactctcagcaacatcagtttcttccattcaaccaactggctgcattgaactctgctgcttatttgcaacaacaatta

SEQ ID NO: 319872 - DNA, 406 bp, Zea mays
ccttcttcccccatacctctcaccagcggtgtcttcaatgtgtgaaaacccaattgttgaaccgtacaggatccaacaggcaatcgcaacaggcatcttaccattatcacccttgttcctccaacaaccgtcagccctattacagcagttacctttggtccatttggtggcacaaaacatcagggcacaacaactacaacaacttgtgctagcaaaccttgctgcatactctcagcaacatcagtttcttccattcaaccaactggctgcattgaactctgctgcttatttgcaacaacaattaccattcagccagctagttgctgcctacccccagcaatttcttccattcaaccaactagcagcattgaactctgctgcttatttacagcagcaacaactacta

SEQ ID NO: 319873 - DNA, 433 bp, Zea mays
tagacccacgcgtccgaactagcaacatagaaagcacaatagtgtaccaacaatggcagctaaaatattttgcggccttatgctccttggtctttctgcaagtgctgctacggcgaccattttcccacaatgctcacaagctcctatagcttcccttcttcccccgtacctctcaccaacggtgtcttcggtatgtgaaaacccaattcttcaaccctacaggatccaacaggcaatcgcagctggcatcttacctttatcacccttgttcctccaacaatcatcagccctattacagcagttacctttggtgcatttattggcacaaaacatcagggcacaacaactacaacaacttgtgctagcaaaccttgctgcctactctcagcaacagcagtttcttccattcaaccaactagctgcattgaactct

SEQ ID NO: 319874 - DNA, 374 bp, Zea mays
  unsure (1)..(374): unsure at all n locations
aacacaccaagcgaagcgcactagcaacgacctaacaacaatggctaccaagatattagccctggttgcgcttcttgccctttttgtgagcgcaacaaatgcgttcattattccacaatgctcacttgctcctagtgccattattccacagttcctcccaccagttacttcaatgggcttcgaacacctagctgtgcaagccaacatgcaacaacaagcgcttgcggcgagcgtcttacaacaaccaattgcccaattgcaacaacaatccttgccacatctaacaatacaagccatcacaacgcaacagcaacaacagttcctaccagcactgagccacctagccatggtgaaccctgccgnctacttgcaag

SEQ ID NO: 319875 - DNA, 200 bp, Zea mays
cgcatacaagcggcggctgcggctgccagccaccgccgacggttcatctaccgtcgccggtgcatctgccaccttcggttcacctgccacctccggtgcatctgccaccgccggtccacctgccgccgccggtccacctgccaccgtcggtccatgttgccgcgccggctcatctgccggcgtcaccatgccactaccct

SEQ ID NO: 319876 - DNA, 328 bp, Zea mays
gcagcattgaactctcctgcttatttacagcagcaacaactactaccattcagccagcgagctggtgtgagccctgctaccttcttgatacaaccacagttgttgccgttctaccagcacgctgcgcctaacgctggcaccctcttacaactgcaacaattgctgccattcaaccaacttgctttgacaaacccagcagcgttctaccaacaacccatcattggtggtgccctcttttagatttcttatgagttatagttcaataataaagttttttgtctgatgtttgtggcttcccagaaataagaaggtacatttctagattctt

SEQ ID NO: 319877 - DNA, 430 bp, Zea mays
attttgagcattcagaaacacaccaagcgaagctacctagcaacgacttaacaacaatggctaccaagatattagccctccttgcgcttcttgccctttttgtgagcgcaacaaatgcgttcattattccacaatgctcacttgctcctagtgccattataccacagttcctccgaccagttacttcaatgggcttcgaacacctagctgtgcaagcctacaggctacaacaagcgcttgcggcgagcgtcttacaacaaccaattaaccaattgcaacaacaatccttggcacatctaaccatacaaaccatcgcaacacaacagcaacaacagttcctaccagcactgagccaactagatgtggtgaaccctgtcgcctacttgcaacagcaggtgcttgcatccaacccacttgctctggcaaacgt

SEQ ID NO: 319878 - DNA, 420 bp, Zea mays
tgaaaatccaattcttctaccctacaggatccaacaggcaatcgcagcaggcaggttagctttatcacccttgttcctccaacaatcatcagccctattacagcagttacctttggtgcatttattggcacaaaacatcagggcacaacaactacaacaactcgtgctagcaaaccttgctgcctactctcagcaacagcagttacctttggtgcatttgttggcacaaaacatcagggcacaacaactacaacaactcgtgctagcaaaccttgctgcctactctcagcaacaacagtttctgccattcaaccaactagctgcattgaactctgctgcttatttgcagcaccaacaactactaccattcagccagctagctgctgcctacccccggcaatttcttccattcaaccaact

SEQ ID NO: 319879 - DNA, 287 bp, Zea mays
ggcgtcggcatcgcacagtgacacggccatcggcactcaactcactccacaggcttcggttcatgatcatcatcatcaccgtcgtcatagccatggccgcgcgtcaccacgccccgcacctactcgcgatgctcatgctctcagcggcggccggcttcttctccgtggcctccgacgagcgcgacctcgacgcagccaacccgctcgcggtcgcggtcgcggagcccgacgctggccgaaacaacgacaacaacaacccttccgagcctaactactactgctaccat

SEQ ID NO: 319880 - DNA, 397 bp, Zea mays
ctcacttgctcctagtgccattattccacagttcctcccaccagttacttcaatgggcgtcgaacatccagccgtgcaagcctacaggctacaactagcgcttgcggcgagcgccttacaacaaccaattgcccaattgcaacaacaatccttggcacatctaaccctacaaaccactgcaacgcaacaacaacaacaacaacagtttctgccatcactgagccacctagccgtggtgaaccctgtcacctacttgcaacagcagctgcttgcatccaacccacttgctctggcgaacgtagctgcataccagcaacaacaacagctgcaacagtttatgccagtgctcagtcaactagccatggtgaaccctgtccggttacctacaactactttc

SEQ ID NO: 319881 - DNA, 384 bp, Zea mays
gcagcatagaaagcacaatagtgtaccaacaatggcagccaaaatattttgcttccttgtgctccttggtctttctgcaagtgctgctaccgcaaccattttcccacaatgctcacaagctcctatagcttcctttcttcccccatacctctcaccagcggtgtcttcagtatgtgaaaacccaattcttcaaccctacaggatccaacaggcaatcgcagcaagcatcttacctttatcacccttgttccttcaacaaccggcaaccctattacagcagttacctttggtgcatttgttggcacaaaacatcaaggcacaacaacttcaacaacttgggctaagaaaccttgctggctactctcagcaacagcagtttctttc

SEQ ID NO: 319882 - DNA, 292 bp, Zea mays
caactagcaacatagaaagcacaatagtgtaccaacaatggcagccaaaatattttgcgtccggatgctccttggtctttctgcaagtgctgctacggcgaccattttcccacaatgctcacaagctcctatagcttcccttcttcccccgtacctctcaccagcggtgtcttcggtatgtgaaaacccaattcttcaaccctataggatccaacaggcaatcgcagctggcatcttacctttatcacccttgttcctccaacaatcatcagccctattacagcagttacct

SEQ ID NO: 319883 - DNA, 373 bp, Zea mays
aaaaaaaaaaaaaaaaaaaaaaaaaaaataaaaaaaaaaaaaaaaaaaaaaaaaagaaagaaaaaaaaaaaatattaaaatatattataataaatttaaatatataaaaataataataaaaaaaaacattttaaaaaaataataaaaaagctactataacttactttattaaaacatacatataaccaaaaatgtaataaaatattagaaaacccaattcttaaaaaaatacaagatccaacattttataagaatcacgcattttacctttatgacacttgttcctccaacaacttttaagcctattacagttagttcctttggtgcattttttaaaacaccatattcagggaaaacttgttttaccaccttt

SEQ ID NO: 319884 - DNA, 295 bp, Zea mays
gcaacatagaaagtggaatccagtagcaacaatagagcaacaatggcgaccaagatactgtccctccttatgctccttgctctttctgcatgtgttgctaacgcgacaattttccctcaatgctcacaagctcctatagcttcccttcttcccccataccttccatcaatgatagcttcagtatgtgaaaacccagctcttcaaccctataggctccaacaagcaatcgcagcaagcaacatacctttatcacccttgtttcaacaatcgccagccctatctttggtgcagtcat

SEQ ID NO: 319885 - DNA, 293 bp, Zea mays
ctcaccagcggtgtcttcggtatgtgataacccaattcttcaaccctacaggatccaggacgcgatcgcagctggcatcttacctttatcacccttgttcctccaacaatcatcagccctattacaacagttacctttggtgcatttattggcacaaaacatcagggcacaacaactacaacaacttgtgctagcaaaccttgctgcctactctcagcaacagcagattcttccattcaaccaactaggttcattgaactctgcttcttatttgcaacaacgacaactaccat

SEQ ID NO: 319886 - DNA, 62 bp, Zea mays
cagaaataagaaagtacatttctagattctaataagcaaaaaccacgttctaaaaaaagaaa

SEQ ID NO: 319887 - DNA, 301 bp, Zea mays
cccagctcttcagccctataggctccaacaagcaatcgcagcaagcaacatacctttatgcacccttgttgtttcaacaatcgccagccctatctttggtgcagtcattggtacaaaccatcagggcacagcagctgcagcaactcgtgctacctgtgatcaaccaagtagctctggcaaacctttctccctactctcagcaacaacaatttcttccattcaaccaactgtctacactgaaccctgctgcttatttgcagcaacaactattaccattcagccagctagctactggctactc

SEQ ID NO: 319888 - DNA, 367 bp, Zea mays
  unsure (1)..(367): unsure at all n locations
cagtagtgtaccaacaatggcagccaaaatattttgcctccttatgctccttggtctggctggagtgctgctacggcgaccattttcccgcaatgctcgcaagctcctatagcttcccttcttcccccgtacctctcaccagcggtgtcttcggtatgtgaaaaccccaattcttcaaccctacaggatccaacaggcaatcgcagctggcatcttacctttatcacccttgttcctccaacaatcatcagccctattacaacagttacctttggtgcanttattggcacanaacatcagggcacaacaactacaacaacttgtgctagcaaaccttgctgcctactctcagcaacagcagtttctt

SEQ ID NO: 319889 - DNA, 343 bp, Zea mays
aacaacaagaagttcatgttcaacaacatcaacaacaaccgcagcaccaacaacaacagcaacaacaacagcaccaacaacaacatcaatgtgaaggccaacaacaacatcaccaacaatcacaaggccatgtgcaacaacacgaacagagccatgagcaacaccaaggacagagccatgagcaacaacatcaacaacaattccagggtcatgacaagcagcaacaaccacaacagcctcagcaatatcagcagggccaggaaaaatcacaacagcaacaatgtcattgccaggagcagcaacagactacaaggtgcagctataactactatagcagtagctc

SEQ ID NO: 319890 - DNA, 237 bp, Zea mays
aaagcaagatcatttacttttcttttaaaaaacctttcatttacctattttattaattatttccttccccttaaccttatccttccttccaaaattccccctgccatttgattcaaccccccttaaccaaatccttatcacccgaatttaacaataacttttttttttcttccatgcttaattccaaaaccattgtttaaccggtgtcccttttaaagaatccaagctaactacccc

SEQ ID NO: 319891 - DNA, 191 bp, Zea mays
tcagtgactgactactgtaataccagagatcgaacaacttggtcctgcaggtcaagaggagagttttgagcatttgggggccgggggcaagagagagagagagagccatggcggcagaccagcagccgcaattgcaggaggagatgaacgattctgccatacgttgcatcaatgaccgtttaagtttgcga

SEQ ID NO: 319892 - DNA, 359 bp, Zea mays
  unsure (1)..(359): unsure at all n locations
gaccaactagcaacatagaaagcacattagtgtaccaacaatggcagccaaaatatggtgctgccttatgctccttggtctttctgcaagtgttgctaccgcaaccattttcccacaatgctcacaagctcctatagcttcccttcttcccccatacctctcaccagcggtgtcttcaatgtgtgaaaccccaattgttcaaccctacaggatccaacaggcaatcgcaacaggcatcttaccattatcaccctngttcctncaacaaccgtcagccctattacagcagttacctttggtccatttggtggcccaaaccatcagggcccaacacctccaacacctgggcctaccaaacc

SEQ ID NO: 319893 - DNA, 257 bp, Zea mays
gaattcccgggcattcaaccaactggcagaaattgctgcgggtaggcagcacgtttctggctgaatgctacttgttgacgcgggggatcacacgcacacttcaatgccgctagtatgccgcatggtactacctgatggcgtttagagcacgcagtacggctttggatacactcctgtacatccgctgccagcgctgccgcggccagctcctggcggacctagccgcgggattcggcgccggcctgcagcctacaggc

SEQ ID NO: 319894 - DNA, 263 bp, Zea mays
gagacgcacacggtccatagaaagtgttatgcaagggtgctatcagtgcaacaacgtcgaacgggatatgtgctatgagtacgctaattgctatgtctgcatgtgttgctaaggcgacaatgatatctgaatggtcactatcaccgatagctaacgttctactgtcataactgcgatgaacgagagcatcattatgaggcaaccgagatgttaagacgtatcagatctaacaagctgccgtagcgggtagcatagcttcataa

SEQ ID NO: 319895 - DNA, 122 bp, Zea mays
gcgtcctgagaccaactagcaacatagaaagcacaatagtgtaccaacaatggcagccaagatatgttgcttccttaagctgcctgggccttcttcaagttcctgttaccgcaaccattttc

SEQ ID NO: 319896 - DNA, 434 bp, Zea mays
  unsure (1)..(434): unsure at all n locations
caacaatagagcaacaatggcggccaagatattttccatccttatgctccttgctctgtctgcatgtgttgctaacgcgaccatttttcctcaatactcacaagctcctatagctgcccttcttcccccataccttccatcaatgaccgcttcagtttgtgaaaacccagcccttcaaccctacaggctccaacaagcaatcgcaacaagcaacttacctttatcacccctgttctttcaacaatcgccagccctatctttggtgcagtcattggtacaaaccatcagggcacaacagctgcaacaactcgtgctaccagtgatcagccaagtagctctggcaaacctttctccctactctcagcaacaacaattntcttcattcaaccaactgtctacactgaaccctgctgcttatttacaacaacaacaac

SEQ ID NO: 319897 - DNA, 346 bp, Zea mays
  unsure (1)..(346): unsure at all n locations
gagaccaactagcaacatagaaagcacaatagtgtaccaacaatggcagccaagatatgttgcttccttatgctccttggtctttctgcaagtgctgctaccgcaaccattttcccacaatgctcacaagctcctatagcttcctttcttcccccatacctctcaccagcggtgtcttcagtatgtgaaaacccaattcttcaaccctacaggatccaacaggcaatcgcagcaggcatcttacctttatcacccttgttcctncaacaaccgtcagccctattacagcagttacctttggtgcattttgtggcacaaaacatcaaggcacaacaactacaacaac

SEQ ID NO: 319898 - DNA, 241 bp, Zea mays
aactccaccttatgctataggctccgagctatcataatcactacaacgctcagccatatgcacaacatcaccaacatctcctaatttgtcaataaatcactaccattacaccaacgatctactgcaacattccctagaacagaaaccaaactgctatttccgtgaaacccctgaacaatgattgctacaagacacgagcacatgctacaacgccacctctatgcaaaagtggcgatgatcc

SEQ ID NO: 319899 - DNA, 364 bp, Zea mays
  unsure (1)..(364): unsure at all n locations
ggtcttcagaccattagctttatctactccagagcgcagaagaacccgatcgacaccatgagggtgttgctcgttgccctcgctctcctggctctcgctgcgagcgccacctccacgcatacaagcggcggctgcggctgccagccaccgccgccggttcatctaccgccgccggtgcatctgccacctccggttcacctgccacctccggtgcatctcccaccgccggtccacctgccgccgccggtccacctgccaccgncggtccatgtgccgncgccggttcatctgccgncgncaccatgccactaccctactcaaccgncccggcctcagcctcatccccagccacacccatgcccgt

SEQ ID NO: 319900 - DNA, 298 bp, Zea mays
gagaccaacaagcaacatagaaagtggaatccagtagcaacaacagagcaacaatggcgaccaagatattttccctccttatgctccttgctctttctgcatgtgttgctaacgcgacaattttccctcaatgctcacaagctcctatagcttcccttcttcccccataccttccatcaatgatagcttcagtatgtgaaaacccagctcttcagccctataggctccaacaagcaatcgcagcaagcaacatacctttatcacccttgttgtttcaacaatcgccagccctatcttt

SEQ ID NO: 319901 - DNA, 348 bp, Zea mays
acgcaacacgcagcatagaaagtggaatccagtagcaacaatagagcaacaatggcgaccaagatactttccctccttatgctccttgctctttctgcatgtgttgctaacgcgacaattttccctcaatgctcacaagctcctatagcttcccttcttcccccataccttccatcaatgatagcttcagtatgtgaaaacccagctcttcaaccctataggctccaacaagcaatcgcagcaagcaacatacctttatcacccttgtttcaacaatcgccagccctatctttggtgcagtcattggtacaaaccatcaaagcacagcagctgcagcaactcgtgcta

SEQ ID NO: 319902 - DNA, 296 bp, Zea mays
  unsure (1)..(296): unsure at all n locations
tccttgcgcttcttgccctttttgtgagcgcaacanatgcgttcattattccacaatgctcacttgctcctagtgccattataccacagttcctccgaccagttacttcaatgggcttcgaacacctagctgtgcaagcctacaggctacaacaagcgcttgcggcgagcgtcttacaacaaccaattaaccaattgcaacaacaatccttggcacatctaaccatacaaaccatcgcaacacaacagcaacaacagttcctaccagcactgagccaactagatgtggtgaaccct

SEQ ID NO: 319903 - DNA, 400 bp, Zea mays
  unsure (1)..(400): unsure at all n locations
cagctcttcaaccatataggcttcaacaggcaatcgcagcaggcaccatacctttagcgggcttgttgtttcaacaatcgccagccctatctttggtgcagtcattggtacaaaccatcaggtcacaacagctgcagcaactcgtgctacctctgatcaaccaagtagctctggcaaacctttctccctactctcagcaacaacaatttcttccattcaaccaactgtctacactgaaccctgctgcttatttgcagcaacaactattaccatttagccagctagctactgcctactctcagcaacaacaacttcttccatttaaccaattggccgcactgaaccccgctgcttatttgcagcagcanatactactaccatntagccagctagctgcagc

SEQ ID NO: 319904 - DNA, 417 bp, Zea mays
atctattaagaccatcctcgattataacttccattaatggagagcccgatccacacggtgagggtttctatcaaggccatcaatctgctaaaaacagataaaaacaatgaatcaactcattcacacaaactgataagagtcacaatcatcatagtcaagagatcactagtgccttgctgatctggatccattaacgctcacagacagtattacaggattctcttcggatcccctaatcatttgtacaaaagcaataacagttcatttgacagagtccaccctgacgaggttcctggtacaccaaggaaggaacttagcatttcagctgttcagatgcttcatttatactaccaaacgaacaattcacaatggccacattataacaagctacttttccatctaactctccaagaaaca

SEQ ID NO: 319905 - DNA, 371 bp, Zea mays
caggcatgttacctttatcacccttgttcctccaacaaccgacagccctattacaggggttacctttggtgcatttgctggcacaaaacatcaaggcacaacaactacaacaacttgtgctaggaaaccttgctgcctactctcagcaacagcagtttcttacattcaaccaactggctgcattgaactctgctgcttatttgcaacaacaactaccattcagtcagctagctgctgcctacccccagcaatgtcttccattcaaccaactggcagcattgaactctgctgcttatttacaacagcaacagctaccaccattcagacagctagctgatgtgagccctgttgccttcttgacacaacaacag

SEQ ID NO: 319906 - DNA, 425 bp, Zea mays
ccaactagcaacatagaaagcacaatagtgtaccaacaatggcagccaaaatgattgggcctccttatgctccttggtctttctgcaagtgctgctacggcgaccattttcccgcaatgctcgcaagctcctatagcttcccttcttcccccgtacctctcaccagcggtgtcttcggtatgtgaaaacccaattcttcaaccctacaggatccaacaggcaatcacagctggcatcttacctttatcacccttgttcctccaacaatcatcagccctattacatcagttacctttggtgcatttattggcacaaaacatcagggcacaacaactacaacaacttgtgctagcaaaccttgctgcctactctcagcaacagcagtttcttccattcaaccaactagctgcattgaactctgcttc

SEQ ID NO: 319907 - DNA, 431 bp, Zea mays
  unsure (1)..(431): unsure at all n locations
caacaagcatcatacaaagtggaattcagtatcaacaatagagcaacaatggcgaggaagatactttccctacttatgctccttgctctttctgcatgtgttgctaacgcgacaattttccctcaatgctcacaagctcctatagcttcccttcttcccccataccttacatcaatgatagcttcagtatgtgaaaacccagctcttcaaccctataggctccaacaagcaatcgcagcaagcaacatacctttatcacccttggttcaacaatcgccagccctatctttggagcagtcattggtacaaaccatcaatgcacagcagctgcagcaactagtgctacctgtgatcaaccaagtagctctggcaaacctttctccctactatgagcaacaacaatttcttncattcaaccaactatctacact

SEQ ID NO: 319908 - DNA, 402 bp, Zea mays
  unsure (1)..(402): unsure at all n locations
gaagtgctgctacggcgaccattttcccgcaatgctcgcaagctcctatagcttcccttcttccccggtacctgtcaccagcggtgtcttcggtatgtgaaaacccaattcttcaaccctacaggatccaacaggcaatcgcagctggcatcttacctttatcacccttgttcctccaacaatcatcagccctattacaacagttacctttggtgcatttattggcacaaaacatcagggcacaacaactacaacaacttgtgctagcaaaccttgctgcctactctcagcaacagcagtttcttccattcaaccaactaggttcattgaactctgcttcttatttgcaacaacaacaactaccattcagccagctacctgctgcctacccncagcaatttc

SEQ ID NO: 319909 - DNA, 323 bp, Zea mays
ctagccgtggtgaaccctgtcacctacttgcaacagcagctgcttgcatccaacccacttgctctggcgaacgtagctgcataccagcaacaacaacagctgcaacagtttatgccagtgctcagtcaactagccatggtgaaccctgccgtctacctacaactactttcatctagcccgctcgcggtgggcaatgcacctacgtacctacaacaacagttgctgcaacaaattgtaccagctctgactcagctagctgtggcaaaccctgctgcctacttacaacagttgcttccattcaaccaactggctgtgtcaaactc

SEQ ID NO: 319910 - DNA, 391 bp, Zea mays
tttgagcattcagaaacacacctagcgaagcgcactagcaacgacctaacagcaatggctaccaagatattatccctctttgcgcttcttgccctttttgtgagcgcaacaaatgcgttcattattccacaatgctcacttgctcctagtgccattattccacagttcctccctccagttacttcaatgggcttcgaacacccagctgtgcaagcctacaggctacaacaagcgcttgcggcgagcgtcttacaacaaccaattgcccaattacaacaacaatccttggcacatctaaccatacaaaccatcgcaacgcaacagcaacaacaatttctaccagcactgagccaactagctgtggtgaaccctgtcgcctacttgcaacagc

SEQ ID NO: 319911 - DNA, 359 bp, Zea mays
agaaagtggaatacagtagcaaaaatagagcaacaatggcggccaagatattgtccatccttatgctccttgctctttctgcatgtgttgctaacgcgaccatttttcctcaatactcacaagctcctatagctgcccttcttcccccataccttccatcaatgaccgctttagtatgtgaaaacccagcccttcaaccctacaggatccagcaagcaatcgcaacaagcaacttacctttatcacacctgttctttcaacaatcgccagccctatctttggtgcagtcattggtacaaaccatcagggcagaacagttgcagcaactcgtgctaccagtgatcagccaagtagctctg

SEQ ID NO: 319912 - DNA, 430 bp, Zea mays
atagaaagcacaatagtgtaccaacaatggcagccaaaatattttgcttccttatgcgtccttggtctttctgcaagtgctgctaccgcaaccattttcccacaatgctcacaagctcctatagcttcctttcttcccccatacctctcaccagcggtgtcttcagtatgtgaaaacccaattcttcaaccctacaggatccaacaggcaatcgcagcaggcatcttacctttatcacccttgttcctccaacaaccgtcagccctattacagcagttacctttggtgcatttgttggcacaaaacatcaaggcacaacaactacaacaacttgtgctaggaaaccttgctgcctactctcagcaacagcagtttcttccattcaaccaactggctgcattgaactctgctgcttattgcaacaacaact

SEQ ID NO: 319913 - DNA, 394 bp, Zea mays
gaccaactagcaacatagaaagcacaatagtgtaccaacaatggcagccaaaatatggcgcttgcttatgctccttggtctttctgcaagtgttgctaccgcaaccattttcccacaatgctcacaagctcctatagctgcccttcttcccccatacctctcaccagcggagtcttcaatgtgtgaaaccccaattgttcaaccctacaggatccaacatgcaatcgcaacacgcatattaccattatcactcttggttctccaacaaccgtcagccctattacagcagttacctttggtacatttggtggcacaaaacatccaggcacaacaactactacaacttgtgctagcaaaccttgctgaatactcttagcaacatcacgttcttcca

SEQ ID NO: 319914 - DNA, 434 bp, Zea mays
aaagcacaatagtgtaccaacaatggcagccaaaatattttgcctccttatgctccggggtctttctgcaagtgctgctacggcgaccattttcccgcaatgctcgcaagctcctatagcttcccttcttcccccgtacctctcaccagcggtgtcttcggtatgtgaaaacccaattcttcaaccctacaggatccaacaggcaatcgcagctggcatcttacctttatcacccttgttcctccaacaatcatcagccctattacaacagttacctttggtgcatttattggcacaaaacatcagggcacaacaactacaacaacttgtgctagcaaaccttgctgcctactctcagcaacagcagtttcttccattcaaccaactaggttcattgaactctgcttcttatttgcaacaacaacaactaccat

SEQ ID NO: 319915 - DNA, 376 bp, Zea mays
gcgaagcgcactagcaacgacctaacaccaatggctaccaagatattagccctccttgcgctgcttgcccttttagtgagcgcaacaaatgcgttcattattccacagtgctcacttgctcctagtgccattattccacagttcctcccaccagttacttcaatgggcttcgaacatccagccgtgcaagcctacaggctacaactagcgcttgcggcgagcgccttacaacaaccaattgcccaattgcaacaacaatccttggcacatctaaccctacaaaccattgcaacgcaacaacaacaacaacaacagtttctgccatcactgagccacctagccgtggtgaaccctgtcacctacttgcaacagcagc

SEQ ID NO: 319916 - DNA, 376 bp, Zea mays
gtgctagcaaaccttgctgcctactctcagcaacagcagtttcttccattcaaccaggtagctgcattgaactctgcttcttatttgcaacaacaacaactaccattcagccagctatctgctgcctacccccagcaatttcttccattcaaccaactgacagcattgaactctcctgcttatttacagcagcaacaactactaccattcagccagctagctggtgtgagccctgctaccttcttgacacaaccacagttgttgccgttctaccagcacgctgcgcctaacgctggcaccctcttacaactgcaacaattgctgccattcaaccaacttgctttgacaaacccagcagcattctaccaacaaccca

SEQ ID NO: 319917 - DNA, 353 bp, Zea mays
cagaaacacaccaagcgaagcacattagcaacaacctaacaacaatggctaccaagagattatccctccttgcgcttcttgcgctttttgcgagcgcaacaaatgcgttcattattccacaatgctcacttgctccaagttccattattacacagttcctcccaccagttacttcaatgggcttcgaacacccagctgtgcaagcctataggctacaacaagcaattgcggcgagcgtcttacaacaaccaatttcccagttgcaacaacaatccttggcacatctaacaatacaaaccatcgcaacgcaacagcaacaacaattcctaccagcactgagccacctagccatg

SEQ ID NO: 319918 - DNA, 386 bp, Zea mays
cccacgcgtacggaccaactagcaacatagaaagcacaatagtgtaccaacaatggcagccaaaatattttgcttccttatgctccttggtctttctgcaagtgctgctaccgcaaccattttgccacaatgctcacaagctcctatagcttcctttcttcccccatacctctcaccagcggtgtcttcagtatgtgaaaacccaattcttcaaccctacaggatccaacaggcaatcgcagcaggcatcttacctttatcacccttgttcctccaacaaccgtcagccctattacagcagttacctttggtgcatttgttggcacataacatcaatgcacaacatctacaacaacttgtgctaggaaaccttgctgcctactctc

SEQ ID NO: 319919 - DNA, 431 bp, Zea mays
cgcagaagaacccgatcgacaccatgagggtgttgctcgttgccctcgctctgctggctctcgctgcgagcgccacctccacgcatacaagcggcggctgcggctgccagccaccgccgccggttcatctaccgccgccggtgcatctgccacctccggttcacctgccacctccggtgcatctcccaccgccggtccacctgccgccgccggtccacctgccaccgccggtccatgtgccgccgccggttcatctgccgccgccaccatgccactaccctactcaaccgccccggcctcagcctcatccccagccacacccatgcccgtgccaacagccgcatccaagcccgtgccagctgcagggaacctgcggcgttggcagcaccccgatcctgggccagtgcgtcgagtttctgaggcatcagtgc

SEQ ID NO: 319920 - DNA, 326 bp, Zea mays
ccacctagacccacgcatccgcgttacctacccggtatccccactccctttctagtttctaccaatctcatcaagagtggatttatactgatgccctccagcccacccatccatcctcctctacagaaatcatgaaattaacaaccatcaaaactacactgcgacctatctgacaccttgactttacctctcttccactatcgctacacacagcccaagtacattgatagcgttagactcgcctgatatgaagtctctcatactgaatagctacttaaacattccacaccctatcatggatataacaaagaaaatacatacatgta

SEQ ID NO: 319921 - DNA, 381 bp, Zea mays
gcaacatagaaagcacaatagtgtaccaacaatggcagctaaaatattttgcctccgtatgctccttggtctttctgcaagtgctgctacggcgaccattttcccacaatgctcacaagctcctatagcttcccttcttcccccgtacctctcaccaacggtgtcttcggtatgtgaaaacccaattcttcaaccctacaggatccaacaggcaatcgcagctggcatcttacctttatcacccttgttcctccaacaatcatcagccctattacagcagttacctttggtgcatttattggcacaaaacatcagggcacaacaactacaacaacttgtgctagcaaaccttgctgcctactctcagcaacagcagtttct

SEQ ID NO: 319922 - DNA, 397 bp, Zea mays
cttctatcagtaccatcaatcatcattcatcttagtagtataggcaccaaatcaaatctgcaacatcaattatgtaacgccaaaaaccatgaagctggtgcttgtggttcttgctttcattgctttagtatcaagtgtttcttgtacacagacaggcggctgcagctgtggtcaacaacaaagccatgagcagcaacatcatccacaacaacatcatccacaaaaacaacaacatcaaccaccaccacaacatcaacagcagcagcaacaacaacaacaacaaggtcacatgccaccaccaaaacattagcaacaacaagaagttcatgttcaacaacaacaacaacaaccgcagcaccaccaccaacaacaacaacaacagcgccaacaacaacat

SEQ ID NO: 319923 - DNA, 256 bp, Zea mays
caagctcctatagcttcccttcttcccccataccttccatcaatgatagcttcaataggtgagaacccagctcttcagccctataagctccaacaagcaatcgcagcaagcaacatacctttatcacccttggtgtttcaacaatcgccagccctatctttggtgcaatcattggtacaaaccatcaaggcacaacaactgcagcaactcgtgctacctgggatcaaccaagtagctctggcaaacctttctccct

SEQ ID NO: 319924 - DNA, 420 bp, Zea mays
ggtgggttggcttctcctccccctccggttcgggttcgggttcgtgaggttctccggggttcggtttcgtgggtgagcggatcgagatggcggcgtcggatgttgagtaccgctgcttcgtcggcggcctcgcctgggccacggacgaccactccctccacaacgccttcagcacctacggcgaggtcctcgagtccaagatcatcctcgatcgggagacgcagaggtcccgcggcttcggcttcgtcaccttctccacggaggaggcgatgcggaacgccatcgagggcatgaacggcaaggagctggacggccgcaacatcaccgtcaacgaggcccagtcccgcggcggccgtggaggcggcggcggcggcgggtacggtggtggccgtggaggcggcggctacggcggtggcgggc

SEQ ID NO: 319925 - DNA, 387 bp, Zea mays
gtaatagttgttgcctactctcagcaacaacaacttcttccatttaaccaattggccgcactgaaccccgctgcttatttgcagcagcaaatactactaccatttagccagctagctgcagcaaaccgtgcttccttcttgacacagcaacagttgctgcctttctaccagcagtttgcggctaaccccgcaaccctcttacaactacaacaattgttgccctttgtccaacttgctttgacagaccgagcggcctcctaccaacaacacatcattggtggtgccctcttttagattgcttattagttgtaattcaataataaagttttttggatgatgtatgtggccaaccagaaataagaagttacatttccagattttaatgtg

SEQ ID NO: 319926 - DNA, 406 bp, Zea mays
acgtattgagaccaactagcaacatagaaagcacaatagtgtaccaacaatggcagccaagagattgtgcctccttatgctccttggtctttctgcaagtgctgctacggcgaccattttcccgcaatgctcgcaagctcctatagcttcccttcttcccccgtacctctcaccagcggtgtcttcggtatgtgaaaacccaattcttcaaccctacaggatccaacaggcaatcgcagctggcatcttacctttatcacccttggtcctccaacaatcatcagccctattacaacagttacctttggtgcatttattggcacaaaacatcagggcacaacaactacaacaacttgtgctagcaaaccttgctgcctactctcagcaacagcagtttgttccattc

SEQ ID NO: 319927 - DNA, 363 bp, Zea mays
agaccaacaagcaacatagaaagtggaatccagtagcaacaacagagcaacaatggcgaccagagatattttccctccttatgctccttgctctttctgcatgtgttgctaacgcgacaattttccctcaatgctcacaagctcctatagcttcccttcttcccccataccttccatcaatgatagcttcagtatgtgaaaacccagctcttcagccctataggctccaacaagcaatcgcagcaagcaacatacctttatcacccttggtgtttcaacaatcgccagccctatctttggtgcagtcattggtacaaaccattagggcacagcagctgcagcaactcgtgctacctgtgatca

SEQ ID NO: 319928 - DNA, 397 bp, Zea mays
attttgagcattcagaacacaccaagcgaagctacctagcaacgacttaacaacagtggctaccaagatattagcccttcttgcgcttcttgccctttttgtgagcgcaacaaatgcgttcattattccacaatgctcacttgctcctagtgccattataccacagttcctccgaccagttacttcaatgggcttcgaacacctagctgtgcaagcctacaggctacaacaagcgcttgcggcgagcgtcttacaacaaccaattaaccaattgcaacaacaatccttggcacatctaaccatacaaaccatcgcaacacaacagcaacaacagttcctaccagcactgagccaactagatgtggtgaaccctgtcgcctacttgcaacagcaggtg

SEQ ID NO: 319929 - DNA, 66 bp, Zea mays
aaaaaaaaaaagaggaaaccaaaaacatcaatttaccaacaaaggcctccaaaaaaggaggggatc

SEQ ID NO: 319930 - DNA, 400 bp, Zea mays
gcaacatagaaagcacaatagtgtaccaacaatggcagccaaaatattttgcctccgtatgctccttggtctttctgcaagtgctgctacggcgaccattttcccgcaatgctcgcaagctcctatagcttcccttcttcccccgtacctctcaccagcggtgtcttcggtatgtgaaaacccaattcttcaaccctacaggatccaacaggcaatcacagctggcatcttacctttatcacccttgttcctccaacaatcatcagccctattacatcagttacctttggtgcatttattggcacaaaacatcagggcacaacaactacaacaacttgtgctagcaaaccttgctgcctactctcagcaacagcagtttcttccattcaaccaactagct

SEQ ID NO: 319931 - DNA, 392 bp, Zea mays
caactagcaacatagaaagcacaatagtgtaccaacaatggcagccaaaatattttggttccgtatgctccttggtctttctgcaagtgctgctaccgcaaccattttcccacaatgctcacaagctcctatagcttcctttcttcccccatacctctcaccagcggtgtcttcagtatgtgaaaacccaattcttcaaccctacaggatccaacaggcaatcgcagcaagcatcttacctttatcacccttgttccttcaacaaccgtcagccctattacagcagttacctttggtgcatttgttggcacaaaacatcaaggcacaacaactacaacaacttgtgctaggaaaccttgctgcctactcttagcaacagcagtttctttcat

SEQ ID NO: 319932 - DNA, 154 bp, Zea mays
  unsure (1)..(154): unsure at all n locations
nccacgcgtaccggagaacagttccccttttctggatcggcctggtccttacagcaggggccattgggggcgagcccgagaagcaagcgggccccgggggacaagaaaccggcgggcacatcgggtacgttgaccggcccgagggcgccgaccc

SEQ ID NO: 319933 - DNA, 227 bp, Zea mays
cggagaagcatgcaaacctcactacacaggaaactgctgtgcacatcgtgtacattgaccacctccacaacaccaacactgaagagttcaacattactaccatcaatcacatactgtttaaaaaacacttgaacagaatcgcagtgctctaccactacaataacgcacacagcaacattcttcacgatgatgaccctatatcatgtcataagatcctaaagagcaac

SEQ ID NO: 319934 - DNA, 331 bp, Zea mays
aacacaccaagcgaacccactaacacgaactaccacaaggctaccaaaaatgagccctcttgcgcttcttgcccttttagtgagcgcaacaaatgcgttcattattccacagtgctcacttgctcctagtgccagtattccacagttcctcccaccagttacttcaatgggcttcgaacatccagccgtgcaagcctacaggctacaactagcgcttgcggcgagcgccttacaacaaccaattgcccaattgcaacaacaatccttggcacatctaaccctacaaaccattgcaacgcaacaacaacaacaacagtttctgccatcactg

SEQ ID NO: 319935 - DNA, 442 bp, Zea mays
tgtcagcattcaaaaacacaccaagcgaagcgcactagcaacgacctaacacgcgatggctaccaagatattagccctccttgcgcttcttgcccttttagtgagcgcaacaaatgcgttcattattccacagtgctcacttgctcctagtgccattattccacagttcctcccaccagttacttcaatgggcttcgaacatccagccgtgcaagcctacaggctacaactagcgcttgcggcgagcgccttacaacaaccaattgcccaattgcaacaacaatccttggcacatctaaccctacaaaccattgcaacgcaacaacaacaacaacaacagtttctgccatcactgagccacctagccgtggtgaaccctgtcacctacttgcaacagcagctgcttgcatccaacccacttgctctggcgaacgtagctgca

SEQ ID NO: 319936 - DNA, 357 bp, Zea mays
ttattgagaccaactagcaacatagaaagcacaatagtgtaccaacaatggcagcgaaaatattttgcctccttatgctccttggtctttctgcaagtgctgctacggcgaccattttcccacaatgctcacaagctcctatagcttcccttcttcccccgtacctctcaccagcggtgtcttcggtatgtgaaaacccaattcttcaaccctataggatccaacaggcaatcgcagctggcatcttacctttatcacccttgttcctccaacaatcatcagccctattacagcagttacctttggtgcatttattggcacaaaacatcagggcacaacaactacaacaacttgtgc

SEQ ID NO: 319937 - DNA, 362 bp, Zea mays
aggcaatcgcagctggcatcttacctttatcacccttgttcctccaacaatcatcaggcctagtacaacagttacctttggtgcatttattggcacaaaacatcagggcacaacaactacaacaacttgtgctagcaaaccttgctgcctactctcagcaacagcagtttcttccattcaaccaactaggttcattgaactctgcttcttatttgcaacaacaacaactaccattcaaccagctacctgctggctacccccagcaatttctttcattcaaccaacttgcagcattgaactcttctgcttatttacaggagcaacaactactaccattcagacagctagctggtgtgagccct

SEQ ID NO: 319938 - DNA, 327 bp, Zea mays
tttccctccttatgctccttgctctttctacatgtgttgctaacgcgacaaattgttcctcaatgctcacaagctcctatagcttcccttacttctcaataccttccatcaattatagcttcaatatgtgaaaacccagctcttcaaccatataggcttcaacaagcaatcgcagcaagcaacataccttgatcgtccttgatgcttcaacaatcgtcagccctatctttggtgcagtcattggtacaaaccattagggcacaacagctgtagcaactcgtgctacctctgatcaaccaagtagctctggcaaacctttctccctac

SEQ ID NO: 319939 - DNA, 421 bp, Zea mays
ggcagccaaaatatttggcttccttatgctccttggtctttctgcaagtgctgctaccgcaaccattttcccacaatgctcacaagctcctatagcttcctttcttcccccatacctctcaccagcggtgtcttcagtatgtgaaaacccaattcttcaaccctacaggatccaacaggcaatcgcagcaggcatcttacctttatcacccttgttcctccaacaaccgtcagccctattacagcagttacctttggtgcatttgttggcacaaaacatcaaggcacaacaactacaacaacttgtgctaggaaaccttgctgcctactctcagcaacagcagtttcttccattcaaccaactggctgcattgaactctgcttgctaatttgcacatcaactaccattcagtcagctagct

SEQ ID NO: 319940 - DNA, 389 bp, Zea mays
accaagcgaagcgcactagcaacgacctaacaccaatggctaccaagatattagccgtccttgcgcttcttgcccttttagtgagcgcaacaaatgcgttcattattccacagtgctcacttgctcctagtgccattattccacagttcctcccaccagttacttcaatgggcttcgaacatccagccgtgcaagcctacaggctacaactagcgcttgcggcgagcgccttacaacaaccaattgcccaattgcaacaacaatccttggcacatctaaccctacaaaccattgcaacgcaacaacaacaacatcaacagtttctgccatcactgagccacctagccgtggtgaaccctgtcacctacttgcaacagcagctgcttgca

SEQ ID NO: 319941 - DNA, 439 bp, Zea mays
caactagcaacatagaaagcacaatagtgtaccaacaatggcagccaaaatatttggcctccttatgctccttggtctttctgcaagtgctgctacggcgaccattttcccgcaatgctcgcaagctcctatagcttcccttcttcccccgtacctctcaccagcggtgtcttcggtatgtgaaaacccaattcttcaaccctacaggatccaacaggcaatcgcagctggcatcttacctttatcacccttgttcctccaacaatcatcagccctattacaacagttacctttggtgcatttattggcacaaaacatcagggcacaacaactacaacaacttgtgctagcaaaccttgctgcctactctcagcaacagcagtttcttccattcaaccaactaagttcattgaactctgcttcttatttgcaacaacaa

SEQ ID NO: 319942 - DNA, 350 bp, Zea mays
aacaagcaacatagaaagtggaatccagtagcaacaatagagcaacaatggcgaccaagatactttccctccttatgctccttgctctttctgcatgtgttgctaacgcgacaattttccctcaatgctcacaagctcctatagcttcccttcttcccccataccttccatcaatgatagcttcagtatgtgaaaacccagctcttcaaccctataggctccaacaagcaatcgcagcaagcaacatacctttatcacccttggttcaacaatcgccagccctatctttggtgcagtcattggtacaaaccatcaaagcacaacagctgcagcaactcgtgctacctggg

SEQ ID NO: 319943 - DNA, 362 bp, Zea mays
ctagcaacatagaaagcacaatagtgtaccaacaatggcagctaaaatattttgcctgcttatgctccttggtctttctgcaagtgctgctacggcgaccattttcccacaatgctcacaagctcctatagcttcccttcttcccccgtacctctcaccaacggtgtcttcggtatgtgaaaacccaattcttcaaccctacaggatccaacaggcaatcgcagctggcatcttacctttatcacccttgttcctccaacaatcatcagccctattacagcagttacctttggtgcatttattggcacaaaacatcagggcacaacaactacaacaacttgggctaacaaaacttggttgct

SEQ ID NO: 319944 - DNA, 443 bp, Zea mays
  unsure (1)..(443): unsure at all n locations
gcaacatagaaagcacaatagtgtaccaacaatggcagccaaaatattttgcctcctgatgctccttggtctttctgcaagtgctgctacggcgaccattttcccgcaatgctcgcaagctcctatagcttcccttcttcccccgtacctctcaccagcggtgtcttcggtatgtgaaaacccaattcttcaaccctacaggatccaacaggcaatcacagctggcatcttacctttatcacccttgttcctccaacaatcatcagccctattacatcagttacctttggtgcatttattggcacaaaacatcagggcacaacaactacaacaacttgtgctagcaaaccttgctgcctactctcagcaacagcaagttcttccattcaaccaactagctgcattgaactctgcttnctattttgcacaacaacaactaccat

SEQ ID NO: 319945 - DNA, 386 bp, Zea mays
caactagcaacatagaaagcacaatagtgtaccaacaatggcagccaaaatattttgcttccttatgctgcttggtctttctgcaagtgctgctaccgcaaccattttcccacaatgctcacaagctcctatagcttcctttcttcccccatacctctcaccagcggtgtcttcagtatgtgaaaacccaattcttcaaccctacaggatccaacaggcaatcgcagcaggcatcttacctttatcacccttgttcctccaacaaccgtcagccctattacagcagttacctttggtgcatttgttggcacaaaacatcaaggcacaacaactacaacaacttgtgctaagaaaccttgctgcctactctcagcaacagcagtttc

SEQ ID NO: 319946 - DNA, 399 bp, Zea mays
agaccaactagcaacatagaaagcacaatagtgtaccaacaatggcagccaaagatatggtgcttccttatgctccttggtctttctgcaagtgctgctaccgcaaccattttcccacaatgctcacaagctcctatagcttcctttcttcccccatacctctcaccagcggtgtcttcagtatgtgaaaacccaattcttcaaccctacaggatccaacaggcaatcgcagcaggcatcttacctttatcacccttgttcctccaacaaccgtcagccctattacagcagttacctttggtgcatttgttggcacaaaacatcaaggcacaacaactacaacaacttgtgctaggaaaccttgctgcctactctcagcaacagcagtttcttccattc

SEQ ID NO: 319947 - DNA, 361 bp, Zea mays
aacgcaaacaaccaccaaagcaatcgataagcaaccctgcaagtgcaggcaaagagagggcgcgaccaaacagatccaatccaatggcgatggcaccgtccgcagcatgcgtcgtctcgttccccgcccgcccggcggcgtccacggccgggccccgcgccgccgcgggcgccggggcggtccacgctttcgcggggtcggcggagggcgccaagtggtgggcgccgcttctggggtggtccgggaaaggccacttcctggaaggcccgggccccgcgcccgccggggccccagaccaagcgccgcggaagcaagtccttggggttattaccgaagaaaaaggcccggaacttgcggcccc

SEQ ID NO: 319948 - DNA, 360 bp, Zea mays
agaggatcgtcgaacagaacagcatgaagatggtcatcgttctcgtcgtgtgcctgggtctgtcagctgccagcgcctctgcaatgcagatgccctgcccctgcgcggggctgcagggcttgtacggcgctggcgccggcctgacgacgatgatgggcgccggcgggctgtacccctacgcggagtacctgaggcagccgcagtgcagcccgctggcggcggcgccctactacgccgggtgtgggcagccgagcgccatgttccagccgctccggcaacagtgctgccagcagcagatgaggatgatggacgtgcagtccgtcgcgcagcagctgcagatgatgatgcagcttgagcgtg

SEQ ID NO: 319949 - DNA, 443 bp, Zea mays
caactagcaacatagaaagcacaatagtgtaccaacaatggcagccaaaatattttggctgcttatgctccttggtatttctgcaagtgctgctacggcgaccattttcccgcaatgctcacaagctcctatagcttcccttcttcccccgtacctctcaccagcggtgtcttcggtatgtgaaaacccaattcttcaaccctacaggatccaacaggcaatcgcagctggcatcttacctttatcacccttgttcctccaacaatcatcagccctattacagcagttacctttggtgcatttattggcacaaaacatcagggcacaacaactacaacaacttgtgctagcaaaccttgctgcctactctcagcaacagcagtttcttccattcaaccaactagctgcattgaactctgcttcttatttgcaacaacaacaac

SEQ ID NO: 319950 - DNA, 347 bp, Zea mays
caagctcctatagctgcccttcttcctccataccttccatcaatgaccgcttcagtgtgtgaaaacccagcccttcaaccctacaggctccaacaagcaatcgcaacaagcaacttacctttatcacccctgttctttcaacaatcgccagccctatctttggtgcagtcattggtacaaaccatcagggcacaacagctgcaacaactcgtgctaccagtgatcagccaagtagctgtggcaaacctttctccctactctcagcaacaacaatttcttccattcaaccaactgtctacactgaaccctgctgcttatttacaacaacaacaactactaccattcag

SEQ ID NO: 319951 - DNA, 404 bp, Zea mays
gcatacaagcggcggctgcggctgccatccaccgccgccggttcatctaccgccgccggtgcatctgccacctccggttcacctgccacctccggtgcatctcccaccgccggtccacctgccgccgccggtccacctgccaccgccggtccatgtgccgccgccggttcatctgccgccgccaccatgccactaccctactcaaccgccccggcctcagcctcatccccagccacacccatgcccgtgccaacagccgcatccaagcccgtgccagctgcagggaacctgcggcgttggcagcaccccgatcctgggccagtgcgtcgagttcctgaggcatcagtgcagcccgacggcgacgccctactgctcgcctcagtgccagtcggtgcggcagcagt

SEQ ID NO: 319952 - DNA, 434 bp, Zea mays
cagcaagcaacatagaaagtagaatccattagcaacaatagagcaacaatggcgaccaagatattttccctccttatgctccttgctctttctacatgtgttgctaacgcgacaattttccctcaatgctcacaagctcctatagcttcccttcttcccccataccttccatcaattatagcttcagtatgtgaaaacccagctcttcaaccatataggcttcaacaagcaatcgcagcaagcaacatacctttatcgcccttgttgtttcaacaatcaccagccctatctttggtgcagtcattggtacaaaccatcagggcacaacagctgcagcaactcgtgctacctgtgatcaaccaagtagctctggcaaacctttctccctactctcagcaacaacaatttcttccattcaaccaactgtctacact

SEQ ID NO: 319953 - DNA, 427 bp, Zea mays
gcaacatagaaagtggaatccagtagcaacaacagagcaacaatggcgaccaagatattttccctccttatgctccttgctctttctgcatgtgttgctaacgcgacaattttccctcaatgctcacaagctcctatagcttcccttcttcccccataccttccatcaatgatagcttcagtatgtgaaaacccagctcttcagccctataggctccaacaagcaatcgcagcaagcaacatacctttatcacccttgttgtttcaacaatcgccagccctatctttggtgcagtcattggtacaaaccatcagggcacagcagctgcagcaactcgtgctacctgtgatcaaccaagtagctctggcaaacctttctccctactctcagcaacaacaatttcttccattcaaccaactgtctacac

SEQ ID NO: 319954 - DNA, 403 bp, Zea mays
gcaacatagaaagtggaatacagtagcaaaaatagagcaacaatggcggccaagatatgttccatccttatgctccttgctctttctgcatgtgttgctaacgcgaccatttttcctcaatactcacaagctcctatagctgcccttcttcccccataccttccatcaatgaccgctttagtatgtgaaaacccagcccttcaaccctacaggatccagcaagcaatcgcaacaagcaacttacctttatcacacctgttctttcaacaatcgccagccctatctttggtgcagtcattggtacaaaccatcagggcagaacagttgcagcaactcgtgctaccagtgatcagccaagtagctctggcaaacctttccccctactctcagcaacaacaatttc

SEQ ID NO: 319955 - DNA, 386 bp, Zea mays
ggaatccagtagcaacaatagagcaacaatggcgaccaagatactttccctcgttatgctccttgctctttctgcatgtgttgctaacgcgacaattttccctcaatgctcacaagctcctatagcttcccttcttcccccataccttccatcaatgatagcttcagtatgtgaaaacccagctcttcaaccctataggctccaacaagcaatcgcagcaagcaacatacctttatcacccttgtttcaacaatcgccagccctatctttggtgcagtcattggtacaaaccatcaaggcacagcagctgcagcaactcgtgctacctgtgatcaaccaagtagctctggcaaacccttctccctactatcagcaacaacaatttc

SEQ ID NO: 319956 - DNA, 447 bp, Zea mays
cagaaacacaccaagcgaagcacattagcaacaacctaacaacaatggctaccaagagattatccctccttgcgcttcttgcgctttttgcgagcgcaacaaatgcgttcattattccacaatgctcacttgctccaagttccattattacacagttcctcccaccagttacttcaatgggcttcgaacacccagctgtgcaagcctataggctacaacaagcaattgcggcgagcgtcttacaacaaccaatttcccagttgcaacaacaatccttggcacatctaacaatacaaaccatcgcaacgcaacagcaacaacaattcctaccagcactgagccacctagccatggtgaaccctgccgcctacctacaacagcaacaactgctttcatctagcccgctcgctgtggccaatgcacctacataccttgaacaaccattgg

SEQ ID NO: 319957 - DNA, 270 bp, Zea mays
cagccagctagctggtgtgagccctgctaccttcttgatacaaccacagttgttgccgttctaccagcacgctgcgcctaacgctggcaccctcttacaactgcaacaattgctgccattcaaccaacttgctttgacaaacccagcagcgttctaccaacaacccatcattggtggtgccctcttttagatttcttatgagttatagttcaataataaagttttttgtctgatgtttgtggcttcccagaaataagaaagtacatttct

SEQ ID NO: 319958 - DNA, 374 bp, Zea mays
attttcagcattcaaaaacacaccaagcgaagcgcactagcaacgacctaacaccaagggctaccaagatattagccctccttgcgcttcttgcccttttagtgagcgcaacaaatgcgttcattattccacagtgctcacttgctcctagtgccattattccacagttcctcccaccagttacttcaatgggcttcgaacatccagccgtgcaagcctacaggctacaactagcgcttgcggcgagcgccttacaacaaccaattgcccaattgcaacaacaatccttggcacatctaaccctacaaaccattgcaacgcaacaacaacaacaacaacagtttctgccatcactgagccacctagccgtggtg

SEQ ID NO: 319959 - DNA, 376 bp, Zea mays
gcggggagaggccacaacatccacagggttctgcgttgcctaaccaaaactcagcggaaaatgctactgctgcagctccaccagctggtggacaacaagcacaaacgctgaatcaacagccaccacagcagcagcagaagccaaatacaaatgaccaggcccaaggtgtttcaaatggccatcaggccactagaatcgtcacaccccttccacaaggaccatctaggtatttcattgataaaagttgcaatccggagaatctggaaatatcagttcaacaaggaatttgggccacacagaggagtaatgaagctaaactcaatgaagcttttgaatccactgagaatgttattttgatattctcaattaatagaac

SEQ ID NO: 319960 - DNA, 276 bp, Zea mays
gcgcatgcgcgccgtcaaggagacgcgccagcgcttcggccgcttcttcttgcgcttgcccgagggcgagtccgccgccgacgtctttgaacggggtggccggtttcctggagccgttgtgccgggacatcgacatggggcggctggaccaggaccccagctgcgaaacgaacctggtgatcgcttccaacggcctaacttggcggtggttcctgatgaaggggttcaggggaccggtgcccaatttgagcgccttaaccactttgacaactggga

SEQ ID NO: 319961 - DNA, 379 bp, Zea mays
cccacgcgtccgcccacgcgtccgagctcctatagcttcccttcttcccccatacctggcatcaattatagcttcagtatgtgaaaacccagctcttcaaccatataggcttcaacaagcaatcgcagcaagcaacatacctttatcgcccttgttgtttcaacaatcaccagccctatctttggtgcagtcattggtacaaaccatcagggcacaacagctgcagcaactcgtgctacctgtgatcaaccaagtagctctggcaaacctttctccctactctcagcaacaacaatttcttccattcaaccaactgtctacactgaaccctgctgcttatttgcagcaacaactattaccatttagccagctagctact

SEQ ID NO: 319962 - DNA, 414 bp, Zea mays
gagaccagcaagcaacatagaaagtagaatccattagcaacaatagagcaacaatggcgaccaagatattttccctccttatgctccttgctctttctacatgtgttgctaacgcgacaattttccctcaatgctcacaagctcctatagcttcccttcttcccccataccttccatcaattatagcttcagtatgtgaaaacccagctcttcaaccatataggcttcaacaagcaatcgcagcaagcaacatacctttatcgcccttgttgtttcaacaatcaccagccctatctttggtgcagtcattggtacaaaccatcagggcacaacagctgcagcaactcgtgctacctgtgatcaaccaagtagctctggcaaacctttctccctactctcagcaacaacaatttc

SEQ ID NO: 319963 - DNA, 432 bp, Zea mays
cacaatgctcacaagctcctatagcttcccttcttcccccatacctctcaccagcggggtcttcaatgtgtgaaaccccaattgttcaaccctacaggatccaacaggcaatcgcaacaggcatcttaccattatcacccttgttcctccaacaaccgtcagccctattacagcagttacctttggtccatttggtggcacaaaacatcagggcacaacaactacaacaacttgtgctagcaaaccttgctgcatactctcagcaacatcagtttcttccattcaaccaactggctgcattgaactctggtgcttatttgcaacaacaattaccattcagccagctagttgctgcctacccccagcaatttcttccattcaaccaactagcagcattgaactctgctgcttatttacagcagcaacaactac

SEQ ID NO: 319964 - DNA, 445 bp, Zea mays
ttcagaaacacacctagcgaagcgcactagcaacgacctaacaacaatggctacgaagatattatccctctttgcgcttcttgccctttttgtgagcgcaacaaatgcgttcattattccacaatgctcacttgctcctaatgccattattccacagttcctccctccagttacttcaatgggcttcgaacacccagctgtgcaagcctacaggctacaacaagcgcttgcggcgagcgtcttacaacaaccaattgcccaattacaacaacaatccttggcacatctaaccatacaaaccatcgcaacgcaacagcaacaacaatttctaccagcactgagccaactagctgtggtgaaccctgtcgcctacttgcaacagcagttgcttgcatccaacccacttgctctggcaaacatagttgcataccaaccaccaccacca

SEQ ID NO: 319965 - DNA, 400 bp, Zea mays
acaatgctcacttgctccaagttccattattacacagttcctcccaccagttacttgaatgggcttcgaacacccagctgtgcaagcctataggctacaacaagcaattgcggcgagcgtcttacaacaaccaatttcccagttgcaacaacaatccttggcacatctaacaatacaaaccatcgcaacgcaacagcaacaacaattcctaccagcactgagccacctagccatggtgaaccctgccgcctacttgcaacagcagttgcttgcatcaaacccacttgctctggcaaacgtagttgcaaaccagccacaacaacagctgcaacagtttcttgcagcgctcagtcaactagccatggtgaaccctggcggctaactaccacaggaaccactg

SEQ ID NO: 319966 - DNA, 358 bp, Zea mays
caactagcaacatagaaagcacaatagtgtaccaacaatggcagccaaaatattttgcttccttatgctccttggtctttctgcaagttttgctaccgcaaccattttcccacaatgctcacaagctcctatagcttcccttcttcccccatacctctcaccagcggtgtcttcaatgtgtgaaaccccaattgttcaaccctacaggatccaacaggcaatcgcaacaggcatcttaccattatcacccttgttcctccaacaaccgtcagccctattacagcagttacctttggtccatttggtggcacaaaacatcaaggcacaacaactaccacaacttgggctagcaaacctt

SEQ ID NO: 319967 - DNA, 141 bp, Zea mays
cgctgctgccggcggtgtcccccactgaagaaactatgtgctgtagtatagccgctggctagctagctagttgagtcatttagcggcgatgattgagtaataatgtgtcacgcatcaccatgggtggcagtgtcagtgtga

SEQ ID NO: 319968 - DNA, 395 bp, Zea mays
attgagaccaactagcaacatagaaagcacaatagtgtaccaacaatggcaggcaaagtattttgcctccttatgctccttggtctttctgcaagtgctgctacggcgaccattttcccgcaatgctcgcaagctcctatagcttcccttcttcccccgtacctctcaccagcggtgtcttcggtatgtgaaaacccaattcttcaaccctacaggatccaacaggcaatcacagctggcatcttacctttatcacccttgttccttcaacaatcatcagccctattacatcagttacctttggtgcatttattggcacaaaacatcagggcacaacaactacaacaacttgtgctagcaaaccttgctgcctactcttagcaacagcagtttct

SEQ ID NO: 319969 - DNA, 346 bp, Zea mays
gcaacatagaaagcacaatagtgtaccaacaatggcagccaaaatattttgcgcgcctgatgctccttggtctttctgcaagtgctgctacggcgaccattttcccgcaatgctcgcaagctcctatagcttcccttcttcccccgtacctctcaccagcggtgtcttcggtatgtgaaaacccaattcttcaaccctacaggatccaacaggcaatcacagctggcatcttacctttatcacccttgttcctccaacaatcatcagccctattacatcagttacctttggtgcatttattggcacaaaacatcagggcacaacaactacaacaacttgtgctagc

SEQ ID NO: 319970 - DNA, 363 bp, Zea mays
  unsure (1)..(363): unsure at all n locations
gcaaaatcctaccctcggtaacagccacgtttatcgagtgtctctagactgacactgggtaaactatgttttgacgagtgtcaaaataagacactccgtaaaacattctttgccgagtgcctgccgtggaacactcgacaacgtatttaaaaaaaataaaacaatctttgtcaagtgcttatcaaagggcactcgacaaagacagctttgccgagtgtcagatcgaggacactcggcaaagtatatttttaaattaaaaaataactttgccgactgctagatcgcgacactcgacaaagtctgtttacatagtcttaactggccttcttcttctcttcattnntctttctcttcttcacgccg

SEQ ID NO: 319971 - DNA, 436 bp, Zea mays
gcaacatagaaagcacaatagtgtaccaacaatggcagccaaaatattttgctgcctgatgctccttggtctttctgcaagtgctgctaccgcaaccattttcccacaatgctcacaagctcctatagcttcctttcttcccccatacctctcaccagcggtgtcttcagtatgtgaaaacccaattcttcaaccctacaggatccaacaggcaatcgcagcaggcatcttacctttatcacccttgttcctccaacaaccgtcagccctattacagcagttacctttggtgcatttgttggcacaaaacatcaaggcacaacaactacaacaacttgtgctaggaaaccttgctgcctactctcagcaacagcagtttcttccattcaaccaactggctgcattgaactctgctgcttatttgcaacaacaacta

SEQ ID NO: 319972 - DNA, 421 bp, Zea mays
  unsure (1)..(421): unsure at all n locations
gcaaagcggcagtgcgtagagaggatcgtcgaacagaacagcatgaagatggtcatcgttctcgtcgtgtgcctggctctgtcagctgccagcgcctctgcaatgcagatgccctgcccctgcgcggggctgcagggcttgtacggcgctggcgccggcctgacgacgatgatgggcgccggcgggctgtacccctacgcggagtacctgaggcagccgcagtgcagcccgctggcggcggcgccctactacgccgggtgtgggcagacgagcgccatgtaccagccgctccggcaacagtgctgccagcagcagatgaggatgatggacgtgcagtccgtcgcgcagcagctgcagatgatgatgcagcttgagcgtgccgctgccgncagcagcagcctgtacgagccagctctgatgc

SEQ ID NO: 319973 - DNA, 435 bp, Zea mays
agaaagcacaatagtgtaccaacaatggcagccaaaatattttgcctccttatgctcgttggtctttctgcaagtgctgctacggcgaccattttcccgcaatgctcgcaagctcctatagcttcccttcttcccccgtacctctcaccagcggtgtcttcggtatgtgaaaacccaattcttcaaccctacaggatccaacaggcaatcacagctggcatcttacctttatcacccttgttcctccaacaatcatcagccctattacatcagttacctttggtgcatttattggcacaaaacatcagggcacaacaactacaacaacttgtgctagcaaaccttgctgcctactctcagcaacagcagtttcttccattcaaccaactagctgcattgaactctgcttcttatttgcaacaacaacaactacca

SEQ ID NO: 319974 - DNA, 428 bp, Zea mays
aaagcacaatagtgtaccaacaatggcagccaaaatattttgcttccttatgctcctgggtctttctgcaagtgctgctaccgcaaccattttcccacaatgctcacaagctcctatagcttcctttcttcccccatacctctcaccagcggtgtcttcagtatgtgaaaacccaattcttcaaccctacaggatccaacaggcaatccgcagcaggcatcttacctttatcacccttgttcctccaacaaccgtcagccctattacagcagttacctttggtgcatttgttggcacaaaacatcaaggcacaacaactacaacaacttgtgctaggaaaccttgctgcctactctcagcaacagcagtttcttccattcaaccaactggctgcattgaactctgctgcttatttgcaaacaacacta

SEQ ID NO: 319975 - DNA, 413 bp, Zea mays
attgagaccaactagcaacatagaaagcacaatagtgtaccaacaatggcagccaaaatattttgcttccttatgctccttggtctttctgcaagtgttgctaccgcaaccattttcccacaatgctcacaagctcctatagcttcccttcttcccccatacctctcaccagcggtgtcttcaatgtgtgaaaccccaattgttcaaccctacaggatccaacaggcaatcgcaacaggcatcttaccattatcacccttgttcctccaacaaccgtcagccctattacagcagttacctttggtccatttggtggcacaaaacatcagggcacaacaactacaacaacttgtgctagcaaaccttgctgcatactctcagcaacatcagtttcttccattcaaccaactggc

SEQ ID NO: 319976 - DNA, 415 bp, Zea mays
ttgagaccaactagcaacatagaaagcacaatagtgtaccaacaatggcagccaaaagattttgcctccttatgctccttggtctttctgcaagtgctgctacggcgaccattttcccgcaatgctcgcaagctcctatagcttcccttcttcccccgtacctctcaccagcggtgtcttcggtatgtgaaaacccaattcttcaaccctacaggatccaacaggcaatcgcagctggcatcttacctttatcacccttgttcctccaacaatcatcagccctattacaacagttacctttggtgcatttattggcacaaaacatcagggcacaacaactacaacaacttgtgctagcaaaccttgctgcctactctcagcaacagcagtttcttccattcaaccaactaggttc

SEQ ID NO: 319977 - DNA, 437 bp, Zea mays
gagaccagcaagcaacatagaaagtataatccattagcaacaatagagcaacaatggcgaccaagatattttccctccttatgctccttgctctttctacatgtgttgctaacgcgacaattttccctcaatgctcacaagctcctatagcttcccttcttcccccataccttccatcaattatagcttcagtatgtgaaaacccagctcttcaaccatataggcttcaacaagcaatcgcagcaagcaacatacctttatcgcccttgttgtttcaacaatcaccagccctatctttggtgcagtcattggtacaaaccatcagggcacaacagctgcagcaactcgtgctacctgtgatcaaccaagtagctctggcaaacctttctccctactctcagcaacaacaatttcttccattcaaccaactgtctaca

SEQ ID NO: 319978 - DNA, 340 bp, Zea mays
  unsure (1)..(340): unsure at all n locations
gcacaatagtgtaccaacaatggcagccaaaatattttgcctccttatgctccttgggctttctgcaagtgctgctacggcgaccattttcccgcaatgctcgcaagctcctatagcttcccttcttcccccgtacctctcaccagcggtgtcttcggtatgtgaaaacccaattcttcaaccctacaggatccaacaggcaatcgcagctggcatcttacctttatcacccttgttcctccaacaatcatcagccctattacaacagttacctttggtgcatntattggcacaaaacatcagggcacaacaactacaacaacttgtgctagcaaacctt

SEQ ID NO: 319979 - DNA, 426 bp, Zea mays
gtggaccatcaatcatctattcatctgtagtatgtatagagcacccaaatcactatctggcggcatgcaattcatctaacgtccaaaaaccatgaagcatggtgccttgtggttcattgcttctcatgtgctttagtattcaagctgtttcttagtacacagcacaggacggctgcaagctgcggtcaacaacaaagatcatgagctagcaacatcactccacatacaactatcattgcacaaagaacatacaacatcaaccgaccaccacaacattcaccagcagtcagcaacctccaaccaacaactaagttcactatgcaacgcacataaaacagtcagcatacaactaagaagtctcaatgttcaactaacaacaatcaacaacacgcagcgatcactcaccatacaacaactaacaacagc

SEQ ID NO: 319980 - DNA, 372 bp, Zea mays
  unsure (1)..(372): unsure at all n locations
gttgcaattggttaattggttgttgtaacaacaatccttggcacatctaaccgtacaggccatcgcaacacaacagcaacaacagttcctaccagcactgagccaactagatgtggtgaaccctgtcgcctacttgcaacagcaggtgcttgcatccaacccacttgctctggcaaacgtagctgcataccaacaacaacaacaattgcaacagtttctgccagcgctcagtcaactagccatggtgaaccctgccgnctacctacaacagcaacaactgctttcatctagccctctcgttgtgggtaatgcacctacatacctgcaacaacaattgctgcaacagattgtaccagctctgactcagctagc

SEQ ID NO: 319981 - DNA, 369 bp, Zea mays
ccagcaagcaacatagaaagtagaatccattagcaacaatagagcaacaatggcgacgaagatattttccctccttatgctccttgctctttctacatgtgttgctaacgcgacaattttccctcaatgctcacaagctcctatagcttcccttcttcccccataccttccatcaattatagcttcagtatgtgaaaacccagctcttcaaccatataggcttcaacaagcaatcgcagcaagcaacatacctttatcgcccttgttgtttcaacaatcaccagccctatctttggtgcagtcattggtacaaaccatcagggcacaacagctgcagcaactcgtgctacctgtgatcaaccaagtagc

SEQ ID NO: 319982 - DNA, 410 bp, Zea mays
ccaacaagcaacatagaaagtggaatccagtagcaacaacagagcaacaatggcgacgaagatattttccctccttatgctccttgctctttctgcatgtgttgctaacgcgacaattttcccctcaatgctcacaagctcctatagcttcccttcttcccccataccttccatcaatgatagcttcagtatgtgaaaacccagctcttcagccctataggctccaacaagcaatcgcagcaagcaacatacctttatcacccttgttgtttcaacaatcgccagccctatctttggtgcagtcattggtacaaaccatcagggcacagcagctgcagcaactcgtgctacctgtgatcaaccaagtagctcttgcaaacctttctccctactctcagcaacaacaattt

SEQ ID NO: 319983 - DNA, 448 bp, Zea mays
gaccaactagcaacatagaaagcacaatagtgtaccaacaatggcagccaaaagattgtgcttccttatgctccttggtctttctgcaagtgctgctaccgcaaccattttcccacaatgctcacaagctcctatagcttcctttcttcccccatacctctcaccagcggtgtcttcagtatgtgaaaacccaattcttcaaccctaggatccaacaggcaatcgcagcaggcatcttacctttatcacccttgttcctccaacaaccgtcagccctattacagcagttacctttggtgcatttgttggcacaaaacatcaaggcacaacaactacaacaacttgtgctaggaaaccttgctgcctactctcagcaacagcagtttcttccattcaaccaactggctgcattgaactctgctgcttatttgcaacaacaactaccatt

SEQ ID NO: 319984 - DNA, 420 bp, Zea mays
cagaccattagctttatctactccagagcgcagaagaacccgatcgacaccatgagggtgttgctcgttgccctcgctctcctggctctcgctgcgagcgccacctccacgcatacaagcggcggctgcggctgccagccaccgccgccggttcatctaccgccgccggtgcatctgccacctccggttcacctgccacctccggtgcatctcccaccgccggtccacctgccgccgccggtccacctgccaccgccggtccatgtgccgccgccggttcatctgccgccgccaccatgccactaccctactcaaccgccccggcctcagcctcatccccagccacacccatgcccgtgccaacagccgcatccaagcccgtgccagctgcagggaacctgcggcgttggcagcaccccg

SEQ ID NO: 319985 - DNA, 158 bp, Zea mays
acttgcttgagtctagcttattgtctagatcaatgtcttgaccaacagcgtgactacgcaacacaaccatacacacatattcacacacatatcaaaacacacataacacaccacataccacacacacacctacacacattcacatcacacaaacatac

SEQ ID NO: 319986 - DNA, 404 bp, Zea mays
  unsure (1)..(404): unsure at all n locations
cgacgacaccatgagggagtgcatttcgatccacatcggccaggccggtatccaggtgggaaacgcgtgctgggagctgtactgccttgagcatggcattcaggctgacggtcagatgcccggtgacaagaccattgggggaggtgatgatgctttcaacaccttcttcagtgagactggtgctgggaagcacgtgccccgtgctgtttttgttgaccttgaacccactgtcatcgatgaggtgaggactggcacctaccgccagctcttccaccctgagcagctcatcagtgggaaggaggatgcagccaacaactttgcccgtggtcactacaccattggcaaggagattgttgacctatgccttgatcgcatcangaagcttgccgacaactgcactggtc

SEQ ID NO: 319987 - DNA, 394 bp, Zea mays
caactagcaacatagaaagcacaatagtgtaccaacaatggcagccaaaatattttgcttccttatgctccttggtctttctgcaagtgttgctaccgcaaccattttcccacaatgctcacaagctcctatagcttcccttcttcccccatacctctcaccagcggtgtcttcaatgtgtgaaaccccaattgttcaaccctacaggatccaacaggcaatcgcaacaggcatcttaccattatcacccttgttcctccaacaaccgtcagccctattacagcagttacctttggtccatttggtggcacaaaacatcagggcacaacaactacaacaacttgtgctagcaaaccttgctgcatactctcagcaacatcagtttcttccattc

SEQ ID NO: 319988 - DNA, 394 bp, Zea mays
gaacgattacaacaacaatccttggcacatctaaccatacaaaccatcgcagcgcaggagcaacaagcactgagccacctagccgtggtgaaccctatcgcctacttgcaacaacagctgcttgcattcaacccacttgctttggcaaacgtagctgcataccaacaacaacaacagttgcaacagtttctaccagcgctcagtcaactagccatggtgaaccctatcgcctacctacaacagcaacaacttctttcatctagcccgctcgctatgggcaatgcacctacatacctgcaacaacagttgatgcaacaacagttgctgcaacaaattgtaccagctcttactcagctagctgtggcaaaccctgctgcctacttgcaacaactac

SEQ ID NO: 319989 - DNA, 53 bp, Zea mays
tcgttggtggcttcccagaaataagaaagtatatttctaaaaaaagaacaaaa

SEQ ID NO: 319990 - DNA, 420 bp, Zea mays
ccgacgcgtccgcaacaagcaacatatctagttgaatccagtagcaacaatagagcagcaatggcgaccaagatattttccctccttatgctccttgctctttctacatgtgttgctaacgcgacaattttccctcaatgctcacaagctcctatagcttcccttcttcccccataccttccatcaattatagcttcaatatgtgaaaacccagctcttcaaccatataggcttcaacaagcaatcgcagcaagcaacatacctttatcgcccttgttggttcaacaatcgccagccctatctttggtgcagtcattggtacaaaccatcagggcacaacagctgcagcaactcgtgctacctctgatcaaccaagtagctttggcaaacctttctccctactctcagcaacaacatttt

SEQ ID NO: 319991 - DNA, 403 bp, Zea mays
gcgcggaccacagggctgtgccgattgatactactatgacggtcatcacctttatggcacgtgttgaccgagtgcataacaggacaggactggcagcgacgtgcggtaagaacgctcgcttgatgcagttagcaacactagtgactcgcagtcggcgacacatggctgggtagaactgtactggttagatccagcgcagctacgatgatgtccagtctctgctgcctacacacatcgatgggtcatattcaagcgattggcaggcatgtgatctgctgctgattcacagcactgtcaggttccatcattgatacaaatggctcatgcgagcactgtgggctttacgacacgtcagcactggctgtcatcgtacctgtgagctgcggctagcgatggatcgcta

SEQ ID NO: 319992 - DNA, 454 bp, Zea mays
ccggctcgtcccacgcgtgcgatggaaagcacaattgtgtacctactactgcagctaaaatattttgcctccttatgcgccttggtctttctgcaagtgctgctacggcgaccattttcccacaatgctcacaagctcctatagcttcccttcttcccccgtacctctcaccaacggtgtcttcggtatgtgaaaacccaattcttcaaccctacaggatccaacaggcaatcgcagctggcatcttacctttatcacccttgttcctccaacaatcatcagccctattacagcagttacctttggtgcatttattggcacaaaacatcagggcacaacaactacaacaacttgtgctagcaaaccttgctgcctactctcagcaacagcagtttcttccattcaaccaactagctgcattgaactctgcttcttatttgcaacaacaacaact

SEQ ID NO: 319993 - DNA, 428 bp, Zea mays
  unsure (1)..(428): unsure at all n locations
tcgaagagctgcagcaactcgtgctaccttatacttcaaccaagtagctctggcaaacctttctccctactctcagcaacaacaatttcttccattcaaccaactgtctacactgaaccctgctgcttatttgcagcaacaactattaccatttagccagctagctactgcctactctcagcaacaacaacttcttccatttaaccaattggccgcactgaaccccgctgcttatttgcagcagcaaatactactaccatttagccagctagctgcagcaaaccgtgcttncttcttgacacagcaacagttgctgcctttctaccagcagtttgcggctaaccccgcaaccctcttacaactacaacaattgttgccctttgtccaacttgctttgacagacccagcggccttctaccaacaacaca

SEQ ID NO: 319994 - DNA, 245 bp, Zea mays
ccgacgcgtgggcccacgcgtccgatcactaaatctaaaaaaaaaaaaaaaaaaaaaaggaaaagggaaaaaaaaaaaaaaaaaaaaaaaaaaaaaaaaaaaaaaaaaaaaaaaaacaaaaaagagaaagaaaaaagaacaagaaaaaaaaaaaagacaaccagcaacaacaggaacacacaagcaacgaagaggacgaaccgaaacaaggagcggacgagaaaaagcaaaaacacagacacaag

SEQ ID NO: 319995 - DNA, 413 bp, Zea mays
  unsure (1)..(413): unsure at all n locations
ctgatttgcactagttggttgaagggttgatactcctgtnggngagagtgagcgggggggggtttaaaagcaagnaaaacatcccttcttaaagcaaggttaggacaagttaaagaaagaaatagcactgttcttgaatgcatacatgtcgatttgcatggcaagggaatatcaaatggattgtgctacatagattcgacaacggtaaacttgcaggagctacctttggaggttgggcggttcaaagaagaactgttgttaggactccatgatatcagcaagaagactgaccttgttattgcggtgcataacctagcacaccgaattccacagtatcaacggtccaatacttctcagcctcagcctgctctttcacttctcttggataaaactaaagcgctaaacattccttg

SEQ ID NO: 319996 - DNA, 434 bp, Zea mays
  unsure (1)..(434): unsure at all n locations
tcgcagaggtgctgccttcatggacaggtactttattttcaagacttactggagcgagaaagctcgcgaagggagggactatgtgcacaagaacttcaactgtgaggacttgctcatgaattttctgtatgcgaacgcaagctccacaaggactgtggagtatgtccaccctgcgtgggctatcgatacatccaagctttcttctgtggccattagccgggacacccagaaacactacgatatcagaacagattgcttggcaaagttctcctccatctatggccccctccctcagaaatgggagttcggcatgcgtgaagatcattgggacaaataggatcgcaatggtggtacacaacggattgtttaaaccttnttggtaatcccctaaaaagtttgtagcttggggtctacggtgaagtttgtaggtcctt

SEQ ID NO: 319997 - DNA, 364 bp, Zea mays
gcggttatttattatttttggcatgtcgtatttctcataaatacttcctggacgacatgaaccaataagagagctcacgtgttactacaggaaaagggaaaacccataggatccggacttattatgaagatgaggagctaattagagcactatatgagatatctttagatccaaattggaaaagtacagggaggctataacaactgggatctgccatgtcataaacaatgaactcagagtcatgctaccactgagtggtctaaatgctatggcacacattgagtatacagtgaggcatcatatgaccacgaatcagactaacgaggtacttcttgctaagagtggcactaatcagatgacgatg

SEQ ID NO: 319998 - DNA, 381 bp, Zea mays
gacccactcgtccgctggaagcaacgtataagtggaatttctagcattatagagcaacaatggcgaccaagatattgtccctccttatgctccttgctctttctacatgtgttgctaacgcgacaattttccctcaatgctcacaagctcctatagcttcccttcttcccccataccttccatcaattatagcttcaatatgtgaaaacccagctcttcaaccatataggcttcaacaagcaatcgcagcaagcaacatacctttatcgcccttgttggttcaacaatcgccagccctatctttggtgcagtcattggtacaaaccatcagggcacaacagctgcagcaactcgtgctacctctgatcaaccaagtagctc

SEQ ID NO: 319999 - DNA, 417 bp, Zea mays
tcgcagcagggtctgtcatcactgagccatttatatgtggtgaaccctgtcacctacttgcaacagcagctgcttgcatccaacccacttgctctggcgaacgtagctgcataccagcaacaacaacagctgcaacagtttatgccagtgctcagtcaactagccatggtgaaccctgccgtctacctacaactactttcatctagcccgctcgcggtgggcaatgcacctacgtacctacaacaacagttgctgcaacaaattgtaccagctctgactcagctagctgtggcaaaccctgctgcctacttacaacagttgcttccattcaaccaactggctgtgtcaaactctgctgcgtacctacaacagcgacaacagttacttaatccattggcagtggctaacccattggtc

SEQ ID NO: 320000 - DNA, 345 bp, Zea mays
ctgctcgtcccccttcggttcgggttacttctgtgaggttctccggggttcggtttcgtgggtgagcggatcgagatggcggcgtcggatgttgagtaccgctgcttcgtcggcggcctcgcctgggccacggacgaccactccctccacaacgccttcagcacctacggcgaggtcctcgagtccaagatcatcctcgatcgggagacgcagaggtcccgcggcttcggcttcgtcaccttctccacggaggaggcgatgcggaacgccatcgagggcatgaacggcaaggagctggacggccgcaacatcaccgtcaacgaggcccagtcccgcggcgggcgt

SEQ ID NO: 320001 - DNA, 352 bp, Zea mays
ccgccttgcgcttcttgcccttttatactttttaacaaatgcgttcattattccacagtgctcacttgctcctagtgccattattccacagttcctcccaccagttacttcaatgggcttcgaacatccagccgtgcaagcctacaggctacaactagcgcttgcggcgagcgccttacaacaaccaattgcccaattgcaacaacaatccttggcacatctaaccctacaaaccattgcaacgcaacaacaacaacaacaacagtttctgccatcactgagccacctagccgtggtgaaccctgtcacctacttgcaacagcagctgcttgcatccaacccacttgctctg

SEQ ID NO: 320002 - DNA, 439 bp, Zea mays
ttgcgggcctgccgctttcggttgcacattgggtaccaacactggcagccaaaatattgggctgccttatgctccttggtctttctgcaagcgttgctaccgcaaccattttcccacaatgctcacaagctcctatagcttcccttcttcccccatacctctcaccagcggtgtcttcaatgtgtgaaaccccaattgttcaaccctacaggatccaacaggcaatcgcaacaggcatcttaccattatcacccttgttcctccaacaaccgtcagccctattacagcagttacctttggtccatttggtggcacaaaacatcagggcacaacaactacaacaacttgtgctagcaaaccttgctgcatactctcagcaacatcagtttcttccattcaaccaactggctgcattgaactctgctgcttatttgcaaca

SEQ ID NO: 320003 - DNA, 409 bp, Zea mays
ccgacgcgtccgcatcaagcaacatatttatttgaatccagtagcaacaatagagcaacaatggcgaccaagatactttccctccttatgctccttgctctttctgcatgtgttgctaacgcgacaattttccctcaatgctcacaagctcctatagcttcccttcttcccccataccttccatcaatgatagcttcagtatgtgaaaacccagctcttcaaccctataggctccaacaagcaatcgcagcaagcaacatacctttatcacccttgtttcaacaatcgccagccctatctttggtgcagtcattggtacaaaccatcaaggcacagcagctgcagcaactcgtgctacctgtgatcaaccaagtagctctggcaaacctttctccctactatcagcaac

SEQ ID NO: 320004 - DNA, 292 bp, Zea mays
ccgacgcgtccgccctcgcgtccgattactgagtctaacaagcaacatagaaagtggaatccagtagcaacaacagagcaacaatggcgaccaagatattttccctccttatgctccttgctctttctgcatgtgttgctaacgcgacaattttccctcaatgctcacaagctcctatagcttcccttcttcccccataccttccatcaatgatagcttcagtatgtgaaaacccagctcttcagccctataggctccaacaagcaatcgcagcaagcaacatacctttatc

SEQ ID NO: 320005 - DNA, 428 bp, Zea mays
aggaagctcagtagtttaccaacaatctctgccttaatattttgcctccttatgctcgttggtctttctgcaagtgctgctacggcgaccattttcccgcaatgctcgcaagctcctatagcttcccttcttcccccgtacctctcaccagcggtgtcttcggtatgtgaaaacccaattcttcaaccctacaggatccaacaggcaatcacagctggcatcttacctttatcacccttgttcctccaacaatcatcagccctattacatcagttacctttggtgcatttattggcacaaaacatcagggcacatcaactacaacaacttgtgctagcaaaccttgctgcctactctcagcaacagcagtttcttccattcaaccaactagctgcattgaactctgcttcttatttgcaacaacaaca

SEQ ID NO: 320006 - DNA, 352 bp, Zea mays
aggattgaaaaacacaccaagcgaatactactttgcaacgacctaacaccaatggctaccaagatattagccctccttgcgcttcttgcccttttagtgagcgcaacaaatgcgttcattattccacagtgctcacttgctcctagtgccattattccacagttcctcccaccagttacttcaatgggcttcgaacatccagccgtgcaagcctacaggctacaactagcgcttgcggcgagcgccttacaacaaccaattgcccaattgcaacaacaatccttggcacatctaaccctacaaaccattgcaacgcaacaacaacaacaacaacagtttctggcatcactga

SEQ ID NO: 320007 - DNA, 346 bp, Zea mays
gcgttcagaaacactccaagcgaagtatttttcaacaacctaacaacaatggctaccaagatattatccctccttgcgcttcttgcgctttttgcgagcgcaacaaatgcgttcattattccacaatgctcacttgctccaagttccattattacacagttcctcccaccagttacttcaatgggcttcgaacacccagctgtgcaagcctataggctacaacaagcaattgcggcgagcgtcttacaacaaccaatttcccagttgcaacaacaatccttggcacatctaacaatacaaaccatcgcaacgcaacagcaacaacaattcctaccagcacttgacc

SEQ ID NO: 320008 - DNA, 223 bp, Zea mays
ctatagatgaagcacagaaacatgcatcccatgccataatggccaaagatgtctcaacgaatgacgcactgggagaccaactcacgtctgagcaaacccaacagctgaccctggaactgaaatcatccgacgaccagaaccaaatcaccaggtgcaagcacgcatcttgacgcactatagagaacatgccagcacaacgcaaccaccaccaccagcactacca

SEQ ID NO: 320009 - DNA, 332 bp, Zea mays
gcaacaatggttacgaaggtattttccctacttatgctccttgctccctctacatgtgttgctaacgcgacaattttccctcaatgctcacaagctcctatagcttcccttcttcccccataccttccatcaattatagcttcagtatgtgaaaacccagctcttcaaccatataggcttcaacaagcaatcgcagcaagcaacatacctttatcgcccttgttgtttcaacaatcaccagccctatctttggtgcagtcattggtacaaaccatcagggcacaacagctgccacaactcgtgctacctgtgatcaaccaagtagctctggc

SEQ ID NO: 320010 - DNA, 440 bp, Zea mays
  unsure (1)..(440): unsure at all n locations
ggctcgacccactcgtccggagcaactagcaactatanaaagcacatctttgnatctacaatggcagctaaaatatggggcctccttatgctccttggtctttctgcaagtgctgctacggcgaccattttcccacaatgctcacaagctcctatagcttcccttcttcccccgtacctctcaccaacggtgtcttcggtatgtgaaaacccaattcttcaaccctacaggatccaacaggcaatcgcagctggcatcttacctttatcacccttgttccttcaacaatcatcagccctattacagcagttacctttggtgcatttattggcacaaaacatcagggcacaacaactacaacaacttgtgctagcaaaccttgctgcctactctcagcaaccgcagtttcttccattcaaccaactagctgcattgaactc

SEQ ID NO: 320011 - DNA, 418 bp, Zea mays
  unsure (1)..(418): unsure at all n locations
tcggagattttccctccttatgctccttgatctttcntcatgtgttgctaacgcgacaatgttcgctcaatgctcacaagctcctatagcttcccttcttcccccataccttccatcaattatagcttcaatatgtgaaaacccagctcttcaaccatataggcttcaacaagcaatcgcagcaagcaacatacctttatcgcccttgttgtttcaacaatcgccagccctatctttggtgcagtcattggtacaaaccatcagggcacaacagctgcagcaactcgtgctacctctgatcaaccaagtagcttttggcaaacctttctccctactctcagcaacaacaatttcttccattcaaccaactgtctacactgaaccctgctgcttatttgcagcaacaactattaccatt

SEQ ID NO: 320012 - DNA, 389 bp, Zea mays
  unsure (1)..(389): unsure at all n locations
cgggcgcgtgggtgttcattcagaactattcctattcgaacgcactagcaacgacctggcaacaatggcttccaagacattatccctccttgcgcttcttgccctttttgtgagtgcaacaaatgcgttcattattccacaatgctcacttgctccgagtgccattattccacagttcctccctccagttacttcaatgggcttcgaacacccagctgtgcaagcctataggctacaacaagcgcttgcggcgagcgtcttagaacaaccaattgcccaattacaacaacaatccttggcacatctaaccatacaaaccatcgcaacgcagcagcaacaagcactgagccacctagccgtggtgaaccctatcgnctacttgcaacaac

SEQ ID NO: 320013 - DNA, 348 bp, Zea mays
gctcgcccacgcgtcagcaaacacactagcgaacatatactacaacctaacaacaatggctaccaagatattatccctccttgcgcttcttgcgctttttgcgagcgcaacaaatgcgttcattattccacaatgctcacttgctccaagttccattattacacagttcctcccaccagttacttcaatgggcttcgaacacccagctgtgcaagcctataggctacaacaagcaattgcggcgagcgtcttacaacaaccaatttcccagttgcaacaacaatccttggcacatctaacaatacaaaccatcgcaacgcaacagcaacaacaattcctaccagcact

SEQ ID NO: 320014 - DNA, 397 bp, Zea mays
  unsure (1)..(397): unsure at all n locations
gtgatcaaccaagtttctctggcaatcatttttccctactctcagcaacaacaatttcttccattcaaccaactgtctacactgaaccctgctgcttatttgcagcaacaactattaccattcagccagctagctactgcctactctcagcaacaacaacttcttccatttaaccaattggccgcactgaaccccgctgcttatttgcagcagcaaatactactaccatttagccagctagctgcagcaaaccgtgcttccttcttgacacagcaacagttgctgcctttctaccagcagtttgcggctaaccccgcaaccctcttacaactacaacaattgttgccctttgtccaacttgctttgacagaccgagcgggctnctaccaacaacaca

SEQ ID NO: 320015 - DNA, 449 bp, Zea mays
cctagcaacatagaaagcagaatagtgtacctacaatgctgcctaaatattttgcctccttatgctccttggtctttctgcaagtgctgctacggcgaccattttcccacaatgctcacaagctcctatagcttcccttcttcccccgtacctctcaccagcggtgtcttcggtatgtgaaaacccaattcttcaaccctataggatccaacaggcaatcgcagctggcatcttacctttatcacccttgttcctccaacaatcatcagccctattacagcagatacctttggtgcatttattggcacaaaacatcatggcacaacaactacaacaacttgtgctagcaaaccttgctgcctactctcagcaacaacagtttcttccattcaaccaactagctgcattgaactctgcttcttatttgcaacaacaacaactaccattca

SEQ ID NO: 320016 - DNA, 439 bp, Zea mays
gcgtggcaacatagaatgcacaatattgtatctaacaatggcagccaaaatattttgcctcgttatgctccttggtctttctgcaagtgctgctacggcgaccattttcccacaatgctcacaagctcctatagcttcccttcttcccccgtacctctcaccagcggtgtcttcggtatgtgaaaacccaattcttcaaccctataggatccaacaggcaatcgcagctggcatcttacctttatcacccttgttcctccaacaatcatcagccctattacagcagttacctttggtgcatttattggcacaaaacatcagggcacaacaactacaacaacttgtgctagcaaaccttgctgcctactctcagcaacaacagtttcttccattcaaccaactagctgcattgaactctgcttcttatttgcaacaacaa

SEQ ID NO: 320017 - DNA, 440 bp, Zea mays
  unsure (1)..(440): unsure at all n locations
cggctcgacccactcgtccgttgacgcttcgggtcttacaagcaactttgaaagttgaatccaggagcaacaacagaggaacagtggcgaccaagatatgcnccctccttatgctccttgctctttctgcatgtgttgctaacgcgacaattttccctcaatgctcacaagctcctatagcttcccttcttcccccataccttccatcaatgatagcttcagtatgtgaaaacccagctcttcagccctataggctccaacaagcaatcgcagcaagcaacatacctttatcacccttgttgtttcaacaatcgccagccctatctttggtgcagtcattggtacaaaccatcatggcacagcagctgcagcaactcgtgctacctgtgatcaaccaagtagctctggcaaacctttcttcctactctcagcaacaacaa

SEQ ID NO: 320018 - DNA, 425 bp, Zea mays
atggagaccagctatcaacatagaattctcaaattgtaccaacaatggcagccaaaatattttgcctccttatgctccttggtctttctgcaagtgctgctacggcgaccattttcccgcaatactcgcaagctcctatagcttcccttcttcccccgtacctctcaccagcggtgtcttcggtatgtgaaaacccaattcttcaaccctacaggatccaacaggcaatcacagctggcatcttacctttatcacccttgttcctccaacaatcatcagccctattacatcagttacctttggtgcatttattggcacaaaacatcagggcacaacaactacaacaacttgtgctagcaaaccttgctgcctactctcagcaacagcagtttcttccattcaaccaactagctgcattgaactct

SEQ ID NO: 320019 - DNA, 394 bp, Zea mays
atggagaccaactagcaacatagaatcttcattagtgtaccaacaatggcagccaaaatattttgcctccttatgctccttggtctttctgcaagtgctgctacggcgaccattttcccgcaatgctcgcaagctcctatagcttcccttcttcccccgtacctctcaccagcggtgtcttcggtatgtgaaaacccaattcttcaaccctacaggatccaacaggcaatcacagctggcatcttacctttatcacccttgttcctccaacaatcatcagccctattacatcagttacctttggtgcatttattggcacaaaacatcagggcacaacaactacaacaacttgtgctagcaaaccttgctgcctactcttagcaacagcagtttc

SEQ ID NO: 320020 - DNA, 435 bp, Zea mays
gcgccgactatcaacattgaaagctctttactgtaccaacaatggcagccaaaatattttgcctccttatgctccttggtatttctgcaagtgctgctacggcgaccattttcccgcaatgctcacaagctcctatagcttcccttcttcccccgtacctctcaccagcggtgtcttcggtatgtgaaaacccaattcttcaaccctacaggatccaacaggcaatcgcagctggcatcttacctttatcacccttgttcctccaacaatcatcagccctattacagcagttacctttggtgcatttattggcacaaaacatcagggcacaacaactacaacaacttgtgctagcaaaccttgctgcctactctcagcaacagcagtttcttccattcaaccaactagctgcattgaactctgcttcttatttgc

SEQ ID NO: 320021 - DNA, 410 bp, Zea mays
cgacccactctcatgtcacagcattacacaccaatactagcgctctagcaacgacctaacaccaatggctaccaagatattagccctccttgcgcttcttgcccttttagtgagcgcaacaaatgcgttcattattccacagtgctcacttgctcctagtgccattattccacagttcctcccaccagttacttcaatgggcttcgaacatccagccgtgcaagcctacaggctacaactagcgcttgcggcgagcgccttacaacaaccaattgcccaattgcaacaacaatccttggcacatctaaccctacaaaccattgcaacgcaacaacaacaacaacaacagtttctgccatcactgagccacctagccgtggtgaaccctgtcacctacttgcaacagcagc

SEQ ID NO: 320022 - DNA, 414 bp, Zea mays
cagaccattagctttatctactccatatctgcagtactaacccgatcgacaccatgagggtgttgctcgttgccctcgctctcctggctctcgctgcgagcgccacctccacgcatacaagcggcggctgcggctgccagccaccgccgccggttcatctaccgccgccggtgcatctgccacctccggttcacctgccacctccggtgcatctcccaccgccggtccacctgccgccgccggtccacctgccaccgccggtccatgtgccgccgccggttcatctgccgccgccaccatgccactaccctactcaaccgccccggcctcagcctcatccccagccacacccatgcccgtgccaacagccgcatccaagcccgtgccagctgcagggaacctgcggcgttggca

SEQ ID NO: 320023 - DNA, 436 bp, Zea mays
  unsure (1)..(436): unsure at all n locations
gcggtgcattcataaacatcacctagtanatgcactagcaacgacctaacaacaatggctgccaagacattatccctccttgcgcttcttgccctttttgtgagtgcaacaaatgcgttcattattccacaatgctcacttgctccgagtgccattattccacagttcctccctccagttacttcaatgggcttcgaacacccagctgtgcaagcctataggctacaacaagcgcttgcggcgagcgtcttagaacaaccaattgcccaattacaacaacaatccttggcacatctaaccatacaaaccatcgcaacgcagcagcaacaagcactgagccacctagccgtggtgaaccctatcgcctacttgcaacaacagctgcttgcatccaacccacttgctttggcaaacgtagctgcataccaacaacaac

SEQ ID NO: 320024 - DNA, 437 bp, Zea mays
gcgttgagcattcagaatcacaccatgctaatcgcactagcaacgacctaacaacaatggctaccaagatattagccctccttgcgcttcttgccctttttgtgagcgcaacaaatgcgttcattattccacaatgctcacttgctcctagtgccattattccacagttcctcccaccagttacttcaatgggcttcgaacacctagctgtgcaagccaacatgcaacaacaagcgcttgcggcgagcgtcttacaacaaccaattgcccaattgcaacaacaatccttgccacatctaacaatacaagccatcacaacgcaacagcaacaacagttcctaccagcactgagccacctagccatggtgaaccctgccgcctacttgcaagagcagctgcttgcatccaacccacttgctctggcgaacgtagttgca

SEQ ID NO: 320025 - DNA, 437 bp, Zea mays
aggaagcacaatattgtaccattaaatgcagccaaaatattttgcctccttatgctcgttggtctttctgcaagtgctgctacggcgaccattttcccgcaatgctcgcaagctcctatagcttcccttcttcccccgtacctctcaccagcggtgtcttcggtatgtgaaaacccaattcttcaaccctacaggatccaacaggcaatcgcagctggcatcttacctttatcacccttgttcctccaacaatcatcagccctattacaacagttacctttggtgcatttattggcacaaaacatcagggcacaacaactacaacaacttgtgctagcaaaccttgctgcctactctcagcaacagcagtttcttccattcaaccaactaggttcattgaactctgcttcttaattgcaacaacaacaactaccatt

SEQ ID NO: 320026 - DNA, 159 bp, Zea mays
tggcattcaaccaacttgctttgacatcatcagctttgttctaccaacaacccatcattggtggtgccctcttttagatttcttatgagttatagttcaataataaagttttttatctgatgtttgtggcttcccagaaataagaaagtacatttctag

SEQ ID NO: 320027 - DNA, 318 bp, Zea mays
cagcacagtaccgtcccagccatggctgacaaaatgcctcgtcatgctacgcggcctggccgcaagggctgcgccggtaaccataccatcacaacgcacagatgctacgatagcatagcttcctttcttgcaccgcacatcaaaccagccgtggctacgggaaaacccaacccaacaaccctacccgacccgacccgccatgccagcacagatggcaccttaaccacactagcctcgccaacactactcagacctatcacagcacataccttacctgcagtgaatggatcggcacatcacatcacagcacctccacca

SEQ ID NO: 320028 - DNA, 363 bp, Zea mays
  unsure (1)..(363): unsure at all n locations
gccaaaatattnngcctgcttatggtccttggtctttctgcaagtgctgctacggcgaccattttcccgcaatgctcgcaagctcctatagcttcccttcttcccccgtacctctcaccagcggtgtcttcggtatgtgaaaacccaattcttcaaccctacaggatccaacaggcaatcacagctggcatcttacctttatcacccttgttcctccaacaatcatcagccctattacatcagttacctttggtgcatttattggcacaaaacatcagggcacaacaactacaacaacttgtgctagcaaaccttgctgcctactctcagcaacagcagtttcttccattcaaccaactagct

SEQ ID NO: 320029 - DNA, 413 bp, Zea mays
tcgaatccagatcatctaaagcggcagtctcttagagtggatcgtcgaacagaacagcatgaagatggtcatcgttctcgtcgtgtgcctggctctgtcagctgccagcgcctctgcaatgcagatgccctgcccctgcgcggggctgcagggcttgtacggcgctggcgccggcctgacgacgatgatgggcgccggcgggctgtacccctacgcggagtacctgaggcagccgcagtgcagcccgctggcggcggcgccctactacgccgggtgtgggcagacgagcgccatgtaccagccgctccggcaacagtgctgccagcagcagatgaggatgatggacgtgcagtccgtcgcgcagcagctgcagatgatgatgcagcttgagcgtgccgctgccgtcagcagca

SEQ ID NO: 320030 - DNA, 454 bp, Zea mays
accggtctcggacattaccgactcgtccgatggagaccagctattaacatataatcctcaattccttaccaacaatggcagccaagggattttggctacttatgctccttggtctttctgcaagtgctgctacggcgaccattttcccgcaatgctcgcaagctcctatagcttcccttcttcccccgtacctctcaccagcggtgtcttcggtatgtgaaaacccaattcttcaaccctacaggatccaacaggcaatcacagctggcatcttacctttatcacccttgttcctccaacaatcatcagccctattacatcagttacctttggtgcatttattggcacaaaacatcaaggcacaacaactacaacaacttgtgctagcaaaccttgctgcctactctcagcaacagcagtttcttccattcaaccaactagctgcattgaactc

SEQ ID NO: 320031 - DNA, 466 bp, Zea mays
cggttcggaatactcgacccacgcgttcgaggattcgaaaacacaccatgcgaatttactttcaacgacctaacaccaatggctaccaagatattagccctccttgcgcttcttgcccttttagtgagcgcaacaaatgcgttcattattccacagtgctcacttgctcctagtgccagtattccacagttcctcccaccagttacttcaatgggcttcgaacatccagccgtgcaagcctacaggctacaactagcgcttgcggcgagcgccttacaacaaccaattgcccaattgcaacaacaatccttggcacatctaaccctacaaaccattgcaacgcaacaacaacaacaacagtttctgccatcactgagccacctagccgtggtgaaccctgtcacctacttgcaacagcagcttgtttgcatccaacccacttgctctggcgaacgtagctgcatac

SEQ ID NO: 320032 - DNA, 434 bp, Zea mays
  unsure (1)..(434): unsure at all n locations
gcggcgacatagaaagctcaatagtgtactctcaatggcagccaaaatattttgcctccttatgctccttggtctttctgcaagtgctgctacggcgaccattttcccgcaatgctcgcaagctcctatagcttcccttcttcccccgtacctctcaccagcggtgtcttcggtatgtgaaaacccaattcttcaaccctacaggatccaacaggcaatcacagctggcatcttacctttatcacccttgttcctccaacaatcatcagccctattacatcagttacctttggtgcatttattggcacanaacatcagggcacaacaactacaacaacttgtgctagcaaaccttgctgcctactctcagcaccagcagtttcttccattcaaccaactagctgcattgaactctgcnttctatttgcaacaac

SEQ ID NO: 320033 - DNA, 433 bp, Zea mays
  unsure (1)..(433): unsure at all n locations
gcgacgaactagcaacatagaaagctcatcattgtaccaacaatggcagccaaaatatttggcttccttatgctccttggtctttctgcaagtgttgctaccgcaaccattttcccacaatgctcacaagctcctatagcttcccttcttcccccatacctctcaccagcggtgtcttcaatgtgtgaaaccccaattgttcaaccctacaggatccaacaggcaatcgcaacaggcatcttaccattatcacccttgttcctccaacaaccgtcagccctattacagcagttacctttggtccatttggtggcacaaaacatcagggcacaacaactacaacaacttgtgctaggcaaccttgctgcatactctcagcancatcagtttcttccattcaaccaactggctgcattgaactctgctgcttatt

SEQ ID NO: 320034 - DNA, 377 bp, Zea mays
gcgagtgagaccaactatcaacatttaatcttcaatagtgtaccaacaatggcagccaagatattttgcttccttatgctccttggtctttctgcaagtgttgctaccgcaaccattttcccacaatgctcacaagctcctatagcttcccttcttcccccatacctctcaccagcggtgtcttcaatgtgtgaaaacccaattgttcaaccctacaggatccaacaggcaatcgcaacaggcatcttaccattatcacccttgttccttcaacaaccgtcagccctattacagcagttacctttggtccatttggtggcacaaaacatcagggcacaacaactacaacaacttgtgctagcaaaccttgctgcata

SEQ ID NO: 320035 - DNA, 419 bp, Zea mays
gagcaactagcaacatagaagcacactttgtctttacaatggcagccaaaatattgggcttccttatgctccttggtctttctgcaagtgctgctaccgcaaccattttcccacaatgctcacaagctcctatagcttcctttcttcccccatacctctcaccagcggtgtcttcagtatgtgaaaacccaattcttcaaccctacaggatccaacaggcaatcgcagcaggcatcttacctttatcacccttgttcctccaacaaccgtcagccctattacagcagttacctttggtgcatttgttggcacaaaacatcaaggcacaacaactacaacaacttgtgctaggaaaccttgctgcctactctcagcaacagcagtttcttccattcaaccaactggctgcattgaactct

SEQ ID NO: 320036 - DNA, 392 bp, Zea mays
cagccctatctttggtgcagtcattggggcaaaccatcagggcacaacagctgcagcaactcgtgctacctctgatcaaccaagtagctctggcaaacctttctccctactctcagcaacaacaatttcttccattcaaccaactgtctacactgaaccctgctgcttatttgcagcaacaactattaccatttagccagctagctactgcctactctcagcatcaacaacttcttccatttaaccaattggccgcactgaaccccgctgcttatttgcagcagcaaatactactaccatttagccagctagctgcagcaaaccgtgcttccttcttgacacagcatcagttgctgcctttctaccagcagtttgcggctaaccccgcaacc

SEQ ID NO: 320037 - DNA, 367 bp, Zea mays
gtgtcattcagatgagtttatcaattccttggcagctagaggtccagggaagtttttgtccaaaaggatgaggtccaattggttggacctatataggagatttctcgaaggccccaattttatgccttggttccggcaaaggcgtgctgctgcggagcaagaacagcagaggctctggaggcaggctcgcatgaatgttgacattgaaaagctaatgtcaaatatgtccgaaatagagaggattgattcttttgatgctgttgagcgttatcttctcagagagatggagaaccctggaaaaggaagtgctgattcaataggggcatgccaaaaattgaaggtagaccttcaagcagcattcaatgta

SEQ ID NO: 320038 - DNA, 398 bp, Zea mays
tagtattgagaccatctagcaacatagtaagcactttagtgtaccaacaatggcagccaaaatatgttgcctccttatgctccttggtctttctgcaagtgctgctacggcgaccattttcccgcaatgctcgcaagctcctatagcttcccttcttcccccgtacctctcaccagcggtgtcttcggtatgtgaaaacccaattcttcaaccctacaggatccaacaggcaatcacagctggcatcttacctttatcacccttgttcctccaacaatcatcagccctattacatcagttacctttggtgcatttattggcacaaaacatcagggcacaacaactacaacaacttgtgctagcaaaccttgctgcctactctcagcaacagcagtttc

SEQ ID NO: 320039 - DNA, 404 bp, Zea mays
  unsure (1)..(404): unsure at all n locations
ttgagaatcagcacctgcgaagcacactagcaacttcctaacaacaatggctaccaagatattatccctccttgcgcttcttgcgctttttgcgagcgcaacaaatgcgttcattattccacaatgctcacttgctccaagttccattattacacagttcctcccaccagttacttcaatgggcttcgaacacccagctgtgcaagcctataggctacaacaagcaattgcggcgagcgtcttacaacaaccaatttcccagttgcaacaacaatccttggcacatctaacaatacaaaccatcgcaacgcaacagcaacaacaattcctaccagcactgagccacctagccatggtgaaccctgccgnctacttgcaacagcagttgcttgcatcaaacccac

SEQ ID NO: 320040 - DNA, 457 bp, Zea mays
cgcgtctacagcacagaggcggctgtgcctagggctctagagtactcggcggcgacatctatactggctgaccggcgccattccatcggtgtccgcttctcgcaggtcatgtgtgacctgcttggtgtggttgctcgacactctcctcaattggtgatattttcttttggagcccaagttcttcgtctaaggcatgactggacatggcattttggcgacatcagaatagcacatgctgctagtgttgtttgatattagagacactttttgatttgcttgcatgttttattttcagtttgaggggcacgagtggtcggacttgtttcagtttcagaaaactagggacacttcttttagtttcagaattgagagaagtgtattttagtttcaggattcataatgatagggacacttcactcagcatatgttcggttgtgattaaaaccatggttgtgga

SEQ ID NO: 320041 - DNA, 423 bp, Zea mays
cagctcttcagccctatagtctccaatctgcaatcgcagcaagcaacatacctttatgacccttgttgtttcaacaatcgccagccctatctttggtgcagtcattggtacaaaccatcagggcacagcagctgcagcaactcgtgctacctgtgatcaaccaagtagctctggcaaacctttctccctactctcagcaacaacaatttcttccattcaaccaactgtctacactgaaccctgctgcttatttgcagcaacaactattaccattcagccagctagctactgcctactctcagcaacaacaacttcttccatttaaccaattggccgcactgaaccccgctgcttatttgcagcagcaaatactactaccatttagccagctagctgcagcaaaccgtgctttcttcttgacac

SEQ ID NO: 320042 - DNA, 416 bp, Zea mays
gagcaactagcaacatagattgcacaatattgtaccaataatggcagccaaaatattgtgcctcattatgctccttggtctttctgcaagtgctgctacggcgagcattttcccgcaatgctcacaagctcctatagcttcccttcttcccccatacctctcaccagcgatgtcttcagtatgtgaaaatccaattcttctaccctacaggatccaacaggcaatcgcagcaggcatcttacctttatcacccttgttcctccaacaatcatcagccctattacagcagttacctttggtgcatttattggcacaaaacatcagggcacaacaactacaacaactcgtgctagcaaaccttgctgcctactctcagcaacagcagttacctttggtgcatttgttggcacaaaaca

SEQ ID NO: 320043 - DNA, 437 bp, Zea mays
ccaactagcagcatataaggcacattagtgtacctctcttggcactcaaaatattttgcctccttatgctccttggtctttctgcaagtgctgctacggcgaccattttcccgcaatgctcgcaagctcctatagcttcccttcttcccccgtacctctcaccagcggtgtcttcggtatgtgaaaacccaattcttcaaccctacaggatccaacaggcaatcgcagctggcatcttacctttatcacccttgttcctccaacaatcatcagccctattacaacagttacctttggtgcatttattggcacaaaacatcagggcacaacaactacaacaacttgtgctagcaaaccttgctgcctactctcagcaacagcagtttcttccattcaaccaactaggttcattgaactctgcttcttatttgcaacaa

SEQ ID NO: 320044 - DNA, 438 bp, Zea mays
cagcaactacgacatcttgtgctagcatacctagttgcctactctcagcaacagcagtttcttccattcaaccaactagctgcattgaactctgcttcttatttgcaacaacaacaactaccattcagccagctatctgctgcctacccccagcaatttcttccattcaaccaactgacagcattgaactctcctgcttatttacagcagcaacaactactaccattcagccagctagctggtgtgagccctgctaccttcttgacacaaccacagttgttgccgttctaccagcacgctgcgcctaacgctggcaccctcttacaactgcaacaattgctgccattcaaccaacttgctttgacaaacccagcagcattctaccaacaacccatcattggtggtgccctcttttagaattcttatgagttataggtc

SEQ ID NO: 320045 - DNA, 415 bp, Zea mays
tgggacctacaagctcattttaagttttatccagtagcaacaacagagcaacaatggcgaccaagatattttccctccttatgctccttgctctttctgcatgtgttgctaacgcgacaattttccctcaatgctcacaagctcctatagcttcccttcttcccccataccttccatcaatgatagcttcagtatgtgaaaacccagctcttcagccctataggctccaacaagcaatcgcagcaagcaacatacctttatcacccttgttgtttcaacaatcgccagccctatctttggtgcagtcattggtacaaaccatcagggcacagcagctgcagcaactcgtgctacctgtgatcaaccaagtagctctggcaaacctttctccctactctcagcaacaacaatttct

SEQ ID NO: 320046 - DNA, 380 bp, Zea mays
gcgacatatagagctcaatagtgtacctacaatgttagccaaaatattttgcttcctgatgctccttggtctttctgcaagtgttgctaccgcaaccattttcccacaatgctcacaagctcctatagcttcccttcttcccccatacctctcaccagcggtgtcttcaatgtgtgaaaccccaattgttcaaccctacaggatccaacaggcaatcgcaacaggcatcttaccattatcacccttgttcctccaacaaccgtcagccctattacagcagttacctttggtccatttggtggcacaaaacatcagggcacaacaactacaacaacttgtgctagcaaaccttgctgcatactctcagcaacatcagtttc

SEQ ID NO: 320047 - DNA, 434 bp, Zea mays
ctggcattttacctttatttttctagctcctccaacaatcatcagccctattacatcagttacctttggtgcatttattggcacaaaacatcagggcacaacaactacaacaacttgtgctagcaaaccttgctgcctactctcagcaacagcagtttcttccattcaaccaactagctgcattgaactctgcttcttatttgcaacaacaacaactaccattcagccagctacctgctgcctacccccagcaatttcttccattcaaccaactggcagcattgaactctcctgcttatttacagcagcaacaactactaccattcagccagctagctggtgtgagccctgctaccttcttgatacaaccacagttgttgccgttctaccagcacgctgcgcctaacgctggcaccctcttacaactgcaacaa

SEQ ID NO: 320048 - DNA, 410 bp, Zea mays
ccgacgcttccgactacatttacaactttttgtgctagcaaaccttgctgcatactctgagcaacatcagtttcttccattcaaccaactggctgcattgaactctgctgcttatttgcaacaacaattaccattcagccagctagttgctgcctacccccagcaatttcttccattcaaccaactagcagcattgaactctgctgcttatttacagcagcaacaactactaccattcagccagctagctgatgtgagccctgctgccttcttgacacaacaacagttgttgccgttctacctgcacgctatgcctaacgctggcaccctcttacaactgcaacaattgctgccattcaaccaacttgctttgacaaacccaacagtgttctaccaacaacccatcattg

SEQ ID NO: 320049 - DNA, 442 bp, Zea mays
atggagaccaacatgcaacttagaaactggaatccagtagcaacaacagagcaacaatggcgaccaagatattttccctccttatgctccttgctctttctgcatgtgttgctaacgcgacaattttccctcaatgctcacaagctcctatagcttcccttcttcccccataccttccatcaatgatagcttcagtatgtgaaaacccagctcttcagccctataggctccaacaagcaatcgcagcaagcaacatacctttatcacccttgttgtttcaacaatcgccagccctatctttggtgcagtcattggtacaaaccatcagggcacagcagctgcagcaactcgtgctacctgtgatcaaccaagtagctctggcaaacctttctccctactctcagcaacaacaatttcttccattcaaccaactgtctacact

SEQ ID NO: 320050 - DNA, 190 bp, Zea mays
atgttatattgcgagtaatttatggtcttgtagcggtggagtaaataaagaaaaaggggaaaaaaaaaaaaaaaaaaaaaaaaaaaaggacagacgaaaaaaaagaacacggcaaaacaaacaaaaaacaagcaaaagcaaaaaaaaaacaaaagagaaacctaaaaacaaggggacgggccgtcgaggg

SEQ ID NO: 320051 - DNA, 387 bp, Zea mays
gagggtgctgatcgttgcccttgcttcattggcgtccgctgcgagcgccgcctccagtgcaagcggcggctgtggctgccagacaccaccgtttcatctaccgcctccgttctatatgccgcctccgttctatctgccgccgcagcagcagccgcagccatggcaataccccactcaaccaccgcagctaagcccgtgccagcagttcggatcctgcggcgtcggcagcgtcggcagcccgttcctgggccagtgcgtcgagttcctgaggcaccagtgcagcccggcggcgacgccctacggctcgccacagtgccaggcgctgcagcagcagtgctgccaccagatcaggcaggtggagccgctgcaccggtaccaggcgacata

SEQ ID NO: 320052 - DNA, 414 bp, Zea mays
tggaatcacaccagtcgtctgcacttctaatcacctaacaacaatggctaccaagatattatccctccttgcgcttcttgcgctttttgcgagcgcaacaaatgcgtccattattccacaatgctcacttgctcctagttccattattccacagctcctaccaccagatacttcaatggccttcgaacacccagctgtgcaagcctataggctacaacaagcgattgcggcgagcgtcttacaacatccaattgcccaattgcaacaacaatacttggcacatataacaatacaaaccatcgcaacgcaacagctacaacagttactaccagcactgagccacctagccatggtgaaccctgtcgcctacttgcaacagcagctgcttgcatccaacccacttgctctagcaaa

SEQ ID NO: 320053 - DNA, 376 bp, Zea mays
atggagaccaacattcaacatagaaagtaggaactagtagcaacaacagagcaacaatggcgaccaagatattttccctccttatgctccttgctctttctgcatgtgttgctaacgcgacaattttccctcaatgctcacaagctcctatagcttcccttcttcccccataccttccatcaatgatagcttcagtatgtgaaaacccagctcttcagccctataggctccaacaagcaatcgcagcaagcaacatacctttatcacccttgttgtttcaacaatcgccagccctatctttggtgcagtcattggtacaaaccatcagggcacagcagctgcagcaactcgtgctacctgtgatcaaccaagtagc

SEQ ID NO: 320054 - DNA, 395 bp, Zea mays
cggagatccaccccccacttttatccgctcgcctgcgcctgcgcctgcctacctgcgatcgatctctcatggcgaccaccagcgccaggaggccgagcggcccggtgctctcggccgcgcactaccgctctgcctcgccgacgcgcgtctcgctcgccgggcagcccgtcagcgtcagcgtgtcctcgtcgtctcggggccggcggacctgcatgtgctcgccgaccaaccacccgggctcgttccgctgcagcctgcacaaggagcgcgtcaagcctgcggcggggccccacggccacgggcacggcaagccgagctcgccgtcgtcgcccccgaccgtcagccgcctgtgcgcgggcgcgggcaggcggatgggcagcgcgctggtgcggatc

SEQ ID NO: 320055 - DNA, 355 bp, Zea mays
atggagtccaactatcaactcagaaactacaatagtgtaccaacaatggcagccaaagtattttgcctccttatgctccttggtctttctgcaagtgctgctacggcgaccattttcccacaatgctcacaagctcctatagcttcccttcttcccccgtacctttcaccagcggtgtcttcggtatgtgaaaacccaattcttcaaccctataggatccaacaggcaatcgcagctggcatcttacctttatcacccttgttccttcaacaatcatcagccctattacagcagttacctttggtgcatttattggcacaaaacatcagggcacaacaactacaacaacttgtgc

SEQ ID NO: 320056 - DNA, 407 bp, Zea mays
tcgacgcgtgcgcctactagcaacatataaagcataatagtgtaccaacaatggcagctaaaatattttgcctccttatgctccttggtctttctgcaagtgctgctacggcgaccattttcccacaatgctcacaagctcctatagcttcccttcttcccccgtacctctcaccaacggtgtcttcggtatgtgaaaacccaattcttcaaccctacaggatccaacaggcaatcgcagctggcatcttacctttatcacccttgttcctccaacaatcatcagccctattacagcagttacctttggtgcatttattggcacaaaacatcaaggcacaacaactacaacaacttgtgctagcaaaccttgctgcctactctcagcaacagcagtttcttccattc

SEQ ID NO: 320057 - DNA, 398 bp, Zea mays
acggcgtccattttcccgtatgctttctagctcctatagcttcccttcttcccccgtacctctcaccagcggtgtcttcggtatgtgaaaacccaattcttcaaccctacaggatccaacaggcaatcacagctggcatcttacctttatcacccttgttcctccaacaatcatcagccctattacatcagttacctttggtgcatttattggcacaaaacatcagggcacaacaactacaacaacttgtgctagcaaaccttgctgcctactctcagcaacagcagtttcttccattcaaccaactagctgcattgaactctgcttcttatttgcaacaacaacaactaccattcagccagctacctgctgcctacccccagcaatttcttccattc

SEQ ID NO: 320058 - DNA, 229 bp, Zea mays
cgtcgcgctgctcaacgggtactaggcgctcaagcgcggccagggggtggtggtgccatcgcgggtgccattgctgaccatcctcgtcgccttcggcacgtcagcgctgggtatcgtctacggcacgctttaggatagctgggaccccgacaaggaaaggtagttgttcagcattaaccgagcccactagaacttgcaattgccaagttacgataaaaacccttggcac

SEQ ID NO: 320059 - DNA, 403 bp, Zea mays
agcttcccttcttcccccgtgcctctcggcagcggtgtcttcggtatgtgaaaacccaattcttcaaccctataggatccaacaggcaatcgcagctggcatcttacctttatcacccttgttcctccaacaatcatcagccctattacagcagttacctttggtgcatttattggcacaaaacatcagggcacaacaactacaacaacttgtgctagcaaaccttgctgcctactctcagcaacaacagtttcttccattcaaccaactagctgcattgaactctgcttcttatttgcaacaacaacccatcattggtggtgccctcttttagatttcttatgagttatagttcaataataaagctttttgtctgatgtttgtggcttcccagaaataagaa

SEQ ID NO: 320060 - DNA, 362 bp, Zea mays
gtgtcgccaagagtttcaacgttaagctgcggtctcataaattatagatgctagatgacatagaggagatatatttgaggaggatatattttttttctgtacacaatgagaaaatgtagagcatcaaagggcggttatatatgtgttgtatgtgtgattccataccctaatatagaggtggttggcttaaaaaaaaaaaaaaaaaataaaaacaaaaactaaaatataaacaaataaaaaaaaaaaaagaaacaataaggacctacaacatcaacccctagaactaaaaaatacccacaatgaaataactaaactcttctataccctgaatgataactaaaaaaaaaaacgggggggcccct

SEQ ID NO: 320061 - DNA, 407 bp, Zea mays
cactccaatcgaagggcactagcaacttacctttcacgctttggctaccaagatattagccctccttgcgcgtcttgcccttttagtgagcgcaacaaatgcgttcattattccacagtgctcacttgctcctagtgccagtattccacagttcctcccaccagttacttcaatgggcttcgaacatccagccgtgcaagcctacaggctacaactagcgcttgcggcgagcgccttacaacaaccaattgcccaattgcaacaacaatccttggcacatctaaccctacaaaccattgcaacgcatcaactacaacaacagtttctgccatcactgagccacctagccgtggtgaaccctgtcacctacttgcaacagcagctgcttgcatccaacccacttgctc

SEQ ID NO: 320062 - DNA, 445 bp, Zea mays
atggagtccaactagtcactagaactccaatagtgtaccaacaatggcagccaaaatattttgcctccttatgctccttggtctttctgcaagtgctgctacggcgaccattttcccgcaatgctcgcaagctcctatagcttcccttcttcccccgtacctctcaccagcggtgtcttcggtatgtgaaaacccaattcttcaaccctacaggatccaacaggcaatcacagctggcatcttacctttatcacccttgttcctccaacaatcatcagccctattacatcagttacctttggtgcatttattggcacaaaacatcagggcacaacaactacaacaacttgtgctagcaaaccttgctgcctactctcagcaacagcagtttcttccattcaaccaactagctgcattgaactctgcttcttatttgcaacaacaa

SEQ ID NO: 320063 - DNA, 435 bp, Zea mays
ggccattagctttatctactccagagctcagaagaacccgatcgacaccatgagggtgttgctcgttgccctcgctctcctggctctcgctgcgagcgccacctccacgcatacaagcggcggctgcggctgccagccaccgccgccggttcatctaccgccgccggtgcatctgccacctccggttcacctgccacctccggtgcatctcccaccgccggtccacctgccgccgccggtccacctgccaccgccggtccatgtgccgccgccggttcatctgccgccgtcaccatgccactaccctactcaaccgccccggcctcagcctcatccccagccacacccatgcccgtgccaacagccgcatccaagcccgtgccagctgcagggaacctgcggcgttggcagcaccccgatcctgggccagtgcgt

SEQ ID NO: 320064 - DNA, 421 bp, Zea mays
  unsure (1)..(421): unsure at all n locations
ggcctattacatcagtnatctttggttcttttattggcacaaaacatcagggcacagcaactacaacaacttgtgctagcaaaccttgctgcctactctcagcaacagcagtttcttccattcaaccaactagctgcattgaactctgcttcttatttgcaacaacaacaactaccattcagccagctacctgctgcctacccccagcaatttcttccattcaaccaactggcagcattgaactctcctgcttatttacagcagcaacaactactaccattcagccagctagctggtgtgagccctgctaccttcttgatacaaccacagttgttgccgttctaccagcacgctgcgcctaacgctggcaccctcttacaactgcaacaattgctgccattcaaccaacttgctttgacaa

SEQ ID NO: 320065 - DNA, 448 bp, Zea mays
accggtttcggattacggctcgacccactcgtccggcgcactttagctcacttctcttatggagaactcgacaccatgaaggtgctgatcgttgcccttgctctcctggcgctcgctgcgagcgccgcctccagtacaagcggcggctgtggctgccagacaccaccgtttcatctaccgcctccgttctatatgccgcctccgttctatctgccgccgcagcagcagccgcagccatggcaataccccactcaaccaccgcagctaagcccgtgccagcagttcggatcctgcggcgtcggcagcgtcggcagcccgttcctgggccagtgcgtcgagttcctgaggcaccagtgcagcccggcggcgacgccctacggctcgccacagtgccaggcgctgcagcagcagtgctgccaccagatcaggcaggtggagccgctgcacc

SEQ ID NO: 320066 - DNA, 386 bp, Zea mays
gtgagcctagcaattagctcatcgacttcagatttgagaactcgacaccatgaaggtgctgatcgttgcccttgctctcctggcgctcgctgcgagcgccgcctccagtacaagcggcggctgtggctgccagacaccaccgtttcatctaccgcctccgttctatatgccgcctccgttctatctgccgccgcagcagcagccgcagccatggcaataccccactcaaccaccgcagctaagcccgtgccagcagttcggatcctgcggcgtcggcagcgtcggcagcccgttcctgggccagtgcgtcgagttcctgaggcaccagtgcagcccggcggcgacgccctacggctcgccacagtgccaggcgctgcagcagcagt

SEQ ID NO: 320067 - DNA, 432 bp, Zea mays
  unsure (1)..(432): unsure at all n locations
taggaagtttaatccttnagtttcaacctagcaacacatggcgaccaagatactttcccgccttatgctccttgctctttctgcatgtgttgctaacgcgacaattttccctcaatgctcacaagctcctatagcttcccttcttcccccataccttccatcaatgatagcttcagtatgtgaaaacccagctcttcaaccctataggctccaacaagcaatcgcagcaagcaacatacctttatcacccttgtttcaacaatcgccagccctatctttggtgcagtcattggtacaaaccatcaaggcacagcagctgcagcaactcgtgctacctgtgatcaaccaagtagctctggcaaacctttctccctactatcagcaacaacaatttcttccattcaaccaactatctacactgaaccctgctgc

SEQ ID NO: 320068 - DNA, 436 bp, Zea mays
agacagtcggctgcagctgtggtcaataacaaagccatgagcagcaacatgatccacggcaacatcatccacaaaaacaacaacatcaaccaccaccacaacatcaccagcagcagcaacaccaacaacaacaagttcacatgcaaccacaaaaacatcagcaacaacaagaagttcatgttcaacaacaacaacaacaaccgcagcaccaccaccaacaacaacaacaacagcaccaacaacaacatcaatgtgaaggccaacaacaacatcaccaacaatcacaaggccatgtgcaacaacacgaacagagccatgagcaacaccaaggacagagccatgagcaacaacatcaacaacaattccagggtcatgacaagcagcaacaaccacaacagcctcagcaatatcagcagggccagggaaaatcacaaca

SEQ ID NO: 320069 - DNA, 243 bp, Zea mays
  unsure (1)..(243): unsure at all n locations
tcagacattatagatttaggtttccaatgcaacaacagagcaacaanggcgaccaaggganaatcccaccggaagccccacgctccatcggcacgcgacgccaacgcgacaagagccccncaaggcccacaagcnccaaaagcnacccgncacaccccaaaccngccaacaacgacacgcgcaggacgngaaaacccagcnccncagcccaacaggcgccaacacgcaancgcagcaagcaac

SEQ ID NO: 320070 - DNA, 406 bp, Zea mays
cgggacgtcagcctagcatttagcttattgactccagattggagaactcgacaccatgaaggtgctgatcgttgcccttgctctcctggcgctcgctgcgagcgccgcctccagtacaagcggcggctgtggctgccagacaccaccgtttcatctaccgcctccgttctatatgccgcctccgttctatctgccgccgcagcagcagccgcagccatggcaataccccactcaaccaccgcagctaagcccgtgccagcagttcggatcctgcggcgtcggcagcgtcggcagcccgttcctgggccagtgcgtcgagttcctgaggcaccagtgcagcccggcggcgacgccctacggctcgccacagtgccaggcgctgcagcagcagtgctgccaccagatc

SEQ ID NO: 320071 - DNA, 418 bp, Zea mays
cagctatcaacatataatgtcttaattttttaccaacaatggcagccaaaatattttgcttccttatgctccttggtctttctgcaagtgttgctaccgcaaccattttcccacaatgctcacaagctcctatagcttcccttcttcccccatacctctcaccagcggtgtcttcaatgtgtgaaaacccaattgttcaaccctacaggatccaacaggcaatcgcaacaggcatcttaccattatcacccttgttcctccaacaaccgtcagccctattacagcagttacctttggtccatttggtggcacaaaacatcagggcacaacaactacaacaacttgtgctagcaaaccttgcttgatactctcagcaacatcagtttcttacattcaaccaactggctgcattgaactc

SEQ ID NO: 320072 - DNA, 420 bp, Zea mays
gggcgtctgcctagcaattttctcattctctccagattggagaactcgacaccatgaaggtgctgatcgttgcccttgctctcctggcgctcgctgcgagcgccgcctccagtacaagcggcggctgtggctgccagacaccaccgtttcatctaccgcctccgttctatatgccgcctccgttctatctgccgccgcagcagcagccgcagccatggcaataccccactcaaccaccgcagctaagcccgtgccagcagttcggatcctgcggcgtcggcagcgtcggcagcccgttcctgggccagtgcgtcgagttcctgaggcaccagtgcagcccggcggcgacgccctacggctcgccacagtgccaggcgctgcagcagcagtgctgccaccagatcaggcaggtggagccgc

SEQ ID NO: 320073 - DNA, 423 bp, Zea mays
tccgttgcaacgcatctacaacatcaatttcagtttctgccatcactgagccacctagccgtggtgaaccctgtcacctacttgcaacagcagctgcttgcatccaacccacttgctctggcgaacgtagctgcataccagcaacaacaacagctgcaacagtttatgccagtgctcagtcaactagccatggtgaaccctgccgtctacctacaactactttcatctagcccgctcgcggtgggcaatgcacctacgtacctacaacaacagttgctgcaacaaattgtaccagctctgactcagctagctgtggcaaaccctgctgcctacttacaacagttgcttccattcaaccaactggctgtgtcaaactctgctgcgtacctacaacagcgacaacagttacttaatccattggca

SEQ ID NO: 320074 - DNA, 400 bp, Zea mays
tcgacgcgtgcgcataccattagctagtgctacctcagagcgcagaagaacccgatcgacaccatgagggtgttgctcgttgccctcgctctcctggctctcgctgcgagcgccaccttcacgcatacaagcggcggctgcggctgccagccaccgccgtcggttcatctaccgtcgccggtgcatctgccacctccggttcacctgccacctccggtgcatcttccaccgccggtccacctgccgccgccggtccacctgccaccgccggtccatgtgccgacgccggttcatctgccgtcgtcaccatgccactaccctactcaaccgccccggcctcagcctcatccccagccacacccatgcccgtgccaacagccgcatccaagcccgtgccagc

SEQ ID NO: 320075 - DNA, 394 bp, Zea mays
gggcccatgaagaatagctttaagatttccaccggcacctcggcggcctccgcgcccgcggacgatgaatctgcagatggcccgtctgccgacgacgactcgtccgatgatgccgcggacaaggctgccgccgcgccgtcgtacctgtccgctcgatgggtgaccgccgcagtgacgaccgccgtcgcgctggcgctggcggcgtaaggtgtgcgctcatgtgctatgttttttttataacttattggaccccctatcttcttttcttttgtccaagtcgtgtcccttccttgttggtgaacaaaataagaagggctatttttgtttttttaaaaaaaaaaaaaaaaataaaaaaaaaaaaaaaaataaaaaaaaaaaaaaaaaaaaataaaaa

SEQ ID NO: 320076 - DNA, 437 bp, Zea mays
cagctagcaacatataaagttacaatactgtaccaacaatggcagccaaaatattttgcttccttatgctccttggtctttctgcaagtgttgctaccgcaaccattttcccacaatgctcacaagctcctatagcttcccttcttcccccatacctctcaccagcggtgtcttcaatgtgtgaaaccccaattgttcaaccctacaggatccaacaggcaatcgcaacaggcatcttaccattatcacccttgttcctccaacaaccgtcagccctattacagcagttacctttggtccatttggtggcacaaaacatcagggcacaacaactacaacaacttgtgctagcaaaccttgctgcatactctcagcaacatcagtttcttccattcaaccaactggctgcattgaactctgctgcttatttgcaacaa

SEQ ID NO: 320077 - DNA, 306 bp, Zea mays
aggggacttaatacgtactttatggattctgctctgtctggcgtctattgctggcgccgaaggctctattgcgttggatgatgcaggctcttgcactgatgcatagagatgagcaaagcgtgatacgctgtatcggtagaagatcgttatccgtgcacgtaaccagctgaggccctgtattgtgctccccctagatggcacaactgctggagccgacgaccttgcacagctgccattgaactatgatcacacaagttctaccaacgatcatcatgcatgattcgacactgacgatgcatgcactga

SEQ ID NO: 320078 - DNA, 458 bp, Zea mays
cggctcgaccctcgcgtccgtggcaacttagaaagcacatcagagatcaacaatggcagccaaaatatggggcctcgttatgctccttggtctttctgcaagtgctgctacggcgaccattttcccgcaatgctcgcaagctcctatagcttcccttcttcccccgtacctctcaccagcggtgtcttcggtatgtgaaaacccaattcttcaaccctacaggatccaacaggcaatcacagctggcatcttacctttatcacccttgttcctccaacaatcatcagccctattacatcagttacctttggtgcatttattggcacaaaacatcagggcacaacaactacaacaacttgtgctagcaaaccttgctgcctactctcagcaacagcagtttcttccattcaaccaactagctgcattgaactctgcttcttatttgcaacaacaacaac

SEQ ID NO: 320079 - DNA, 420 bp, Zea mays
ctgctatcagtaccatcatttatcattcttcttagtagtataggcaccaaatcaaatgtgcaacatcaattatctaactccaaaaaccatgaagctggtgcttgtggttcttgctttcattgctttagtatcaagtgtttcttgtacacagacaggcggctgcagctgtggtcaacaacaaagccatgagcagcaacatcatccacaacaacatcatccacaaaaacaacaacatcaaccaccaccacaacatcaccagcagcagcaacaccaacaacaacaagttcacatgcaaccacataaacatcagcaacaacaagaagttcatgttcaacaacatcaactacaaccgcagcaccaacaacatcaacaacaacaacagcaccaacaacaacatcaatgtgaaggccaacaacaaca

SEQ ID NO: 320080 - DNA, 113 bp, Zea mays
cagcaacccatcatttgcggtgccctgttttagatcgcttatgagttatagttcaatgatgaagttttttggatgatgtttgtggcttcccagaaataagaaagtacatttct

SEQ ID NO: 320081 - DNA, 236 bp, Zea mays
cattcagccagttagtttgtgttattcctgctaccttcttgacacaaccacagttgttgccgttctaccagcacgctgcgcctaacgctggcaccctcttacaactgcaacaattgctgccattcaaccaacttgctttgacaaacctagcagtgttctaccaacaacccatcattggtggtgccctcttttagatttcttatgagttatagttcaataataaagttttttgtctg

SEQ ID NO: 320082 - DNA, 400 bp, Zea mays
ggttctccgtgttacgtagcacactctcaaattgaacagattggtgcatcctcagaagctaagaagaggttgaattttaatgtggatgttataaatctgaggatgccggatcgtgcaagaccaaaaggacggacaataaaaaatatagaagataggattatgaaactaggtgccaaaagaaaaaaagaagaataggagatgccaattgtgtggaatagcagatggacataacagcagaacgtgtctgtctgtggaagagaacagggcaagactagcaaaactggctaatcgaaagagaggacgaccggccggatcaagactaaacaataaaacaactgctccacagtggaatgaaacatcgactgctaaaaaacatcgtattgatgaagaagtagaaaat

SEQ ID NO: 320083 - DNA, 385 bp, Zea mays
  unsure (1)..(385): unsure at all n locations
ctgtatcacccctgttctttcaacaagtcccagctttatctttggtgcagtcattggtgcaaaccatcagggcacaacagctgcaacaactcgtgctaccagtgatcagccaagtagctctggcaaacctttctccctactctcagcaacaacaatttcttccattcaaccaactgtctacactgaaccctgctgcttatttacaacaacaacaactactaccattcagccagctagctactgcctactctcagcagcaacaatttcttccatttaaccaattggccgcactgaacccctctgcttatttccagcagcaaatactactaccatttggccagctagctacaacaagccccacttnctttttgaaacaacaacaatt

SEQ ID NO: 320084 - DNA, 393 bp, Zea mays
atgttgatcagtcataaacacaccaatctaagcttcctagcaacgacttaacaacaatggctaccaagatattagccctccttgcgcttcttgccctttttgtgagcgcaacaaatgcgttcattattccacaatgctcacttgctcctagtgccattataccacagttcctccgaccagttacttcaatgggcttcgaacacctagctgtgcaagcctacaagctacaacaagcgcttgcggcgagcgtcttacaacaaccaattaaccaattgcaacaacaatccttggcacatctaaccatacaaaccatcgcaacacaacagcaacaacagttcctaccagcactgagccaactagatgtggtgaaccctgtcgcctacttgcaacagc

SEQ ID NO: 320085 - DNA, 424 bp, Zea mays
aggccattagctttatctactccagtcttcagaagaacccgatcgacaccatgagggtgttgctcgttgccctcgctctcctggctctcgctgcgagcgccacctccacgcatacaagcggcggctgcggctgccagccaccgccgccggttcatctaccgccgccggtgcatctgccacctccggttcacctgccacctccggtgcatctcccaccgccggtccacctgccgccgccggtccacctgccaccgccggtccatgtgccgccgccggttcatctgccgccgccaccatgccactaccctactcaaccgccccggcctcagcctcatccccagccacacccatgcccgtgccaacagccgcatccaagcccgtgccagctgcagggaacctgcggcgttggcagcaccccgatcct

SEQ ID NO: 320086 - DNA, 424 bp, Zea mays
  unsure (1)..(424): unsure at all n locations
taggnatttacacacttatcactacgtatctatcaacgacctaacaacaatggcttccaagacattatccctccttgcgcttcttgccctttttgtgagtgcaacaaatgcgttcattattccacaatgctcacttgctccgagtgccattattccacagttcctccctccagttacttcaatgggcttcgaacacccagctgtgcaagcctataggctacaacaagcgcttgcggcgagcgtcttagaacaaccaattgcccaattacaacaacaatccttggcacatctaaccatacaaaccatcgcaacgcagcagcaacaagcactgagccacctagccgtggtgaaccctatcgcctacttgcaacaacagctgctngcatccaacccacttgctttggcaaacgtagctgcataccaa

SEQ ID NO: 320087 - DNA, 454 bp, Zea mays
gaattaccggcattgagaccaactagcaagatagaaagcactttagtgtaccaataatggcttctcaaaatattttgcctccttatgctccttggtctttctgcaagtgctgctacggcgaccattttcccgcaatgctcgcaagctcctatagcttcccttcttcccccgtacctctcaccagcggtgtcttcggtatgtgaaaacccaattcttcaaccctacaggatccaacaggcaatcacagctggcatcttacctttatcacccttgttcctccaacaatcatcagccctattacatcagttacctttggtgcatttattggcacaaaacatcagggcacaacaactacaacaacttgtgctagcaaaccttgctgcctactctcagcaacagcagtttcttccattcaaccaactagctgcattgaactctgcttcttatttgcaac

SEQ ID NO: 320088 - DNA, 409 bp, Zea mays
ccgttatcaacaatagagcttcaatggtgaccaagatattttccctccttatgctccttgctctttctacatgtgttgctaacgcgacaattttccctcaatgctcacaagctcctatagcttcccttcttcccccataccttccatcaattatagcttcagtatgtgaaaacccagctcttcaaccatataggcttcaacaagcaatcgcagcaagcaacatacctttatcgcccttgttgtttcaacaatcaccagccctatctttggtgcagtcattggtacaaaccatcagggcacaacagctgcagcaactcgtgctacctgtgatcaaccaagtagctctggcaaacctttctccctactctcagcaacaacaatttcttccattcaaccaactgtctacact

SEQ ID NO: 320089 - DNA, 432 bp, Zea mays
acatataaagtagaatcctttagcaacaatagagcaacaatggcgaccaagatattttccctccttatgctccttgctctttctacatgtgttgctaacgcgacaattttccctcaatgctcacaagctcctatagcttcccttcttcccccataccttccatcaattatagcttcagtatgtgaaaacccagctcttcaaccatataggcttcaacaagcaatcgcagcaagcaacatacctttatcgcccttgttgtttcaacaatcaccagccctatctttggtgcagtcattggtacaaaccatcagggcacaacagctgcagcaactcgtgctacctgtgatcaaccaagtagctctggcaaacctttctccctactctcagcaacaacaatttcttccattcaaccaactgtctacactgaaccct

SEQ ID NO: 320090 - DNA, 450 bp, Zea mays
accaactagcaacatagaaagcacaatagtgtaccaacaatggcagccaaaatatttgggctccttatgctccttggtctttctgcaagtgctgctacggcgaccattttcccgcaatgctcgcaagctcctatagcttcccttcttcccccgtacctctcaccagcggtgtcttcggtatgtgaaaacccaattcttcaaccctacaggatccaacaggcaatcgcagctggcatcttacctttatcacccttgttcctccaacaatcatcagccctattacaacagttacctttggtgcatttattggcacaaaacatcaaggcacaacaactacaacaacttgtgctagcaaaccttgctgcctactctcagcaacagcagtttcttccattcaaccaactaggttcattgaactctgcttcttatttgcaacaacaacaactacca

SEQ ID NO: 320091 - DNA, 388 bp, Zea mays
ccaactagcaacatagaaagcacaatagtgtaccaacaatggcagccaaaatattttggctccttatgctccttggtctttctgcaagtgctgctacggcgaccattttcccgcaatgctcgcaagctcctatagcttcccttcttcccccgtacctctcaccagcggtgtcttcggtatgtgaaaacccaattcttcaaccctacaggatccaacaggcaatcgcagctggcatcttacctttatcacccttgttcctccaacaatcatcagccctattacaacagttacctttggtgcatttattggcacaaaacatcagggcacaacaactacaacaacttgtgctagcaaaccttgctgcctactctcagcaacagcagtttct

SEQ ID NO: 320092 - DNA, 425 bp, Zea mays
caacaacaaagccatgagcagcaacatcatccacaacaacatcatccacaaaaacaacggcatcaagcaccaccacaacatcaccagcagcagcaacaccaacaacaacaagttcacatgcaaccacaaaaacatcagcaacaacaagaagttcatgttcaacaacaacaacaacaaccgcagcaccaacaacaacaacaacaacaacagcaccaacaacaacatcaatgtgaaggccaacaacaacatcaccaacaatcacaaggccatgtgcaacaacacgaacagagccatgagcaaccaccaagacagagccatgagcaacaacatcaacaacaattccaaggtcatgacaagcagcaacaaccacaacagcctcagcaatatcaacagggcccaggaaaatcacaacagcaacaatgtca

SEQ ID NO: 320093 - DNA, 435 bp, Zea mays
  unsure (1)..(435): unsure at all n locations
gtcagcctagcaattagctcatcgactccagattggagaactcgacaccatgaaggtgctgatcgttgcccttgctctcctggcgctcgctgcgagcgccgcctccagtacaagcggcggctgtggctgccagacaccaccgtttcatctaccgcctccgttctatatgccgcctccgttctatctgccgccgcagcagcagccgcagccatggcaataccccactcaaccaccgcagctaagcccgtgccagcagttcggatcctgcggcgtcggcagcgtcggcagcccgttcctgggccaatgcgtcgagttcctgaggcaccagtgcagcccggcggcgacgccctacggctcgccacagtgccaggcgctgcagcagcagtgctgccaccagatcangcaggtggagccgctgcaccggtaccaggcgac

SEQ ID NO: 320094 - DNA, 438 bp, Zea mays
aacaatggctaccaagatattatccctctttgcgcttcttgccctttttgtgagcgcggcagatgcgttcattattccacaatgctcacttgctcctagtgccattattccacagttcctccctccagttacttcaatgggcttcgaacacccagctgtgcaagcctacaggctacaacaagcgcttgcggcgagcgtcttacaacaaccaattgcccaattacaacaacaatccttggcacatctaaccatacaaaccatcgcaacgcaacagcaacaacaatttctaccagcactgagccaactagctgtggtgaaccctgtcgcctacttgcaacagcagttgcttgcatccaacccacttgctctggcaaacatagttgcataccaacaacaacaacaattgcaacagtttctaccagcgctcagtcaactagc

SEQ ID NO: 320095 - DNA, 432 bp, Zea mays
  unsure (1)..(432): unsure at all n locations
gcacaatagtgtaccaacaatggcagccaaaatattttgcttccttatgctggttgggctttctgcaagtgttgctaccgcaaccattttcccacaatgctcacaagctcctatagcttcccttcttcccccatacctctcaccagcggtgtcttcaatgtgcgaaaccccaattgttcaaccctacaggatccaacaggcaatcgcaacaggcatcttaccattatcacccttgcttctccaacaaccgtcagccctattacagcagttacctttggtccatttggtggcacagaacatcanggcacaacaactacaacaacttgtgctagcaaaccttgctgcatactctcagcaacatcagtttcttccattcaaccaactggctgcattgaactctgctgcttatttgcaacaacaattacccattca

SEQ ID NO: 320096 - DNA, 430 bp, Zea mays
  unsure (1)..(430): unsure at all n locations
atttgagcattcagaaacacaccaagcgaagcgcactagcaacgacctaagggcagtggctaccaagatattagccctccttgcgcttcttgccctttttgtgagcgcaacaaatgcgttcattatttcacaatgctcacttgctcctagtgccattattccacagttcctgccaccagttactttaatgggcttcgaacacctagctgtgctagccaacatgcaacaacaagcgcttgcggcgagcgtcttacaacaacccattgcccaattgcaacaacaatccttgccacatctaacaatacaagccatcacaacgcaacatcaacaacagttgctaccagcactgagccacctagccatggtgaaccctgacgnctacttgcaagagcagctgcttgcatccaacccacttgctctggcgaacgta

SEQ ID NO: 320097 - DNA, 422 bp, Zea mays
ctcgtgctacctctgatcaaccaagtagctctggcaaacctttctccctactctcagcgccctcttacaactgcaacaattgctgccattcaaccaacttgctttgacaaacccaacagtgttctaccaacaacccatcattggtggtgccctcttttagattgcttatgagttatagttcaataatgaagttttttggatgatgtttgtggcgtcccagaaataagaaagtacatttctagattcttaaaaaaaaaaaaaaaaaaaaaaaaaaaaaaaaaaaaaaaaaaaaaaaaaaaaaaataaaaaaaaaaaaaaaaaaaaaaaaacaaaaaaaaaaaaaaaaaaaaaaaaaaaaaaaatattcactaaataaaaaaactaaacaaaaatttttaaaaaaaaaaaaaggggcccccttt

SEQ ID NO: 320098 - DNA, 326 bp, Zea mays
ggagcttgatttcgacgagctggatattgagaccctatgggagctcgatcgatttgtggtcaatgggaggaaagctctaaagaagagccagcggaattctacgatgaatggtgatgctgctgtgatgaatgcagatgccatcgatgtgacaattgttccggatgatgatgatgacagggtcgaggttgctgtcaatccatctgtggtggttgaaattggagagtcggagactgacgttccagagaagattgaagtggaggctgagatgggtgacgagtatgtggatatcggtgatgagatgccgacgatgaattaccagtcggtgg

SEQ ID NO: 320099 - DNA, 409 bp, Zea mays
gcaacatagaaagtggaatacagtagctaaaatagagcaacaatggcggccaagatatgttccatccttatgctccttgctctttctgcatgtgttgctaacgcgaccatttttcctcaatactcacaagctcctatagctgcccttcttcccccataccttccatcaatgaccgctttagtatgtgaaaacccagcccttcaaccctacaggatccagcaagcaatcgcaacaagcaacttacctttatcacacctgttctttcaacaatcgccagccctatctttggtgcagtcattggtacaaaccatcagggcagaacagttgcagcaactcgtgctaccagtgatcagccaagtagctctggcaaacctttccccctactctcagcaacaacaatttctttcat

SEQ ID NO: 320100 - DNA, 290 bp, Zea mays
aaacacaccaagcgaagcgcactagcaacgacctaacaacaatggctaccaagatattggccctcgttgcgcttcttgccctttttgtgagcgcaacaaatgcgttcattattccacaatgctcacttgctcctagtgccattattccacagttcctcccaccagttacttcaatgggcttcgaacacctagctgtgcaagccaacatgcaacaacaagcgcttgcggcgagcgtcttacaacaaccaattgcccaattgcaacaacaatccttgccacatctaacaata

SEQ ID NO: 320101 - DNA, 342 bp, Zea mays
gcctcagcctcatccccagccacacccatgcccgtgccaacagccgcatccaagccggtgccagctgcagggaacctgcggcgttggcagcaccccgatcctgggccagtgcgtcgagttcctgaggcatcagtgcagcccgacggcgacgccctactgctcgcctcagtgccagtcgttgcggcagcagtgttgccagcagctcaggcaggtggagccgcagcaccggtaccaggcgatcttcggcttggtcctccagtccatcctgcagcagcagccgcaaagcggccaggtcgcggggctgttggcggcgcagatagcgcagcaactgacggcgatgtg

SEQ ID NO: 320102 - DNA, 412 bp, Zea mays
gaaaacccaattcttcaaccctacaggatccaacaggcaatcgcagctggcatcttggcttgatcacccttgttcctccaacaatcatcagccctattacaacagttacctttggtgcatttattggcacacaacatcagggcacaacaactacaacaacttgtgctagcaaaccttgctgcctactctcagcaacagcagtttcttccattcaaccaactaggttcattgaactctgcttcttatttgcaacaacaacaactaccattcagccagctacctgctgcctacccccagcaatttcttgcattcaaccaactagcagcattgaactctgctgcttatttacagcagctgcatactactaccattcagacacttagctcgtgtgagcgctgatagcttcttgaca

SEQ ID NO: 320103 - DNA, 304 bp, Zea mays
cccagctcttcaaccatataggcttcaacaagcaatcgcagcaagcaacatacgttggtcgcccttgttgtttcaacaatcaccagccctatctttggtgcagtcattggtacaaaccatcagggcacaacagctgcagcaactcgtgctacctgtgatcaaccaagtagctctggcaaacctttctccctactctcagcaacaacaatttcttccattcaaccaactgtgtacactgaaccctgctgcttatttgcagcaacaactattaccatttagccagctagctacatgctactctcag

SEQ ID NO: 320104 - DNA, 245 bp, Zea mays
gtcacgcgttcgtccacacgtccgcccacgcttgccgcgccgactacatgcccatgggcgagcacgatcataacgccagcccttacttcactgcttccgccgctgccgacttcggaccatgatccactgctgctatagctcccgtcgttgccagatacccgtttaccagcctgattcaagatgaggacaacctcatccttgaactcttcctgctccagcaagcaatcgcatacatcatgctgacc

SEQ ID NO: 320105 - DNA, 411 bp, Zea mays
ggaattcccggggcttcagtatgtgaaaacccagctcttcaaccctataggctccaacaagcaatcgcagcaagcaacatacctttgtcacccttgtttcaacaatcgccagccctatctttggtgcagtcattggtacaaaccatcaaggcacagcagctgcagcaactcgtgctacctgtgatcaaccaagtagctctggcaaacctttctccctactatcagcaacaacaatttcttccattcaaccaactatctacactgaaccctgctgcttatttgcagcaacaactattaccattcagccagctagctactgcctactctcatcaacaacaacttcttccatttaaccaattggccgcactgaacctcgctgcttatttgcagcagcaaatattactaccattt

SEQ ID NO: 320106 - DNA, 361 bp, Zea mays
cagctagcaacatagaaagcacaatagtgtaccaacaatggcagccaaaatatgttagttccttatgctccttggtctttctgcaagtgctgctaccgcaaccattttcccacaatgctcacaagctcctatagcttcctttcttcccccatacctctcaccagcggtgtcttcagtatgtgaaaacccaattcttcaaccctacaggatccaacaggcaatcgcagcaggcatcttacctttatcacccttgttcctccaacaaccgtcagccctattacagcagttacctttggtgcatttgttggcacaaaacatcaaagcacaacaactacaacaacttgtgctaagaaaccttgct

SEQ ID NO: 320107 - DNA, 259 bp, Zea mays
gcccgtgccagcagttcggatcctgcggcgtcggcagcgtcggcagcccgtgggtgggccagtgcgtcgagttcctgaggcaccagtgcagcccggcggcgacgccctacggctcgccacagtgccaggcgctgcagcagcagtgctgccaccagatcaggcaggtggagccgctgcaccggtaccaggcgacatacggtgtggtcctgcagtccttcctgcagcagcagtcgcaaggcgagctcgccgagctgatggc

SEQ ID NO: 320108 - DNA, 372 bp, Zea mays
ccgagttatttatgtaattatgtacctcatattgaaaattgagctaaaaaaggcatgggagcatgttatccaatcccattctgtttgatttgttatatgatgcaaaatttaaattcgtccgcaattgtgacaccctcatcagttccttttttttctcgaaagcgcaagagagctgcgcgaaaatatattaagaaggagataaaggtccaaaaggaccccaagatacatggtacaaaaaaggctgccctacgaccctcatcagttccttgattgcacagatcaattagtgtttgcatcttacgccattgtgaatcttggttattcatattatatcctgtcatgcaaaaatttaatatcaatttgttcaaatgt

SEQ ID NO: 320109 - DNA, 379 bp, Zea mays
caacatagaaagcacaatagtgtaccaacaatggcagccaaaatattttgcttccttaggctccttggtctttctgcaagtgctgctaccgcaaccattttcccacaatgctcacaagctcctatagcttcctttcttcccccatacctctcaccagcggtgtcttcagtatgtgaaaacccaattcttcaaccctacaggatccaacaggcaatcgcagcaggcatcttacctttatcacccttgttcctccaacaaccgtcagccctattacagcagttacctttggtgcatttgttggcacaaaacatcaaagcacaacaactacaacaacttgtgctaagaaaccttgctgcctactctcagcaacaagcagttc

SEQ ID NO: 320110 - DNA, 432 bp, Zea mays
attgagaccaactagcaacatagaaagcacaatagtgtaccaacaatggcagccaaaagattttgcctccttatgctccttggtctttctgcaagtgctgctacggcgaccattttcccgcaatgctcgcaagctcctatagcttcccttcttcccccgtacctctcaccagcggtgtcttcggtatgtgaaaacccaattcttcaaccctacaggatccaacaggcaatcgcagctggcatcttacctttatcacccttgttcctccaacaatcatcagccctattacaacagttacctttggtgcatttattggcacaaaacatcaaggcacaacaactacaacaacttgtgctagcaaaccttgctgcctactctcagcaacagcagtttcttccattcaaccaactaggttcattgaactctgcttct

SEQ ID NO: 320111 - DNA, 309 bp, Zea mays
ggaattgccggcccgactcgacccacgcgtgcgcagctagcaacatagaaagcacaatagtgtaccaacaatggcagccaaaatatgttggttccttatgctccttggtctttctgcaagtgttgctaccgcaaccattttcccacaatgctcacaagctcctatagcttcccttcttcccccatacctctcaccagcggtgtcttcaatgtgtgaaaccccaattgttcaaccctacaggatccaacaggcaatcgcaacaggcatcttaccattatcacccttgttccttcaacaaccgtcagccct

SEQ ID NO: 320112 - DNA, 418 bp, Zea mays
aagggcttacgagtgcatcaaggatatcatcaaggtgaaacttcttagtggccagaggggggatcacaactcaaccgccgactaccgagcgagattatctgtcaatagggacacatctgaagttgcctacagtcaaatcggacacaccgatgggtgctacatctataccaccacagtcacctgagagaacaaaggcattatggactagattaatgagaagctgtatggacagtactgaactgaggctatacatggctgagctggtctgtgatgtcgcttgacttgcgaaatgttcagtggaggatagatgataacatccacccatgagttggtgcccataccctggatcatgtgacaaggacacggacagttacctgctgtacaatttttttgggaagataattgtcttgcttggtct

SEQ ID NO: 320113 - DNA, 256 bp, Zea mays
gtgagccctgctaccttcttgatacaaccacagttgttgccgttctaccagcacgctgggcctaaggctggcaccctcttacaactgcaacaattgctgccattcaaccaacttgctttgacaaacccagcagcgttctaccaacaacccatcattggtggtgccctcttttagatttcttatgagttatagttcaataataaagttttttgtctgatgtttgtggcttcccagaaataagaaagtacatttctag

SEQ ID NO: 320114 - DNA, 396 bp, Zea mays
aggatccaacaggcaatcgcagcaggcatcttacctttatcacccttgttcctccaacagccgtcggccctattacagcagttacctttggtgcatttgttggcacaaaacatcaaggcacaacaactacaacaacttgtgctaggaaaccttgctgcctactctcagcaacagcagtttcttccattcaaccaactggctgcattgaactctgctgcttatttgcaacaacaactaccattcagtcagctagctgctgcctacccccagcaatttcttccattcaaccaactggcagcattgaactctgctgcttatttacaacagcaacagctaccaccattcagccagctagctgatgtgagccctgttgccttcttgacacaacaacagttg

SEQ ID NO: 320115 - DNA, 354 bp, Zea mays
gaattaccgggcagcattcagaaacacaccaagcgaagcacattagcaacaacctatcaacaatggctaccaagatattatccctgcttgcggttcttgcgctttttgcgagcgcaacaaatgcgttcattattccacaatgctcacttgctccaagttccattattacacagttcctcccaccagttacttcaatgggcttcgaacacccagctgtgcaagcctataggctacaacaagcaattgcggcgagcgtcttacaacaaccaatttcccagttgcaacaacaatccttggcacatctaacaatacaaaccatcgcaacgcaacagcaacaacaattcctaccagcac

SEQ ID NO: 320116 - DNA, 436 bp, Zea mays
cagcattcaaaaacacaccaagcgaagcgcactagcaacgacctaacaccaatggctgccaggatattagccctccttgcgcttcttgcccttttagtgagcgcaacaaatgcgttcattattccacagtgctcacttgctcctagtgccagtattccacagttcctcccaccagttacttcaatgggcttcgaacatccagccgtgcaagcctacaggctacaactagcgcttgcggcgagcgccttacaacaaccaattgcccaattgcaacaacaatccttggcacatctaaccctacaaaccattgcaacgcaacaacaacaacaacagtttctgccatcactgagccacctagccgtggtgaaccctgtcacctacttgcaacagcagctgcttgcatccaacccacttgctctggcgaacgtagctgcat

SEQ ID NO: 320117 - DNA, 433 bp, Zea mays
aacacacctagcgaagcgcactagcaacgacctaacaacaatggcttccaagacatggtcgcgtccttgcgcttcttgccctttttgtgagtgcaacaaatgcgttcattattccacaatgctcacttgctccgagtgccattattccacagttcctccctccagttacttcaatgggcttcgaacacccagctgtgcaagcctataggctacaacaagcgcttgcggcgagcgtcttataacaaccaattgcccaattacaacaacaatccttggcacatctaaccatacaaaccatctcaacgcagcagcaagcactgagccacctagccgtggtgaaccctatcgcctacttgcaacaacagctgcttgcatccaacccacttgctttggcaaacgtagctgcataccaacaacaacaacagttgcaaca

SEQ ID NO: 320118 - DNA, 412 bp, Zea mays
ggttggcttctcctccccctccggttcgggttcgggttcgtgaggttctccggggtgcggtttcgtgggtgagcggatcgagatggcggcgtcggatgttgagtaccgctgcttcgtcggcggcctcgcctgggccacggacgaccactccctccacaacgccttcagcacctacggcgaggtcctcgagtccaagatcatcctcgatcgggagacgcagaggtcccgcggcttcggcttcgtcaccttctccacggaggaggcgatgcggaacgccatcgagggcatgaacggcaaggagctggacggccgcaacatcaccgtcaacgaggcccagtcccgcggcggccgtggaggcggcggcggcggcgggtacggtggtggccgtggaggcggcggctacggcggtggc

SEQ ID NO: 320119 - DNA, 441 bp, Zea mays
  unsure (1)..(441): unsure at all n locations
cttcagaccattagctttatctactccagagcgcagaagaacccgatcgacaccatgagggtgttgctcgttgccctcgctctcctggctctcgctgcgagcgccacctccacgcatacaagcggcggctgcggctgccagccaccgccgccggttcatctaccgccgccggtgcatctgccacctccggttcacctgccacctccggtgcatctcccaccgccggtccacctgccgccgccggtccacctgccaccgncggtccatgtgccgacgacggttcatctgccgtcgacaccatgccactaccctaactaaccagcccggcctcagcctcatccccagccacacccatgcccgtgccaacagccgcattcaagcccgtgccagctgcagggaacctgcggcgttggcagcaccccgatccctggccagtgcgtc

SEQ ID NO: 320120 - DNA, 452 bp, Zea mays
attgagaccaactagcaacatagaaagcacaatagtgtaccaacaatggcagccaaaagattttgcgctccttatgctccttggtctttctgcaagtgctgctacggcgaccattttcccgcaatgctcgcaagctcctatagcttcccttcttcccccgtacctctcaccagcggtgtcttcggtatgtgaaaacccaattcttcaaccctacaggatccaacaggcaatcacagctggcatcttacctttatcacccttgttcctccaacaatcatcagccctattacatcagttacctttggtgcatttattggcacaaaacatcagggcacaacaactacaacaacttgtgctagcaaaccttgctgcctactctcagcaacagcagtttcttccattcaaccaactagctgcattgaactctgcttcttatttgcaacaaccaccac

SEQ ID NO: 320121 - DNA, 240 bp, Zea mays
caacaatttctaacataatatggctacgttcttatgctccttatctctatctacaattcttcctaccatatctcattatcccacaattctcacaaccttctatatctccacttactaccacatacttctcaacaccttaatcaacaatatcacaaacctcaatttcacaaccatacattatccaacatacacatcacatcaaacaatcttacctttatcaccctttttactccaacaacc

SEQ ID NO: 320122 - DNA, 256 bp, Zea mays
gctcacttgctcctagttccattatgaataatggatcaggagctgtgacatatcgtaattgctagttaaatggtcagggcctcagaacgtacagcattcatactttatttattctagccatagcgttatcgcattcaacaactaatgcttaaaactataataattattacacatctaacactactaaccatcataacgcatacataacatcagttcttatcatacttgaccaattacaattgttgaactttaccat

SEQ ID NO: 320123 - DNA, 431 bp, Zea mays
ctacaggatccaacaggcaatcgcagtatgcatcttacctttatcacccttgttcctgcaagaatcatcagccctattacagcagttacctttggtgcatttattggcacaaaacatcagggcacaacaactacaacaactcgtgctagcaaaccttgctgcctactctcagcaacagcagttacctttggtgcatttgttggcacaaaacatcagggcacaacaactacaacaactcgtgctagcaaaccttgctgcctactctcagcaacaacagtttctgccattcaaccaactagctgcattgaactctgctgcttatttgcagcaacaacaactactaccattcagccagctagctgctgcctacccccggcaatttcttccattcaaccaactggcagcattgaactctcatgcttatgtacaac

SEQ ID NO: 320124 - DNA, 286 bp, Zea mays
actcggtctcggaattcccggctcagcattcaaaaacacaccaagcgatatgtggccaaccagaaataagaagttacatttccagattcgaaaaaaaaaaaaaaaaaaaaaaaaaaaaaaaaaaaaaaaaaaaaaaaaaaaaaaaaaaaaaaaaaaaaaaaaaaaaaaaaaaaaaaaaaaaaaaaaaaaaaaaaaaaaaactaaaaaaaaaaataaaactaacaataaaaacacctattacaactgaaacaatagactgacaataaaccaacttaaaataaactaa

SEQ ID NO: 320125 - DNA, 444 bp, Zea mays
attcaaaaacacaccaagcgaagcgcactagcaacgacctaacaccaatggctaccaagatatgagccgtccttgcgcttcttgcccttttagtgagcgcaacaaatgcgttcattattccacagtgctcacttgctcctagtgccagtattccacagttcctcccaccagttacttcaatgggcttcgaacatccagccgtgcaagcctacaggctacaactagcgcttgcggcgagcgccttacaacaaccaattgcccaattgcaacaacaatccttggcacatctaaccctacaaaccattgcaacgcaacaacaacaacaacagtttctgccatcactgagccacctagccgtggtgaaccctgtcacctacttgcaacagcagctgcttgcattcaacccacttgctctggcgaacgtagctgcataccagcaacaac

SEQ ID NO: 320126 - DNA, 445 bp, Zea mays
cagctagcaacatagaaagcacaatagtgtaccaacaatggcagccaaaatattttgcgtccttatgctccttggtctttctgcaagtgctgctacggcgaccattttcccgcaatgctcgcaagctcctatagcttcccttcttcccccgtacctctcaccagcggtgtcttcggtatgtgaaaacccaattcttcaaccctacaggatccaacaggcaatcacagctggcatcttacctttatcacccttgttcctccaacaatcatcagccctattacatcagttacctttggtgcatttattggcacaaaacatcagggcacaacaactacaacaacttgtgctagcaaaccttgctgcctactctcagcaacagcagtttcttccatccaaccaactagctgcattgaactctgcttcttatttgcaacaacaacaacta

SEQ ID NO: 320127 - DNA, 433 bp, Zea mays
attgtcagcattcaaaaacacaccaagctaagcgcactagcaacgacctaacaccaatggcggccaagatattagccctccttgcgcttcttgcccttttagtgagcgcaacaaatgcgttcattattccacagtgctcacttgctcctagtgccagtattccacagttcctcccaccagttacttcaatgggcttcgaacatccagccgtgcaagcctacaggctacaactagcgcttgcggcgagcgccttacaacaaccaattgcccaattgcaacaacaatccttggcacatctaaccctacaaaccattgcaacgcaacaacaacaacaacagtttctgccatcactgagccacctagccgtggtgaaccctgtcacctacttgcaacagcagctgcttgcatccaacccacttgctctggcgaacgt

SEQ ID NO: 320128 - DNA, 446 bp, Zea mays
caactagcaacatagaaagcacaatagtgtaccaacaatggcagccaaaatattttgcgtccttatgctccttggtctttctgcaagtgctgctaccgcaaccattttcccacaatgctcacaagctcctatagcttcctttcttcccccatacctctcaccagcggtgtcttcagtatgtgaaaacccaattcttcaaccctacaggatccaacaggcaatcgcagcaggcatcttacctttatcacccttgttcctccaacaaccgtcagccctattacagcagttacctttggtgcatttgttggcacaaaacatcaaagcacaacaactacaacaacttgtgctaggaaaccttgctgcctactctcagcaacagcagtttcttccattcaaccaactggctgcattgaactctgctgcttatttgcaacaacaactaccat

SEQ ID NO: 320129 - DNA, 434 bp, Zea mays
cagctagcaacatagaaagcacaatagtgtaccaacaatggcagccaaaatattttggctgcttatgctccttggtctttctgcaagtgctgctacggcgaccattttcccgcaatgctcgcaagctcctatagcttcccttcttcccccgtacctctcaccagcggtgtcttcggtatgtgaaaacccaattcttcaaccctacaggatccaacaggcaatcacagctggcatcttacctttatcacccttgttcctccaacaatcatcagccctattacatcagttacctttggtgcatttattggcacaaaacatcagggcacaacaactacaacaacttgtgctagcaaaccttgctgcctactctcagcaacagcagtttcttccattcaaccaactagctgcattgaactctgcttcttatttgcaac

SEQ ID NO: 320130 - DNA, 438 bp, Zea mays
  unsure (1)..(438): unsure at all n locations
atgttgagcattcagaaacacaccaagcgaatcgcactagcaacgacctaacaacagtgggtaccaagatattagccctccttgcgcttcttgccctttttgtgagcgcaacaaatgcgttcattattccacaatgctcacttgctcctagtgccattattccacagttcctcccaccagttacttcaatgggcttcgaacacctagctgtgcaagccaacatgcaacaacaagcgcttgcggcgagcgtcttacaacaaccaattgcccaattgcaacaacaatccttgccacatctaacaatacaagccatcacaacgcaacagcaacaacagttcctaccagcactgagccacctagccatggtgaaccctgccgnctacttgcaagagcagctgcttgcatccaacccacttgctctggcgaacgtagttgcaa

SEQ ID NO: 320131 - DNA, 269 bp, Zea mays
aaagcacaatagtgtaccaacaatggcagccaaaatattttgcctccttatgctcctgggtctttctgcaagtgctgctacggcgaccattttcccgcaatgctcgcaagctcctatagcttcccttcttcccccgtacctctcaccagcggtgtcttcggtatgtgaaaacccaattcttcaaccctacaggatccaacaggcaatcacagctggcatcttacctttatcacccttgttcctacaacaatcatcagccctattacatc

SEQ ID NO: 320132 - DNA, 407 bp, Zea mays
ccagtcacccataatattttgagcattcataaacacacctagcgaagcgcactagcaacgacctaacaacaatggcttccaagacattatccctccttgcgcttcttgccctttttgtgagtgcaacaaatgcgttcattattccacaatgctcacttgctccgagtgccattattccacagttcctccctccagttacttcaatgggcttcgaacacccagctgtgcaagcctataggctacaacaagcgcttgcggcgagcgtcttagaacaaccaattgcccaattacaacaacaatccttggcacatctaaccatacaaaccatcgcaacgcagcagcaacaagcactgagccacctagccgtggtgaaccctatcgcctacttgcaacaacagctgcttgca

SEQ ID NO: 320133 - DNA, 443 bp, Zea mays
  unsure (1)..(443): unsure at all n locations
ggtcgacnacgcgtccgattgagaccaactagcaacatagaaagcacaatagtgtaccaacaatggcagccaaaagattttggttccttatgctccttggtctttctgcaagtgctgctaccgcaaccattttcccacaatgctcacaagctcctatagcttcctttcttcccccatacctctcaccagcggtgtcttcagtatgtgaaaacccaattcttcaaccctacaggatccaacaggcaatcgcagcaggcatcttacctttatcacccttgttcctccaacaaccgtcagccctattacagcagttacctttggtgcatttgttggcacaaaacatcaaggcacaacaactacaacaacttgtgctaggaaaccttgctgcctactctcagcaacagcagtttcttccattcaaccaactggctgcattgaactct

SEQ ID NO: 320134 - DNA, 442 bp, Zea mays
ctagcaacatagaaagcacaatagtgtaccaacaatggcagccaaaatattttgcctcgttatgctccttggtctttctgcaagtgctgctacggcgaccattttcccacaatgctcacaagctcctatagcttcccttcttcccccgtacctctcaccagcggtgtcttcggtatgtgaaaacccaattcttcaaccctataggatccaacaggcaatcgcagctggcatcttacctttatcacccttgttcctccaacaatcatcagccctattacagcagttacctttggtgcatttattggcacaaaacatcaaggcacaacaactacaacaacttgtgctagcaaaccttgcttgctactctcagcaacaacagtttcttccattcaaccaactagctgcattgaactctgctttctatttgcaacaacaacaacta

SEQ ID NO: 320135 - DNA, 457 bp, Zea mays
tcggattcccgggattttcagcattcaaaaacacaccaagcgaagcgcactagcaacgacctaacaccaatggctaccaagatattggcgcgtccttgcgcttcttgcccttttagtgagcgcaacaaatgcgttcattattccacagtgctcacttgctcctagtgccattattccacagttcctcccaccagctacttcaatgggcttcgaacatccagccgtgcaagcctacaggctacaactagcgcttgcagcgagcgccttacaacaaccaattgcccaattgcaacaacaatccttggcacatctaaccctacaaaccattgcaacgcaacaacgacaacaacaacagtttctgccatcactgagccacctagccgtggtgaaccctgtcacctacttgcaacagcagctgcttgcattcaacccacttgctctggcgaacgtagctgca

SEQ ID NO: 320136 - DNA, 287 bp, Zea mays
cagctagcaacatagaaagcacaatagtgtaccaacaatggcagccaaaatattttgggtccttatgctccttggtctttctgcaagtgctgctaccgcaaccattttcccacaatgctcacaagctcctatagcttcctttcttcccccatacctctcaccagcggtgtcttcagtatgtgaaaacccaattcttcaaccctacaggatccaacaggcaatcgcagcaggcatcttacctttatcacccttgttcctccaacaaccgtcagccctattacagcagt

SEQ ID NO: 320137 - DNA, 385 bp, Zea mays
gacccacgcgtccgtgcttatttgcagcaacaacaactactaccattcagccagctagctgctgcctaccgccggcaatttcttccattcaaccaactggcagcattgaactctcatgcttatgtacaacaacaacaactactaccattcagccagctagctgctgtgagccctgctgccttcttgacacagcaacatttgttgccgttctacctgcacactgcgcctaacgttggcaccctcttacaactgcaacaattgctgccattcgaccaacttgctttgacaaacccagcagtgttctaccaacaacccatcattggtggtgccctcttttagattgcttatgagttatagttcaataataaagttttttttgctgatt

SEQ ID NO: 320138 - DNA, 385 bp, Zea mays
atggagaccaactagcaacatacaaagttcaatagtgtaccaacaatggcagccaaaggatttcggctccttatgctccttgctatgactgcaagtgctgctacggcgaccatttttccgcaatgctcacaagctcctatagcttcccttcttgccccgtacctctcaccagcggtgtcttcggtatgtgaaaacccaattcttgaaccctacaggatccaacaagcaatcgcagctggcatcttacctttatcacccttgttcctacaacaatcatcagccctattacagcagttacctttggtgcatttattggcacaaaacatcaaggcgcaacaactacaacaacttgagctagcaaaccttgctgcctactctcagcaac

SEQ ID NO: 320139 - DNA, 436 bp, Zea mays
acgcagcaagcaacatagaaagtggaatccagtagcaacaatagagcaacaatggcgaccgagatattttccctccttatgctccttgctctttctacatgtgttgctaacgcgacaattttgcctaaatgctgacaagctcctatagcttaccttcttcccccataccttgcatcaattatagctacaatatgcgaaaacccagctcttcaaccatataggcttcaacaagcaatcgcagcaagcaacatacctttatcgcccttgtagtttcaacaatcgccagccctatctttggtgcagtcattggtacaaaccatcagggcacaacagctgcagcaactcgagctacctctgatcaaccaagtagctctggcaaacctttatccctactctcagcaacaacaaattcttacatttaaccaactgtctacac

SEQ ID NO: 320140 - DNA, 454 bp, Zea mays
ttattgagaccaactagcaacatagaaagcacaatagtgtaccaacaatggcagccgaaatattttgcctccttatgctccttggtctttctgcaagtgctgctacggcgaccattttcccgcaatgctcgcaagctcctatagcttcccttcttcccccgtacctctcaccagcggtgtcttcggtatgtgaaaacccaattcttcaaccctacaggatccaacaggcaatcacagctggcatcttacctttatcacccttgttcctccaacaatcatcagccctattacatcagttacctttggtgcaattattggcacaaaacatcagggcacaacaactacaacaacttgtgctagcaaaccttgctgcctactctcagcaacagcaggttcttccattcaaccaactagctgcattgaactctgcttcttatttgcaacaacaacaact

SEQ ID NO: 320141 - DNA, 336 bp, Zea mays
agcattcaaaaacacaccaagcgaagcgcactatcaacgacctaacaccaatggctaccaagatattagccctccttgcgcttcttgcccttttagtgagcgcaacaaatgcgttcattattccacagtgctcacttgctcctagtgccagtattccacagttcctcccaccagttacttcaatgggcttcgaacatccagccgtgcaagcctacaggctacaactagcgcttgcggcgagcgccttacaacaaccaattgcccaattgcaacaacaatccttggcacatctaaccctacaaaccattgcaacgcaacaacaacaacaacagtttc

SEQ ID NO: 320142 - DNA, 332 bp, Zea mays
acccacgcgtacggttggcttctcctccccctccggttcgtgttcgggttcgtgaggttctccggggttcggtggcgtgggtgagcggatcgagatggccgcgtccgatgttgagtaccgctgcttcgtcggcggactcgcctgggccacggacgaccactccctccacaacgccttcagcacctactgcgaggtactcgagtccaagatcatcctcgatcgggagacgcatacgtcccgcggcttcggcttcgtcaccttctccacggaggatgcgatgccgaacgccatcgagggcatgaacggcaaggagctggacggccgcaacatta

SEQ ID NO: 320143 - DNA, 333 bp, Zea mays
atccagatcagcaaagcggcagtgcgtagagaggatcgtcgaacagaacagcgtgaagatggtcatcgttctcgtcgtgtgcctggctctgtcagctgccagcgcctctgcaatgcagatgccctgcccctgcgcggggctgcagggcttgtacggcgctggcgccggcctgacgacgatgatgggcgccggcgggctgtacccctacgcggagtacctgaggcagccgcagtgcagcccgctggcggcggcgccctactacgccgggtgtgggcagccgagcgccatgttccagccgctccggcaacagtgctgccagcagcagatgaggat

SEQ ID NO: 320144 - DNA, 428 bp, Zea mays
  unsure (1)..(428): unsure at all n locations
cggacgcgtgggcggacgcgtgggcggacgcgtgggtcgctctcctggctctcgctgggagcgccacctccacgcatacaagcggcggctgcggctgccagccaccgccgccggttcatctaccgccgccggtgcatctgccacctccggttcacctgccacctccggtgcatctcccaccgccggtccacctgccgccgccggtccacctgccaccgccggtccatgtgccgccgccggttcatctgccgccgccaccatgccactaccctactcaaccgccccggcctcagcctcatccccagccacacccatgcccgtgccaacagccgcatccaagcccgtgccagctgcagggaacctgcngcgttggcagcaccccgatcctgggcagtgcgtcgagtttctgaggcatcagtgcagcccga

SEQ ID NO: 320145 - DNA, 77 bp, Zea mays
gacgtgaaagcacactgatgaaccatcaatggctgccaaaatattagctttcttagctggtgacttttgcagactgc

SEQ ID NO: 320146 - DNA, 390 bp, Zea mays
gaccaactagcaacatagaaagcacaatagtgtaccaacaatggcagccaagatattgggcttccttatgctgcttggtctttctgcaagtgttgctaccgcaaccattttcccacaatgctcacaagctcctatagcttcccttcttcccccatacctctcaccagcggtgtcttcaatgtgtgaaaccccaattgttcaaccctacaggatccaacaggcaatcgcaacaggcatcttaccattatcacccttgttcctccaacaaccgtcagccctattacagcagttacctttggtccatttggtggcacaaaacatcagggcacaacaactacaacaacttgtgctagcaaaccttgctgcatactctcagcaacatcagtttct

SEQ ID NO: 320147 - DNA, 148 bp, Zea mays
gaatcctgtggtggcgagcgagacatcacccacacccagcgagaagaggtatgggggcacacgcggagggcccgactggtacctggacttgtcagtggcgtgccagccggggtgcctctgggcttagctgcagaccccgccgtcgcca

SEQ ID NO: 320148 - DNA, 444 bp, Zea mays
  unsure (1)..(444): unsure at all n locations
cccacgcgtccgagaaagcacaatagtgtaccaacaatggcagccaaaatattttgcggccttatgctccttggtctttctgcaagtgctgctacggcgaccattttcccgcaatgctcgcaagctcctatagcttcccttcttcccccgtacctctcaccagcggtgtcttcggtatgtgaaaacccaattcttcaaccctacaggatccaacaggcaatcacagctggcatcttacctttatcacccttgttccncaacaatcatcagccctataacatcagttacctttggtgcatttatgggcccaaaccatcagggcacaacaactacaccaacttgtgctagcaaaccttgctgnctactctcagcaacagcagtttcttccattcaaccaactagctgcattgaactctgcttcttatttgcaaacacaacaactac

SEQ ID NO: 320149 - DNA, 412 bp, Zea mays
gaaccctgctgcttatttgcaacaacaacaactaccattcagccagctacctgctgcgcgacccccagcaatttcttccattcaaccaactagcagcattgaactctcctgcttatttacagcagcaacaactactaccattcagccagctagctggtgtgagccctgctaccttcttgacacaaccacagttgttgccgttctaccagcacgttgcgcctaacgctggcaccctcttacaactgcaacaattgctgccattcaaccaacttgctttgacaaacccagcagtgttctaccaacaacccatcattggtggtgccctcttttagatttcttatgagttatagttcaataataaagttttttatctgatgtttgtggcttcccagaaataagaaagtacatttct

SEQ ID NO: 320150 - DNA, 383 bp, Zea mays
gcaacatagaaagcacaatagtgtaccaacaatggcagccaaaatattttgcttccttatgcgccttggtctttctgcaagtgttgctaccgcaaccattttcccacaatgctcacaagctcctatagcttcccttcttcccccatacctctcaccagcggtgtcttcaatgtgtgaaaacccaattgttcaaccctacaggatccaacaggcaatcgcaacaggcatcttaccattatcacccttgttcctccaacaaccgtcagccctattacagcagttacctttggtccatttggtggcacaaaacatcaaggcaccaccactaccaccacttgggcttaccaaacttggtggatacttttaacaaccttaagttcttt

SEQ ID NO: 320151 - DNA, 351 bp, Zea mays
gaccaactagcaacatagaaagcacaatagtgtaccaacaatggcagccaaaatatggggcttccttatgctccttggtctttctgcaagtgttgctaccgcaaccattttcccacaatgctcacaagctcctatagcttcccttcttcccccatacctctcaccagcggtgtcttcaatgtgtgaaaccccaattgttcaaccctacaggatccaacaggcaatcgcaacaggcatcttaccattatcacccttgttcctacaacaactcgtagccctattacagcagttacctttggttcatttggtggcacaaaacatcacggcaccacaactacaacaacctgtgct

SEQ ID NO: 320152 - DNA, 196 bp, Zea mays
acgctggtcaaaaacccagcatgttgtattctgatttagtagcaaagatagattgtaactgcttagcaatgatcaggcatgtatgttagatatgtaaattggaacacatataatattactattcgtatatgtattgatcacctttgtgtgaaatataccctgataccacactagcaagctataaaatagaaagaaa

SEQ ID NO: 320153 - DNA, 448 bp, Zea mays
  unsure (1)..(448): unsure at all n locations
aacacaccaagcgaagcgcactagcaacgacctaacaacaatggctaccaagatattagccctccttgcgcttcgggccctttttgtgagcgcaacaaatgcgttcattattccacaatgctcacttgctcctagtgccattattccacagttcctcccaccagttacttcaatgggcttcgaacacctagctgtgcaagccaacatgcaacaacaagcgcttgcggcgagcgtcttacaacaaccaattgcccaattgcaacaacaatccttgccacatctaacaatacaagccatcacaacgcaacagcaacaacagttcctaccagcactgagccacctagccatggtgaaccctgccgnctacttgcaagagcagctgcttgcatccaacccacttgctctggcgaacgtagttgcaaaccagcaacaacaacagctacaacag

SEQ ID NO: 320154 - DNA, 436 bp, Zea mays
gcaacatagaaagcacaatagtgtaccaacaatggcagccaaaatattttgcctccttgaggctccttggtctttctgcaagtgctgctacggcgaccattttcccgcaatgctcgcaagctcctatagcttcccttcttcccccgtacctctcaccagcggtgtcttcggtatgtgaaaacccaattcttcaaccctacaggatccaacaggcaatcacagctggcatcttacctttatcacccttgttcctccaacaatcatcagccctattacatcagttacctttggtgcatttattggcacaaaacatcatggcacaacaactacaacaacttgtgctagcaaaccttgctgcctactctcagcaacagcagtttcttccattcaaccaactagctgcattgaactctgcttcttatttgcaacaacaaca

SEQ ID NO: 320155 - DNA, 275 bp, Zea mays
gccgccggttcatctgccgccgccaccatgccactaccctactcaaccgcggcggcctgggcctcatccccagccacacccatgcccgtgccaacagccgcatccaagcccgtgccagctgcagggaacctgcggcgttggcagcaccccgatcctgggccagtgcgtcgagttcctgaggcatcagtgcagcccgacggcgacgccctactgctcgcctcagtgccagtcgttgcggcagcagtgttgccagcagctcaggcaggtggagccgc

SEQ ID NO: 320156 - DNA, 372 bp, Zea mays
aaagcacaatagtgtaccaacaatggcagccaaaatattttgcctccttatgctcctgggtatttctgcaagtgctgctacggcgaccattttcccgcaatgctcacaagctcctatagcttcccttcttcccccgtacctctcaccagcggtgtcttcggtatgtgaaaacccaattcttcaaccctacaggatccaacaggcaatcgcagctggcatcttacctttatcacccttgttcctccaacaatcatcagccctattacagcagttacctttggtgcatttattggcacaaaacatcaaggcacaacaactacaacaacttgtgctagcaaaccttgctgcctactctcagcaacaagcagttct

SEQ ID NO: 320157 - DNA, 323 bp, Zea mays
cggacgcgtgggattttgagcattcataaacacacctagcgaagcgcactagcaacgacctaacaacaatggctaccaagatattatccctctttgcgcttcttgcccttattgtgagcgcaacaaatgcgttcattattccacaatgctcacttgctcctagtgccattattccacagttcctccctacagatacttcaatgggcttcgaacacccagctgtgcaagcctacaggctacaacaagcgcttgcggctagcgtcttacaacaaccaattggccaattacaacaaccattcttggcacatctaaccataccaacc

SEQ ID NO: 320158 - DNA, 341 bp, Zea mays
caactagcaacatagaaagcacaatagtgtaccaacaatggcagccaaaatattttggctccgtatgctccttggtctttctgcaagtgctgctacggcgaccattttcccgcaatgctcgcaagctcctatagcttcccttcttcccccgtacctctcaccagcggtgtcttcggtatgtgaaaacccaattcttcaaccctacaggatccaacaggcaatcacagctggcatcttacctttatcacccttgttcctccaacaatcatcagccctattacatcaagtacctttggtgcatttattggcacaaaacatcaaggcaccacaactacaacaac

SEQ ID NO: 320159 - DNA, 389 bp, Zea mays
atgcagctagttggttgaactctgcttcttatttgcaacatcaacaactaccattcagccagctgtctgctgcctacccccagcaatttcttccattcaaccaactgacagctttgaactctcctgcttatttacagcagcaacaactactaccattcagccagctagctggtgtgagccctgctaccttcttgacacaaccacaattgttgccgttctaccagcacgctgcgcctaacgctggcaccctcttacaactgcaacaattgctgccattcaaccaacttgctttgacaaacccaacagcattctaccaacaacccatcattggtggtgccctcttttagatttcttatgagttatagttcaataataaagttttttgtctg

SEQ ID NO: 320160 - DNA, 459 bp, Zea mays
gcacaatagtgtaccaacaatggcagctaaaatattttgcctccttatgctgcttggtgtttctgcaagtgctgctacggcgaccattttcccacaatgctcacaagctcctatagcttcccttcttcccccgtacctctcaccaacggtgtcttcggtatgtgaaaacccaattcttcaaccctacaggatccaacaggcaatcgcagctggcatcttacctttatcacccttgttcctccaacaatcatcagccctattacagcagttacctttggtgcatttattggcacaaaacatcagggcacaacaactacaacaacttgtgctagcaaaccttgctgcctactctcagcaacagcagtttcttccattcaaccaactagctgcattgaactctgcttcttatttgcaacaacaacaactaccattcagccagctatctgctgcctaccccca

SEQ ID NO: 320161 - DNA, 337 bp, Zea mays
cgaagcgcactagcaacgacctaacaccaatggctaccaagatattagccctccttgcgcttcttgccctttgagtgagcgcaacaaatgcgttcattattccacagtgctcacttgctcctagtgccattattccacagttcctcccaccagttacttcaatgggcttcgaacatccagccgtgcaagcctacaggctacaactagcgcttgcggcgagcgccttacaacaaccaattgcccaattgcaacaacaatccttggcacatctaaccctacaaaccattgcaacgcaacaacaacaacaacaacagtttctgccatcactgagccacct

SEQ ID NO: 320162 - DNA, 387 bp, Zea mays
  unsure (1)..(387): unsure at all n locations
caacaagcaacatagaaagtggaatccagtagcaacaatagagcaacaatggcgaccaagatattttccctccttatgctccttgctctttctacatgtgttgctaacgcgacaattttccctcaatgctcacaagctcctatagcttcccttcttcccccataccttccatcaattatagcttcaatatgtgaaaacccagctcttcaaccatataggcttcaacaagcaatcgcagcaagcaacatacctttatcgcccttgatgtttcaacaatcgccagccctatctctggtgcagtcattggtacanaccatcanggcacaacagctgcagcaactcgtgctacctctgatcacccaagtagctcttgcaaacctttctcct

SEQ ID NO: 320163 - DNA, 334 bp, Zea mays
gttgccctcgctctcctggctctcgctgcgagcgccacctccacgcatacaagcgggggctgcggctgccagccaccgccgccggttcatctaccgccgccggtgcatctgccacctccggttcacctgccacctccggtgcatctcccaccgccggtccacctgccgccgccggtccacctgccaccgccggtccatgtgccgtcgccggttcatctgccgccgtcaccatgccactaccctactcaactcgccctgcctcaggctcatccccagccacaaccatgcccgtgccaacagccgtattcaagcccgtgccaactgcagggaacct

SEQ ID NO: 320164 - DNA, 64 bp, Zea mays
cttgatatctatattcatatgatataaaataatatccctttctacatttgcacagaggcactaa

SEQ ID NO: 320165 - DNA, 425 bp, Zea mays
gcaacatagaaagcacaatagtgtaccaacaatggcagccaaaatattttgcctccttatgctccttggtatttctgcaagtgctgctacggcgaccattttcccgcaatgctcacaagctcctatagcttcccttcttcccccgtacctctcaccagcggtgtcttcggtatgtgaaaacccaattcttcaaccctacaggatccaacaggcaatcgcagctggcatcttacctttatcacccttgttcctccaacaatcatcagccctattacagcagttacctttggtgcatttattggcacaaaacatcagggcacaacaactacaacaacttgtgctagcaaaccttgctgcctactctcagcaacagcagtttcttccattcaaccaactagctgcattgaactctgcttcttatttgc

SEQ ID NO: 320166 - DNA, 327 bp, Zea mays
ccaactagcaacatagaaagcacaatagtgtaccaacaatggcagccaaaagattttggttccttatgctccttggtctttctgcaagtgctgctaccgcaaccattttcccacaatgctcacaagctcctatagcttcctttcttcccccatacctctcaccagcggtgtcttcagtatgtgaaaacccaattcttcaaccctacaggatccaacaggcaatcgcagcaagcatcttacctttatcacccttgttccttcaacaacccgtcagccctattacagcagttacctttggtgcatttgttggcacaaaacatcaaggca

SEQ ID NO: 320167 - DNA, 436 bp, Zea mays
agcaaaccttgctgcctactctcagcatcaacagtttcttccattcaaccagctagctgcattgaactctgcttcttatttgcaacaacaacaactaccattcagccagctatctgctgcctacccccagcaatttcttccattcaaccaactgacagctttgaactctcctgcttatttacagcagcaacaactactaccattcagccagctagctggtgtgagccctgctaccttcttgacacaaccacaattgttgccgttctaccagcacgctgcgcctaacgctggcaccctcttacaactgcaacaattgctgccattcaaccaacttgctttgacaaacccaacagcattctaccaacaacccatcattggtggtgccctcttttagatttcttatgagttatagttcaataataaaagtttttggctg

SEQ ID NO: 320168 - DNA, 372 bp, Zea mays
gaccaacagcacatagaaagggaatacagtagcaacaatagagcacaatggcggccaggatattttccatccttatgctccttgctctttctgcatgtgttgctaacgcgaccatttttcctcaatactcacaagctcctatagctgcccttcttcccccataccttccatcaatgaccgcttcagtttgtgaaaacccagcccttcaaccctacaggctccaacaagcaatcgcaacaagcaacttacctttatcacccctgttctttcaacaatcgccagccctatctttggtgcagtcattggtacaaaccatcagggcacaacagctgcaacaactcgtgctaccagtgatcagccaagtagctctgg

SEQ ID NO: 320169 - DNA, 434 bp, Zea mays
gaaacacaccaagcgaagctacctagcaacgacttaacaacaatggctaccaagatagtagcgcctccttgcgcttcttgccctttttgtgagcgcaacaaatgcgttcattattccacaatgctcacttgctcctagtgccattataccacagttcctccgaccagttacttcaatgggcttcgaacacctagctgtgcaagcctacaggctacaacaagcgcttgcggcgagcgtcttacaacaaccaattaaccaattgcaacaacaatccttggcacatctaaccatacaaaccatcgcaacacaacagcaacaacagttcctaccagcactgagccaactagatgtggtgaaccctgtcgcctacttgcaacagcaggtgcttgcatccaacccacttgctctggcaaacgtagctgcataccaacaac

SEQ ID NO: 320170 - DNA, 358 bp, Zea mays
ccaacaagcaacatagaaagtggaatccagtagcaacaacagagcaacaatggcgacgaagagattttccctccttatgctccttgctctttctgcatgtgttgctaacgcgacaattttccctcaatgctcacaagctcctatagcttcccttcttcccccataccttccatcaatgatagcttcagtatgtgaaaacccagctcttcagccctataggctccaacaagcaatcgcagcaagcaacatacctttatcacccttgttgtttcaacaatcgccagccctatctttggtgcagtcattggtacaaaccatcaaggcacagcagctgcagcaactcgtgctacctgtgatc

SEQ ID NO: 320171 - DNA, 182 bp, Zea mays
cgcgtacgcaagcacgggccatataaagagtaatatacaatcttcaccatagcagcactgtcgaccgcaagatattttctattcatgacgctgcgctctctctgcatatgttgctatcacgacaacattccctctcagctctcacactcctatatctctgctccttttcccatatacttcat

SEQ ID NO: 320172 - DNA, 445 bp, Zea mays
  unsure (1)..(445): unsure at all n locations
gcaacatagaaagcacaatagtgtaccaacaatggcagccaaaatattttggctccttgtgctccttggtctttctgcaagtgctgctacggcgaccattttcccgcaatgctcgcaagctcctatagcttcccttcttcccccgtacctctcaccagcggtgtcttcggtatgtgaaaacccaattcttcaaccctacaggatccaacaggcaatcacagctggcatcttacctttatcacccttgttcctccaacaatcatcagccctattacatcagttacctttggtgcatntattggcacanaacatcagggcacaacaactacaacaacttgtgctagcaaaccttgctgcctactctcagcaacagcagtttcttccattcaaccaactagctgcattgaactctgcttcttatttgcaacaacaacaactaccattc

SEQ ID NO: 320173 - DNA, 430 bp, Zea mays
  unsure (1)..(430): unsure at all n locations
gcgaagcgcactagcaacgacctaacaacaatggctaccaagatattagcgctccttgcgcttcttgccctttttgtgagcgcaacaaatgcgttcattattccacaatgctcacttgctcctagtgccattattccacagttcctcccaccagttacttcaatgggcttcgaacacctagctgtgcaagccaacatgcaacaacaagcgcttgcggcgagcgtcttacaacaaccaattgcccaattgcaacaacaatccttgccacatctaacaatacaagccatcacaacgcaacagcaacaacagttcctaccagcactgagccacctagccatggtgaaccctgccgnctacttgcaagagcagctgcttgcatccaacccacttgctctggcgaacgtagtttgcaaccagcaacaacaacagc

SEQ ID NO: 320174 - DNA, 321 bp, Zea mays
  unsure (1)..(321): unsure at all n locations
agaaagcacaatagtgtaccaacaatggcagccaaaatattttgcttccttatgctccgtggtctttctgcaagtgttgctaccgcaaccattttcccacaatgctcacaagctcctatagcttcccttcttcccccatacctctcaccagcggtgtcttcaatgtgtgaaaccccaattgttcaaccctacaggatccaacaggcaatcgcaacaggcatcttaccattatcacccttgttcctccaacaaccgtcagccctattacagcangttacctttgtccatttggtggcacaaaacatcagggcacaacaacta

SEQ ID NO: 320175 - DNA, 340 bp, Zea mays
caactcgtgctagcaaaccttgctgcctactctcagcaacaacagtttctgccattgaaccgactagctgcattgaactctgctgcttatttgcagcaacaacaactactaccattcagccagctagctgctgcctacccccggcaatttcttccattcaaccaactggcagcattgaactctcatgcttatgtacaacaacaacaactactaccattcagccagctagctgctgtgagccctgctgccttcttgacacagcaacatttgttgccgttctacctgcacactgcgcctaacgttggcaccctcttacaactgcaacaattgctgccattcg

SEQ ID NO: 320176 - DNA, 316 bp, Zea mays
cggacgcgtgggcaactagcaacatataaagcacaatagtgtaccaacaatggcaacgaaagtattctgcttccttatgctccttggtctttctgcaagtgctgctaccgcgaccattttcccgcaatgctcacaagctcctatagcttcccttcttcccccatacctctcaccagcggtgtcttcagtatgtgaaaacccaattcttcaaccctacaggatccaacaggcaatcgcagcaggcatcttacctttatcacccttgttcctccaacaaccgtcagccctattacagcagatacctttggtgcatttg

SEQ ID NO: 320177 - DNA, 361 bp, Zea mays
  unsure (1)..(361): unsure at all n locations
ctctgtcagctgccagcgcctctgcaatgcagatgccctgcccctgcgcggggctgcgagggcttgtacggcgctggcgccggcctgacgacgatgatgggcgccggcgggctgtacccctacgcggagtacctgaggcagccgcagtgcagcccgctggcggcggcgccctactacgccgggtgtgggcagacgagcgccatgtaccagccgctccggcaacagtgctgccagcagcagatgaggatgatggacgtgcagtccgtcgcgcagcagctgcagatgatgatgcagcttgagcgtgccgctgccgncagcagcagcctgtacgagccagctctgatgcagcagcagcagcagc

SEQ ID NO: 320178 - DNA, 68 bp, Zea mays
atggtgaccaaagaacatcatatactgttcagatgtcaataaacgatgatgggtggggtatactgctt

SEQ ID NO: 320179 - DNA, 436 bp, Zea mays
  unsure (1)..(436): unsure at all n locations
gcaacatagaaagcacaatagtgtaccaacaatggcagccaaaatatttggcttccggatgctccttggtctttctgcaagtgctgctaccgcaaccattttcccacaatgctcacaagctcctatagcttcctttcttcccccatacctctcaccagcggtgtcttcagtatgtgaaaacccaattcttcaaccctacaggatccaacaggcaatcgcagcaggcatcttacctttatcacccttgttcctccaacaaccgtcagccctattacagcagttacctttggtgcatttgttggcacaaaacatcaaagcacaacaactacaacaactngtgctaggaaaccttgctgcctactctcagcaacagcagtttcttccattcaaccaactggctgcattgaactctgctgcttatttgcaacaacaacta

SEQ ID NO: 320180 - DNA, 367 bp, Zea mays
  unsure (1)..(367): unsure at all n locations
agaccaactagcaacatagaaagcacaatagtgtaccaacaatggcagccagaatattgtgcctccttatgctccttggtctttctgcaagtgctgctacggcgaccattttcccgcaatgctcgcaagctcctatagcttcccttcttcccccgtacctctcaccagcggtgtcttcggtatgtgaaaacccaattcttcaaccctacaggatccaacaggcaatcacagctggcatcttacctttatcacccttgttcctccaacaatcatcagccctattacatcagttacctttggtgcatttattggcacaaaacatcanggcacaacaactaccaccacctggtgctagcaaaccttgctg

SEQ ID NO: 320181 - DNA, 459 bp, Zea mays
  unsure (1)..(459): unsure at all n locations
gaccaactagcaacatagaaagcacaatagtgtaccaacaatggcagccaagatatttggcctccttatgctccttggtctttctgcaagtgctgctacggcgaccattttcccgcaatgctcgcaagctcctatagcttcccttcttcccccgtacctctcaccagcggtgtcttcggtatgtgaaaacccaattcttcaaccctacaggatccaacaggcaatcacagctggcatcttacctttatcacccttgttcctncaacaatcatcagccctattacatcaggtacccttgggtgcatnaattggcacaaaaacatcagggcccaccacctccaccaacttgtgctagcaaaccttgctgcctactttcagcaacagcagttctttccattcaaccaactagctgcattgaactctgcttcttatttgcaacaacaacaactaccattcagc

SEQ ID NO: 320182 - DNA, 394 bp, Zea mays
cggacgcgtgggttcagaaacacaccattcgaagcacattatcaacaaccgaacaacgatggctaccaagatattatccctccttgcgcttcttgcgctttttgcgagcgcaacaaatgcgttcattattccacaatgctcacttgctccaagttccattattacacagttccttccaccagttacttcaatgggctttgaacacccagctgtgcaagcctataggctacaacaagcaattgctgctagcgtcttacaacaaccaatttatcagttgcaacaactatccttggcacatctaacaatacaaaccatctgaacgcagcatcaacaacaatacttaccactactgaaccacctatccatggtgaaccttgacgccttgcaacagtag

SEQ ID NO: 320183 - DNA, 386 bp, Zea mays
caactagcaacatagaaagcacaatagtgtaccaacaatggcagccaaaatattttgcttccttatgctccttggtcggtctgcaagtgctgctaccgcaaccattttcccacaatgctcacaagctcctatagcttcctttcttcccccatacctctcaccagcggtgtcttcagtatgtgaaaacccaattcttcaaccctacaggatccaacaggcaatcgcagcaggcatcttacctttatcacccttgttcctccaacaaccgtcagccctattacagcagttacctttggtgcatttgttggcacaaaacatcaaggcacaacaactacaacaacttgtgctaggaaaccttgctgcctactctcagcaacagcagtttc

SEQ ID NO: 320184 - DNA, 317 bp, Zea mays
ccaactagcaacatagaaagcacaatagtgtaccaacaatggcagctaaaatgtttggcctccttatgctccttggtctttctgcaagtgctgctacggcgaccattttcccacaatgctcacaagctcctatagcttcccttcttcccccgtacctctcaccaacggtgtcttcggtatgtgaaaacccaattcttcaaccctacaggatccaacaggcaatcgcagctggcatcttacctttatcacccttgttcctccaacaatcatcagccctattacagcagttacctttggtgcatttattggcacaaaac

SEQ ID NO: 320185 - DNA, 299 bp, Zea mays
ctactaccattcagccagctagctggtgtgagccctgctaccttcttgacgcgaccacagttgttgccgttctaccagcacgctgcgcctaacgctggcaccctcttacaactgcaacaattgctgccattcaaccaacttgctttgacaaacccagcagcattctaccaacaacccatcattggtggtgccctcttttagatttcttatgagttatagttcaataataaagttttttgtctgacaaaaagacctattacagaagatacctttggtgcatttgttggcacaaaacaaaa

SEQ ID NO: 320186 - DNA, 279 bp, Zea mays
gtgagaacgtttgggatcagtcacgtgtatctgggattgggatcattatgcgcactggcaggtttgtacatagctgggaatgtggttgagatcaaggggagatcacttgaagagattgagagggagttgagtgtgtcaaagagaggtacttttgctagtgatgctgtggccagggtttgggtatcgagaatgcatccaagcgctgaaccgagcattcttggacctggagactctttgtagttgcatgtagctgttaggaataagcgaacagcaagagta

SEQ ID NO: 320187 - DNA, 294 bp, Zea mays
gcaaaaagctgctacctcaaccattcttcccacaatgctacacaagcctactatagctatcctttcttcccccatacctctcaccagcgacgtcttcagtatgttaaaacccaattcttcaaccctacaggatccaacaagcaatcgcaacacgcatcttacctttatcacccttgttcctccaacaaccgtcagccctattacagcaattacctttgatgcatttgttgccacaaaacatcaaagcacaacaactacaacaacttgtgctaagaaaccttgctgcctactctc

SEQ ID NO: 320188 - DNA, 444 bp, Zea mays
aaaaacacaccaagcgaagcgcactagcaacgacctaacaccaatggctacgaagatattagccctccttgcgcttcttgcccttttagtgagcgcaacaaatgcgttcattattccacagtgctcacttgctcctagtgccagtattccacagttcctcccaccagttacttcaatgggcttcgaacatccagccgtgcaagcctacaggctacaactagcgcttgcggcgagcgccttacaacaaccaattgcccaattgcaacaacaatccttggcacatctaaccctacaaaccattgcaacgcaacaacaacaacaacagtttctgccatcactgagccacctagccgtggtgaaccctgtcacctacttgcaacagcagctgcttgcatccaacccacttgctctggcgaacgtagctgcataccagcaacaacaaca

SEQ ID NO: 320189 - DNA, 299 bp, Zea mays
  unsure (1)..(299): unsure at all n locations
atgagctttatctactccagagcgcagtagaacccgatcgacaccatgagggtgttgcgcgttgccctcgctctcctggctctcgctgcgagcgccacctccacgcatacaagcggcggctgcggctgccagccaccgccgccggttcatctaccgccgccggtgcatctgccacctccggttcacctgccacctccggtgcatctcccaccgccggtccacctgccgccgccggtccacctgccaccgncggtccatgtgccgncgncggttcatctgccgncgncaccatgccacta

SEQ ID NO: 320190 - DNA, 251 bp, Zea mays
gacaaagatacgcgaggctgatccgacctgcatagagatggctaatatcgccgacacggcggcagcggctcctagcatatcggccctgcttagcctagaatgcctgacaaggcgaggtccaacggcaaacgctcatgcacctggaatactggcatgaagtgcaagtgagcccgatctacgcatgccgccaactacacgacccttagctaaccgaccttggcaggcgctatacgcttcgacccgtgccagcg

SEQ ID NO: 320191 - DNA, 311 bp, Zea mays
gtaccgggcacgcgtacgcggacgcgtgggttgttgttcttgctcacattgatttagcatcgggtgtatgttgttcacagactggctggtgcaggtgtgagcaacatcaaaagtcatgagcagtaacatgataaacaacagcatcattcacagaaacaactgcatcgaccatgaccacaacattgcaagcagcagctacaccaacaactacaagttcacatgcaaccacagaaacattagtaacaacaagaagttcatgtctaacagcaacaacaacaaccataacaccagcaccaacaacaacaacgaca

SEQ ID NO: 320192 - DNA, 394 bp, Zea mays
cagctagacccacgcgtccgaacatagaaagcacaatagtgtaccaacaatggcagccaaaatatttagctggcttatgctccttggtctttctgcaagtgctgctaccgcaaccattttcccacaatgctcacaagctcctatagcttcctttcttcccccatacctctcaccagcggtgtcttcagtatgtgaaaacccaattcttcaaccctacaggatccaacaggcaatcgcagcaggcatcttacctttatcacccttgttcctgcaacaaccgtcagccctattacagcagttacctttggtgcatttgttggcacaaaacatcaaggcacaacaactacaacaacttgtgctaggaaaccttgctgcctactctcagcaacagcag

SEQ ID NO: 320193 - DNA, 403 bp, Zea mays
cggacgcgtgggtggacgtcagcctagcaattagctcatcgactccagattggagaactcgacaccatgaaggtgctgatcgttgcccttgctctcctggcgctcgctgcgagcgccgcctccagtacaagcggcggctgtggctgccagacaccaccgtttcatctaccgcctccgttctatatgccgcctccgttctatctgccgccgcagcagcagccgcagccatggcaataccccactcaaccaccgcagctaagcccgtgccagcagttcggatcctgcggcgtcggcagcgtcggcagcccgttcctgggccagtgcgtcgagttcctgaggcaccagtgcagcccggcggcgacgccctacggctcgccacagtgccaggcgctgcagcagcagt

SEQ ID NO: 320194 - DNA, 380 bp, Zea mays
ggaatcccgggtagagcaggcattctaccgaaggacacatgaaacaccactcatcctaacacagaaccagaactaccatggttcacacttgacgtggcccaatatgacgcctttttacggcagcaccgaaagatgacagagacccaacatgctatgatcaacactaccaacattaagcagcatcgcaacgatgacgacgacgtttactcagagagcttatgctagatactgtaggaagaaactcactatacgagcacgcacgacatgcataaccatcaacgagagaagaactatagcacaagcacacagtatcatgagggcatccacgtgaggagcgacactgactcaaagtcttcgccacacttatgctaccactacga

SEQ ID NO: 320195 - DNA, 419 bp, Zea mays
ccaactagcaacatagaaagcacaatagtgtaccaacaatggcagccaaaatattttgcctccttatgctccttggtctttctgcaagtgctgctacggcgaccattttcccgcaatgctcgcaagctcctatagcttcccttcttcccccgtacctctcaccagcggtgtcttcggtatgtgaaaacccaattcttcaaccctacaggatccaacaggcaatcacagctggcatcttacctttatcacccttgttcctccaacaatcatcagccctattacatcagttacctttggtgcatttattggcacaaaacatcagggcacaacaactacaacaacttgtgctagcaaaccttgctgcctactctcagcaacagcagtttcttccattcaaccaactagctgcattgaactct

SEQ ID NO: 320196 - DNA, 425 bp, Zea mays
cccacgcgtccggcacaatagtgtaccaacaatggcagccaaaatattttgcctccttatgctccttggtatttctgcaagtgctgctacggcgaccattttcccgcaatgctcacaagctcctatagcttcccttcttcccccgtacctctcaccagcggtgtcttcggtatgtgaaaacccaattcttcaaccctacaggatccaacaggcaatcgcagctggcatcttacctttatcacccttgttcctccaacaatcatcagccctattacagcagttacctttggtgcatttattggcacaaaacatcagggcacaacaactacaacaacttgtgctagcaaaccttgctgcctactctcagcaacagcagtttcttccattcaaccaactagctgcattgaactctgcttcttatttgc

SEQ ID NO: 320197 - DNA, 415 bp, Zea mays
gagaccaacaagcaacatagaaagtggaatacagtagcaacaatagagcaacaatggctgccaagatattttccatccttatgctccttgctctttctgcatgtgttgctaacgcgaccatttttcctcaatactcacaagctcctatagctgcccttcttaccccataccttccatcaatgaccgcttcagtttgggaaaacccagcccttcaaccctacaggctccaacaagcaatcgcaacaagcaacttacctttatcacccctgttctttcaacaatcgacagccctatctttggtgcagtcattggtacaaaccatcaaggcacaacagctgcaacaactcgtgctaccagtgatcaaccaagtagctctggcaaacctttctccctactctcagcaacaacaatttct

SEQ ID NO: 320198 - DNA, 427 bp, Zea mays
atcgatagcatgggtctgcgaattattgatagctaagaacacaacactggcagccaaggtattctgcttccttatgctccttggtctttctgcaagtgttgctaccgcaaccattttcccacaatgctcacaagctcctatagcttaccttctttccccatacctctcaccagcggagtcttcaatgtgtgaaaacccaattgttcaaccctacaggatccaacaggcaatcgcaacaggcatcttaccattatcacccttgatcctccaacaaccgtcagccctattacagcagttacctttggtccatttggtggcacaaaacatcagggcacaacaactacaacaacttgtgctagcaaaccttgctgcatactctcagcaacatcagtttcttccattcaaccaactggctgcattgaactct

SEQ ID NO: 320199 - DNA, 430 bp, Zea mays
caacatcataaggcatcctcgcgtgcaatacatccaaggcaagggagaaggaacggtacctttgacgtaggtgcaagtgccgagtccgtcagcggacttgccgcccttgcccttgcccttgcccttgcctcccttgccgccgccgtcgtcgccgccagaggagccggccgcctgcttgcccttccccttggcgtccttcggcttcgagtccttgcccatcggagcaactgcgcaaggtcgatcggattacacaggccaaaaccctacttccaagtaagatttggctcagatactaccaccgacgacgacgagtcgacgacgacgggaggaccacgaccacaaagatagatatctggacgcgacgcacgagggccttgatgtagaaggccatatacggccgatgggcccggctcgtctagccagatacttt

SEQ ID NO: 320200 - DNA, 404 bp, Zea mays
  unsure (1)..(404): unsure at all n locations
gcaaagcggcagtgcgtagagaggatcgtcgaacagaacagcatgaagatggtcatcgttctcgtcgtgtgcctggctctgtcagctgccagcgcctctgcaatgcagatgccctgcccctgcgcggggctgcagggcttgtacggcgctggcgccggcctgacgacgatgatgggcgccggcgggctgtacccctacgcggagtacctgaggcagccgcagtgcagcccgctggcggcggcgccctactacgccgggtgtgggcagacgagcgccatgtaccagccgctccggcaacagtgctgccagcagcagatgaggatgatggacgtgcagtccgtcgcgcagcagctgcagatgatgatgcagcttgagcgtgccgctgccgncagcagcagcctgta

SEQ ID NO: 320201 - DNA, 244 bp, Zea mays
gcgacgcatactaatgagacctattagatgcattaaatgcacagtattgatcgacccgagggcatccagaatattcagctaccttatgctgcgcgggcttactgtaggtgtctgatctcagaaacattatctcacaatgttcacacgattatatggattgaattctgctcccatacctctcacaaaacgagtattatatgtgcgaaatcctgattgctacaccctacaagatccaacatgcaat

SEQ ID NO: 320202 - DNA, 421 bp, Zea mays
ctctcaccagcggtgagagcggtctgtgaaaacccaattcttcaaccctacaggatcgaacaggcaatcgcagctggcatcttacctttatcacccttgttcctccaacaatcatcagccctattacagcagttacctttggtgcatttattggcacaaaacatcagggcacaacaactacaacaacttgtgctagcaaaccttgctgcctactctcagcaacagcagtttcttccattcaaccaactagctgcattgaactctgcttcttatttgcaacaacaacaactaccattcagccagctacctgttgcctacccccaacaatttcttccattcaaccaactggcaacattgaactctcctgcttatttacagcagcaacaactactaccattcagccagctagctggtgtgagcc

SEQ ID NO: 320203 - DNA, 418 bp, Zea mays
ctagcaacatagaaagcacaatagtgtaccaacaatggcagccaaaatattttgctggcttatgctccttggtctttctgcaagtgttgctaccgcaaccattttcccacaatgctcacaagctcctatagcttcccttcttcccccatacctctcaccagcggtgtcttcaatgtgtgaaaccccaattgttcaaccctacaggatccaacaggcaatcgcaacaggcatcttaccattatcacccttgttcctccaacaaccgtcagccctattacagcagttacctttggtccatttggtggcacaaaacatcagggcacaacaactacaacaacttgtgctagcaaaccttgctgcatactctcagcaacatcagtttcttccattcaaccaactggctgcattgaactctgct

SEQ ID NO: 320204 - DNA, 287 bp, Zea mays
acgcgtagctgacatttagacctactatttacatttcaagcacagcattgatccaaccgggacggccaaactaaacagcttccttatgctcctcgatctaaccgcaactgctactactcaaaccattagtccactatgttcacaaaattctatagattgaattcttcctccatacctgtaacaagacaactatcatatatgcgaaatcctgattgctcaaccctacaagatcctacattcaatcgaatcacgcatattaacattatcacccatgttcctccaacaac

SEQ ID NO: 320205 - DNA, 412 bp, Zea mays
gcgacatagaaagcacaatagtgtaccaacaatggcagccaaaatatttggcttccggatgctggttggtctttctgcaagtgctgctaccgcaaccattttcccacaatgctcacaagctcctatagcttcctttcttcccccatacctctcaccagcggtgtcttcagtatgtgaaaacccaattcttcaaccctacaggatccaacaggcaatcgcagcaggcatcttacctttatcacccttgttcctccaacaaccgtcagccctattacagcagttacctttggtgcatttgttggcacaaaacatcaaggcacaacaactacaacaacttgtgctaggaaaccttgctgcctactctcagcaacagcagtttcttccattcaaccaactggctgcattgaactct

SEQ ID NO: 320206 - DNA, 425 bp, Zea mays
aacaagcaacatagaaagtggaatccattagcaacaacagagcaacaatggcgaccaagatatgtgtccctccttatgctccttgctctttctgcatgtgttgctaacgcgacaattttccctcaatgctcacaagctcctatagcttcccttcttcccccataccttccatcaatgatagcttcagtatgtgaaaacccagctcttcagccctataggctccaacaagcaatcgcagcaagcaacatacctttatcacccttgttgtttcaacaatcgccagccctatctttggtgcagtcattggtacaaaccatcagggcacagcagctgcagcaactcgtgctacctgtgatcaaccaagtagctctggcaaacctttctccctactctcagcaacaacaatttcttccattcaaccaact

SEQ ID NO: 320207 - DNA, 306 bp, Zea mays
  unsure (1)..(306): unsure at all n locations
gcaacatagaaagcacaatagtgtaccaacaatggcagccaaaatattttgcttcctgatgctccttggtctttctgcaagtgctgctaccgcaaccattttcccacaatgctcacaagctcctatagcttcctttcttcccccataccttgttaccagcggtgtcttcagtatgtgaaaacccaattcttcaaccctacaggatccaacaggcaatcgcagcaggcatcttacctttatcacccttgttcctacaacaaccgtcagccctattacagcagntaccttnggtgcatttgttggcac

SEQ ID NO: 320208 - DNA, 427 bp, Zea mays
attttgagcattcagaaacacacctagcgaagcgcactagcaacgacctaacaacaatggcttccaagacattatccctccttgcgcttcttgccctttttgtgagtgcaacaaatgcgttcattattccacaatgctcacttgctccgagtgccattattccacagttcctccctccagttacttcaatgggcttcgaacacccagctgtgcaagcctataggctacaacaagcgcttgcggcgagcgtcttagaacaaccaattgcccaattacaacaacaatccttggcacatctaaccatacaaaccatcgcaacgcagcagcaacaagcactgagccacctagccgtggtgaaccctatcgcctacttgcaacaacagctgcttgcatccaacccacttgctttggcaaacgtagctgcata

SEQ ID NO: 320209 - DNA, 383 bp, Zea mays
gaaagcacaatagtgtaccaacaatggcagccaaaatattttgcttccttatgctccttggtctttctgcaagtgctgctaccgcaaccattttcccacaatgctcacaagctcctatagcttcctttcttcccccatacctctcaccagcggtgtcttcagtatgtgaaaacccaattcttcaaccctacaggatccaacaggcaatcgcagcaggcatcttacctttatcacccttgttcctccaacaaccgtcagccctattacagcagttacctttggtgcatatgttggcacataacatcaaggcacatcaactacaacaacttgtgctaggaaaccatgatgcctactctgaacaacagcaggtggtaccattcaac

SEQ ID NO: 320210 - DNA, 239 bp, Zea mays
ggaacctgcggcgttggcagcaccccgatcctgggccagtgcgtcgagttcctgaggcatcagtgcagcccgacggcgacgccctactgctcgcctcagtgccagtcgttgcggcagcagtgttgccagcagctcaggcaggtggagccgcagcaccggtaccaggcgatcttcggcttggtccttcagtccatcctgcagcagcagccgcaaagcggccaggtcgcggggcttgtggc

SEQ ID NO: 320211 - DNA, 418 bp, Zea mays
caactagcaacatagaaagcacaatagtgtaccaacaatggcagccaaaatattttgcctccttatgctccttggtctttctgcaagtgctgctacggcgaccattttcccgcaatgctcgcaagctcctatagcttcccttcttcccccgtacctctcaccagcggtgtcttcggtatgtgaaaacccaattcttcaaccctacaggatccaacaggcaatcgcagctggcatcttacctttatcacccttgttcctccaacaatcatcagccctattacaacagttacctttggtgcatttattggcacaaaacatcagggcacaacaactacaacaacttgtgctagcaaaccttgctgcctactctcagcaacagcagtttcttccattcaaccaactaggttcattgaactct

SEQ ID NO: 320212 - DNA, 400 bp, Zea mays
cagcattcaaaaacacaccaagcgaagcgcactagcaacgacctaacaccaatggctaccaagatattagccctccttgcgcttcttgcccttttagtgagcgcaacaaatgcgttcattattccacagtgctcacttgctcctagtgccattattccacagttcctcccaccagttacttcaatgggcttcgaacatccagccgtgcaagcctacaggctacaactagcgcttgcggcgagcgccttacaacaaccaattgcccaattgcaacaacaatccttggcacatctaaccctacaaaccattgcaacgcaacaacaacaacaacaacagtttctgccatcactgagccacctagccgtggtgaaccctgtcacctacttgcaacagcagctgc

SEQ ID NO: 320213 - DNA, 251 bp, Zea mays
agcatgcacaggactgagcaacttagcaacccattataactttcctccatatgccactactatgtgccaatgagacagctaacactacgatttttgcgcattgatcacaatctcctaaaacgtatcttcttacacagtaactactaccatcatagagactagcttgaaaaaaccaaactctaaaatcctacaaaatccaactaacattcgcacatgcaatcttacatgcttcaactatcgaactccaacaa

SEQ ID NO: 320214 - DNA, 424 bp, Zea mays
gtgaaaacccagcccttcaaccctacaggatccagcaagcaatcgcaacaagcaactgacctttatcacacctgttctttcaacaatcgccagccctatctttggtgcagtcattggtacaaaccatcagggcagaacagttgcagcaactcgtgctaccagtgatcagccaagtagctctggcaaacctttccccctactctcagcaacaacaatttcttccattcaaccaactgtctatactgaaccctgctgcttatttgcagcaacaacaactactaccattcagccagctagctactgcctactctcagcagcaacaatttcttccatttaaccaattggccgcactgaacccctctgcttatttccagcagcaaatactactaccatttggccagctagctacaacaagcccggtttc

SEQ ID NO: 320215 - DNA, 361 bp, Zea mays
gaccaactagcaacatagaaagcacaatagtgtaccaacaatggcagccaaaatatggtgcctccttatgctccttggtctttctgcaagtgctgctacggcgaccattttcccacaatgctcacaagctcctatagctttccttcttcccccgtacctctcaccagcggtgtcttcggtatgtgaaaacccaattctttaaccctataggatccaacaggcaatcgcagctggcatcttacctttatcacccttggtccttcaacaatcatcagccctattacagcagttacctttggtgcatttattggcacaaaacatcagggcacaacaactacaacaacttgtgctagcaaacctt

SEQ ID NO: 320216 - DNA, 415 bp, Zea mays
cccaattcttcaaccctacaggatccaacaggcaatcgcagctggcatcttaccttgatcaccgttgttcctccaacaatcatcagccctattacaacagttacctttggtgcatttattggcacaaaacatcagggcacaacaactacaacaacttgtgctagcaaaccttgctgcctactctcagcaacagcagtttcttccattcaaccaactaggttcattgaactctgcttcttatttgcaacaacaacaactaccattcagccagctacctgctgcctacccccagcaatttcttccattcaaccaactagcagcattgaactctcctgcttatttacagcagcaacaactactaccattcagccagctagctggtgtgagccctgctaccttcttgacacaaccacag

SEQ ID NO: 320217 - DNA, 421 bp, Zea mays
  unsure (1)..(421): unsure at all n locations
agaccattagctttatctactccagagcgcagaagaacccgatcgacaccatgagggtgttgctcgttgccctcgctctcctggctctcgctgcgagcgccacctccacgcatacaagcggcggctgcggctgccagccaccgccgccggttcatctaccgccgccggtgcatctgccacctccggttcacctgccacctccggtgcatctcccaccgccggtccacctgccgccgccggtccacctgccaccgtcggtccatgtgccgccgtcggttcatctgccgccgccaccatgccactaccctactcaaccgncccggcctcagcctcatccccagccacacccatgcccgtgccaacagccgcatccaagcccgtgccagctgcagggaacctgcggcgttggcagcaccccgat

SEQ ID NO: 320218 - DNA, 175 bp, Zea mays
gaactctcctgcttatttacagcagcttcaactactaccattcagccagctagctggagtaaggttggctatctaacaattataaccactattacaacagttactatcaggagcatttattgtaacataacatcactgttacaactactacaacaacttgcactacaaaaacttg

SEQ ID NO: 320219 - DNA, 421 bp, Zea mays
gaccaactagcaacatagaaagcacaatagtgtaccaacaatggcagccaaaatatggtgcttccttatgctccttggtctttctgcaagtgctgctaccgcaaccattttcccacaatgctcacaagctcctatagcttcctttcttcccccatacctctcaccagcggtgtcttcagtatgtgaaaacccaattcttcaaccctacaggatccaacaggcaatcgcagcaggcatcttacctttatcacccttgttcctccaacaaccgtcagccctattacagcagttacctttggtgcatttgttggcacaaaacatcaaggcacaacaactacaacaacttgtgctaggaaaccttgctgcctactctcagcaacagcagtttcttccattcaaccaactggctgcattgaactct

SEQ ID NO: 320220 - DNA, 312 bp, Zea mays
gaactctcctgcttatttacagcagcaacaactactaccattcagccagctagctggtgtgagccctgctaccttcttgatacaaccacagttgttgccgttctaccagcacgctgcgcctaacgctggcaccctcttacaactgcaacaattgctgccattcaaccaacttgctttgacaaacccagcagcgttctaccaacaacccatcattggtggtgccctcttttagatttcttatgagttatagttcaataataaagttttttgtctgatgtttgtggcttcccagaaataagaaagtacatttct

SEQ ID NO: 320221 - DNA, 275 bp, Zea mays
acggctgctcgtgcggtgtgctcgtgagctcttgattcgataacgctgatggtagctatcgttgggttctgatgactacctgtcataccgcgaacgcagacgacgacggccgtgttctgctgctgtgctcttgctacaccggctgcgagcttgactgcgacccttctaatggggccaagttcgtgtacagcagctccgtcggtccagaccactggggcgccctgagcgccagcttcaggcagtgcgccacatggacgaagcagtccacgatcgac

SEQ ID NO: 320222 - DNA, 434 bp, Zea mays
caaaaacacaccaagcgaagcgcactagcaacgacctaacaccaatggctaccaagatattagccctccttgcgcttcttgcccttttagtgagcgcaacaaatgcgttcattattccacagtgctcacttgctcctagtgccattattccacagttcctcccaccagttacttcaatgggcttcgaacatccagccgtgcaagcctacaggctacaactagcgcttgcggcgagcgccttacaacaaccaattgcccaattgcaacaacaatccttggcacatctaaccctacaaaccattgcaacgcaacaacaacaacaacaacagtttctgccatcactgagccacctagccgtggtgaaccctgtcacctacttgcaacagcagctgcttgcatccaacccacttgctctggcgaacgtagctgcatac

SEQ ID NO: 320223 - DNA, 418 bp, Zea mays
ccagcaagcaacatagaaagtagaatccattagcaacaatagagcaacaatggcgacgaagatattttccctccttatgctccttgctctttctacatgtgttgctaacgcgacaattttccctcaatgctcacaagctcctatagcttcccttcttcccccataccttccatcaattatagcttcagtatgtgaaaacccagctcttcaaccatataggcttcaacaagcaatcgcagcaagcaacatacctttatcgcccttgttgtttcaacaatcaccagccctatctttggtgcagtcattggtacaaaccatcagggcacaacagctgcagcaactcgtgctacctgtgatcaaccaagtagctctggcaaacctttctccctactctcagcaacaacaatttcttccattc

SEQ ID NO: 320224 - DNA, 401 bp, Zea mays
gtgcagcattggtacaaaccatcagggcacaacagctgcaacaactcgtgctaccagtgatcggccaagtagctctggcaaacctttctccctactctcacaacaacaatttcttccattcaaccaactgtctacactgaaccctgctgcttatttacaacaacaacaactactaccattcagccagctagctactgcctactctcagcagcaacaatttcttccatttaaccaattggccgcactgaacccctctgcttatttccagcagcaaatactactaccatttggccagctagctacaacaagccccacttcctttttgaaacaacaacaattgcttccgttctaccagcagtttgtggctaacctcgcaaccctcttacaactgcaacagttgc

SEQ ID NO: 320225 - DNA, 428 bp, Zea mays
aaagcacaatagtgtaccaacaatggcagccaaaatattttgcctccttatgctccttggtctgtctgcaagtgctgctacggcgaccattttcccgcaatgctcgcaagctcctatagcttcccttcttcccccgtacctctcaccagcggtgtcttcggtatgtgaaaacccaattcttcaaccctacaggatccaacaggcaatcacagctggcatcttacctttatcacccttgttcctccaacaatcatcagccctattacatcagttacctttggtgcatttattggcacaaaacatcagggcacaacaactacaacaacttgtgctagcaaaccttgctgcctactctcagcaacagcagtttcttccattcaaccaactagctgcattgaactctgcttcttatttgcaacaacaacaac

SEQ ID NO: 320226 - DNA, 385 bp, Zea mays
gcctagcaattagctcatcgactccagattggagaactcgacaccatgaaggtgctgatcgttgcccttgctctcctggcgctcgctgcgagcgccgcctccagtacaagcggcggctgtggctgccagacaccaccgtttcatctaccgcctccgttctatatgccgcctccgttctatctgccgccgcagcagcagccgcagccatggcaataccccactcaaccaccgcagctaagcccgtgccagcagttcggatcctgcggcgtcggcagcgtcggcagcccgttcctgggccagtgcgtcgagttcctgaggcaccagtgcagcccggcggcgacgccctacggctcgccacagtgccaggcgctgcagcagcagtgct

SEQ ID NO: 320227 - DNA, 313 bp, Zea mays
aatattttgagcattcagaaacacaccaagcgaagctacctagcaacgacttaacaacaatggctaccaagatattagccctccttgcgcttcttgccctttttgtgagcgcaacaaatgcgttcattattccacaatgctcacttgctcctagtgccattataccacagttcctccgaccagttacttcaatgggcttcgaacacctagctgtgcaagcctacaggctacaacaagcgcttgcggcgagcgtcttacaacaaccaattaaccaattgcaacaacaatccttggcacatctaaccatacaaac

SEQ ID NO: 320228 - DNA, 401 bp, Zea mays
cggacgcgtgggttttgcgagcgcaacaaatgcgttcattattccacaatgctcacttgctccaagttccattattacacagttcctcccaccagttacttcaatgggcttcgaacacccagctgtgcaagcctataggctacaacaagcaattgcggcgagcgtcttacaacaaccaatttcccagttgcaacaacaatccttggcacatctaacaatacaaaccatcgcaacgcaacagcaacaacaattcctaccagcactgagccacctagccatggtgaaccctgccgcctacttgcaacagcagttgcttgcatcaaacccacttgctctggcaaacgtagttgcaaaccagccacaacaacaggtggaacagtttctgccagcgctcaatcaac

SEQ ID NO: 320229 - DNA, 414 bp, Zea mays
gcaacatagaaagcacaatagtgtaccaacaatggcagccaaaatattttgcctgcttatgctccttggtctttctgcaagtgctgctacggcgaccattttcccacaatgctcacaagctcctatagcttcccttcttcccccgtacctctcaccagcggtgtcttcggtatgtgaaaacccaattcttcaaccctataggatccaacaggcaatcgcagctggcatcttacctttatcacccttgttcctccaacaatcatcagccctattacagcagttacctttggtgcatttattggcacaaaacatcagggcacaacaactacaacaacttgtgctagcaaaccttgctgcctactctcagcaacaacagtttcttccattcaaccaactagctgcattgaactctgc

SEQ ID NO: 320230 - DNA, 405 bp, Zea mays
cttgccctttttgtgagcgcaacaaatgcgttcattattccacaatgctcacttgcgcctagtgccattattccacagttcctccctccagttacttcaatgggcttcgaacacccagctgtgcaagcctacaggctacaacaagcgcttgcggcgagcgtcttacaacaaccaattgcccaattacaacaacaatccttggcacatctaaccatacaaaccatcgcaacgcaacagcaacaacaatttctaccagcactgagccaactagctgtggtgaaccctgtcgcctacttgcaacagcagttgcttgcatccaacccacttgctctggcaaacatagttgcataccaacaacaacaacaattgcaacagtttctaccagcgctcagtcaactagccatg

SEQ ID NO: 320231 - DNA, 410 bp, Zea mays
cttcaacaagcaatcgcagcaagcaacatacctttatcgcccttgttgtttcaacaagcgccagccctatctttggtgcagtcattggtacaaaccatcagggcacaacagctgcagcaactcgtgctacctctgatcaaccaagtagctctggcaaacctttctccctactctcagcaacaacaatttcttccattcaaccaactgtctacactgaaccctgctgcttatttgcagcaacaactattaccatttagccagctagctactgcctactctcagcaacaacaacttcttccatttaaccaattggccgcactgaaccccgctgcttatttgcagcagcaaatactactaccatttagccagctagctgcagcaaaccgtgcttccttcttgacacagcaaca

SEQ ID NO: 320232 - DNA, 404 bp, Zea mays
cgctctcctggctctcgctgcgagcgccacctccacgcatacaagcggcggctgcggctgccagccaccgccgccggttcatctaccgccgccggtgcatctgccacctccggttcacctgccacctccggtgcatctcccaccgccggtccacctgccgccgccggtccacctgccaccgccggtccatgtgccgccgccggttcatctgccgccgccaccatgccactaccctactcaaccgccccggcctcagcctcatccccagccacacccatgcccgtgccaacagccgcatccaagcccgtgccagctgcagggaacctgcggcgttggcagcaccccgatcctgggccagtgcgtcgagtttctgaggcatcagtgcagcccgacggcgacgccct

SEQ ID NO: 320233 - DNA, 395 bp, Zea mays
aggcgatcattctgaataccatgaggcttgcactgtcgacgacctatctcctatgggggcccagagattatccctccttgcgcttcttgcccttttagtgagcgcaacaaatgcgttcattattccacagtgctcacttgctcctagtgccagtattccacagttcctcccaccagttacttcaatgggcttcgaacatccagccgtgcaagcctacaggctacaactagcgcttgcggcgagcgccttacaacaaccaattgcccaattgcaacaacaatccttggcacatctaaccctacaaaccattgcaacgcaacaacaacaacaacagtttctgccatcactgagccacctagccgtggtgaacccttgcacctacttgcaacagcagc

SEQ ID NO: 320234 - DNA, 422 bp, Zea mays
attttcagcattcaaaaacacaccaagcgaagcgcactagcaacgacctaacaccaatggctaccaagatattagccctccttgcgcttcttgcccttttagtgagcgcaacaaatgcgttcattattccacagtgctcacttgctcctagtgccattattccacagttcctcccaccagttacttcaatgggcttcgaacatccagccgtgcaagcctacaggctacaactagcgcttgcggcgagcgccttacaacaaccaattgcccaattgcaacaacaatccttggcacatctaaccctacaaaccattgcaacgcaacaacaacaacaacaacagtttctgccatcactgagccacctagccgtggtgaaccctgtcacctacttgcaacagcagctgcttgcatccaacccactt

SEQ ID NO: 320235 - DNA, 170 bp, Zea mays
cgctctcctggcactcgatgcttagcgtttactaacacacatacttgcacacgggtgctgtagatatccacatcctacgtgtgatcaacgtccttctactaatctgccaaaattggttcacaattcaaataagctgcatcgctcatcgtgccattatctcacaactcctc

SEQ ID NO: 320236 - DNA, 164 bp, Zea mays
cgacccacgcgtaccgatgcattattatgaagtaaatgaggctttgtctgttgttgctatagctaatcagaggcttcttggtatcccttccggaaagctaaacttaatgcgaggcgctgactgccagcatcatcctatacagagcacaaggcgcacagattata

SEQ ID NO: 320237 - DNA, 437 bp, Zea mays
ttcagcattcaaaaacacaccaagcgaagcgcactagcaacgacctaacaccaatggctaccaagatattagccctccttgcgcttcttgcccttttagtgagcgcaacaaatgcgttcattattccacagtgctcacttgctcctagtgccagtattccacagttcctcccaccagttacttcaatgggcttcgaacatccagccgtgcaagcctacaggctacaactagcgcttgcggcgagcgccttacaacaaccaattgcccaattgcaacaacaatccttggcacatctaaccctacaaaccattgcaacgcaacaacaacaacaacagtttctgccatcactgagccacctagccgtggtgaaccctgtcacctacttgcaacagcagctgcttgcatccaacccacttgctctggcgaacgtagctgca

SEQ ID NO: 320238 - DNA, 386 bp, Zea mays
caactagcaacatagaaagcacaatagtgtaccaacaatggcagccaaaatattttgcttcctgatgctccttggtctttctgcaagtgttgctaccgcaaccattttcccacaatgctcacaagctcctatagcttcccttcttcccccatacctctcaccagcggtgtcttcaatgtgtgaaaccccaattgttcaaccctacaggatccaacaggcaatcgcaacaggcatcttaccattatcacccttgttcctccaacaaccgtcagccctattacagcagttacctttggtccatttggtggcacaaaacatcagggcacaacaactacaacaacttgtgctagcaaaccttgctgcatactctcagcaacatcagtttc

SEQ ID NO: 320239 - DNA, 428 bp, Zea mays
agatattgatggcgatgttggtggacccacctgacatcaagagggagatgcagatggagatgcagcccgcaccaccaccatctgctgcggcgtcggcatcgcagacggcgtggccgctggattggccggtggacgggcgctcgctcaatcctccatcgctgcccactatatcagtccagtgtttggactggaatgcgcacagtctgttactttgatggcaaaacgtatgaattggttggacagagccgccaacgaagtaccatgggtaaggatgtgctggacaatgaaagcttttgtcttataacaataggatacaagaagcttgcaagtggttttgtgaaggcttttgtgaatcacttgaatcattagttcttttaagaatggttttgtatagcgttagcaaatatgtgtaaaacacattaagatgt

SEQ ID NO: 320240 - DNA, 265 bp, Zea mays
attgagaccaacaagcaacatagaaagtggaatccagtagcaacaatagagcaacaatggcgaccaagatattttccctccttatgctccttgctctttctacatgtgttgctaacgcgacaattttccctcaatgctcacaagctcctatagcttcccttcttcccccataccttccatcaattatagcttcaatatgtgaaaacccagctcttcaaccatataggcttcaacaagcaatcgcagcaagcaacatacctttatc

SEQ ID NO: 320241 - DNA, 419 bp, Zea mays
cccacgcgtccggggtcttcagaccattagctttatctactccagagcgcagaagaacccgatcgacaccatgagggtgttgctcgttgccctcgctctcctggctctcgctgcgagcgccacctccacgcatacaagcggcggctgcggctgccagccaccgccgccggttcatctaccgccgccggtgcatctgccacctgcggttcacctgccacctccggtgcatctcccaccgccggtccacctgccgccgccggtccacctgccaccgccggtccatgtgccgccgccggttcatctgccgacggcaccatgccactaccctactcaaccgacccggcctcagcctcatccccagccacacccatgcccgtgccaacagccgcatccaagcccgtgccagctgcagggaacct

SEQ ID NO: 320242 - DNA, 415 bp, Zea mays
caactagcaacatagaaagcacaatagtgtaccaacaatggcagccaaaatattttgcctccttatgctccttggtctttctgcaagtgctgctacggcgaccattttcccgcaatgctcgcaagctcctatagcttcccttcttcccccgtacctctcaccagcggtgtcttcggtatgtgaaaacccaattcttcaaccctacaggatccaacaggcaatcgcagctggcatcttacctttatcacccttgttcctccaacaatcatcagccctattacaacagttacctttggtgcattaattggcacaaaacatcagggcacaacaactacaacaacttgtgctagcaaaccttgctgcctactctcagcaacagcagtttcttccattcaaccaactaggttcattgaac

SEQ ID NO: 320243 - DNA, 405 bp, Zea mays
acatagaaagtggaatccagtagcaacaacagagcaacaatggcgagcaagatattttccctccttatgctccttgctctttctgcatgtgttgctaacgcgacaattttccctcaatgctcacaagctcctatagcttcccttcttcccccataccttccatcaatgatagcttcagtatgtgaaaacccagctcttcagccctataggctccaacaagcaatcgcagcaagcaacatacctttatcacccttgttgtttcaacaatcgccagccctatctttggtgcagtcattggtacaaaccatcaaggcacagcagctgcagcaactcgtgctacctgtgatcaaaccagtaactctggcaaacctttctccctactctcagcaaccacaatttcttcca

SEQ ID NO: 320244 - DNA, 412 bp, Zea mays
gaaagcacaatagtgtaccaacaatggcagccaaaatattttgcctacttatgctccttggtctttctgcaagagctgctaccgcgaccattttaccgcaatgctcgcaagctcctatagcttcccttcgttccaccatacctatcaccagcggcgtcttctgtatgtgaaaacccaattcttcaaccctacaggatccaacatgcaatcacagctggcatcttacctttatcacccttgttcctacaacaatcatgatgcctattacatcaattacctatagagcatttattggcacaaaacatcagggcacaacaactacaacaactagcgctagcaaacctttgttgatactctcagcaacatcagattcatgcattcaaccaactagctgcattgaactctgcttctt

SEQ ID NO: 320245 - DNA, 417 bp, Zea mays
agttacctttggtgcatttattggcacaaaacatcagggcacaacaactacaacaggtggggctagcaaaccttgctgcctactctcagcaacagcagtttcttccattcaaccaactagctgcattgaactctgcttcttatttgcaacaacaacaactaccattcagccagctacctgctgcctacccccagcaatttcttccattcaaccaactggcagcattgaactctcctgcttatttacagcagcaacaactactaccattcagccagctagctggtgtgagccctgctaccttcttgatacaaccacagttgttgccgttctaccagcacgctgcgcctaacgctggcaccctcttacaactgcaacaattgctgccattcaaccaacttgctttgacaaacccagcag

SEQ ID NO: 320246 - DNA, 425 bp, Zea mays
aaaccttgctgcctactctcagtaacttcagtttcttccattcaaccaactaggtgggttgaactctgcttcttatttgcaacaacaacaactaccattcagccagctacctgttgcctacccccaacaatttcttccattcaaccaactggcagcattgaactctcctgcttatttacagcagcaacaactactaccattcagccagctagctggtgtgagccctgctaccttcttgacacaaccacagttgttgccgttctaccatcacgctgcgcctaacgctggcaccctcttacaactgcaacaattgctgccattcaaccaacttgctttgacaaacctagcagtgttctaccaacatcccatcattggtggtgccctcttttagatttcttatgagttatagttcaataataaagttt

SEQ ID NO: 320247 - DNA, 393 bp, Zea mays
  unsure (1)..(393): unsure at all n locations
cctgggtcgtcagaccattagcttgatctactccagagcgcagaagaacccgatcgagaccgggagggtgttgctcgtggccctcgctctcctggctctcgctgcgagcgccacctccacgcatacaagcggcggctgcggctgccagccaccgccgccggttcatctaccgccgccggtgcatctgccacctccggttcacctgccacctgcggtgcatatcccaccgccggtccacctgccgccgccggtccacctgccaccgtcggtccatgtgccgncgccggttcatctgccgtcgncaccatgccactaccctactcaaccgtcccggactcagcctcatgcccagccacacccatgcccgtgccaacagacgcatccaaacccgtg

SEQ ID NO: 320248 - DNA, 388 bp, Zea mays
aacacaccaagcgaagcgcactagcaacaacctaacaacaatggctaccaagatatggtccctccttgcgcttcttgcgctttttgcgagcgcaacaaatgcgtccattattccacaatgctcacttgctcctagttccattattccacagttcctcccaccagttacttcaatggccttcgaacacccagctgtgcaagcctataggctacaacaagcgattgcggcgagcgtcttacaacaaccaattgcccaattgcaacaacaatccttggcacatctaacaatacaaaccatcgcaacgcaacagcaacaacagttcctaccagcactgagccacctagccatggtgaaccctgtcgcctacttgcaacagcagctgcttgca

SEQ ID NO: 320249 - DNA, 275 bp, Zea mays
aggctctgaatcaacccttgatagcctgatacatacgcacacagtagcgggaacgggtcgtctatgccatactgacgaccatgtgggcaaaagtatcttaaaacgaccacagactgaaacaagcaccagcgtctaaaacatgatcataggaccatacaagatgctttggtacagcgaacagactgaaatcctcatattatatggacctgtcaagattacaaactgcttacgatcttacccatgagatgactcatgcatatgtgcgtatcaaaaga

SEQ ID NO: 320250 - DNA, 354 bp, Zea mays
catcggatggcatgctatcgacacccatgccgcgcgtggcgagcagaacacccccaaggggggaggactgagactgaccatgggagacgcctgcagcgacgctgcagctgcgggccagcagctgacgcaggacgaagatggcggacgacgagggcgtcacgcggagaaggagctcgtacgtgacccaataacccacgactacggatgatcgagcaagctgtactaggacctgccagcgacgccgatgatggcgctcaaccacatctctcgcctgtgcgaatccgtagacgcgtccgtccggttctacgtgaaggcgctcggctctgcgctcatccaggcgccgcaagcgctcga

SEQ ID NO: 320251 - DNA, 413 bp, Zea mays
  unsure (1)..(413): unsure at all n locations
caagcaacatagaaagtggaatccagtatcaacaatagagcaacaatggcgaccaagaggtggtccctccttatgctccttgctctttctacatgtgttgctaacgcgacaattttccctcaatgctcacaagctcctatagcttcccttcttcccccataccttccatcaattatagcttcaatatgtgaaaacccagctcttcaaccatataggcttcaacaagcaatcgcagcaagcaacatacctttatcgcccttgttgtttcaacaatcgccagccctatctttggtgcagtcattggtacaaaccatcagggcacaacagctgcagcaactcgtgctacctctgatcaaccaagtagctctggcaaacctttctncctactctcagcaacaacaatttcttccatt

SEQ ID NO: 320252 - DNA, 204 bp, Zea mays
ctcaagcaacacatccggcgacgcgcactcaccacgacctgacatctacggctaccacgatattaccccgacgggcgctaatagacctttcatcgatctcatcataggcgtttatgattccacagttctcactagcatctagtgccattactccacagctcctatcactagccactttaatgggctcctaacatccatgagcgc

SEQ ID NO: 320253 - DNA, 413 bp, Zea mays
gcaacataaaaagaaaaatcacaatatcactaataaagcaacaatgacaaccaagagataggccctacttatgctccttgactctttctacatgtgttgctaacgcgacaattttccctcaatgctcacaagctcctatagcttcccttcttcccccataccttccatcaattatagcttcaatatgtgaaaacccagctcttcaaccatataggcttcaacaagcaatcgcagcaagcaacatacctttatcgcccttgttgtttcaacaatcgccagccctatctttggtgcactcattggtacaaaccatcagggcacaacagctgcagcaactcgtgctacctatgatcaaccaagtagctctggcaaacctttctccctactttcagctacaacaatttcttccattc

SEQ ID NO: 320254 - DNA, 421 bp, Zea mays
gcaacatataaagcacaatagtgtaccaacaatggcagccaaaatattttgcttcgttatgctccttggtctttctgcaagtgctgctaccgcaaccattttcccacaatgctcacaagctcctatagcttcctttcttcccccatacctctcaccagcggtgtcttcagtatgtgaaaacccaattcttcaaccctacaggatccaacatgcaatcgcagcaggcatcttacctttatcacccttgttcctccaacaaccgtcagccctattacagcagttacctttggtgcatttgttggcacagaacatcaaggcacaacaactacaacaacttgtgctaggaaaccttgctgcctactctcagcaacagcagtttcttccattcaaccaactggctgcattgaactctgctgcttat

SEQ ID NO: 320255 - DNA, 214 bp, Zea mays
attgagaccaactagcaacatataaagcacaatagtgtaccaacaatggcaggcaagatattttgcttccttatgctccttggtctttctgcaagtgctgctaccgcaaccattttcccacaatgctcacaagctcctatagcttcctttcttcccccatacctctcaccagcggtgtcttcagtatgtgaaaacccaattcttcaaccctaca

SEQ ID NO: 320256 - DNA, 165 bp, Zea mays
aaaccggctcaacttcaaccctctttttttaccatatatctttcaaatcctacggccgttaccatttatcggcagcaatttacgccatacataccagccatcgaggtcctatgacaactcaatcgaccgagcaacgcgtccgcaacagaggtcaaaccctcttct

SEQ ID NO: 320257 - DNA, 387 bp, Zea mays
cggacgcgtgggttgcgcttcttgccctttttgtgagtgcaacaaatgcgttcattgttggacaatgctcacttgctccgagtgccattattccacagttcctccctccagttacttcaatgggcttcgaacacccagctgtgcaagcctataggctacaacaagcgcttgcggcgagcgtcttagaacaaccaattgcccaattacaacaacaatccttagcacatctaaccatacaaaccatcgcaacgcagcagcaacaagcactgagccacctagccgtggtgaaccctatcgcctacttgcaacaacagctgcttgcatccaacccacttgctttggcaaacgtagctgcataccaacaacaacaacagttgcaacagtttc

SEQ ID NO: 320258 - DNA, 349 bp, Zea mays
actcggatttgaattctcgactcaacccacgcgtcctcagcaactacaaccacaacacttatattaacatcaacaacaacagcaacaacggcaggattaatgtataggccaacaactacatcaccaactatcacaaggccatgttcatcaacacgaacagagccatgagcaccaccaatgtcagatccattatcaacaacattaacatcaatttacagtgctcaatgaccatgcattcaacatactacaatatcctcaacaatatgatcaatactagtaataatcacaacagcaacaatgacattgacagtagcaccatcatatctacaatgtcagctattactactat

SEQ ID NO: 320259 - DNA, 364 bp, Zea mays
acgccagcaagcaacatataacgtcagaatccattaccaacaatagagcaacaatggcgagcaagatgattttccctccttatgctccttgctctttctacatgtgttgctaacgcgacaattttccctcaatgctcacaagctcctatagcttcccttcttcccccataccttccatcaattatagcttcagtatgtgaaaacccagctcttcaaccatataggcttcaacaagcaatcgcagcaagcaacatacctttatcgcccttgttgtttcaacaatcaccagccctatctttggtgcactcattggtacaaaccatcaaggcacaacagctgcagcaactcgtgctacctgtgatca

SEQ ID NO: 320260 - DNA, 430 bp, Zea mays
tcggagcgagcgcagcaaatgcgatcattattacacagagctcacttgctcctagtgccaggatggcacagttcctaccaccagttacttcaatgggcttcgaacatccagccgtgcaagcctacaggctacaactagcgcttgcggcgagcgccttacaacaaccaattgcccaattgcaacaacaatccttggcacatctaaccctacaaaccattgcaacgcaacaacaacaacaacaacagtttctgccatcactgagccacctagccgtggtgaaccctgtcacctacttgcaacagcagctgcttgcatccaacccacttgctctggcgaacgtagctgcataccagcaacaacaacagctgcaacagtttatgccagtgctcagtcaactagccatggtgaaccctgccgtctacctacaact

SEQ ID NO: 320261 - DNA, 369 bp, Zea mays
ccagcaagcaacatagaaagtagaatccattatcaacaatagagcaacaatggcgaggaaggtattttccctccttatgctccttgctctttctacatgtgttgctaacgcgacaattttccctcaatgctcacaagctcctatagcttcccttcttcccccataccttccatcaattatagcttcagtatgtgaaaacccagctcttcaaccatataggcttcaacaagcaatcgcagcaagcaacatacctttatcgcccttgttgtttcaacaatcaccagccctatctttggtgcagtcattggtacaaaccatcaaggcacaacagctgcagcaactcgtgctacctgtgatcaaccaagtagc

SEQ ID NO: 320262 - DNA, 226 bp, Zea mays
gcttcctcaagctcatcaagagtggactttgaagctggtgcatggcatcaatcacagggaccaacaatcacattcacgaacaatcacattcgcgacagcatacggcctgcacagcagtaactgggatctgccatgctacatctctgtcacatctatagagactggcgtattacctggacgctgaatccaacggtgcctgcttgtgacaagtggtacactggatgcc

SEQ ID NO: 320263 - DNA, 420 bp, Zea mays
agaaagtagaatccattagcaacaatagagcatcaatggcgaccaagatattttccgtcggatgctccttgctctttctacatgtgttgctaacgcgacaattttccctcaatgctcacaagctcctatagcttcccttcttcccccataccttccatcaattatagcttcagtatgtgaaaacccagctcttcaaccatataggcttcaacaagcaatcgcagcaagcaacatacctttatcgcccttgttgtttcaacaatcaccagccctatctttggtgcagtcattggtacaaaccatcagggcacaacagctgcagcaactcgtgctacctgtgatcaaccaagtagctctggcaaacctttctccctactctcagcaacaacaatttcttccattcaaccaactgtctacact

SEQ ID NO: 320264 - DNA, 391 bp, Zea mays
gcttcctgaagctcatcaagattggacattgtagctggtgcatggcatcaatcacagtcggcaacaatcacattcacgaacaatcacattcgcgacagaatacgggctggacagcagtaactgggatctgcgatcctacagctcgattccatcttttcagccgggcatattatcttgaggctgaatctaaaggcgcaagtctggtcctagtggtacctgggatgccattcacttatggttactgtacatactatcatcacacccaacagcgtccgaaactcgctctggggcatccttagatttggagacattaatcaagactagctcttgattgctgtctgctggcatgttctgatgttatattctggctgcatacatgaggcatcatacc

SEQ ID NO: 320265 - DNA, 420 bp, Zea mays
cttcagtatgtgaaaacccaattctttaaccctacaggatccaacaggcaagggcagcatgcatcttacctttatcacccttgttcctccaacaaccgtcagccctattacagcagttacctttggtgcatttgttggcacaaaacatcaaggcacaacaactacaacaacttgtgctaggaaaccttgctgcctactctcagcaacagcagtttcttccattcaaccaactggctgcattgaactctgctgcttatttgcaacaacaactaccattcagtcagctagctgctgcctacccccagcaatttcttccattcaaccaactggcagcattgaactctgctgcttatttacaacagcaacagctaccaccattcagccagctagctgatgtgagccctgttgccttcttgacac

SEQ ID NO: 320266 - DNA, 312 bp, Zea mays
tcgactcaagccacgcgtcatttggtggcacgaaacataggatcacatcatctacagcaacttgtactagtaggcctggctgcctactctcagcacctacttcaaccttacatcacaaccaactgtctacatagaactctgcagccaattctcagcttcacctaccatttactcagctagcggctgattacctgactgaatctgcaacatataaccaactgtcaccagagcactctgctgctctattgacaacaacgtgagttatcaccattcacacagctagcatatatgatacctgttgacttattgaca

SEQ ID NO: 320267 - DNA, 282 bp, Zea mays
cggtttctccagtctcgactcaagcgacccatcaggcgatcacaactgacatcttacctttttcaccctcgttccatgcaacactaagggaggggtattacatcagttacgtgtggtgcatctattgctactaatcatcatggctcaacaggttctaccgcttgcgctagcaaacctgtgtctctactgtcaccagcagtatacggtggcattcatctaagtcgactgctggaagtatgcttactagctgcaacgctaacatctaccatacagctacttact

SEQ ID NO: 320268 - DNA, 420 bp, Zea mays
gcatcatagaaagtggaatacagtagcatcaatagagcaacaatggcggccgagatagtttccatccttatgctccttgctctttctgcatgtgttgctaacgcgaccatttttcctcaatactcacaagctcctatagctgcccttcttaccccataccttccatcaatgaccgcttcagtttgtgaaaacccagcccttcaaccctacaggctccaacaagcaatcgcaacaagcaacttacctttatcacccctgttctttcaacaatcgccagccctatctttggtgcagtcattggtacaaaccatcatggcacaacagctgcaacaactcgtgctaccagtgatcagccaagtagctctggcaaacctttctccctactctcagcaacaacaatttcttccattcaaccaactg

SEQ ID NO: 320269 - DNA, 410 bp, Zea mays
ccaactagcaacatagaaagcacactagtgtaccaacaatggcagccaaaatattcaggcttgttatgctacttggtctcactgcaagtgctgctacggcgaccattgtcccgcaatgctcgcaagctcctatagcttcccttcttccctggtacctgtcaccagcggcgtcttcggtatgtgaaaacccaattcttcaaccctacaagatccaacaggcaatcacagctggcatcttacctttatcacccttgttcctccaacaatcatcagccctattacatcagttacctttggtgcatctattggcacaaaacatcagggcacaacaactacaacaacttgtgctagcataccttgctgcctactctcagcaacagcagtttcttgcattcaaccaactagctgca

SEQ ID NO: 320270 - DNA, 432 bp, Zea mays
acgtaccgtccgcggcacgctcgcaagctcctattgcttcccttcttcccccgtacctctcacgagcggggtcttcggtatgtgaaaacccaattcttcaaccctacaggatccaacaggcaatcgcagctggcatcttacctttatcacccttgttcctccaacaatcatcagccctattacaacagttacctttggtgcatttattggcacaaaacatcagggcacaacaactacaacaacttgtgctagcaaaccttgctgcctactctcagcaacagcagtttcttccattcaaccaactaggttcattgaactctgcttcttatttgcaacaacaacaactaccattcagccagctacctgctgcctacccccagcaatttcttccattcaaccaactagcagcattgaactctcctgcttatttac

SEQ ID NO: 320271 - DNA, 401 bp, Zea mays
gcgaagtagaccaccaagcacaagctgcatatccggccggaatatgtggactatcggcagggtctctacaccgaatgtggccgttctcctgctgctccttatcgtcgatccccacgaagccgtgccttattccaaagcgctcatttgctggtaccggatcgcgggctcaaatggtgtcatcatgtcctaccacaactgcgcgcacgtgtgctgtgcatgaagtctacggtacgagcagctgctacggcatcatgctccatgcacgtgcatcacggattgctagctagctatcagctattccgcactttaattccattaatacggatcgacgtctccgtcggtcactacatatgtgctactatacgtgtacactacatgcagtatatgtccacatgtactcg

SEQ ID NO: 320272 - DNA, 425 bp, Zea mays
  unsure (1)..(425): unsure at all n locations
caacaagcaacatataaagcggaatccagtagcaacaatagagcaacaatggcgaccaggatattttccctgcttatgctccttgctctttctacatgtgttgctaacgcgacaattttccctcaatgctcacaagctcctatagcttcccttcttcccccataccttccatcaattatagcttcaatatgtgaaaacccagctcttcaaccatataggcttcaacaagcaatcgcagcaagcaacatacctttatcgcccttgctgtttcaacaatcgccagccctatctttggtgcagtcattggtacaaaccatcanggcacaacagctgcagcaactcgtgctacctctgatcaaccaagtagctctggcaaacctttctccctactctcagcaacaacaatttcttccattcaaccaact

SEQ ID NO: 320273 - DNA, 423 bp, Zea mays
ccaacaagcaacatagaaagtgtaatccagtagcaacaatagagcaacaatggcgacgaagatactttccctccttatgctccttgctctttctgcatgtgttgctaacgcgacaattttccctcaatgctcacaagctcctatagcttcccttcttcccccataccttccatcaatgatagcttcagtatgtgaaaacccagctcttcaaccctataggctccaacaagcaatcgcagcaagcaacatacctttatcacccttgtttcaacaatcgccagccctatctttggtgcagtcattggtacaaaccatcaaggcacagcagctgcagcaactcgtgctacctgtgatcaaccaagtagctctggcaaacctttctccctactatcagcaacaacaatttcttccattcaaccaact

SEQ ID NO: 320274 - DNA, 346 bp, Zea mays
cccacgcgtacggaaagcacaatagtgtaccaacaatggcagccaacatattttgccgcctgatgctccttggtctttctgcaagtgctgctacggcgaccattttcccgcactgctcgcaagctcctatagcttcccttcatcccccgtacctttcaccaacggtgtctatagtatgtgaaaacccaattcttcaaccctacaggatccaactggcagtcacagctggcatcttacctttatcacccttgttcctacaacaatcagcagccctattacatgagttacctttggtgcatttattggcacaaaacatcagggcacaacaactacaacaacttgtgct

SEQ ID NO: 320275 - DNA, 397 bp, Zea mays
tcgagcacattgacagcgcaacactacgaagtaccatgcagtccgatagatctagcgacggggtcttccttgatattacagcaactgctgctacagtgactgttagcaccgcgctgctaacgctcgcatatatcgataatgattactcggtgcttatcaccagccaccgcaattaacaagagtaatccactattcctgctactgttcacattccagcaggcaaccacaactaggacagctacgacttgcggctcgtgcctaccaccatcatgaggactattatatgcaacaatactggtgaattcacaggcacaaaacattagggctgaaacagcagcaactccagctctagcagccatcactgcctaatctaaccaaggtcaatccagtcacatta

SEQ ID NO: 320276 - DNA, 344 bp, Zea mays
gctctgtgcgctcacacacgcgggttttcatcacccaactatacaatcctacatgcgtcaggatgatcatacaacaacatcatctaacattaactaactccttaacccaccaacacacctttaccttattgctccaaacctactacatccatctgtctttccacataatttacatcaatcatctccagaagctgatgtctaccaacatcaacaacagtattagcaccaacaataactgctactacaccacatccacacaacaacatcattgagtaagccaacttcaacataaccaactatcacaatgccatgtgcaacaacaccaacagttacatgaactacac

SEQ ID NO: 320277 - DNA, 427 bp, Zea mays
caagcaacataggaagtggaatccaccatcaacaacagagcaacaatggcgacgaagagatcttccctccttatgctccttgctctttctgcatgtgtagctaacgcgacaattttccctcaatgctcacaagctcctatagcttgccttcttcccccataccttccatcaatgatagcttcagtatgtgaaaacccagctcttcagccctataggctacaacaagcaatcgcagcatgcaacatacctttatcacccttgatgattcaacaatcgtcagccatatctttggcgcagtcattgctacaaaccatcagggcacagcagttgaagaaactcgcgctacctgtgatcaaccaagtagctatggcaaacctttctccctactctcagcatcaacaatttcttccattcaaccaactgtcta

SEQ ID NO: 320278 - DNA, 423 bp, Zea mays
attgagaccaacaagcaacatataaagtggaatccagtagcaacaatagagcggcaagggcgaccaagatatttgccctccttatgctccttgctctttctacatgtgttgctaacgcgacaattttccctcaatgctcacaagctcctatagcttcccttcttcccccataccttccatcaattatagcttcaatatgtgaaaacccagctcttcaaccatataggcttcaacaagcaatcgcagcaagcaacatacctttatcgcccttgttgtttcaacaatcgccagccctatctttggtgcagtcattggtacaaaccatcagggcacaacagctgcagcaactcgtgctacctctgatcaaccaagtagctctggcaaacctttctccctactctcagcaacaacaatttcttccat

SEQ ID NO: 320279 - DNA, 420 bp, Zea mays
agctccgtgcacctaaaaggcccatatgtcccaccatgggcagccaaaaaattttgcctccttaggctccttggtctttctgcaagtgctgctacggcgaccattttcccgcaatgctcgcaagctcctatagcttcccttcttcccccgtacctctcaccagcggtgtcttcggtatgtgaaaacccaattcttcaaccctacaggatccaacaggcaatcgcagctggcatcttacctttatcacccttgttcctccaacaatcatcagccctattacaacagttacctttggtgcatttattggcacaaaacatcagggcacaacaactacaacaacttgtgctagcaaaccttgctgcctactctcagcaacagcagtttcttccattcaaccaactaggttcattgaactctgct

SEQ ID NO: 320280 - DNA, 407 bp, Zea mays
aacgttgctgcctactatagacaccagcagttgcttccattcaaccaactagcgggatggaactctgcttcttatttgcaacaacaacaactaccattcagccagctacctgctgcctacccccagcaatttcttccattcaaccaactggcagcattgaactctcctgcttatttacagcagcaacaactactaccattcagccagctagctggtgtgagccctgctaccttcttgatacaaccacagttgttgccgttctaccagcacgctgcgcctaacgctggcaccctcttacaactgcaacaattgctgccattcaaccaacttgctttgacaaacccagcagcgttctaccaacaacccatcattggtggtgccctcttttagatctcttatgagtgata

SEQ ID NO: 320281 - DNA, 415 bp, Zea mays
cctggttcctccaacaaccgtaagccttattacagcagttacctttggtgcattggggggcacaaaacatcaaggcacaacaactacaacaacttgtgctaggaaaccttgctgcctactctcagcaacagcagtttcttccattcaaccaactggctgcattgaactctgctgcttatttgcaacaacaactaccattcagtcagctagctgctgcctacccccagcaatttcttccattcaaccaactggcagcattgaactctgctgcttatttacaacagcaacagctaccaccattcagccagctagctgatgtgagccctgttgccttcttgacacaacaacagttgttgccgttctacctgcacgctgcgcctaacgctggcaccctcttacaactgcaacaattgct

SEQ ID NO: 320282 - DNA, 333 bp, Zea mays
aaagcacaatagtgtaccaacaatggcagccaaaatattttgcctccttatgctccttggtatttctgcaagtgctgctacggcgaccattttcccgcaatgctcacaagctcctatagcttcccttcttcccccgtacctctcaccagcggtgtcttcggtatgtgaaaacccaattcttcaaccctacaggatccaacaggcaatcgcagctggcatcttacctttatcacccttgttcctccaacaatcatcagccctattacagcagttacctttggtgcatttattggcacaaaacatcagggcacaacaactacaacaacttgggct

SEQ ID NO: 320283 - DNA, 407 bp, Zea mays
agtaccatcaatcatcattcatcttagtagtataggcaccaaatcaaatctgcaacgtcaattatctaactccaaaaaccatgaagctggtgcttgtggttcttgctttcattgctttagtatcaagtgtttcttgtacacagacaggcggctgcagctgtggtcaacaacaagccatgagcagcaacatcatccacaacaacatcatccacaaaaacaacaacatcaaccaccaccacaacatcaccagcagcagcaacaccaacaacatcaagttcacatgcaaccacaaaaacatcagcaacaacaagaagttcatgttcaacaacaacaacatcaaccgcagcaccaccaccatcaacaacaacaacagcaccaacatcaacatcaatgtgaaggccaacaac

SEQ ID NO: 320284 - DNA, 449 bp, Zea mays
tcccgaattcgccggctagcaacatagaaagcacaatattgtaccaataatggcagccaaaatattttgcctcattatgctccttggtctttctgcaagtgctgctacggcgagcattttcccgcaatgctcacaagctcctatagcttcccttcttcccccatacctctcaccagcgatgtcttcagtatgtgaaaatccaattcttctaccctacaggatccaacaggcaatcgcagcaggcatcttacctttatcacccttgttcctccaacaatcatcagccctattacagcagttacctttggtgcatttattggcacaaaacatcagggcacaacaactacaacaactcgggctagcaaaccttgctgcctactctcagcaacagcagttacctttggtgcatttgttggcacaaaacatcaaggcacaacaactacaacaac

SEQ ID NO: 320285 - DNA, 421 bp, Zea mays
ctagcaacatagaaagcacaatattgtaccaataatggcagccaaaatattttgcctcattatgctccttggggttgcgtgcaagtgctgctacggcgagcattttcccgcaatgctcacaagctcctatagcttcccttcttcccccatacctctcaccagcgatgtcttcagtatgtgaaaatccaattcttctaccctacaggatccaacaggcaatcgcagcaggcatcttacctttatcacccttgttcctccaacaatcatcagccctattacagcagttacctttggtgcatttattggcacaaaacatcagggcacaacaactacaacaactcgtgctagcaaaccttgctgcctactctcagcaacagcagttacccttttgtgcatttgttggcacaaaacatcagggcac

SEQ ID NO: 320286 - DNA, 407 bp, Zea mays
  unsure (1)..(407): unsure at all n locations
aactagcaacatagaaagcacaatagtgtaccaacaatggcagccaaaatatttggcttccttatgctccttggtctttctgcaagtgctgctaccgcaaccattttcccacaatgctcacaagctcctatagcttcctttcttcccccatacctctcaccagcggtgtcttcagtatgtgaaaacccaattcttcaaccctacaggatccaacaggcaatcgcagcaggcatcttacctttatcacccttgatcctccaacaaccgtcagccctattacagcagttacctttggtgcatttgttggcacagaacatcaaggcacaacaactacaacaactngtgcctaggaacccttgctgcctactctcaagcacagcagtttcttccattcaaccaactggctg

SEQ ID NO: 320287 - DNA, 342 bp, Zea mays
gcatcatagaaagcacaatactgtaccaacaatggcagccaaaatattatgcctggttatgctactcggtctgtctgcaagtgctgctacggcgaccattttaccgcaatgctcgcaagctactatagcttcccttcttcccccgtacctctcaccagcggtgtcttcggtatgtgaaaacccaattcttcaaccctacaggatccaacaggcaatcgcagctggcatcttacctttatcaccctagttcctccaacaatcatcagccctattacaacagttacctttggtgcatttattggcacaaaacatcacggcacagcaactacaacaacttgcgct

SEQ ID NO: 320288 - DNA, 145 bp, Zea mays
agcagcttctgcttgctctggggggaaggagagagagagagcgagagagagagagagatctagtagagaggctagtaggtggtcctcgaacgaagatgttggcggtgttcagcggccaggtggtggaggtgccggcggaactggt

SEQ ID NO: 320289 - DNA, 420 bp, Zea mays
cgcacgcgttcgattttgagcattcataaacacaccaagcgaagcacattagcaacagcctgaacaacaatggctaccaagatattatccctccttgcgcttcttgcgctttttgcgagcgcaacaaatgcgttcattattccacaatgctcacttgctccaagttccattattacacagtttctgccaccagttacttcaatgggcttcgaacacccagctgtgcaagcctataggctacaacaagcaattgcggcgagcgtcttacaacaaccaattttgcagttgcaacaacaatgcttggcacatctaacaatacaaaccatcgcaacgcaacagcaactacaattcctaccagcactgagccacctagccatggtgaaccctgccgactacttgcaacagcagttgcttgcatca

SEQ ID NO: 320290 - DNA, 381 bp, Zea mays
gcaacatagaaagcacaatagtgtaccaacaatggcagccaaaatattttgcctcgttatgctccttggtctttctgcaagtgctgctacggcgaccattttcccgcaatgctcgcaagctcctatagcttcccttcttcccccgtacctctcaccagcggtgtcttcggtatgtgaaaacccaattcttcaaccctacaggatccaacaggcaatcgcagctggcatcttacctttatcacccttgttcctccaacaatcatcagccctattacaacagttacctttggtgcatttattggcacaaaacatcagggcacaacaactacaacaacttgtgctagcaaaccttgctgcctactctcagcaacagcagtttct

SEQ ID NO: 320291 - DNA, 387 bp, Zea mays
gaatacagtagcaaaaatagagcaacaatggcggccaagatattttccatccttatgctccttgctctttctgcatgtgttgctaacgcgaccatttttcctcaatactcacaagctcctatagctgcccttcttcccccataccttccatcaatgaccgctttagtatgtgaaaacccagcccttcaaccctacaggatccagcaagcaatcgcaacaagcaacttacctttatcacacctgttctttcaacaatcgccagccctatctttggtgcagtcattggtacaaaccatcaaggcagaacagttgcagcaactcgtgctaccagtgatcagcccagtagctctggcaaaactttccccctactttagcaacaacaatttc

SEQ ID NO: 320292 - DNA, 360 bp, Zea mays
attttgagcattcagaaacacaccaagcgaagcgcactagcaacgacctaacaacaatggctaccaagatattagccctccttgcgcttcttgccctttttgtgagcgcaacaaatgcgtacattattccacaatgctcacttgctcctagtgccattattccacagttgctcccaccagttacttcaatgggcttcgaacacctagctgtgcaagccaacatgcaacaacaagcgcttgcggcgagcgtcttacaacaaccaattgcccaattgcaacaacaatccttgccacatctaacaatacaagccatcacaacgcaacagcaacaacagtttctaccagcactgagccacctag

SEQ ID NO: 320293 - DNA, 349 bp, Zea mays
ccaactagcaacatagaaagcacaatagtgtaccaacaatggcagccaaaatattgtgcttccttatgctccttggtctttctgcaagtgctgctaccgcaaccattttcccacaatgctcacaagctcctatagcttcctttcttcccccatacctctcaccagcggtgtcttcagtatgtgaaaacccaattcttcaaccctacaggatccaacaggcaatcgcagcaggcatcttacctttatcacccttgttcctccaacaaccgtcagccctattacagcagttacctttggtgcatttgttggcacaaaacatcaaggcacaacaactacaacaacttgtgct

SEQ ID NO: 320294 - DNA, 411 bp, Zea mays
agcaacatagaaagcacaatagtgtaccaacaatggcagccaaaatatgttgcctcgttatgctccttggtctttctgcaagtgctgctactgcgaccattttcccgcaatgctcgcaagctcctatagctctccttcttcccccgtacctctcaccagcggagtcttcggtatgtgaaaacccaattcttcaaccctacaggatccaacaggcactcgcagctggcatcttacctttatcacccttgttcctacaacaatcatcagccctattacaacagctacctttggtgcatttattggcacaatacatcagggcacaacatctacaacaacttgtgctagcaaaccttgctgactactctcagcaacagctgtctcttgcattcaaccaactaggttcatcgaact

SEQ ID NO: 320295 - DNA, 410 bp, Zea mays
gcggaggagacggcctgctgcatgccgagagagcattcaggatcgcacagctggagctagcattcctcaacgactacttctacacaagataccccatcctgttctggcgtggcttcccgctcctctgtgcttggcaccccctgctcaccatcgctctcatcgcgtggcttgcaagggacatccacaagctctacgaacccagggaaggagagactgcccacgtcattaagggtgtcaatgttgacatcaccatcacatggatattcatgggcattatcgttctgaaggagctgtggaagatggtcacctacatcttgtcggactggaccaaggtgatgctgctgtgcgagtacacttcgcggaggagcatcggcccgtggtgtatgtggatcccattccacaacgtatgt

SEQ ID NO: 320296 - DNA, 343 bp, Zea mays
caatttcttccattcaaccaactggcagcattgaactctcctgcttatttacaggggcaacaactactaccattcagccagctagctggtgtgagccctgctaccttcttgacacaaccacagttgttgccgttctaccagcacgctgcgcctaacgctggcaccctcttacaactgcaacaattgctgccattcaaccaacttgctttgacaaacctagcagtgttctaccaacaacccatcattggtggtgccctcttttagatttcttatgagttatagttcaataataaagttttctgtctgaaaaattactgaagattaaaagcaaaacaaaagggca

SEQ ID NO: 320297 - DNA, 333 bp, Zea mays
gcaacatagaaagcacaatagtgtaccaacaatggcagccaaaatattttgcctccttatgctccttggtctttctgcaagtgctgctacggcgaccattttcccgcaatgctcgcaagctcctatagcttcccttcttcccccgtacctctcaccagcggtgtcttcggtatgtgaaaacccaattcttcaaccctacaggatccaacaggcaatcagacctattacatcagttacctttggtgcatttattggcacaaaacatcagggcacaacaactacaacaacttgtgctagcaaaccttgctgcctactctcagcaacagcagtttc

SEQ ID NO: 320298 - DNA, 409 bp, Zea mays
cagcaagcaacatagaacgtagaatccattaccaacaatagagcaacaatggcgagcaagatattttccctccttatgctccttgctctttctacatgtgttgctaacgcgacaattttccctcaatgctcacaagctcctatagcttcccttcttcccccataccttccatcaattatagcttcagtatgtgaaaacccagctcttcaaccatataggcttcaacaagcaatcgcagcaagcaacatacctttatcgcccttgttgtttcaacaatcaccagccctatctttggtgcagtcattggtacaaaccatcagggcacaacagctgcagcaactcgtgctacctgtgatcaaccaagtagctctggcaaacctttctccctactctcagcaacaacaatttc

SEQ ID NO: 320299 - DNA, 413 bp, Zea mays
gtcatcgttctcgtcgtgtgcctggctctgtcagctgccagcgcctctgcaatgcagatgccctgcccctgcgcggggctgcagggcttgtacggcgctggcgccggcctgacgacgatgatgggcgccggcgggctgtacccctacgcggagtacctgaggcagccgcagtgcagcccgctggcggcggcgccctactacgccgggtgtgggcagccgagcgccatgttccagccgctccggcaacagtgctgccagcagcagatgaggatgatggacgtgcagtccgtcgcgcagcagctgcagatgatgatgcagcttgagcgtgccgctgccgccagcagcagcctgtacgagccagctctgatgcagcagcagcagcagctgctggcagcccaaggtctcaaccccat

SEQ ID NO: 320300 - DNA, 348 bp, Zea mays
ttcagaaacacaccaagcgaagcgcactagcaacgacctaacaacaatggctaccaagatgttagccctccttgcgcttcttgccctttttgtgagcgcaacaaatgcgttcattattccacaatgctcacttgctcctagtgccattattccacagttcctcccaccagttacttcaatgggcttcgaacacctagctgtgcaagccaacatgcaacaacaagcgcttgcggcgagcgtcttacaacaaccaattgcccaattgcaacaacaatccttgccacatctaacaatacaagccatcacaacgcaacagcaacaacagttcctaccagcactgagccacct

SEQ ID NO: 320301 - DNA, 411 bp, Zea mays
  unsure (1)..(411): unsure at all n locations
gctttatctactccagagcgcagaagaacccgatcgacaccatgagggtgttgctcgttgccctcgctctgctggctctcgctgcgagcgccacctccacgcatacaagcggcggctgcggctgccagccaccgccgccggttcatctaccgccgccggtgcatctgccacctccggttcacctgccacctccggtgcatctcccaccgccggtccacctgccgccgccggtccacctgccaccgncggtccatgtgccgncgncggttcatctgccgncgncaccatgccactaccctactcaaccgccccggcctcagcctcatccccagccacacccatgcccgtgccaacagccgcatccaagcccgtgccagctgcagggaacctgncgcgttggcagcacccccg

SEQ ID NO: 320302 - DNA, 285 bp, Zea mays
agcaaaccttgctgcctactctcagcaacagcagtttcttccattcaaccaactaggttcattgaactctgcttcttatttgcacaacaactacaacaacttgtgctagcaaaccttgctgcatactctcagcaacatcagtttcttccattcaaccaactggctgcattgaactctgctgcttatttgcaacaacaattaccattcaaccagctagttgctggctacccccaacaatttcttccattcaaccaactagcagcattgaactctggtgcttattta

SEQ ID NO: 320303 - DNA, 415 bp, Zea mays
  unsure (1)..(415): unsure at all n locations
ggctgctgcaatgtgcttaatgatagctgcgaagctactttatgttgaagataggctgataagcaattctgtttctgagaaagccactgaggcatttgaggaccctgggcttgttgggatgcctcaaattgttggtaccactgctttatctaatacacgaacttaggctggaggctttactatgggccaagttgttcaagaagcataacctttgttttctggtgcatatgaagggctttgtttgtgctcgtcaagactactttatctcatatgggagtttcctattatagtgattcgaagaccggctggtactaataaatgcaaggatggtgtaaatcgtttgtaggctttcagctgnggccatgaaaattcttgagagcaagattcattcactggaaacattntttagatctag

SEQ ID NO: 320304 - DNA, 408 bp, Zea mays
caagcaacatagaaagtagaatccattagcaacaatagagcaacaatggcgaccaagatattttccctccttatgctccttgctctttctacatgtgttgctaacgcgacaattttccctcaatgctcacaagctcctatagcttcccttcttcccccataccttccatcaattatagcttcagtatgtgaaaacccagctcttcaaccatataggcttcaacaagcaatcgcagcaagcaacatacctttatcgcccttgttgtttcaacaatcaccagccctatctttggtgcagtcattggtacaaaccatcagggcacaacagctgcagcaactcgtgctacctgtgatcaaccaagtagctctggcaaacctttctccctactcttagcaacaacaatttctt

SEQ ID NO: 320305 - DNA, 413 bp, Zea mays
  unsure (1)..(413): unsure at all n locations
cggacgcgtgggtcagcattcanaatctcatcaagcgaagcgcactagcaacgaccgaacgccaatggctaccaagatattagccctccttgcgcttcttgcccttttagtgagcgcaacaaatgcgttcattattccacagtgctcacttgctcctagtgccattattccacagttcctcccaccagttacttcaatgggcttcgaacatccagccgtgcaagcctacaggctacaactagcgcttgcggcgagcgccttacaacaaccaattgcccaattgcaacaacaatccttggcacatctaaccctacaaaccattgcaacgcaacaacatcaacatcaacagtttctgccatcactgagccacctagccgtggtgaaccctgtcacctacttgcaacagcagctgc

SEQ ID NO: 320306 - DNA, 361 bp, Zea mays
  unsure (1)..(361): unsure at all n locations
caatagtgtaccaacaatggcagccaaaatattttgcctccttatgctccgtgggatttctgcaagtgctgctacggcgaccattttcccgcaatgctcacaagctcctatagcttcccttcttcccccgtacctctcaccagcggtgtcttcggtatgtgaaaacccaattcttcaaccctacaggatccaacaggcaatcgcagctggcatcttacctttatcacccttgttcctccaacaatcatcagccctattacagcagttacctttggtgcatttattggcacanaacatcagggcacagcaactacaacaacttgtgctagcaaaccttgctgcctactctcagcaacagcag

SEQ ID NO: 320307 - DNA, 118 bp, Zea mays
tcggcggccatcgcttttccgtcccaacaaccacccgttattccgccgcccctgcaaggtgggttaatcaaaacctcttatttggcaacaagctcctgccgattcaatcaacctccaa

SEQ ID NO: 320308 - DNA, 351 bp, Zea mays
gcggcggctgcggctgccagccacctccgccggttcatctaccgccgccggtgcatctgccacctccggttcacctgccacctgcggtgcatctgccaccgccggtccacctgccgccgccggtccacctgccaccgccggtccatgtgccgccgccggttcatctgccgccgccaccatgccactaccctactcaaccgccccggtctcagcctcatccgcagccacacccatgcccgtgccaacagccgcatccaagcccgtgccagctgcagggaacctgcggcgttggcagcaccccgatcctgggccagtgcgtcgagtttctgaggcatcagtgcagccccgacg

SEQ ID NO: 320309 - DNA, 359 bp, Zea mays
cccacgcgtccgcaatagtgtaccatacaatggcagccaaaatattttgcctcctgatgctccttggtctttctgcaagtgctgctacggcgaccattttcccgcaatgctcgcaagctcctatagcttcccttcttcccccgtacctctcaccagcggtgtcttcggtatgtgaaaacccaattcttcaaccctacaggatccaacaggcaatcgcagctggcatcttacctttatcacccttgttcctccaacaatcatcagccctattacaacagttacctttggtgcatttattggcacataacatcagggcacaacaactacaacaacttgtgctagcaaaccttgctgcctac

SEQ ID NO: 320310 - DNA, 398 bp, Zea mays
acatagaaagtggaatccagtatcaacaatagagcaacaatggcgaccaagagactttccctccttatgctccttgctctttctgcatgtgttgctaacgcgacaattttccctcaatgctcacaagctcctatagcttcccttcttcccccataccttccatcaatgatagcttcagtatgtgaaaacccagctcttcaaccctataggctccaacaagcaatcgcagcaagcaacatacctttatcacccttgtttcaacaatcgccagccctatctttggtgcagtcattggtacaaaccatcaaggcacagcagctgcagcaactcgtgctacctgtgatcaaccaagtagctctggcaaacctttctgcctactatcagcaacaacaatttct

SEQ ID NO: 320311 - DNA, 385 bp, Zea mays
attcagccagctacctgctgcctacccccagcaatttcttccattcaaccaactggcagcattgaactctcctgcttatttacagcagcaacaactactaccattcagccagctagctggtgtgagccctgctaccttcttgatacaaccacagttgttgccgttctaccagcacgctgcgcctaacgctggcaccctcttacaactgcaacaattgctgccattcaaccaacttgctttgacaaacccagcagcgttctaccaacaacccatcattggtggtgccctcttttagatttcttatgagttatagttcaataataaagttttttgtctgatgtttgtggcttcccagaaataagaaggtacatttctagaataaaaa

SEQ ID NO: 320312 - DNA, 354 bp, Zea mays
attcccggcgtcagacctacgggttcatgcaactacatgctgtctactccccttcaatctcttcaattcaaccatctgtgtggattgaactattctgctaacttactgcgacaccacctgctaccattgatccagttagatcgtgagaaccctgctaccttctacatacatccacagtagtacacgatctaccatcacggcatgtatagcgctaggcacattattacacatgaaccactagatgtcatgctagcaaatcgctctgactaatctaaccatcatctaccaataacatataatcaactagctgcattgaaagatgcctcataagtgatacatcaacaattaccattc

SEQ ID NO: 320313 - DNA, 333 bp, Zea mays
aacatagaaagcacaatagtgtaccaacaatggcagccaaaatattttgcctcctgatgctccttggtctttctgcaagtgctgctacggcgaccattttcccgcaatgctcgcaagctcctatagcttcccttcttcccccgtacctctcaccagcggtgtcttcggtatgtgaaaacccaattcttcaaccctacaggatccaacaggcaatcacagctggcatcttacctttatcacccttgttcctccaacaatcatcagccctattacatcagttacctttggtgcatttattggcacaaaacatcaaggcacaacaactacaacaac

SEQ ID NO: 320314 - DNA, 433 bp, Zea mays
tgcaaccctacaggatccaacaggcaatcgcagctggcatcttacctttatcacccttgttcctccaacaatcatcagccctattacaacagttacctttggtgcatttattggcacaaaacatcagggcacaacaactacaacaacttgtgctagcaaaccttgctgcctactctcagcaacagcagtttcttccattcaaccaactaggttcattgaactctgcttcttatttgcaacaacaacaactaccattcagccagctacctgctgcctacccccagcaatttcttccattcaaccaactagcagcattgaactctcctgcttatttacagcagcaacaactactaccattcagccagctagctggtgtgagccctgctaccttcttgacacaaccacaagtgttgccgttctaccagcacgttgc

SEQ ID NO: 320315 - DNA, 385 bp, Zea mays
ccatataggcttcaacaagcaatcgcagcaagcaacatacctttatcgcccttgttgtttcaacaatcaccagccctatctttggtgcagtcattggtacaaaccatcagggcacaacagctgcagcaactcgtgctacctgtgatcaaccaagtagctctggcaaacctttctccctactctcagcaacaacaatttcttccattcaaccaactgtctacactgaaccctgctgcttatttgcagcaacaactattaccatttagccagctagctactgcctactctcagcaacaacaacttcttccatttaaccaattggccgcactgaaccccgctgcttatttgcagcagcaaatactactgccatttagcgagctagctg

SEQ ID NO: 320316 - DNA, 257 bp, Zea mays
agcgaagctacctagcaacgacttaacaacaatggctaccaagattttagcggtccttgcacttcttgccctttttgtgagcgcaacaaatgcgtgcattattccacaatgctcacttgctcctagtgccattataccacagttcctccgaccagttacttcaatgggcttcgaacacctagctgtgcaagcctacaggctacaacaagcgcttgcggcgagcgtattacaacaaccaattgaccaattgcaacaac

SEQ ID NO: 320317 - DNA, 383 bp, Zea mays
atcagcaaagcggcagtgcgtagagaggatcgtcgaacagaacagcatgaagatggtcatcgttctcgtcgtgtgcctggctctgtcagctgccagcgcctctgcaatgcagatgccctgcccctgcgcggggctgcagggcttgtacggcgctggcgccggcctgacgacgatgatgggcgccggcgggctgtacccctacgcggagtacctgaggcagccgcagtgcagcccgctggcggcggcgccctactacgccgggtgtgggcagacgagcgccatgtaccagccgctccggcaacagtgctgccagcagcagatgaggatgatggacgtgcagtccgtcgcgcagcagctgcagatgatgatgcagcttgagcgtg

SEQ ID NO: 320318 - DNA, 430 bp, Zea mays
atagaaagcacaatagtgtaccaacatatggcagccaaaatattttgcctccttatgctccttggtctttctgcaagtgctgctacggcgaccattctcccgcaatgctcacaagctcctataactttccttcttcccccgcacctctcaccagcggtgtcttcggtatgtgaaaacccaattcttcaaccctacaggatccaacaggcaatcgcagctggcatcttaccttaatcaccctagctactacaacaatcaacacacctattacaacactaacctctggtacatttatcgacacaccacatcacagcacaacaactacaacaacttgtgctagcaaaccttgctgcctactttcaacaacagcagtttcttccattcaaccaactaggttcattgaaatcctgttcttatttgcaacaacaac

SEQ ID NO: 320319 - DNA, 407 bp, Zea mays
  unsure (1)..(407): unsure at all n locations
gccgccggtgcatctgccacctccggttcacctgccacctccggtgcatctcccaccgccggtccacctgccgccgccggtccacctgccaccgccggtccatgtgccgccgccggttcatctgccgccgtcaccatgccactaccctactcaaccgccccggcctcagcctcatccccagccacacccatgcccgtgccaacagccgcatccaagcccgtgccagctgcagggaacctgcggcgttggcagcaccccgatcctgggccagtgcgtcgagttcctgaggcatcagtgcagcccgacggcgacgccctactgctcgcctcagtgccagtcgttgcggcagcagtgttgccagcagctcangcaggtggagccgcagcaccggtaccaggcgatcttcg

SEQ ID NO: 320320 - DNA, 418 bp, Zea mays
atttgcactcatgcatcacaaaacatccttctatcagtaccatcaatcatcatgcatgcttagtagtataggcaccaaatcaaatctgcaacatcaattatctaactccaaaaaccatgaagctggtgcttgtggttcttgctttcattgctttagtatcaagtgtttcttgtacacagacaggcggctgcagctgtggtcaacaacaaagccatgagcagcaacatcatccacaacaacatcattcacaaaaacaacaacatcaaccaccaccacaacatcaccagcagcagcaacaccaacaacaacatgttcacatgcaaccacataaacatgagcaacaacaagaagttcatgttcaacatcaacaacaacaaccgcagcaccaccaccatacaacaacaacatcagcaccaac

SEQ ID NO: 320321 - DNA, 197 bp, Zea mays
gtcttcggtatgtgaaaacccaattcttcacccctacaggatccatcaggcaatgacagctggcatcttacctttatgacccttgttcctccaacaatcatgaggcctattacatcagttacctttggtgcatttattggcacaaaacatcagggcacaacaactacaacaacttgtgctagcaaaccttgatgact

SEQ ID NO: 320322 - DNA, 424 bp, Zea mays
gctctttctgcatgtgttgctaacgcgacaattttccctcaatgctcacaagctggtgaagctatcattgatggaaggtatgggggaagaagggaagctataggagcttcagtatgtgaaaacccagctcttcaaccctataggctccaacaagcaatcgcagcaagcaacatacctttatcacccttgtttcaacaatcgccagccctatctttggtgcagtcattggtacaaaccatcaaggcacagcagctgcagcaactcgtgctacctgtgatcaaccaagtagctctggcaaacctttctccctactatcagcaacaacaatttcttccattcaaccaactatctacactgaaccctgctgcttatttgcagcaacaactattaccattcagccagctagctactgcctactctcatc

SEQ ID NO: 320323 - DNA, 437 bp, Zea mays
cgcgtgccagcaacatagaaagtggaatccagtttcaacaatagagcaacaatggcgaccaaggtattttccctccttatgctccttgctctttctacatgtgttgctaacgcgacaattttccctcaatgctcacaagctcctatagcttcccttcttcccccataccttccatcaattatagcttcaatatgtgaaaacccagctcttcaaccatataggcttcaacaagcaatcgcagcaagcaacatacctttatcgcccttgttgtttcaacaatcgccagccctatctttggtgcagtcattggtacaaaccatcagggcacaacagctgcagcaactcgtgctacctctgatcaaccaagtagctctggcaaacctttctccctactctcagcaacaacaatttcttccattcaaccaactgtctacact

SEQ ID NO: 320324 - DNA, 381 bp, Zea mays
ccaacaagcaacatagaaagtggaatccagtagcaacaacagagcaacaatggcgagcaagatattttccctccttatgctccttgctctttctgcatgtgttgctaacgcgacaattttccctcaatgctcacaagctcctatagcttcccttcttcccccataccttccatcaatgatagcttcagtatgtgaaaacccagctcttcagccctataggctccaacaagcaatcgcagcaagcaacatacctttatcacccttggtggttcaaccatcggcaagccctatctttggtgcaatcattggtaccaaccattaaggcacaacaactgcagcaactcgtgctacctgggatcaacccagttgcttttgccaaac

SEQ ID NO: 320325 - DNA, 448 bp, Zea mays
tccgacccacgcgtccgcagcatagaaagcacaatagtgtaccaacaatggcagccaaaatattttgcctccgtatgctccttggtctttctgcaagtgctgctacggcgaccattttcccacaatgctcacaagctcctatagcttcccttcttcccccgtacctctcaccagcggtgtcttcggtatgtgaaaacccaattcttcaaccctataggatccaacaggcaatcgcagctggcatcttacctttatcacccttgttcctccaacaatcatcagccctattacagcagttacctttggtgcatttattggcacaaaacatcagggcacaacaactacaacaacttgtgctagcaaaccttgctgcctactctcagcaacaacagtttcttccattcaaccaactagctgcattgaactctgcttcttatttgcaacaaca

SEQ ID NO: 320326 - DNA, 390 bp, Zea mays
attttgagcattcagaaacacaccaagcgaagcacattagcaacaacctaacaacagtggctaccaagatattatccctccttgcgcttcttgcgctttttgcgagcgcaacaaatgcgttcattattccacaatgctcacttgctccaagttccattattacacagttactcccaccagttacttcaatgggcttcgaacacccagctgtgcaagcctataggctacaacaagcaattgcggcgagcgtcttacatcaaccaatttcccagttgcaacaacaatccttggcacatgtaacaatacaaaccatcgcatctcaacagcatcaacaattactaccagcactgagccacctagccatggtgaaccctgccgactacttgcaac

SEQ ID NO: 320327 - DNA, 427 bp, Zea mays
attgagaccaactagcaacatagaaagcacaatagtgtaccaacaatggcagccagaatgttttgcctccttatgctccttggtctttctgcaagtgctgctacggcgaccattttcccgcaatgctcgcaagctcctatagcttcccttcttcccccgtacctctcaccagcggtgtcttcggtatgtgaaaacccaattcttcaaccctacaggatccaacaggcaatcacagctggcatcttacctttatcacccttgttcctccaacaatcatcagccctattacatcagttacctttggtgcatttattggcacaaaacatcagggcacaacaactacaacaacttgtgctagcaaaccttgctgcctactctcagcaacagcagtttcttccattcaaccaactagctgcattgaactctg

SEQ ID NO: 320328 - DNA, 130 bp, Zea mays
cacgcgtccgggaacgcactcatcgcaactctaaatctcctgccgcatgctaactacactggccgtgcgatcatgctagcgctgtcgctgacacacaccacctacccatctacctcctccgctctatatg

SEQ ID NO: 320329 - DNA, 98 bp, Zea mays
aaaacaatctactcatcctagtcctgctggcgccctgctagaatgtctgtaaatcgatatgcaagcaaatgcattcagtctctgcctgtgttctgatc

SEQ ID NO: 320330 - DNA, 425 bp, Zea mays
gacctaacatcaatggctaccaagatattagccctccttgcgcttcttgccctttttgtgagcgcaacaaatgcgttcattattccacaatgctcacttgctcctagtgccattattccacagttcctcccaccagttacttcaatgggcttcgaacacctagctgtgcaagccaacatgcaacaacaagcgcttgcggcgagcgtcttacaacaaccaattgcccaattgcaacaacaatccttgccacatctaacaatacaagccatcacaacgcaacagcaacaacagttcctaccagcactgagccacctagccatggtgaaccctgccgcctacttgcaagagcagctgcttgcatccaacccacttgctctggcgaacgtagttgcaaaccagcaacaacaacagctacaacagtttct

SEQ ID NO: 320331 - DNA, 108 bp, Zea mays
attagttgtaattcaataataaagattttaggataaggtatgctgcctgccataagtgagaactcacattaccagattataatgtgacaatgctcactagatggcagt

SEQ ID NO: 320332 - DNA, 401 bp, Zea mays
gtgagcgcaacaaatgcgttcattattccacaatgctcacttgctcctagtgccatgattccacagttcctcccaccagttacttcaatgggcttcgaacacctagctgtgcaagccaacatgcaacaacaagcgcttgcggcgagcgtcttacaacaaccaattgcccaattgcaacaacaatccttgccacatctaacaatacaagccatcacaacgcaacagcaacaacagttcctaccagcactgagccacctagccatggtgaaccctgccgcctacttgcaagagcagctgcttgcatccaacccacttgctctggcgaacgtagttgcaaaccagcaacaacaacagctacaacagtttctgccaacgctcagtcaactagccatggtgaaccc

SEQ ID NO: 320333 - DNA, 418 bp, Zea mays
ggtcttcagaccattagctttaactactccagagcgcagaagaacccggacgacacgatgagggtgttgctcgttgccctcgctctcctggctctcgctgcgagcgccacctccacgcatacaagcggcggctgcggctgccagccaccgccgccggttcatctaccgccgccggtgcatctgccacctccggttcacctgccacctccggtgcatctcccaccgccggtccacctgccgccgccggtccacctgccaccgccggtccatgtgccgccgccggttcatctgccgccgccaccatgccactaccctactcaaccgccccggcctcagcctcatccccagccacacccatgcccgtgccaacagccgcatccaagcccgtgccagctgcagggaacctgcggcgttggca

SEQ ID NO: 320334 - DNA, 399 bp, Zea mays
gagaccaactagcaacatagaaagcacaatagtgtaccaacaatggcagccaaaatattttgcctccttatgctccttggtctttctgcaagtgctgctacggcgaccattttcccgcaatgctcgcaagctcctatagcttcccttcttcccccgtacctctcaccagcggtgtcttcggtatgtgaaaacccaattcttcaaccctacaggatccaacaggcaatcgcagctggcatcttacctttatcacccttgttcctccaacaatcatcagccctattacaacagttacctttggtgcatttattggcacaaaacatcagggcacaacaactacaacaacttgtgctagcaaaccttgctgcctactctcagcaacagcagtttcttccattc

SEQ ID NO: 320335 - DNA, 395 bp, Zea mays
attgagaccaactagcatcatagaaagcacaatagtgtaccaacaatggcagccaaaatgttttgcctccttatgctccttggtctttctgcaagtgctgctacggcgaccattttcccgcaatgctcgcaagctcctatagcttcccttcttcccccgtacctctcaccagcggtgtcttcggtatgtgaaaacccaattcttcaaccctacaggatccaacaggcaatcacagctggcatcttacctttatcacccttgttccttcaacaatcatcagccctattacatcagttacctttggtgcatttattggcacaaaacatcaaggcacatcaactacaacaacttgtgctagcaaaccttggttgctactttcagcaacagcagtttct

SEQ ID NO: 320336 - DNA, 428 bp, Zea mays
  unsure (1)..(428): unsure at all n locations
ccaactagcaacatagaacgcacaatagtgtaccatcaatgggccgccaaatattgggcctccttatgctccttggtctntctgcaagtgctgctacggcgaccattttcccacaatgctcacaagctcctatagcttcccttcttcccccgtacctctcaccagcggtgtcttcggtatgtgaaaacccaattcttcaaccctataggatccaacaggcaatcgcagctggcatcttacctttatcacccttgttcctccaacaatcatcagccctattacagcagttacctttggtgcatttattggcacaaaacatcagggcacaacaactacaacaacttgtgctagcaaaccttgctgcctactctcagcaacaacagtttcttccattcaaccaactagctgcattgaactctgcttcttat

SEQ ID NO: 320337 - DNA, 91 bp, Zea mays
cggactcgtgggtaataatgcagtatgacgacacacattatcatgtgtggtatgagcaataatatatgcatcataataaagttttggtttt

SEQ ID NO: 320338 - DNA, 444 bp, Zea mays
cacaatagtgcaccaacaatggcagccaaaatattttgcctccttatgctccttggtctttctgcaagtgctgctacggcgaccattttcccacaatgctcacaagctcctatagcttcccttcttcccccgtacctctcaccagcggtgtcttcggtatgtgaaaacccaattcttcaaccctataggatccaacaggcaatcgcagctggcatcttacctttatcacccttgttcctccaacaatcatcagccctattacagcagttacctttggtgcatttattggcacaaaacatcagggcacatcaactactacaacttgtgctagcaaaccttgctgcctactctcagcaacaacagtttcttccattcaaccaactagctgcattgaactctgcttcttatttgcaacatcaacatctaccattcagccagctatct

SEQ ID NO: 320339 - DNA, 419 bp, Zea mays
cccaattccctccgtcggccgccgctccatcccgtacgacgacaccatgagggagtgcatttcgatccacatcggccaggccggtatccaggtcggaaacgcgtgctgggagctgtactgccttgagcatggcattcaggctgacggtcagatgcccggtgacaagaccattgggggaggtgatgatgctttcaacaccttcttcagtgagactggtgctgggaagcacgtgccccgtgctgtttttgttgaccttgaacccactgtcatcgatgaggtgaggactggcacctaccgccagctcttccaccctgagcagctcatcagtgggaaggaggatgccgccaacaactttgcccgtggtcactacaccattggcaaggagattgttgacctgtgccttgatcgcatcaggaagc

SEQ ID NO: 320340 - DNA, 413 bp, Zea mays
ccaactagcaacatagaaagcacaatagtgtaccaacaatggcagccaaaatattttgcttccttatgctccttggtctttctgcaagtgttgctaccgcaaccattttcccacaatgctcacaagctcctatagcttcccttcttcccccatacctctcaccagcggtgtcttcaatgtgtgaaaccccaattgttcaaccctacaggatccaacaggcaatcgcatcaggcatcttaccattatcacccttgttcctccaacaaccgtcagccctattacagcagttacctttggtccatttggtggcacaaaacatcagggcacaacaactacaacaacttgtgctagcaaaccttgctgcatactctcagcaacatcagtttcttccattcaaccaactggctgcattg

SEQ ID NO: 320341 - DNA, 148 bp, Zea mays
tcggggaaccatggggccgtaccaggtcctgaatggggttaatttttctgggcttttacggttcggccaagggcttgaaggtttcgaacccaaagttaacctttgcctcccttggaacggccttcatggttaactaccggattccgga

SEQ ID NO: 320342 - DNA, 413 bp, Zea mays
gcacaatagtgtaccaacaatggcagccaaaatatcttgcctccttatgctgcttggtctatctgcaagtgctgctacggcgaccattttcccgcaatgctcgcaagctcctatagcttcccttcttcccccgtacctctcaccagcggtgtcttcggtatgtgaaaacccaattcttcaaccctacaggatccaacaggcaatcacagatggcatcttacctttatcacccttgttcctccaacaatcatcagccctattacatcagttacctttggtgcatttattggcacaaaacatcagggcacaccaactacaacaactcgtgctatcaaaccttgctgcctactctcagcaacagcagtttctttcattcaaccaactagctgcattgaactctgcttattatttgc

SEQ ID NO: 320343 - DNA, 404 bp, Zea mays
  unsure (1)..(404): unsure at all n locations
tcggacagcattgcaactctcctggcttatttacagcagcaaacgaactacttaccattgcagggcagtctacgctgagtgtgagcctctgcttaccttcgttggacacaatccagcagcttgttgctcgtatctacacagcagcgtctgcgtcctaacgcatgagcacactgttacaatctgcaacacattgcttgtcattcgaaccaacttgcttnagacaaacgccagcatgcattctaccaacaactccatcatatggtggtgccactattcgtagattctcttatgagtctatnagttcaagtaataagagtctttttagtcatgatgtatcgtggccttcccatgaaataagtacagtacagtttctagaattcctcaatgcagaaacaaaaaggtga

SEQ ID NO: 320344 - DNA, 353 bp, Zea mays
tccgattcggtcgaccagctcgagggctggcccctgaaaacctggttgtcttgatccaatgaaggacgggtaggaccattccggaaaggaccgtccgatcaccggtcggccgtcagcgatgctggatggaattacaccccgttacaccatgagatcgactcgcatgaatctaggcgagagtggagctaaagacagcagaacacaatgtatcaccttcaaagcctgacttggctctttagctgggtcgaattgctgatgccgtgctgctgctttgagatctgatgggatcctttggatcaagacggagacttgcgagggacattgtcggcgctttggcgttatcaggaaggagc

SEQ ID NO: 320345 - DNA, 285 bp, Zea mays
gtcctaaatgccagccgcgccccttttttttcttttttttgcataattttttctggtatggctctcacaattcctttatttccaacttaaatttagactcttgatcattttttattcagaacgagcactagtgtcacgttatgacgacgtgaccaccttgagctcgaattcctcgacgacgaccagcgacaacccttccacttgagcggcacctagtgcttcgtgcctttgataccctagcgtcgcgccattcgagttgtgcatcttaacgccattgacatacac

SEQ ID NO: 320346 - DNA, 416 bp, Zea mays
ccttcttcccccgtacctctcaccagcggtgtcttcggtatgtgaaaacccaattcgtcaaccctacaggatccaacaggcaatcacagctggcatcttacctttatcacccttgttcctccaacaatcatcagccctattacatcagttacctttggtgcatttattggcacaaaacatcagggcacaacaactacaacaacttgtgctagcaaaccttgctgcctactctcagcaacagcagtttcttccattcaaccaactagctgcattgaactctgcttcttatttgcaacaacaacaactaccattcagccagctacctgctgcctacccccagcaatttcttccattcaaccaactggcagcattgaactctcctgcttatttacagcagcaacaactactaccattca

SEQ ID NO: 320347 - DNA, 419 bp, Zea mays
cggacgcgtgggtcagcattcaaaaacacaccaagcgaagcgcactagcaacgacctaacaccaatggctaccaagatattagccctccttgcgcttcttgcccttttagtgagcgcaacaaatgcgttcattattccacagtgctcacttgctcctagtgccattattccacagttcctcccaccagttacttcaatgggcttcgaacatccagccgtgcaagcctacaggctacaactagcgcttgcggcgagcgccttacaacaaccaattgcccaattgcaacaacaatccttggcacatctaaccctacaaaccattgcaacgcaacaacatcaacaacaacagtttctgccatcactgagccacctagccgtggtgaaccctgtcacctacttgcaacagcagctgcttgcat

SEQ ID NO: 320348 - DNA, 421 bp, Zea mays
gcactagcaacgacctaacaaccaagggctttccaagacattatccttccttgggctggttgcccttttggggagtgcaccaaatgcgttcattattccacaatgctcacttgctccgagtgccattattccacagttcctccctccagttacttcaatgggcttagaacacccagctgtgcaagcctataggctacaacaagcgcttgcggcgagcgtcttagaacaaccaattgcccaattacaacaacaatccttggcacatctaaccatacaaaccatcgcaacgcagcatcaacaagcactgagccacctagccgtggtgaaccctatcgcctacttgcaacaacagctgcttgcatccaacccacttgctttggcaaacgtagctgcataccaaccacaacaacagttgcaacag

SEQ ID NO: 320349 - DNA, 425 bp, Zea mays
gcatcatagaaagtggaatccagtagcaacaatagagcaacaatggcgaccaagatattttccctccttatgctccttgctctttctacatgtgttgctaacgcgacaattttccctcaatgctcacaagctcctatagcttcccttcttcccccataccttccatcaattatagcttcaatatgtgaaaacccagctcttcaaccatataggcttcaacaagcaatcgcagcaagcaacatacctttatcgcccttgttgtttcaacaatcgccagccctatctttggtgcagtcattggtacaaaccatcatggcacaacagctgcatcaactcgtgctacctctgatcaaccaagtagctctggcaaacctttctacctactctcagcaactacaatttcttccattcaaccaactgtctac

SEQ ID NO: 320350 - DNA, 340 bp, Zea mays
agtacactatatgacatcaatggcttctaccgaatatcagccttggcaagggatgggttatggctacatagctacttagaacgatttcatgattggctaatacgacagctgtgatataatgcacatgatctctgacaacatgaaatgatataaaagaccttgtaggcttaatagaatttatacacagaaaggtgatatctgagctgtatatgctaattggtgctctgactgcgatgaacatacttcaaataatgttctccatgcatacattgtgggtgatgtactggatgcctatgatgatacccatggtaactgcataattcccttagtcaaggttact

SEQ ID NO: 320351 - DNA, 158 bp, Zea mays
gtcgatgattgaataataatggggtaatccttaacattggttgcaatggtcaattggggcattgacctgattgaccattggaattgaaaagaaaaaagtattgttccaaaaaaaaaaaaaatactaaattttacagatcatattacaaaataaataac

SEQ ID NO: 320352 - DNA, 364 bp, Zea mays
  unsure (1)..(364): unsure at all n locations
attgagaccaactagcaacatataaagcacaatagtgtaccaacaatggcagccaggatattttgcctccttatgctccttggtctttctgcaagtgctgctacggcgaccattttcccgcaatgctcgcaagctcctatagcttcccttcttcccccgtacctctcaccagcggtgtcttcggtatgtgaaaacccaattcttcaaccctacaggatccaacaggcaatcacagctggcatattacctttatcacccttgttcctccaacaatcatcagccctattacatcagctacctttggtgcatttattggcacanatcatcagggcacaacaactactacaacttgtgctagcaaacc

SEQ ID NO: 320353 - DNA, 389 bp, Zea mays
attcaaaaacacaccaagcgaagcgcactagcaacgacctaacaccaatggctaccaagatattagccctccttgcgcttcttgcccttttagtgagcgcaacaaatgcgttcattattccacagtgctcacttgctcctagtgccattattccacagttcctcccaccagttacttcaatgggcttcgaacatccagccgtgcaagcctacaggctacaactagcgcttgcggcgagcgccttacaacaaccaattgcccaattgcaacaacaatccttggcacatataaccctacaaaccattgcaacgcaacaacaacaacaacaacagtttgtgccatcactgagccacctagccgtggtgaaccctgtcacctacttgcaacag

SEQ ID NO: 320354 - DNA, 426 bp, Zea mays
tcatagacagtagaatccattagcatcattagagcaccaatggcgaccaagatagtttccctccttatgctccttgctctttctacatgtgttgctaacgcgacaattttccctcaatgctcacaagctcctatagcttcccttcttcccccataccttccatcaattatagcttcagtatgtgaaaacccagctcttcaaccatataggcttcaacaagcaatcgcagcatgcaacatacctttatcgcccttgttgcttcaacaatcaccagccctatctttggtgcagtcattggtacaaaccatcagggcacaacagctgcagcaactcgtgctacctgtgatcaaccaagtagctctggcaaacctttctccctactctcagcatcaacaatttcttccattcaaccaactgtctacactg

SEQ ID NO: 320355 - DNA, 375 bp, Zea mays
cgggcggcctaaagggttggccttggtacctacaacgtttcttcaggagcctccaggggcctttactgccttggacggaaagactctcgatggacggatcataccgcttaatcatgctaacgagaagaccggtggcttacgtggcggctgtggctatgttgcggcggatatggtggtggtggaggctatggtggtgctggtggaagccgtggatactgtggcagcgactatggtggcagctacagcaacatgggtggtggtggtgattatggtgacgctggttgacgttgaggcaactatactgccagacgttgcgaccgcttcgcctacagtaactttggctatgacagtatctccggtggaaacggggctagc

SEQ ID NO: 320356 - DNA, 435 bp, Zea mays
tttcgggacgtcaaccttcaaaaccgcggtatcgtccaggaaattgatgtggcccaatgccttttaacccttctggtggtggcagcatctatgttgacgaagcttatgggacagcaaagcatgcaaaaactgcttctgctgctgctgctgcaaacaatgtcgcctgcaatgtatacagctcaattacaatgcctgtgcacccaatgccttggcagcagcaaggctatgagaacttttatggggcttatggctccaggatgtatagctcttacatgggatatagggtgccctatggagataacatgtgctcaggctatggaagaggttatggcggttcgtcatgaggttccagaatgtatggtggatcaacgtatatcgctggaatgttacgaccctatggtggctatgggatggtcatgagtccttataatcagg

SEQ ID NO: 320357 - DNA, 418 bp, Zea mays
cttgcatccaacccacttgctctggcgaacgtagctgcataccagcaacaacaacagctgcaacagtttatgccagtgctcagtcaactagccatggtgaaccctgccgtctacctacaactactttcatctagcccgctcgcggtgggcaatgcacctacgtacctacaacaacagttgctgcaacaaattgtaccagctctgactcagctagctgtggcaaaccctgctgcctacttacaacagttgcttccattcaaccaactggctgtgtcaaactctgctgcgtacctacaacagcgacaacagttacttaatccattggcagtggctaacccattggtcgctaccttcctgcagcagcaacaacaattgctgccatacaaccagttctctttgatgaaccctgccttgcagc

SEQ ID NO: 320358 - DNA, 397 bp, Zea mays
agccttccgccacttgccaccttaaaaggcccatttttgtcccaccattggcagccaaaatatttggctgccttatgctccttggtctttctgcaagtgttgctaccgcaaccattttcccacaatgctcacaagctcctatagcttcccttcttcccccatacctctcaccagcggtgtcttcaatgtgtgaaaacccaattgttcaaccctacaggatccaacaggcaatcgcaacaggcatcttaccattatcacccttgttcctccaacaaccgtcagccctattacagcagttacctttggtccatttggtggcacaaaacatcagggcacaacaactacaacaacttgtgctagcaaaccttgctgcatactctcagcaacatcagtttct

SEQ ID NO: 320359 - DNA, 425 bp, Zea mays
ggtgggtcggcttctcctcccccttcggttcgggttcgggttcgtgaggttctccgggtttcggtttcgtgggtgggcggatcgagatggcggcgtcggatgttgagtaccgctgcttcgtcggcggcctcgcctgggccacggacgaccactccctccacaacgccttcagcacctacggcgaggtcctcgagtccaagatcatcctcgatcgggagacgcagaggtcccgcggcttcggcttcgtcaccttctccacggaggaggcgatgcggaacgccatcgagggcatgaacggcaaggagctggacggtcgcaacatcaccgtcaacgaggcccagtcccgcggcggccgtggaggcggcggcggcggctacggtggtggcccgtgaggcggcggctacgggcgtggcgggcgccgtgat

SEQ ID NO: 320360 - DNA, 392 bp, Zea mays
cgacctacgcgtacgggggcggtggcttctactccccctcttggtctagctccggttcatgaagttctcgggatgggctgtttcgtgggtgggcggatcgagatggcggcgtctgatgttgagtaccgctgcttcgtcggcggcctcacctgggccactgacgaccactccgtacacaacgccttcagcacctacggcgaggtcctcgagtccaagatcatcctcgatcgggagacgcagaggtcccgcggcttcggcttcgtcaccttctccacggaggaggcgatgcggaacgccatcgagggcatgaacggcaaggagctggacggtcgcaacatcaccgtcaacgaggcccagtcccgctgcggccgtggaggcggctgcagcggcta

SEQ ID NO: 320361 - DNA, 100 bp, Zea mays
aaacattccaataagcttcaaatggtaaaggcctttttggttcaaccttttttttggacaaacttcaataaaaatatacctatggggaaaatctggtttc

SEQ ID NO: 320362 - DNA, 261 bp, Zea mays
cccacgcgtccgcagcaggatgatgacatcactgcggggtgaagcgacaatcccatctccgccgtgggaatcatgggtgagcgcttcgttcttggtggtttcgcctgtttttcctggtagtcttaggtactattcttgcttacctggccatcgctagcactattttttgcggcatctggtgggttcgactatgacgattatcctcacctatgtaaaccctagattgatggattttttaataaataaatagcagttctagcc

SEQ ID NO: 320363 - DNA, 285 bp, Zea mays
gcaacatagaaagtggaatccagtatcatcaacagagcatcaatggcgaccaagatattttccctccttatgctccttgctctttctgcatgtgttgctaacgcgacaattttccctcaatgctcacaagctcctatagcttcccttcttcccccataccttccatcaatgatagcttcagtatgtgaaaacccagctcttcagccctataggctccaacaagcaatcgcagcaagcaacatacctttatcacccttgttgtttcaacaatcgccagcccctatc

SEQ ID NO: 320364 - DNA, 420 bp, Zea mays
gaccaacaagcaacatagaaagtggaatccagtagcaacaatagagcaacagtggcgaccaagatattttccctccttatgctccttgctctttctacatgtgttgctaacgcgacaattttccctcaatgctcacaagctcctatagcttcccttcttcccccataccttccatcaattatagcttcaatatgtgaaaacccagctcttcaaccatataggcttcaacaagcaatcgcagcaagcaacatacctttatcgcccttgctgtttcaacaatcgccagccctatctttggtgcagtcattggtacaaaccatcatggcacaacagctgcagcaactcgtgctacctctgatcaaccaagtagctctggcaaacctttctccctactctcagcaaccaccatttcttccattc

SEQ ID NO: 320365 - DNA, 100 bp, Zea mays
tggagaccaactagcaacatagaaagcacaatagtgttccaacaatggcagccaaaatattgcctccttatgctccctgggctttctgcaagtgctggta

SEQ ID NO: 320366 - DNA, 417 bp, Zea mays
attgagaccaacaagcaacatagaaagtggaatacagtagcaacaatagagcaacaatggcggccaagatattttccatccttatgctccttgctctttctgcatgtgttgctaacgcgaccatttttcctcaatactcacaagctcctatagctgcccttcttcccccataccttccatcaatgaccgcttcagtttgtgaaaacccagcccttcaaccctacaggctccaacatgcaatcgcaacaagcaacttacctttatcacccctgttctttcaacaatcgccagccctatctttggtgcagtcattggtacaaaccatcagggcacatcagctgcaacaactcgtgctaccagtgatcagccaagtagctctggcaaacctttctccctactctcagcaacaacaatttt

SEQ ID NO: 320367 - DNA, 332 bp, Zea mays
tatgctccggggtcgttctgcaagtgctgctacggcgaccattttcccacattgctcacaagctcctatagcttcccttcttcccccgtacctctcaccaacggtgtcttcggtatgtgaaaacccaattcttcaaccctactggatccaacaggcaatcgcagctggcatcttacctttatcacccttgttcctccaacaatcatcagccctattacagcagttacctttggtgcatttattggcacaaaacatcagggcacaacaactacaacaacttgtgctagcaaaccttgctgcctactctcagcaacagcagtttcttccattca

SEQ ID NO: 320368 - DNA, 529 bp, Zea mays
  unsure (1)..(529): unsure at all n locations
cgtctcgctgaacccattctacnnagcaggcnntggaaagtaaagaagnngaggaggnannatttagcanncaggcccgtgtnngtcagtccttaanntgatgagtnnngttaagaaacccaacaccnnncaggtattgcccaatttaaatcctgtnnttcccttccanngttattttgctttagaaaccttannagtgcattgtgctttattaannttttcgttctttggggttaccatacccaagcttnngaggataccanngattgagaaattaagaacacctnnttcggtgaatgggggaaaggcactttatacatgannctcagcttctggttatgtacactttcgtttctgtcanttttactttcccaatcaaaaacccttaattaatagtcatcgttgcattttgaaataaaactgtcttgtgtatnctccgtgaaatgccgcagttaaattctacagcnttagaaatgctgtatccaacgtagtagttggttctctgtacatcttctgatcttattcccgg

SEQ ID NO: 320369 - DNA, 440 bp, Zea mays
attgagaccaactagcaacatagaaagcacaatagtgtaccaacaatggcagccaaaatattttgcctccttatgctccttggtctttctgcaagtgctgctacggcgaccattttcccacaatgctcacaagctcctatagcttcccttcttcccccgtacctctcaccagcggtgtcttcggtatgtgaaaacccaattcttcaaccctataggatccaacaggcaatcgcagctggcatcttacctttatcacccttgttcctccaacaatcatcagccctattacagcagttacctttggtgcatttattggcacaaaacatcagggcacaacaactacaacaacttgtgctagcaaaccttgctgcctactctcagcaacaacagtttcttccattcaaccaactagctgcattgaactctgcttcttatttgca

SEQ ID NO: 320370 - DNA, 301 bp, Zea mays
cgatgctgctgccgatgggcgcggtgatgcagaaacgtgggattctatggacgcgcgacgaccaggctcgtcgctgcgatcggtgtctacctgcgccaactttagtctggtttcagcagcaggacgggtactacagatatgctagataaaggtcttatatatgtcatatgacctatcatggtcttatatgttcgatcgtcgtcgtgtctgtatgtacatacatggttgtcaaataaagctctttgcattctgataaaacttgtgctgtaagcacgctttttcaaggcacatcataatatcc

SEQ ID NO: 320371 - DNA, 439 bp, Zea mays
gcaacatagaaagcacaatagtgtaccaacaatggcagccaaaatattttgcctgcgtatgctccttggtctttctgcaagtgctgctacggcgaccattttcccgcaatgctcgcaagctcctatagcttcccttcttcccccgtacctctcaccagcggtgtcttcggtatgtgaaaacccaattcttcaaccctacaggatccaacaggcaatcgcagctggcatcttacctttatcacccttgttcctccaacaatcatcagccctattacaacagttacctttggtgcatttattggcacaaaacatcagggcacaacaactacaacaacttgtgctagcaaaccttgctgcctactctcagcaacagcagtttcttccattcaaccaactaggttcattgaactctgcttcttatttgcaacaacaacaacta

SEQ ID NO: 320372 - DNA, 205 bp, Zea mays
  unsure (1)..(205): unsure at all n locations
cgagaccaacaangcaacatangaaaggtggaatacagtnagccaactaatagagcaacccaatggcgnngccaagatnattggcggcgatccttatgctnnccttgctctgttnnctgcatgnnngttgctaacngcngnnaccatttnnttcctcaatacctcnnacaagctcnnctatagnnctgcccnnttcttnnccccc

SEQ ID NO: 320373 - DNA, 440 bp, Zea mays
gccgccggttcatctaccgccgccggtgcatctgccacctccggttcacctgccacctccggtgcatctcccaccgccggtccacctgccgccgccggtccacctgccaccgccggtccatgtgccgccgccggttcatctgccgccgccaccatgccactaccctactcaaccgccccggcctcagcctcatccccagccacacccatgcccgtgccaacagccgcatccaagcccgtgccagctgcagggaacctgcggcgttggcagcaccccgatcctgggccagtgcgtcgagttcctgaggcatcagtgcagcccgacggcgacgccctactgctcgcctcagtgccagtcgttgcggcagcagtgttgccagcagctcaggcaggtggagccgcagcaccggtaccaggcgatcttcggcttggtcctccagt

SEQ ID NO: 320374 - DNA, 434 bp, Zea mays
gcacaatagtgtaccaacaatggcagccaaaatattttgcctccttatgctccttggtctttctgcaagtgctgctacggcgaccattttcccgcaatgctcgcaagctcctatagcttcccttcttcccccgtacctctcaccagcggtgtcttcggtatgtgaaaacccaattcttcaaccctacaggatccaacaggcaatcacagctggcatcttacctttatcacccttgttcctccaacaatcatcagccctattacatcagttacctttggtgcatttattggcacaaaacatcaaggcacaacaactacaacaacttgtgctagcaaaccttgctgcctactctcagcaacagcagtttcttccattcaaccaactagctgcattgaactctgcttcttatttgcaacaacaacaactaccattca

SEQ ID NO: 320375 - DNA, 430 bp, Zea mays
gctgaggcacatgagagaagatattgcatcgattgaatcacgtaacaatggcttggagatgcagtctgtaaacaacaaagggcttatggaagagctagataaattgcttgagcgtctgcggattccacaagagtttgcagcatcattaactggaggctcatttgaagagtcacggatgctgaaaaatgttgaggcatgtgaatggttgacaggggccattcgcagtcttgaagttcctaatttggacccatgctatgtcaacatgcgcgctgttagagagaaaaaggcagagctggagaaactgaaaacaacttttgttcgacgagcatcagagtttttgcggaactacttctccagtttggtagacttcatgatcagtgacaaaagctacttttcacagcgtggacaattgaagcggcctgatcatgca

SEQ ID NO: 320376 - DNA, 433 bp, Zea mays
gaaagcacaatattgtaccaataatggcagccaaaatattttgcctcattatgctccttggtctttctgcaagtgctgctacggcgagcattttcccgcaatgctcacaagctcctatagcttcccttcttcccccatacctctcaccagcgatgtcttcagtatgtgaaaatccaattcttctaccctacaggatccaacaggcaatcgcagcaggcatcttacctttatcacccttgttcctccaacaatcatcagccctattacagcagttacctttggtgcatttattggcacaaaacatcagggcacaacaactacaacaactcgtgctagcaaaccttgctgcctactctcagcaacagcagttacctttggtgcatttgttggcacaaaacatcagggcacaacaactacaacaactcgtgctagc

SEQ ID NO: 320377 - DNA, 521 bp, Zea mays
  unsure (1)..(521): unsure at all n locations
ccgtccgctgctnngctgcttnnatttgcaaccaactatactacncnnattcagtcanngctagctnngctgcctacgcgcccnnagcaatttgcttccatttcannaccaactgnngcagcattgaacctctgctnnngcttatttacccaacagnncaacagcntnnaccaccannttcagccagcttanngctgatgtganngccctgttgcnncttcttgacaccannacaacagnnttgttgggccgttctaaacctgcannngctgcgcnnctaacgcnntggcaccctttcttaccaactnggcaacaattggctgcnncattcannaccaacttgggctttgacccaaacccannacagcgttctaaccanacaacnnccatcannttggtggtgggccctctnnttagaattgggcttatgagttattacccttcaataatggannagttttttgggatgaaatgtttggtggctttttcccagannnataagaaaaggtacaaaatttcta

SEQ ID NO: 320378 - DNA, 294 bp, Zea mays
tccaacaatcatcagccctattacattagttacctttggtgcatttattggcacaaaacatcagggcacaacaactacaacaacttgtgctagcaaaccttgctgcctactctcagcaacaacaattgctgccattcaaccaacttgctttgacaaacccaacagcgttctaccaacaacccatcattggtggtgccctcttttagattgcttatgagttatacttcaataatgaagttttttggatgatgtttgtggcttcccagaaataagaaagtacatttctagattctt

SEQ ID NO: 320379 - DNA, 432 bp, Zea mays
cagctcttcagccctataggctccatcaagcaatcgcagcaagcaacataccttgatcacccttgttgtttcaacaatcgccagccctatctttggtgcagtcattggtacaaaccatcagggcacagcagctgcagcaactcgtgctacctgtgatcaaccaagtagctctggcaaacctttctgcctactctcagcaacaacaatttcttccattcaaccaactgtctacactgaaccctgctgcttatttgcagcatcaactattaccattcagccagctagctactgcctactgtcagcaacaacaacttcctacatttaaccaattggccgcactgaaccccgctgcttatttgcagcatcacatactactaccatttagccagctagctgcagcaaaccgtgctttcttcttgacacagcatcagt

SEQ ID NO: 320380 - DNA, 430 bp, Zea mays
  unsure (1)..(430): unsure at all n locations
gctgtgcaagcctataggctacaacaagctgggtgttcgaaggccattgaagtaactggtgggaggaactgtggaataatggaactaggagcacccagctgtgcaagcctataggctacaacaagcgattgcggcgagcgtcttacaacaaccaattgcccaattgcaacaacaatccttggcacatctaacaatacaaaccatcgcaacgcaacagcaacaacagttcctaccagcactgagccacctagccatggtgaaccctgtcgcctacttgcaacagcagctgcttgcatccaacccacttgctctagcaaacgtagttgcaaaccagcaacaacaacaactgcaacagtttctgccagcgcttagtcaactagccatggtgaaccctgccgnctacctacaacagcaacaactgctttcatct

SEQ ID NO: 320381 - DNA, 437 bp, Zea mays
acggcgaccattttcccgcaatgctcacaagctcctatagcttcccttcttcccccgtacctctcaccagcggtgtcttcggtatgtgaaaacccaattcttcaaccctacaggatccaacaggcaatcgcagctggcatcttacctttatcacccttgttcctccaacaatcatcagccctattacagcagttacctttggtgcatttattggcacaaaacatcagggcacaacaactacaacaacttgtgctagcaaaccttgctgcctactctcagcaacagcagtttcttccattcaaccaactagctgcattgaactctgcttcttatttgcaacaacaacaactaccattcagccagctacctgttgcctacccccaacaatttcttccattcaaccaactggcagcattgaactctcctgcttatttaca

SEQ ID NO: 320382 - DNA, 442 bp, Zea mays
attgagaccaactagcaacatagaaagcacaatagtgtaccaacaatggcagccaaaatattttgcttccttatgctccttggtctttctgcaagtgttgctaccgcaaccattttcccacaatgctcacaagctcctatagcttcccttcttcccccatacctctcaccagcggtgtcttcaatgtgtgaaaccccaattgttcaaccctacaggatccaacaggcaatcgcaacaggcatcttaccattatcacccttgttcctccaacaaccgtcagccctattacagcagttacctttggtccatttggtggcacaaaacatcagggcacaacaactacaacaacttgtgctagcaaaccttgctgcatactctcagcaacatcagtttcttccattcaaccaactggctgcattgaactctgctgcttatttgcaac

SEQ ID NO: 320383 - DNA, 438 bp, Zea mays
  unsure (1)..(438): unsure at all n locations
caacatagaaagcacaatagtgtaccaacaatggcagccaaaatattttgcctccgtatgctccttggtctttctgcaagtgctgctacggcgaccattttcccgcaatgctcgcaagctcctatagcttcccttcttcccccgtacctctcaccagcggtgtcttcggtatgtgaaaacccaattcttcaaccctacaggatccaacaggcaatcgcagctggcatcttacctttatcacccttgttcctccaacaatcatcagccctattacaacagttacctttggtgcatttattggcacanaacatcagggcacaacaactacaacaacttgtgctagcaaaccttgctgcctactctcagcaacagcagtttcttccattcaaccaactaggttcattgaactctgcttcttatttgcaacaacaacaacta

SEQ ID NO: 320384 - DNA, 440 bp, Zea mays
cccacgcgtccgcaacaagcaacatataaagtggaatacagtagcaacaatagagcaacaatggcggccaagatattttccatccttatgctccttgctctttctgcatgtgttgctaacgcgaccatttttcctcaatactcacaagctcctatagctgcccttcttcccccataccttccatcaatgaccgcttcagtttgtgaaaacccagcccttcaaccctacaggctccaacaagcaatcgcaacaagcaacttacctttatcacccctgttctttcaacaatcgccagccctatctttggtgcagtcattggtacaaaccatcagggcacaacagctgcaacaactcgtgctaccagtgatcagccaagtagctctggcaaacctttctccctactctcagcaacaacaatttcttccattcaaccaactgtc

SEQ ID NO: 320385 - DNA, 435 bp, Zea mays
cagcattcaaaaacacaccaagcgaagcgcactagcaacgacctaacaccaatggctaccaagatattagccctccttgcgcttcttgcccttttagtgagcgcaacaaatgcgttcattattccacagtgctcacttgctcctagtgccattattccacagttcctcccaccagttacttcaatgggcttcgaacatccagccgtgcaagcctacaggctacaactagcgcttgcggcgagcgccttacaacaaccaattgcccaattgcaacaacaatccttggcacatctaaccctacaaaccattgcaacgcaacaacaacaacaacaacagtttctgccatcactgagccacctagccgtggtgaaccctgtcacctacttgcaacagcagctgcttgcatccaacccacttgctctggcgaacgtagct

SEQ ID NO: 320386 - DNA, 426 bp, Zea mays
caactagcaacatagaaagcacaatagtgtaccaacaatggcagccaaaatattgtgcctccttatgctccttggtctttctgcaagtgctgctacggcgaccattttcccgcaatgctcgcaagctcctatagcttcccttcttccaccgtacctctcaccagcggtgtcttcggtatgtgaaaacccaattcttcaaccctacaggatccaacaggcaatcacagctggcatcttacctttatcacccttgttcctacaacaatcatcagccctattacatcagttacctttggtgcatttatcggcacaaaacatcagggcacaacaactacaacaacttgtgctaacaaaccttgctgcctactcttagcaacagcagtttcttccattcaaccaactagctgcattgaactctgcttctta

SEQ ID NO: 320387 - DNA, 430 bp, Zea mays
aactagcaacatagaaagcacaatagtgtaccaacaatggcagccaaaatattttgcctccttatgctccttggtctttctgcaagtgctgctacggcgaccattttcccgcaatgctcgcaagctcctatagcttcccttcttcccccgtacctctcaccagcggtgtcttcggtatgtgaaaacccaattcttcaaccctacaggatccaacaggcaatcacagctggcatcttacctttatcacccttgttcctccaacaatcatcagccctattacatcagttacctttggtgcatttattggcacaaaacatcagggcacaacaactacaacaacttgtgctagcaaaccttgctgcctactctcagcaacagcagtttcttccattcaaccaactagctgcattgaactctgcttcttatttgc

SEQ ID NO: 320388 - DNA, 429 bp, Zea mays
gttctagatcgcgagcggccgccctttttttttttttattttttgatttttttttttatttatggtggttggacttttttttttacaccattatttttacgggtaaatttatggtattgggaacaggtcaagaacaacggaagggaggaggggggagaacatgacaaattggagccgtgcacgaacaccaacgaaaacaaatggggggacgatagaccctatggggatggacgaattgttaattgccaattattattgaaccatgctagactgaaagtgagaaggggccatgccccgggggggcgggatggggccctgcgcgatcctcgacgtcctttggcccggctactccatagaggaggacagggactgcacgtactacgcggaattaccgtacgcaaaccactcgctggtggctgcaggctacga

SEQ ID NO: 320389 - DNA, 432 bp, Zea mays
acatagaaagtggaatccagtagcaacaacagagcaacaatggcgaccaagatattttccctccttatgctccttgctctttctgcatgtgttgctaacgcgacaattttccctcaatgctcacaagctcctatagcttcccttcttcccccataccttccatcaatgatagcttcagtatgtgaaaacccagctcttcagccctataggctccaacaagcaatcgcagcaagcaacatacctttatcacccttgttgtttcaacaatcgccagccctatctttggtgcagtcattggtacaaaccatcagggcacagcagctgcagcaactcgtgctacctgtgatcaaccaagtagctctggcaaacctttctccctactctcagcaacaacaatttcttccattcaaccaactgtctacactgaaccct

SEQ ID NO: 320390 - DNA, 434 bp, Zea mays
gaccaactagcaacatagaaagcacaatagtgtaccaacaatggcagccaaaatgttttgcctccttatgctccttggtctttctgcaagtgctgctacggcgaccattttcccacaatgctcacaagctcctatagcttcccttcttcccccgtacctctcaccagcggtgtcttcggtatgtgaaaacccaattcttcaaccctataggatccaacaggcaatcgcagctggcatcttacctttatcacccttgttcctccaacaatcatcagccctattacagcagttacctttggtgcatttattggcacaaaacatcagggcacaacaactacaacaacttgtgctagcaaaccttgctgcctactctcagcaacaacagtttcttccattcaaccaactagctgcattgaactctgcttcttatttgc

SEQ ID NO: 320391 - DNA, 442 bp, Zea mays
  unsure (1)..(442): unsure at all n locations
attgagaccaactagcaacatagaaagcacaatattgtaccaataatggcagccaggatattttgcctcattatgctccttggtctttctgcaagtgctgctacggcgagcattttcccgcaatgctcacaagctcctatagcttcccttcttcccccatacctctcaccagcgatgtcttcagtatgtgaaaatccaattcttctaccctacaggatccaacaggcaatcgcagcaggcatcttacctttatcacccttgttcctccaacaatcatcagccctattacagcagttacctttggtgcatttattggcacaaaacatcagggcacaacaactacaacaactcgtgctagcaaaccttgctgcctactctcagcaacagcagttacctttggtgcatttgttggcacanaacatcagggcacaacaactacaac

SEQ ID NO: 320392 - DNA, 440 bp, Zea mays
  unsure (1)..(440): unsure at all n locations
gaccaactagcaacatagaaagcacaatagtgtaccaacaatggcagctaaaatgtgttgcctccttatgctccttggtctttctgcaagtgctgctacggcgaccattttcccacaatgctcacaagctcctatagcttcccttcttcccccgtacctctcaccaacggtgtcttcggtatgtgaaaacccaattcttcaaccctacaggatccaacaggcaatcgcagctggcatcttacctttatcacccttgttcctccaacaatcatcagccctattacagcagttacctttggtgcatntattggcacaaaacatcaaggcacaacaactacaacaacttgtgctagcaaaccttgctgcctactctcagcaacagcagtttcttccattcaaccaactagctgcattgaactctgcttcttatttgcaacaac

SEQ ID NO: 320393 - DNA, 365 bp, Zea mays
cagagcgcagaagaacccgatcgacaccatgagggtgttgctcgttgccctcgctctcctggctctcgctgcgagcgccacctccacgcatacaagcggcggctgcggctgccagccaccgccgccggttcatctaccgccgccggtgcatctgccacctccggttcacctgccacctccggtgcatctcccaccgccggtccacctgccgccgccggtccacctgccaccgccggtccatgtgccgccgccggttcatctgccgccgccaccatgccactaccctactcaaccgccccggcctcagcctcatccccagccacacccatgcccgtgccaacagccgcatccaagcccgtgccagc

SEQ ID NO: 320394 - DNA, 428 bp, Zea mays
caaccatataggcttcaacaagcaatcgcagcaagcaacatacctttatcgcccgtgttgtttcaacaatcgccagccctatctttggtgcagtcattggtacaaaccatcagggcacaacagctgcagcaactcgtgctacctctgatcaaccaagtagctctggcaaacctttctccctactctcagcaacaacaatttcttccattcaaccaactgtctacactgaaccctgctgcttatttgcagcaacaactattaccatttagccagctagctactgcctactctcagcaacaacaacttcttccatttaaccaattggccgcactgaaccccgctgcttatttgcagcagcaaatactactaccatttagccagctagctgcagcaaaccgtgcttccttcttgacacagcaacagttgct

SEQ ID NO: 320395 - DNA, 432 bp, Zea mays
attgagaccaactagcaacatagatagcacaatagtgtaccaacaatggcagccggaatattttgcctccttatgctccttggtctttctgcaagtgctgctacggcgaccattttcccgcaatgctcgcaagctcctatagcttcccttcttcccccgtacctctcaccagcggtgtcttcggtatgtgaaaacccaattcttcaaccctacaggatccaacaggcaatcacagctggcatcttacctttatcacccttgttcctccaacaatcatcagccctattacatcagttacctttggtgcatttattggcacaaaacatcagggcacaacaactacaacaacttgtgctagcaaaccttgctgcctactctcagcaacagcagtttcttccattcaaccaactagctgcattgaactctgcttct

SEQ ID NO: 320396 - DNA, 282 bp, Zea mays
gcagcattgaactctcctgcttatttacagcagcaacaactactaccattcagccagctagctggtgtgagccctgctaccttcttgacacaaccacagttgttgccgttctaccagcacgttgcgcctaacgctggcaccctcttacaactgcaacaattgctgccattcaaccaacttgctttgacaaacccagcagtgttctaccaacaacccatcattggtggtgccctcttttagatttcttatgagttatagttcaataataaagttttttatctg

SEQ ID NO: 320397 - DNA, 427 bp, Zea mays
gaaagtggaatccagtagcaacaatagagcaacaatggcgaccaagatattttccctccttatgctccttgctctttctacatgtgttgctaacgcgacaattttccctcaatgctcacaagctcctatagcttcccttcttcccccataccttccatcaattatagcttcaatatgtgaaaacccagctcttcaaccatataagcttcaacaagcaatcgcagcaagcaacatacctttatcgcccttgttgtttcaacaatcgccagccctatctttggtgcagtcattggtacaaaccatcaaggcacaacagctgcagcaactcgtgctacctctgatcaaccaagtagctctggcaaacctttctccctactctcagcaacaacaatttcttccattcaaccaactgtctacactgaaccct

SEQ ID NO: 320398 - DNA, 452 bp, Zea mays
gagaccaactagcaacatagaaagcacaatattgtaccaataatggcagccaaaatattttgcctcattatgctccttggtctttctgcaagtgctgctacggcgagcattttcccgcaatgctcacaagctcctatagcttcccttcttcccccatacctctcaccagcgatgtcttcagtatgtgaaaatccaattcttctaccctacaggatccaacaggcaatcgcagcaggcatcttacctttatcacccttgttcctccaacaatcatcagccctattacagcagttacctttggtgcatttattggcacaaaacatcagggcacaacaactacaacaactcgtgctagcaaaccttgctgcctactctcagcaacagcagttacctttggtgcatttgttggcacaaaacatcagggcacaacaactacaacaactcgtgctagc

SEQ ID NO: 320399 - DNA, 428 bp, Zea mays
atctaaccctacaaaccattgcaacgcaacaacaacaacaacaacagtttctgccatcactgagccacctagccgtggtgaaccctgtcacctacttgcaacagcagctgcttgcatccaacccacttgctctggcgaacgtagctgcataccagcaacaacaacagctgcaacagtttatgccagtgctcagtcaactagccatggtgaaccctgccgtctacctacaactactttcatctagcccgctcgcggtgggcaatgcacctacgtacctacaacaacagttgctgcaacaaattgtaccagctctgactcagctagctgtggcaaaccctgctgtctacttacaacagttgcttccattcaaccaactggctgtgtcaaactctgctgcgtacctacaacagcgacaacagttacttaat

SEQ ID NO: 320400 - DNA, 435 bp, Zea mays
ctttatctactccagagcgcagaagaacccgatcgacaccatgagggtgttgctcgttgccctcgctctcctggctctcgctgcgagcgccacctccacgcatacaagcggcggctgcggctgccagccaccgccgccggttcatctaccgccgccggtgcatctgccacctccggttcacctgccacctccggtgcatctcccaccgccggtccacctgccgccgccggtccacctgccaccgccggtccatgtgccgccgccggttcatctgccgccgccaccatgccactaccctactcaaccgccccggcctcagcctcatccccagccacacccatgcccgtgccaacagccgcatccaagcccgtgccagctgcagggaacctgcggcgttggcagcaccccgatcctgggccagtgcgtcgagttcct

SEQ ID NO: 320401 - DNA, 435 bp, Zea mays
caacaagcaacatagaaagtggaatacagtagcaaaaatagagcaacaatggcggccaagatattttccatccttatgctccttgctctttctgcatgtgttgctaacgcgaccatttttcctcaatactcacaagctcctatagctgcccttcttcccccataccttccatcaatgaccgctttagtatgtgaaaacccagcccttcaaccctacaggatccagcaagcaatcgcaacaagcaacttacctttatcacacctgttctttcaacaatcgccagccctatctttggtgcagtcattggtacaaaccatcagggcagaacagttgcagcaactcgtgctaccagtgatcagccaagtagctctggcaaacctttccccctactctcagcaacaacaatttcttccattcaaccaactgtctatactg

SEQ ID NO: 320402 - DNA, 439 bp, Zea mays
attttgagcattcagaaacacaccaagcgaagcacattagcaacaacctaacaacagtggctaccaagatattatccctccttgcgcttcttgcgctttttgcgagcgcaacaaatgcgttcattattccacaatgctcacttgctccaagttccattattacacagttcctcccaccagttacttcaatgggcttcgaacacccagctgtgcaagcctataggctacaacaagcaattgcggcgagcgtcttacaacaaccaatttcccagttgcaacaacaatccttggcacatctaacaatacaaaccatcgcaacgcaccagcaccaccaattcctacaagcactgagccacctagccatggtgaaccctgccgcctacttgcaacagcagttgcttgcatcaaacccacttgctctggcaaacgtagttgcaaa

SEQ ID NO: 320403 - DNA, 435 bp, Zea mays
caactagcaacatagaaagcacaatagtgtaccaacaatggcagccaaaatattttgcctgcttatgctccttggtctttctgcaagtgctgctacggcgaccattttcccgcaatgctcgcaagctcctatagcttcccttcttcccccgtacctctcaccagcggtgtcttcggtatgtgaaaacccaattcttcaaccctacaggatccaacaagcaatcgcagctggcatcttacctttatcacccttgttcctacaacaatcatcagccctattacaacagttacctttggtgcatttattggcacaaaacatcagggcacaacaactacaacaacttgtgctagcaaaccttgctgcctactctcagcaacagcagtttcttccattcaaccaactaagttcattgaactctgcttcttatttgcaaca

SEQ ID NO: 320404 - DNA, 439 bp, Zea mays
tcagcattcaaaaacacaccaagcgaagcgcactagcaacgacctaacaccaatggctaccaagatattagccctccttgcgcttcttgcccttttagtgagcgcaacaaatgcgttcattattccacagtgctcacttgctcctagtgccagtattccacagttcctcccaccagttacttcaatgggcttcgaacatccagccgtgcaagcctacaggctacaactagcgcttgcggcgagcgccttacaacaaccaattgcccaattgcaacaacaatccttggcacatctaaccctacaaaccattgcaacgcaacaacaacaacaacagtttctgccatcactgagccacctagccgtggtgaaccctgtcacctacttgcaacagcagctgcttgcatccaacccacttgctctggcgaacgtagctgcatac

SEQ ID NO: 320405 - DNA, 146 bp, Zea mays
gccctcttttagatttattattgaactataactcataagaaatctaaaagagggcaccaccaatgatgggttatagttcaataataaagttttttgtctgatgtttgtggcttcccagaaataagaaagtacatttctagattctt

SEQ ID NO: 320406 - DNA, 435 bp, Zea mays
caactagcaacatagaaagcacaatagtgtaccaacaatggcagccaaaatatggtgcctgcttatgctccttggtctttctgcaagtgctgctacggcgaccattttcccacaatgctcacaagctcctatagcttcccttcttcccccgtacctctcaccagcggtgtcttcggtatgtgaaaacccaattcttcaaccctataggatccaacaggcaatcgcagctggcatcttacctttatcacccttgttcctccaacaatcatcagccctattacagcagttacctttggtgcatttattggcacaaaacatcagggcacaacaactacaacaacttgtgctagcaaaccttgctgcctactctcagcaacaacagtttcttccattcaaccaactagctgcattgaactctgcttcttatttgcaaca

SEQ ID NO: 320407 - DNA, 440 bp, Zea mays
acgcgttcggcaacatagaaagcacaattcattttcaacaatggcgcaacaatggcgagcacgaggttatccctccttatgctccttgctctttctacatgtcttgctaacgcgacaattgtccctcaatgctcacaagctcctatagcttcccttatttctccataccttccatcaattatagcttcagcatgtgaaaacccagctcttcaaccatatatgcttcaacaagcaatcgcagcaagcaacatacctttatcgcccttgttgttttaacaatcaccaaccctatctttggtgcagtcattggtacaaaccatcaaggcacaacaactgctgcaactcgtgctacctgtgatcaaccaagtaactctggcaaacctttctccctactcttaacaacaacaatttctttcattcaaccaactgtctacactgaa

SEQ ID NO: 320408 - DNA, 337 bp, Zea mays
cagaaacacaccaagcgaagcgcactagcaacaacctaacaacaatggctaccaagatatgatccctccttgcgcttcttgcgctttttgcgagcgcaacaaatgcgtccattattccacaatgctcacttgctcctagttccattattccacagttcctcccaccagttacttcaatggccttcgaacacccagctgtgcaagcctataggctacaacaagcgattgcggcgagcgtcttacaacaaccaattgcccaattgcaacaacaatccttggcacatctaacaatacaaaccatcgcaacgcaacagcaacaacagttcctaccagcact

SEQ ID NO: 320409 - DNA, 429 bp, Zea mays
gcaacatagaaagtagaatccattatcaacaatagagcaacaatggcgaccaagatattttccctccttatgctccttgctctttctacatgtgttgctaacgcgacaattttccctcaatgctcacaagctcctatagcttcccttcttcccccataccttccatcaattatagcttcagtatgtgaaaacccagctcttcaaccatataggcttcaacaagcaatcgcagcaagcaacatacctttatcgcccttgttgtttcaacaatcaccagccctatctttggtgcagtcattggtacaaaccatcagggcacaacagctgcagcaactcgtgctacctgtgatcaaccaagtagctctggcaaacctttctccctactctcagcaacaacaatttcttccattcaaccaactgtctacactg

SEQ ID NO: 320410 - DNA, 473 bp, Zea mays
agtcgacctgcaggcatgcaagctcatcgcggagggtacaataatgtaccaacaatggcagccaaaatattttgcttccttatgctgcttggtctttctgcaagtgctgctaccgcaaccattttcccacaatgctcacaagctcctatagcttcctttcttcccccatacctctcaccagcggtgtcttcagtatgtgaaaacccaattcttcaaccctacaggatccaacaggcaatcgcagcaggcatcttacctttatcacccttgttcctccaacaaccgtcagccctattacagcagttacctttggtgcatttgttggcacaaaacatcaaggcacaacaactacaacaacttgtgctaggaaaccttgctgcctactctcagcaacagcagtttcttccattcaaccaactggctgcattgaactctgctgcttatttgcaacaacaactaccattcagtcagct

SEQ ID NO: 320411 - DNA, 450 bp, Zea mays
  unsure (1)..(450): unsure at all n locations
caaagcacaatagtgtaccaacaatggcagccaaaatattttgctctccttatgctccttggtctttctgcaagtgctgctacggcgaccattttcccgcaatgctcgcaagctcctatagcttcccttcttcccccgtacctctcaccagcggtgtcttcggtatgtgaaaacccaattcttcaaccctacaggatccaacaggcaatcacagctggcatcttacctttatcacccttgttcctccaacaatcatcagccctattacatcagttacctttggtgcatttattggcacanaacatcagggcacaacaactacaacaacttgtgctagcaaaccttgctgcctactctcagcaacagcaagttctttcattcaaccaactagctgcattgaactctgcttcttatttgcaacaacaacaactaccattcagccagctacct

SEQ ID NO: 320412 - DNA, 441 bp, Zea mays
aacacaccaagcgaagcgcactagcaacgacctaacaccaatggctaccaagatattagccctccttgcgcttcttgcccttttagtgagcgcaacaaatgcgttcattattccacagtgctcacttgctcctagtgccattattccacagttcctcccaccagttacttcaatgggcttcgaacatccagccgtgcaagcctacaggctacaactagcgcttgcggcgagcgccttacaacaaccaattgcccaattgcaacaacaatccttggcacatctaaccctacaaaccattgcaacgcaacaacaacaacaacaacagtttctgccatcactgagccacctagccgtggtgaaccctgtcacctacttgcaacagcagctgcttgcatccaacccacttgctctggcgaacgtagctgcttaccagcaacaaca

SEQ ID NO: 320413 - DNA, 385 bp, Zea mays
cggacgcgtggggcaatttcttccattcaaccaactggcagcattgaactctgctgcttatttacaacagcaacagctaccaccattcagccagctagctgatgtgagccctgttgccttcttgacacaacaacagttgttgccgttctacctgcacgctgcgcctaacgctggcaccctcttacaactgcaacaattgctgccattcaaccaacttgctttgacaaacccaacagcgttctaccaacaacccatcattgggggtgcccttttttagattgcttatgagttatacttcaataatgaagtcttttggatgatgtctgtggcttcccagaaataagaaagtacatttctagattcttaaaacacaaatggccttaac

SEQ ID NO: 320414 - DNA, 437 bp, Zea mays
gtgtaccaacaatggcagccaaaatattttgcttccttatgctccttggtctttctgcaagtgttgctaccgcaaccattttcccacaatgctcacaagctcctatagcttcccttcttcccccatacctctcaccagcggtgtcttcaatgtgtgaaaccccaattgttcaaccctacaggatccaacaggcaatcgcaacaggcatcttaccattatcacccttgttcctccaacaaccgtcagccctattacagcagttacctttggtccatttggtggcacaaaacatcagggcacaacaactacaacaacttgtgctagcaaaccttgctgcatactctcagcaacatcagtttcttccattcaaccaactggctgcattgaactctgctgcttatttgcaacaacaattaccattcagccagctagttgct

SEQ ID NO: 320415 - DNA, 389 bp, Zea mays
gaattcccagctagacgtacgagttcgagcattcagaaacacaccaagcgaaatgcactagcaacaacctatcaacaatggctgccaagatattatccctccttgcgcttcttgcgctttttgcgagcgcaacaaatgcgtccattattccacaatgctcacttgctcctagttccattattccacagttcctcccaccagttacttcaatggccttcgaacacccagctgtgcaagcctataggctacaacaagcgattgcggcgagcgtcttacaacaaccaattgcccaattgcaacaacaatccttggcacatctaacaatacaaaccatcgcaacgcaacagcaacaacagttcctaccagcactgagccacctaaccatggtg

SEQ ID NO: 320416 - DNA, 388 bp, Zea mays
accaccaccaggggaagcgcactaccaactacctaacaccaatggctaccaagatattagccctgcttgcgcttcttgcccttttagtgagcgcaacaaatgcgttcattattccacagtgctcacttgctcctagtgccattattccacagttcctcccaccagttacttcaatgggcttcgaacatccagccgtgcaagcctacaggctacaactagcgcttgcggcgagcgccttacaacaaccaattgcccaattgcaacaacaatccttggcacatctaaccctacaaaccattgcaacgcaacaacaacaacaacaacagtttctgccatcactgagccacctagccgtggtgaaccctgtcacctacttgcaacagcagct

SEQ ID NO: 320417 - DNA, 425 bp, Zea mays
caactagctgcattgaactctgcttcttatttgcaacaacaacaactaccattcagccagctacctgctgcctacccccagcaatttcttccattcaaccaactggcagcattgaactctcctgcttatttacagcagcaacaactactaccattcagccagctagctggtgtgagccctgctaccttcttgatacaaccacagttgttgccgttctaccagcacgctgcgcctaacgctggcaccctcttacaactgcaacaattgctgccattcaaccaacttgctttgacaaacccagcagcgttctaccaacaacccatcattggtggtgccctcttttagatttcttatgagttatagttcaataataaagttttttgtctgatgtttggggcttcccagaaataagaaagtacatttct

SEQ ID NO: 320418 - DNA, 399 bp, Zea mays
gagcattcagaaacacacctagcgaagcgcactagcaacgacctaacaacaatggctaccaagatattatccctctttgcgcttcttgccctttttgtgagcgcaacaaatgcgttcattattccacaatgctcacttgctcctagtgccattattccacagttcctccctccagttacttcaatgggcttcgaacacccagctgtgcaagcctacaggctacaacaagcgcttgcggcgagcgtcttacaacaaccaattgcccaattacaacaacaatccttggcacatctaaccatacaaaccatcgcaacgcaacagcaacaacaatttctaccagcactgagccaactagctgtggtgaaccctgtcgcctacttgcaacagcagttgcttgca

SEQ ID NO: 320419 - DNA, 155 bp, Zea mays
aacaggcaacatagcaagtttaattgtcgcagcatcgtccgagcaacaccggccaaggtgatatgcctccttatgctgctcgttgctcctgcaagcgctgctgctgacaccacaattgcgcattgctgcttagatgctattgcagttcttctact

SEQ ID NO: 320420 - DNA, 304 bp, Zea mays
gctactcaaagtgcggtggctttcttgacagcagcacaatacctaccatcaatgtgcggcttgtaccactcatactaccaaaataatccatgcagcagcaatgacattagtggtgtttgcaattgaagaattgtgtctacctagccgttatactcatataacggtgttaagcaataaagtaccatacattaaaaaaaaaaaaaaaaaaaaaaaaaaaaaaaaggaaaaaaaaaaaaaaaattaaaaaaaaattaaaaaaaaaaaaaaaaaaaaaaaaaaaaaaaaaaaaaaaaaggggcggccg

SEQ ID NO: 320421 - DNA, 362 bp, Zea mays
acgcatgcacccacgggaccggggtgttacaaccacatctacaacttcagacagccaacctacacaccggggaaggtgttaatacattctggcgatatcctctctctctacgatactacagacagcatgtggcaaacaatctcgcatgcttacaacaccatcatttgatgtaactacaacaaactatttgctacgaatcgtaccatcttactgcagaaccccaccattcatgatgccattatctaaatcaacctatgcattatactgcaatcataaagttctcatactgatatgcgcaaattgtcagcagttatagactatacatctatatagaaagtccagagacaaaaaataacgccagc

SEQ ID NO: 320422 - DNA, 392 bp, Zea mays
ccaatccagatcagcaaagcggcagtgcgtagagaggatcgtcgaacagaacagcatgaagatggtcatcgttctcgtcgtgtgcctggctctgtcagctgccagcgcctctgcaatgcagatgccctgcccctgcgcggggctgcagggcttgtacggcgctggcgccggcctgacgacgatgatgggcgccggcgggctgtacccctacgcggagtacctgaggcagccgcagtgcagcccgctggcggcggcgccctactacgccgggtgtgggcagccgagcgccatgttccagccgctccggcaacagtgctgccagcagcagatgaggatgatggacgtgcagtccgtcgcgcagcagctgcagatgatgatgcagcttgagcgtg

SEQ ID NO: 320423 - DNA, 423 bp, Zea mays
  unsure (1)..(423): unsure at all n locations
cagaaacacaccaagcgaagcacattatcaacaacctaacaacaatggctaccaagagatgatccctacttgcgcttcttgcgctttttgcgagcgcaacaaatgcgttcattattccacaatgctcacttgctccaagttccattattacacagttcctcccaccagttacttcaatgggcttcgaacacccagctgtgcaagcctataggctacaacaagcaattgcggcgagcgtcttacaacaaccaatttcccagttgcaacaacaatccttggcacatctaacaatacaaaccatcgcaacgcaacagcaacaacaattcctaccagcactgagccacctagccatggtgaaccctgccgnctacttgcaacagcagttgcttgcatcanacccacttgctctggcaaacgtagttg

SEQ ID NO: 320424 - DNA, 378 bp, Zea mays
cccacgcgtccggaccattagctttatctactccagagcgcagaagaacccgatcgacaccatgagggtgttgctcgttgccctcgctctcctggctctcgctgcgagcgccacctccacgcatacaagcggcggctgcggctgccagccaccgccgccggttcatctaccgccgccggtgcatctgccacctccggttcacctgccacctccggtgcatctcccaccgccggtccacctgccgccgccggtccacctgccaccgccggtccatgtgccgccgccggttcatctgccgccgccaccatgccactaccctactcaaccgccccggcctcagcctcatccccagccacacccatgcccgtgccaacagcc

SEQ ID NO: 320425 - DNA, 397 bp, Zea mays
gaccaactagcaacatagaaagcacaatagtgtaccaacaatggcagccaaaatattgtgcctccttatgctccttggtctttctgcaagtgctgctacggcgaccattttcccgcaatgctcgcaagctcctatagcttcccttcttcccccgtacctctcaccagcggtgtcttcggtatgtgaaaacccaattcttcaaccctacaggatccaacaggcaatcgcagctggcatcttacctttatcacccttgttcctccaacaatcatcagccctattacaacagttacctttggtgcatttattggcacaaaacatcagggcacaacaactacaacaacttgtgctagcaaaccttgctgcctactctcagcaacagcagtttcttccattc

SEQ ID NO: 320426 - DNA, 307 bp, Zea mays
aactaactacatacatagcacgctcattaaccaaccatcgctggcaaactatatagcctgcctacgcatgctgctcggtctgcatgcgcttgctccgacagcaaccatccgcaatgctcgcacgctcgtatctatagctttctttcttcgtacgtatcactaaccatctgtgtcgtatgtgaaagcaaacttatttaaccatacatgctcgaaccagcaagcaatcgtagcatgcaacctatatcaatcacgcttgttccacaaacaatcatcatatcacaaccgacacctacggtgcatgcattga

SEQ ID NO: 320427 - DNA, 366 bp, Zea mays
  unsure (1)..(366): unsure at all n locations
ccgacgcgtgcggaccattagctctatctactctagagcgcagaagaacccgatcgagaccgtgagggtgttgctcgttgccctcgctctcctggctctcgctgcgagcgccacctncacgcatacaagcggcggctgcggctgccagccaccggcgccggttcatctaccgccgccggtgcatctgccacctacggttcacctgccacctccggtgcatctcccaccgccggtccacctgccgccgccggtccacctgccaccgccggtccatgtgccgccgccggttcatctgccgncgncaccatgccactaccctactcaaaccgcccggcctcagcctcattcccagccacacccatgccc

SEQ ID NO: 320428 - DNA, 393 bp, Zea mays
atcaatcatcattcatcttagtaggattggcaccagatcaaatctgcaacatcaatgatctaactccaaaaaccatgaagctggtgcttgtggttctcgctttcattgctttagtatcaagggtttcttgtacacagacaggcggctgtagatgtggtcaacaacatatccatgatcagcaacatcatccacaacaacatcatccacaaaaacggcaatatcaaccaccaccacaacattatcagcaccagcaacaccaacaacaacaagttcacatgcaaccacaacaacatgagcatcaacaagaacttcatgttcaacgacaacaactacaaccgcagcagcatcaccaacaacgtcgacaacagtgccaacaacaacatcaatgtgaat

SEQ ID NO: 320429 - DNA, 411 bp, Zea mays
attttgagcattcagaaacacaccaagcgaagcgcactagcaacgacctagcaacaatggctaccaagatattagccctccttgcgcttcttgccctttttgtgagcgcaacaaatgcgttcattattccacaatgctcacttgctcctagtgccattattccacagttcctcccaccagttacttcaatgggcttcgaacacctagctgtgcaagccaacatgcaacaacaagcgcttgcggcgagcgtcttacaacaaccaattgcccaattgcaacaacaatccttgccacatctaacaatacaagccatcacaacgcaacagcaacaacagttcctaccagcactgagccacctagccatggtgaaccctgccgcctacttgcaagagcaagcaacatagaaagcac

SEQ ID NO: 320430 - DNA, 388 bp, Zea mays
tcgcccacgcgtccgagaaagcacaatagtgtaccaacaatggcagccaaaatattttgcttccttatgctccttggtctttctgcaagtgttgctaccgcaaccattttcccacaatgctcacaagctcctatagcttcccttcttcccccatacctctcaccagcggtgtcttcaatgtgtgaaaccccaattgttcaaccctacaggatccaacaggcaatcgcaacaggcatcttaccattatcacccttgttcctccaacaaccgtcagccctattacagcagttacctttggtccatttggtggcacaaaacatcagggcacaacaactacaacaacttgtgctagcaaaccttgctgcatactctcagcaacatcagtttc

SEQ ID NO: 320431 - DNA, 119 bp, Zea mays
aaaaaaaaaaaaaaaaaaaaaaaaaatttaaaattaaaaaaaaaaaaaaaaaaaaaaggaaaaaggtaaaaaataaaaaaataccagaaaaaaggagaaagaaattcggggtcctattt

SEQ ID NO: 320432 - DNA, 414 bp, Zea mays
ctgcaaccctacaggatccaacaggctttcgcagctggcatcttacctttatcacccgtgtgcctccaacaatcatcagccctattacagcagttacctttggtgcatttattggcacaaaacatcagggcacaacatctacaacaacttgtgctagcaaaccttgctgcctactctcagcaacagcagtttcttccattcaaccaactagctgcattgaactctgcttcttatttgcaacatcatcaactaccattcagccagctacctgttgcctacccccaacaatttcttccattcaaccaactggcagcattgaactctcctgcttatttacagcagcaacaactactaccattcatccagctagctggtgtgagccctgctaccttcttgacacaaccacagttgttg

SEQ ID NO: 320433 - DNA, 443 bp, Zea mays
caatcatcattcatcttagtagtataggcaccaaatcaaatctgcaacatcaattatctaactccaaaaaccatgaagctggtgcttgtggttcttgctttcattgctttagtatcaagtgtttcttgtacacagacaggcggctgcagctgtggtcaacaacaaagccatgagcagcaacatcatccacaacaacatcatccacaaaaacaacaacatcaaccaccaccacaacatcaccagcagcagcaacaccaacctcaacaaggtcacatgcaaccacaaaaacatcagcaacaacaagaagttcatgttcaacaacaactacaacaaccgcagcaccaccaccaacaacaactactacagcaccaacaacaacatcaatgtgaaggccaacaacaacatcatcaacaatcacaaggccatgttcaacaactcgaaca

SEQ ID NO: 320434 - DNA, 413 bp, Zea mays
agaccagcaagcaacatagaaagtagaatccattagcaacaatagagcaacaatggcgaccaagatattttccctccttatgctccttgctctttctacatgtgttgctaacgcgacaattttccctcaatgctcacaagctcctatagcttcccttcttcccccataccttccatcaattatagcttcagtatgtgaaaacccagctcttcaaccatataggcttcaacaagcaatcgcagcaagcaacatacctttatcgcccttgttgtttcaacaatcaccagccctatctttggtgcagtcattggtacaaaccatcagggcacaacagctgcagcaactcgtgctacctgtgatcaaccaagtagctctggcaaacctttctccctactctcagcaacaacaatttc

SEQ ID NO: 320435 - DNA, 424 bp, Zea mays
  unsure (1)..(424): unsure at all n locations
gagaccaactagcaacatagaaagcacaatagtgtaccaacaatggcagccaaaatattttgcctccttatgctccttggtctttctgcaagtgctgctacggcgaccattttcccgcaatgctcgcaagctcctatagcttcccttcttcccccgtacctctcaccagcggtgtcttcggtatgtgaaaacccaattcttcaaccctacaggatccaacaggcaatcgcagctggcatcttacctttatcacccttgttccttcaacaatcatcagccctattacaacagttacctttggtgcatntattggcacaaaacatcagggcacaacaactacaacaacttgtgctagcaaaccttgctgcctactctcagcaacagcagtttcttccattcaaccaactaggttcattgaactctg

SEQ ID NO: 320436 - DNA, 339 bp, Zea mays
caggacgtgggccgtgccgctgcggacgcgctgaaccgtggcggtcgacaggctcgaggacgactccaaggtggtagtccaactaagtgcgacgctcaagggtgcgccgtcctgtatgtggttggagtgaacatgacgtatggttgccataggtgagcggattacatactttagcacttactgcttggttataagatgcgtcatcatctaattcgtcagctggctcggttacccaatcgtgatcctgacatcgtcgtatcatatcaggaacgctgtcacatcgtcttgcgactaaggtcatgttggtcagttgctccagcgtcgagactgtggaaatga

SEQ ID NO: 320437 - DNA, 216 bp, Zea mays
aatgacatgagtcatgacgtatcggattcgctgaagcgcgaaatgagataggctcgatggatgatgctaagttgagagtccaactaagcgcgatggcagtgtgtgttggtctgtaaaggtgtaggaactagagatggctgcacacatgctggattacataactaatcactaattgcttggttctaggaagcgaaatgatttaaaacaacatcatgt

SEQ ID NO: 320438 - DNA, 432 bp, Zea mays
gcaacatagaaagcacaatagtgtaccaacaatggcagccaaaatattttgcttccttatgctccttggtctttctgcaagtgttgctaccgcaaccattttaccacaatgctcacaagctcctatagcttcccttcttcccccatacctctcaccagcggtgtcttcaatgtgtgaaaacccaattgttcaaccctacaggatccaacaggcaatcgcaacaggcatcttaccattatcacccttgttcctgcaacaaccgtcagccctattacagcaattacctttggtccatttggtggcacaaaacatcaaggcacaacaactacaacaacttgtgctagcaaaccttgctgcatactctcagcaacatcaagttcttccattcaaccaactggctgcattgaactctgctgcttatttgcaacaacc

SEQ ID NO: 320439 - DNA, 321 bp, Zea mays
ccaactagcaccatagaaagcacatttttgtaccaacaatggcagccaaaatatttggcctgcttatgctccttggtctttctgcaagtgctgctacggcgaccattttcccacaatgctcacaagctcctatagcttcccttcttcccccgtacctctcaccagcggtgtcttcggtatgtgaaaacccaattcttcaaccctataggatccaacaggcaatcgcaactggcatcttacctttatcaaccttggtccttcaacaatcatcaaccctattacagcaggtacctttggtgcatttattggcacaaaacatta

SEQ ID NO: 320440 - DNA, 386 bp, Zea mays
gagaccaactagcaacatagaaagcacaatagtgtaccaacaatggcagccaaaatattttgcttccttatgctccttggtctttctgcaagtgctgctaccgcaaccattttcccacaatgctcacaagctcctatagcttcctttcttcccccatacctctcaccagcggtgtcttcagtatgtgaaaacccaattcttcaaccctacaggatccaacaggcaatcgcagcaggcatcttacctttatcacccttgttcctccaacaaccgtcagccctattacagcagttacctttggtgcatttgttggcacaaaacatcaaggcacaacaactacaacaacttgtgctaagaaaccttgctgcctactctcagcaacagca

SEQ ID NO: 320441 - DNA, 406 bp, Zea mays
gctcctgggtctttctgcaagtgctggctacggcgaccattttcccgcaatgctcgcaagcgcctatagcttcccttgttcccccgtacctctcaccagcggtgtcttcggtatgtgaaaacccaattcttcaaccctacaggatccaacaggcaatcacagctggcatcttacctttatcacccttgttcctgcaacaatcatcagccctattacatcagttacctttggtgcatttattggcacaaaacatcagggcacatcatctactacaacttgtgctagcataccttgctgcctactctcagcaacagcagtttcgtccattcaaccaactagctgcatggaactctgcttcttacttgcaacaacggcaactaccattcagtcagctacctgctgccta

SEQ ID NO: 320442 - DNA, 293 bp, Zea mays
agtctgaccaatgtaacactttacattcgacacgcactactgtcgcagtagctacgagggctaagacgattttacatgtcgtagcgcttcttgtacttatagcgagcgcaatatatgcggttatcagtgcacaatgctcacacgctcctagtgcaacaattgcagaactacatcgtacaagctcttgaataggcagctaacgcctagctgggtgagtgcttatgccagatgatgcgcttgatgcaagtgtcttagaccaactattttgcgaattgagaaaagaatcttcggta

SEQ ID NO: 320443 - DNA, 433 bp, Zea mays
gcattcagaaacacacctagcgaagcgcactagcaacgacctaacaacaatggcttccaagacattatccctccttgcgcttcttgccctttttgtgagtgcaacaaatgcgttcattattccacaatgctcacttgctccgagtgccattattccacagttcctccctccagttacttcaatgggcttcgaacacccagctgtgcaagcctataggctacaacaagcgcttgcggcgagcgtcttagaacaaccaattgcccaattacaacaacaatccttagcacatctaaccatacaaaccatcgcaacgcagcagcaacaagcactgagccacctagccgtggtgaaccctatcgcctacttgcaacaacagctgcttgcatccaacccacttgctttggcaaacgtagctgcataccaaccaccaaca

SEQ ID NO: 320444 - DNA, 207 bp, Zea mays
tgcacgctgcgcctaacgctggcaccctcttacaactgcaacaattgctgccattcaaccaacttggtttgacaaacccaacagcgttctaccaacaacccatcattggtggtgccctcttttagattgcttatgagttatacttcaataatgaagttttttggatgatgtttgtggcttcccagaaataagaaagtacatttctag

SEQ ID NO: 320445 - DNA, 362 bp, Zea mays
ccattgcacctgcctgctcgagtcgctttcaactcatggccatggagtccgcctcagcctctgtcttccactcggttgctcctctgctggctacgcagagccttcactagccatggccgcgccctctctggtaccgagctcgcccataccgagctccctcagcgtcccgtccatggtcctcctccactcgccctggccatgcttgcctgccgcgccacactgagtttctggagtctggcacggtgaactggggagagaagcagccaagcagctccctcacgccgcggcttcctccttcagctcggcgctcatctccctctctgctcggaccgtgcccagctccgcgcgtcgcagttcgcccc

SEQ ID NO: 320446 - DNA, 253 bp, Zea mays
atcggtgacgactgcacagagcaacactcacacccgtgcccaaatgcattgactccaatcacgtccgaacatatcgacgaccatggatgtataccggcccgaacgcggcgacgactttaccaagactgacaccaactgcaaggaccaatccatcgaccgcaaggtcgacgtcatcgaggaggacgcgctagaacaactactatgtaagttatgcgaatgtgaacgggacactgacaaggctgtggtaatgctg

SEQ ID NO: 320447 - DNA, 323 bp, Zea mays
aatgccacgaatgcacaatgcagcttcacagccgtgtggtaatgcatagactccagatcacgtctgatacaactaaggagctggcaagtcttgcagtaacattgccatgatgatcctatgtatattgccccgcactacaatgaccaagctatcttaagcatggttcaattgatattctaggtcgagcatgaactacttcgatgtgagtcacagactagctatctggagtctgacacggcgaactcaatagagacacaagcacacaacttactaacaatgtgggtctcgtattaagcatactactaatctaactcattgatcag

SEQ ID NO: 320448 - DNA, 315 bp, Zea mays
gaagaccgaagaccgagccttgcggtgttctcgcacgggaacgggacaggacctcgggatctgagatccttgctgtccgcccgaccgtgcccgtcgacgcgtcgttcttgccagccgagcctgatctacgccctcttctcctacagggggatcggatacgcgacaggctgcgcgatggagctgggggtcttcggataccgctgcctgatctggaaccccggcttcgacttcgacgacgaaatgctcggcttgatcaagggctactacgtgcacctttaatctcgcttgcattgaccacagacgcacaccggagca

SEQ ID NO: 320449 - DNA, 405 bp, Zea mays
cgggttttggaaaccccaatccttaacccttccaggatccaccaggcaatcacagctggcatggaaccttaatcacccttgttcctccaacaatcatcagccctattacatcagttacctttggtgcatttattggcacaaaacatcagggcacaacaactacaacaacttgtgctagcaaaccttgctgcctactctcagcaacagcagtttcttccattcaaccaactagctgcattgaactctgcttcttatttgcaacaacaacaactaccattcaaccagctacctgctgcctacccccagcaatttcttccattcaaccaactggcagcattgaactctcctgcttatttacagcagcaacaactactaccattcagccagctagcttgtgtgagccct

SEQ ID NO: 320450 - DNA, 340 bp, Zea mays
cccacgcgtccgaaagcacaatagtgtaccaacaatggcagccaaaatattttgcctgcttatgctccttggtctttctgcaagtgctgctacggcgaccattttcccgcaatgctcgcaagctcctatagcttcccttcttcccccgtacctctcaccagcggtgtcttcggtatgtgaaaacccaattcttcaaccctacaggatccaacaggcaatcacagctggcatcttacctttatcacccttgttcctccaacaatcatcagccctattacatcagttacctttggtgcatttattggcacaaaacatcaaggcacaacaactacaacaactt

SEQ ID NO: 320451 - DNA, 335 bp, Zea mays
gcaacatagaaagcacaattttgtaccaacaatggcagccaaaatattttgcttccgtatgctccttggtctttctgcaagtgttgctaccgcaaccattttcccacaatgctcacaagctcctatagcttcccttcttcccccatacctctcaccagcggtgtcttcaatgtgtgaaaacccaattgttcaaccctacaggatccaacaggcaatcgcaacaggcatcttaccattatcacccttgttgctccaacaaccgtcagccctattacagcagttacctttggtccatttggtggcacaaaacatcaaggcacaacaactacaacaac

SEQ ID NO: 320452 - DNA, 433 bp, Zea mays
caacaagcaacatagaaagtggaatacagtagcaacaatagagcaacaatggcggccaagatattttccatccttatgctccttgctctttctgcatgtgttgctaacgcgaccatttttcctcaatactcacaagctcctatagctgcccttcttcccccataccttccatcaatgaccgcttcagtttgtgaaaacccagcccttcaaccctacaggctccaacaagcaatcgcaacaagcaacttacctttatcacccctgttctttcaacaatcgccagccctatctttggtgcagtcattggtacaaaccatcagggcacaacagctgcaacaactcgtgctaccagtgatcagccaagtagctctggcaaacctttctccctactctcagcaacaacaatttcttccattcaaccaactgtctacac

SEQ ID NO: 320453 - DNA, 364 bp, Zea mays
gcaggctgcgttaaccgcttacggttttcatggactgagcatcaaaactgtgtgacactggtcttatgcgatcctatagtggagaccagcgtgctttctgtgtctgagtatcgatatcacacaagaagtgggccaatgcttctgatagacttgaacgaatatgagcagacagatctggtggagagtgatacagttgttgctgacctgcacaatctgatcacgtttcactgtctagaagattgcatctacatggcttatgtacacaaactacaagtagaacagtataagcatatacacataactgagacctggtacctgcttgacacaacaaccgatggtgccgttgtacctgcacgctgaggat

SEQ ID NO: 320454 - DNA, 387 bp, Zea mays
caactagcaacatagaaagcacaatagtgtaccaacaatggcagccaaaatattttgcctccttatgctccttggtctttctgcaagtgctgctacggcgaccattttcccgcaatgctcgcaagctcctatagcttcccttcttcccccgtacctctcaccagcggtgtcttcggtatgtgaaaacccaattcttcaaccctacaggatccaacaggcaatcacagctggcatcttacctttatcacccttgttcctgcaacaatcatcagccctattacatcagttacctttggtgcatttattggcacaaaacatcagggcacaacaactacaacaacttgtgctagcaaaccttgctgcctactctcagcaacagcagtttct

SEQ ID NO: 320455 - DNA, 364 bp, Zea mays
aactagcaccatagaaagcacattactttaccaacaatggcagccaaaatatggtgggtgcttatgctccttggtatttctgcaagtgctgctactgcgaccattttcccgcaatgctcacaagctcctatagcttcccttcttcccccgtacctctcaccagcggtgtcttcggtatgtgaaaacccaattcttcaaccctacaggatccaacaggcaatcgcagctggcatcttacctttatcacccttgttcctccaacaatcatcagccctattacagcagttacctttggtgcatttattggcacataacatcagggcacaacaactacaacaacttgtgctagcaaaccttgctgcct

SEQ ID NO: 320456 - DNA, 426 bp, Zea mays
agccttccgatcgaaagctgtggttgataaactggattctttagaggaggataatgggcgtgtaatgagagcagtggcactcgatgtccagtctctgatcaatgagcgggaaaatatcaagattcaggaatcattatgcagctcatattttggtaacagtatcaaggaaatggaaaatgaggttcaaattctaaaagatgggtcaagaaagatgaattctgatatatcatcagtagcaaaggacacgacagaaaaggtcgaagttttgcattcagctatcgagaaggttcaagttatagctgatgaatgggtcaagatgaactatactattaacagaatatggtcattcactaaggagacagagaaaagggtggaggtctatattcaagattaatgaagggctttaagcagacgaagagaaaagtg

SEQ ID NO: 320457 - DNA, 245 bp, Zea mays
tccgaggactcagactcaaggatcgcgggactatggatccagaaagtgaatcgccgttggcgatgcattcgatgagctgaacattcctagtatgggaggtgcatgtgtgtattgagctaaagtccgatgtcggtcttatggcagatggtgcggtactgctggcacttggactactgccatgcttgcgcgatcatttgaacaatgtacgacatcagcacaatgctctggaacgccagggtattcgg

SEQ ID NO: 320458 - DNA, 252 bp, Zea mays
ttcgctccgaggactcagtttaaattatcgagagatcaagcatccagagagtgagtcaccgttagagatgcatctgttgcgctgaacatagcgagtatgggaggtgcatgtctatatgttagataatgtctgatgtgggccagatgagacagatgtgcgggagggctggcacctgcaatactgtcatgctggagcgatcatttgaacactgtacgtcatcagcataatgctatggaacgcccggatatacgg

SEQ ID NO: 320459 - DNA, 388 bp, Zea mays
gcaacatagaaagcacaatagtgtaccaacaatggcagccaaaatattttgcttccttatgctccttggtctttctgcaagtgctgctaccgcaaccattttcccacaatgctcacaagctcctatagcttcctttcttcccccatacctctcaccagcggtgtcttcagtatgtgaaaacccaattcttcaaccctacaggatccaacaggcaatcgcagcaggcatcttacctttatcacccttgttcctccaacaaccgtcagccctattacagcagttacctttggtgcatttgttggcacaaaacatcaaggcacaacaactacaacaacttgtgctaggaaaccttgctggctactctcagcaacagcagtttcttccattc

SEQ ID NO: 320460 - DNA, 429 bp, Zea mays
agcccagcaggcaccttagaaggtagattccattaccaccattagagcaccattggcgaccgagatattttccctccttatgctccttgctctttctacatgtgttgctaacgcgacaattttccctcaatgctcacaagctcctatagcttcccttcttcccccataccttccatcaattatagcttcagtatgtgaaaacccagctcttcaaccatataggcttcaacaagcaatcgcagcaagcaacatacctttatcgcccttgttgtttcaacaatcaccagccctatctttggtgcagtcattggtacaaaccatcagggcacaacagctgcagcaactcgtgctacctgtgatcaaccaagtagctctggcaaacctttctccctactctcagcaacaacaatttcttccattcaaccaact

SEQ ID NO: 320461 - DNA, 407 bp, Zea mays
ggaattcccggcattgagaccaactagcaacatagaaagcacaatagtgtaccaacaatggcagccaaaatattttgcttccttatgctccttggtctttctgcaagtgttgctaccgcaaccattttcccacaatgctcacaagctcctatagcttcccttcttcccccatacctctcaccagcggtgtcttcaatgtgtgaaaccccaattgttcaaccctacaggatccaacaggcaatcgcaacaggcatcttaccattatcacccttgttcctccaacaaccgtcagccctattacagcagttacctttggtccatttggtggcacaaaacatcaaggcacaacaactacaacaacttgtgctagcaaaccttgctgcatactctcagcaacatcagtttct

SEQ ID NO: 320462 - DNA, 410 bp, Zea mays
ctccgctcggccaccagctttgaccgtctcccctcccctccgctcctgttcctccatacccggcccccccgcaggagcggcgcggcggcggcggcggcaaagccaaaggcaagatgttcgggcgcgcgccgaagaagagcgacaacaccaagtactacgagatcctcggggtgcccaagtcggcgtcccaggacgacctcaagaaggcctaccgcaaggcagctatcaagaaccaccccgacaagggcggtgaccccgagaagttcaaggagctcgcacaagcctatgaggttttgagtgatccagagaaacgtgagatttatgatcagtatggtgaagatgcccttaaggaaggaatgggtggtggtgggtcccatgctgatccatttgacattttctcatcattcttt

SEQ ID NO: 320463 - DNA, 337 bp, Zea mays
ttttagttttataggcaccaaatcaaatctgggacatgaattatctaactgcaaataccatgaagctggtgcttgtggttcttgctttcattgctttagtatcacgtgtttcttgtacacagacaggcggctgcagctgtgttcaacaacaaatccatgagcagcaacatcattcacaacagcatcatacacagcatcatcaacatgttccaccaccacagcataaccagctgcagctgtcaccaactactccaagttcacatgcaaccacttaaacatcaataacaacgcgaagtctatgttcaacatcgacaacaacaaccgaatcaccacctgc

SEQ ID NO: 320464 - DNA, 377 bp, Zea mays
attttcagcattcaaaaacacaccaagcgaagcgcactagcaacgacctaacaccaatggctaccaagatattagccctccttgcgcttcttgcccttttagtgagcgcaacaaatgcgttcattattccacagtgctcacttgctcctagtgccagtattccacagttcctcccaccagttacttcaatgggcttcgaacatccagccgtgcaagcctacaggctacaactagcgcttgcggcgagcgccttacaacaaccaattgcccaattgcaacaacaatccttggcacatctaaccctacaaaccattgcaacgcaacaacaacaacaacagtttctgccatcactgagccacctaaccgtggtgaaccct

SEQ ID NO: 320465 - DNA, 382 bp, Zea mays
  unsure (1)..(382): unsure at all n locations
gcttctcacccctctcacgttgcaggcgcgtcatcgtcgcctcccgaaccgtcctcactgccctcctgccaccagcgctgcccctactgcgggcgctgttgcctgggctcttgccatcngcctgcgcccactcctgcccctgtcgtcggcgtggctgcccagcctggcccagccaccagtggcctaggcaccgctggccacgaccacggcttggcccacaccagcttgggcgtggctggtctggggttgtctggtccgggcctcgctgctgtcagcccctatgctgtcggcgtgccctaggcgtcctggacgctgctacggaccttggcacttcctttcatnctgagtgcctacttcgcgcctcttttggccgaactacccc

SEQ ID NO: 320466 - DNA, 243 bp, Zea mays
cgcgtcgagctacgatagcgtgaattatagcttcagacttcgaacttgcaacgtctgaagcatatgggcttccacgggcaataccatacaggatcctacatgcattggcagcggggatctaacatttaccagccctgtctctggagcagtcatcagtcctatcactgcaggtacatcaggtgcatctactggcacaaaatatcatggctcaactactactacaactcgtgcttgcaaactttg

SEQ ID NO: 320467 - DNA, 310 bp, Zea mays
taacatcaatggctaccaagatattatccctctttgcgcttcttgccctttttgtgagcgcaacaaatgcgttcattattccacaatgctcacttgctcctagtgccattattccacagttcctccctccagttacttcaatgggcttcgaacacccagctgtgcaagcctacaagctacaacaagcgcttgcggcgagcgtcttacaacaaccaattgcccaattacaacaacaatccttggcacatctaaccatacaaaccatcgcaacgcaacagcaacaacaatttctaccagcacttaaccaact

SEQ ID NO: 320468 - DNA, 244 bp, Zea mays
tgcatttattggcacaaaacatcagggctcaacaactacaacaactcgtgctagcaaaccttgctgcctactctcagcaacagcagttacctttggtgcatttgttggcacaaaacatcagggcacaacaactacaacaactcgtgctagcaaaccttgctgcctactctcagcaacaacagtttctgccattcaaccaactagctgcattgaactctgctgcttatttgcagcaacaacaacc

SEQ ID NO: 320469 - DNA, 444 bp, Zea mays
accgttcgattcccggtcgagtacgtggcaacgtagaaagcacaatagtgttccaactatggcagccaaaatattttgctgccttatgctccttggtctttctgcaagtgctgctaccgcaaccattttcccacaatgctcacaagctcctatagcttcctttcttccgccatacctatcaccagcggtgtcttcagtatgtgaaaacccaattcttcaaccctacaggatccaacaggcaatcgcagcaggcatcttacctttatcacccttgttcctccaacaaccgtcagccctattacagcagttacctttggtgcatttgttggcacaaaacatcaaggcacaacaactacaacaacttgtgctaggaaaccttgctgcctactctcagcaacagcagtttcttccattcaaccaactggctgcattgaactctgctgc

SEQ ID NO: 320470 - DNA, 239 bp, Zea mays
cagcaagatataaagcacaggagtgtaccaacaatggtatccaatttatattgcctccttatgctcctgggaatgtgagaaagttcagagaccgagaccattgacaaggattctgtgcatgatgctactgctgtccttagctcatatgaaatgtcaagatcaacaacacaggctcaggcacctgcagtgcttgcaagagcttcaggatagcctgctagactcgtaccgacagaatctaa

SEQ ID NO: 320471 - DNA, 286 bp, Zea mays
attccctgcatcaatttaaatcagaaagagaaaaaaaaaaaaaaaaaaaaaaattaaaaaaaaaaaaaaaaaaaaaagggcaacggttaaaaagaaaccggcactacgatcccaatcatgcaacgtcatatactactgctttcacctcccttaaatctgtttccttggccgcattttacaccgcccgtactcggtaaaccctgggactacccgtcctaatccgtcctgcgtgccatccccctttcatcaggcggcatcaccatgccacaagcccgctcaaacgccc

SEQ ID NO: 320472 - DNA, 244 bp, Zea mays
attttcagcattcaaaaacacaccaagctaagcgcactagcaacgacctaacaccaatggctaccaagatattagccctccttgcgcttcttgcccttttagtgagcgcaacaaatgcgttcattattccacagtgctcacttgctcctagtgccattattccacagttcctcccaccagttacttcaatgggcttcgaacatccagccgtgcaagcctacaggctacaactagcgcttgcggc

SEQ ID NO: 320473 - DNA, 237 bp, Zea mays
caagatcagaagccagatgctagacgacgaactggatggcgcaaaggtcaaggcaagaggcaacataatgcagactaacattgtagttgacgatccaagtgattatacaagcctatttatggaccgaggattccagatagaacactagactgcacactgggactgacactatcacttgcactacctaagtcattaaaggatcaagagtagagctaccagtaaaggtatgataagaac

SEQ ID NO: 320474 - DNA, 239 bp, Zea mays
attgtctccagtttctcccattaggagtaaggcaatggcaaagcagcaactggctctagctgggccctctgccatggtgacgcaaaggataacacaagtacgcaacgccgcatgagttggtgtctggctttgtcaagtgtccctctcgcggtgcctgtctcctttcacttgtggagcacggtgagctcgcaaattcgttcactgcaaaagagcctgctgtgacccccctgaaaccaacc

SEQ ID NO: 320475 - DNA, 242 bp, Zea mays
gaccaactagcaacatagaaagcacaatagtgtaccaacaatggcagccaaaatatttggcctccttatgctccttggtatttctgcaagtgctgctacggcgaccattttcccgcaatgctcacaagctcctatagcttcccttcttcccccgtacctctcaccagcggtgtcttcggtatgtgaaaacccaattcttcaaccctacaggatccaacaggcaatcgcagctggcatcttac

SEQ ID NO: 320476 - DNA, 241 bp, Zea mays
atcaattatagcttcaatatgtgaaaacccagctcttcaaccatataggcttcaacaagcaatcgcagcaagcaacatacctttatcgcccttgttgtttcaacaatcgccagccctatctttggtgcagtcattggtacaaaccatcagggcacaacagctgcagcaactcgtgctacctctgatcaaccaagtagctctggcaaacctttctccctactctcagcaacaacaatttctt

SEQ ID NO: 320477 - DNA, 246 bp, Zea mays
caggattcaaaaacacaccaagcgaagttcactagcaacgacctaacaccaatggctagcgaagatattagccctccttgcgcttcttgcccttttagtgagcgcaacaaatgcgttcattattccacagtgctcacttgctcctagtgccagtattccacagttcctcccaccagttacttcaatgggcttcgaacatccagccgtgcaagcctacaggctacaactagcgcttgcggcgagcgc

SEQ ID NO: 320478 - DNA, 254 bp, Zea mays
tcacttgcatggtaatgggattgggaatgagggaatacgtgagttgatgtctgcattatctgctcacaaagggaagatcacagttgtggatattggcaacaacaacattagcccggaaggtttacatcctgtagccgagttcctcaaaaggacaaagtccttacagtggttcagtctctacatgaacgatattagtgatgagggagctggaaaggttgctgaggctctaaaagattacataacaatttctacca

SEQ ID NO: 320479 - DNA, 236 bp, Zea mays
agcccgtgccagcagttcggatcctgcggcgtcggcagcgtcggcagcccgttcctgggccagtgcgtcgagttcctgaggcaccagtgcagcccggcggcgacgccctacggctcgccacagtgccaggcgctgcagcagcagtgctgccaccagatcaggcaggtggagccgctgcaccggtaccaggcgacatacggtgtggtcctgcagtccttcctgcagcagcagccgcc

SEQ ID NO: 320480 - DNA, 243 bp, Zea mays
  unsure (1)..(243): unsure at all n locations
attgagaccagcaagcaacatagaaagtttaatcttttagcaacaatagagcaacaatgtcnaccgagatattttccctgcttatgctccttgctctttctacatgtgttgctaacgcgacaattttccctcaatgctcacaagctcctatagctttccttcttcccccataccttccatcaattatagcttcagtatgtgaaaacccagctcttcaaccatataagcttcaacaagcaatct

SEQ ID NO: 320481 - DNA, 246 bp, Zea mays
attgagaccaactagcaacatagaaagcacaatagtgtaccaacaatggcagccaaaatattttgcttccttatgctccttggtctttctgcaagtgctgctaccgcaaccattttcccacaatgctcacaagctcctatagcttcctttcttcccccatacctctcaccagcggtgtcttcagtatgtgaaaacccaattcttcaaccctacaggatccaacaggcaatcgcagcaggcatctta

SEQ ID NO: 320482 - DNA, 238 bp, Zea mays
attgagaccaactagcaacatagaaagtacaatagtgtaccaacaatggcggccaaaatattttgcctccttatgctccttggtctttctgcaagtgctgctacggcgaccattttcccgcaatgctcgcaagctcctatagcttcccttcttcccccgtacctctcaccagcggtgtcttcggtatgtgaaaacccaattcttcaaccctacaggatccaacaggcaatcacagctg

SEQ ID NO: 320483 - DNA, 239 bp, Zea mays
gcacaatagtgtaccaacaatggcagccaaaatattttgcttccttatgctccttggtctttctgcaagtgttgctaccgcaaccattttcccacaatgctcacaagctcctatagcttcccttcttcccccatacctctcaccagcggtgtcttcaatgtgtgaaaacccaattgttcaaccctacaggatccaacaggcaatcgcaacaggcatcttaccattatcacccttgttcc

SEQ ID NO: 320484 - DNA, 379 bp, Zea mays
  unsure (1)..(379): unsure at all n locations
gcgcggacgcgtgggcagcgcgctcccaccggccccggcgtccgacgacagggcggggagccccgcggcggcgcgggcgagcaagctggcgcgcgccgcgccgcggcggagcaggtcggagaagatggcggcgggcccgcggctgctgcaggttcggcgcgcggcgtccccgccggcggcccccgagctgcggcggacggagtcggagaacgggcggcggcggcggtcgtccgtgtcggcgcgcgcgtgccgctggggcgcggacgacgccgacgagttccggcgcacggtggaggcgttcatcgacaagcacaagcggttccaccgncaggagtccatgacgctggccgtcgtcgcggggtccgggaccgggtccggc

SEQ ID NO: 320485 - DNA, 246 bp, Zea mays
cccacgcgtccgcaactagcaacatagaaagcacaatagtgtaccaacaatggcagccaaaatattttgcttccttatgctccttggtctttctgcaagtgttgctaccgcaaccattttcccacaatgctcacaagctcctatagcttcccttcttcccccatacctctcaccagcggtgtcttcaatgtgtgaaaccccaattgttcaaccctacaggatccaacaggcaatcgcaacaggcat

SEQ ID NO: 320486 - DNA, 242 bp, Zea mays
gagaccaacaagcaacatagaaagtggaatccagtagcaacaatagagcaacaatggcgaccaagatattttccctccttatgctccttgctctttctacatgtgttgctaacgcgacaattttccctcaatgctcacaagctcctatagcttcccttcttcccccataccttccatcaattatagcttcaatatgtgaaaacccagctcttcaaccatataggcttcaacaagcaatcgca

SEQ ID NO: 320487 - DNA, 245 bp, Zea mays
gaccaactagcaacatataaagcacaatattgtaccaacaatggcagccaaaatattgggcttccttatgctccttggtctttctgcaagtgctgctaccgcaaccattttcccacaatgctcacaagctcctatagcttcctttcttcccccatacctctcaccagcggtgtctacagtatgtgaaaacccaattcttcaaccctacaggatccaacaggcaatcgcagcaggcatcttacctt

SEQ ID NO: 320488 - DNA, 242 bp, Zea mays
ctatgaatgaacacaagaaacttgtaactggtactcctatcatggatcaacgtatcctgattgatcagctgatggggggtgtccaaaaaaaaaaaaaaaaaaaaaaaaaaaaaaaaaaaaaaaaaaaaaaaaaaaaaaaaaaaaaaaaaaaaaaaaaaaaaaaaaaaaaaaaaaaaaaaaaaaaaaaaaaaaaaaaaaaaaaaaaaaaggggcgcccccttaaaagaacccaacttaaccac

SEQ ID NO: 320489 - DNA, 238 bp, Zea mays
aacaaatgcgttcattattccacaatgctcacttgctcctagtgccattaggccacagggcctccctccagttacttcaatgggcttcgaacacccagctgtgcaagcctacaggctacaacaagcgcttgcggcgagcgtcttacaacaaccaattgcccaattacaacaacaatccttggcacatctaaccatacaaaccatcgcaacgcaacagcaacaacaatttctaccagca

SEQ ID NO: 320490 - DNA, 252 bp, Zea mays
attgagaccagcaagcaacatagaaagtagaatccattagcaacaatagagcaacaatggcgaccaagatattttccctccttatgctccttgctctttctacatgtgttgctaacgcgacaattttccctcaatgctcacaagctcctatagcttcccttcttcccccataccttccatcaattatagcttcagtatgtgaaaacccagctcttcaaccatataggcttcaacaagcaatcgcagcaagca

SEQ ID NO: 320491 - DNA, 127 bp, Zea mays
gaggaatcccactacagtgcctccctcgtgggctcgtggactagcatggtgccggggccgtgggggacggcaaggacggtacgcaaccgtacgcaggcactcaccggtgagcggcgaggcgactgac

SEQ ID NO: 320492 - DNA, 258 bp, Zea mays
attgagaccaactagcaacatagaatgtacaattttgtaccaacaatggcagccaaagtatggtgcctccttatgctccttggtctttctgcaagtgctgctaccgcgaccatttttccacaatgcttacaagctcctatagcttcccttcttcccctgtacctcttaccagctgtgtcttccttatgtgaaaacccaattcttcaactctataggatcctacaggcaatcgcagctggcatcttacctttatcaccc

SEQ ID NO: 320493 - DNA, 243 bp, Zea mays
atcagtaccatcaatcatcattcatcttattagtataggcaccaaatcaaatctgcaagatcaatgatctaactccaaaaaccatgaagctggtgcttgtggttcttgctttcattgctttagtatcaagtgtttcttgtacacagacaggcggctgcagctgtggtcaacaacaaagccatgagcagcaacatcatccacaacaacatcatccacaaaaacaacaacatcaaccaccaccac

SEQ ID NO: 320494 - DNA, 237 bp, Zea mays
gaaaaggcagagaaaaaaaaagaagagaagctaagagcttgggagttcagctgcaagccgttcgacgagagagacgaccgaacccggccggaaggggaggagcgggaggaccgcctgcgccgtcggtgagctgcaagttaggctttcaaagaatgtggaggagtgtgtggactttgcgccagagggaggtaaggtggtggtgagtgctactccaaaaggccactccgatggaagtca

SEQ ID NO: 320495 - DNA, 237 bp, Zea mays
cggacgcgtggggcggtgtcttcagtatgtgaaaacccaattcttcaacccgacaggagccaacaggcaatcgcagcaggcatcttacctttatcacccttgttcctccaacaaccgtcagccctattacagcagttacctttggtgcatttgttggcacaaaacatcaaggcacaacaactacaacaacttgtgctaggaaaccttgctgcctactctcagcaacagcagtttctt

SEQ ID NO: 320496 - DNA, 150 bp, Zea mays
gcatcttacctttatcacactaactcctccaacaacccacacacctattacccaattacctaacatcaattactttcacaaaacatcaaaccacaacaactacaacaacttattctacaacaaccttacttactactataacaacaccac

SEQ ID NO: 320497 - DNA, 245 bp, Zea mays
cggacgcgtgggtttgcctacttatgcttcttggtctttctgcaagtgctgctacggcgaccattgtccccgcatgctcgcaagctcctatagctttccttcttccaccgtacctctcaccagcggtgtcttcggtatgtgaaaacccaattcttcaaccctacaagatccaacaggcaatcacagctggcatcttacctttatcacccttgttcctccaacaatcatcagccctattacatcag

SEQ ID NO: 320498 - DNA, 243 bp, Zea mays
  unsure (1)..(243): unsure at all n locations
gcaacatagaaagtggaatccagtagcaacaatagagcaacaatggcgaccaagatatgttccctgcttatgctccttgctctntctacatgtgttgctaacgcgacaatttttcctcaatgctcacaagctcctatagcttcccttctttccccataccttccatcaattatagcttcaatatgtgaaaacccagctcttcaaccatataggcttcaacaagcaatcgcagcaagcaacata

SEQ ID NO: 320499 - DNA, 253 bp, Zea mays
gaccaactagcaacatagaaagcacaatagtgtaccaacaatggcagccaaaatattttgcctccttatgctccttggtctttctgcaagtgctgctacggcgaccattttcccgcaatgctcgcaagctcctatagcttcccttcttcccccgtacctctcaccagcggtgtcttcggtatgtgaaaacccaattcttcaaccctacaggatccaacaggcaatcacagctggcatcttacctttatcaccc

SEQ ID NO: 320500 - DNA, 240 bp, Zea mays
gccagtcccgcgagcaccattcaccacaccagcgcagccgccatggccgacgtcgagaaggccacccccgtggccgcaccggccgagggcgcgggcggcgacgtggccgccgggagaaccggcgcggtggccgccctgctgcggcggtggcggacccaggacctgctggaccggtcggggtccgcgctgcgcgccgcggcgtgggcgttctccctgctggcgttcctcgtcatggcctgc

SEQ ID NO: 320501 - DNA, 251 bp, Zea mays
tatactcctgttcaacttattctcccacgtagccctctcgtgataccgtctacacgcactagacctctgcaacaattcctgcaacagaccgtaccagcttttactcagaatgtaacactcaaaccctactaactacttgcaacagctgatatcattcatccaatagactgtgacgaactatactgcgtacctacatcaactatactactcatacatgtgactacctctgtctatctctcttttcactttct

SEQ ID NO: 320502 - DNA, 246 bp, Zea mays
acgcaacagcaacaacaatttctaccagcactgagccaactagctgtggtgaaccctgtggcctacttgcaacagcagttgcttgcatccaacccacttgctctggcaaacatagttgcataccaacaacaacaacaattgcaacagtttctaccagcgctcagtcaactagccatggtgaaccctgccgcctacctacaacagcaacaactgatttcatctagccctctcgctgtggttaatgca

SEQ ID NO: 320503 - DNA, 289 bp, Zea mays
cactcatccggggcaacttacatggacaatctcgctttacatccttcaccacactaattggctccagcatctctaaccacctatcaggatctaccaagttgccacatatcctttgacccaccttcactctatccatgctacaatactcccaacatatctactatccccagactatctgactgaccttcatagatatggtaactctcaagactatgaactttaacaagacacttgcaaagaatctttccaatacataccatcctatcttgccatcagacgccatcatcac

SEQ ID NO: 320504 - DNA, 256 bp, Zea mays
cctgtctccctccctcccccaccccgcgagaccgccggcgaatttgttgcagtgcactgaagccaacagctgcaggacaggaggaggaggaggagctgtttcaacaattatcccccgcgcgcccaggccagccccgcccccgcccgcccactctcccgaggattccaggttctcaacacaacagacaacaccgctcaccgcatatatatatatatagatgggttccgaggggccttctcccgtcaccgtccacgtc

SEQ ID NO: 320505 - DNA, 237 bp, Zea mays
  unsure (1)..(237): unsure at all n locations
cacctgtatactgtaatggtcttgggtcttggcaactgattaatgatnngggtattttgttaattttaantgganattggaatatattaattatttttataatttttaaattaatatttatatttttattttaattttaanaagaatttaatgttttaaacacaacagacaacaccgctcaccgcttatatatatatatagatggtttccgaggggccttctcccctcaccgtccac

SEQ ID NO: 320506 - DNA, 443 bp, Zea mays
  unsure (1)..(443): unsure at all n locations
attttgagcattcagaaacacaccaagtgaagcgcactagcaacgacctaacaacagtggctaccaagatattagccctccttgcgcttcttgccctttttgtgagcgcaacaaatgcgttcattattccacaatgctcacttgctcctagtgccattattccacagttcctcccaccagttacttcaatgggcttcgaacacctagctgtgcaagccaacatgcaacaacaagcgcttgcggcgagcgtcttacaacaaccaattgcccaattgcaacaacaatccttgccacatctaacaatacaagccatcacaacgcaacagcaacaacagttcctaccagcactgagccacctagccatggtgaaccctgccgnctacttgcaagagcagctgcttgcatccaacccacttgctctggcgaacgtagttgcaaaccag

SEQ ID NO: 320507 - DNA, 336 bp, Zea mays
tcgattttgagcattcagaaacacaccaagcgaagcgcactagcaacgacctaacaacgggggctaccaagatattagccctacttgcgcttcttgccctttttgtgagcgcaacaaatgcgttcattattccacaatgctcacttgctcctagtgccattattccacagttcctcccaccagttacttcaatgggcttcgaacacctagctgtgcaagccaacatgcaacaacaagcgcttgcggcgagcgtcttacaacaaccaattgcccaattgcaacaacaatccttgccacatctaacaatacaagccatcacaacgcaacagcaacaac

SEQ ID NO: 320508 - DNA, 426 bp, Zea mays
gagaccaactagcaacatataacgcacagtagtgtaccaacaatggcagggaaaaggtgttgcctacttatgctccttggtctttgtgcaagtgctgctacggcaaccattttcctgcaatgctcgcaagctcctatagcttcccttcttccgccgtacctctcaccagcggcgtcttcggtatgtgaaaacccaattcttcaaccctacaggatccaacaggcaatcacagctggcatcttacctttatcacacttgttcctccaacagtcatcagccctattacatcagttacctttggtgcatttattggcacacaacatcagggcacaacaactacaacaacttgtgctagcaaaccttgctgcctactgtcagcaacagcagttgcttccattcaaccaactagctgcattgaactctgat

SEQ ID NO: 320509 - DNA, 425 bp, Zea mays
ctcatgcatcacaaaacattcttatatcagtaccatcaatcatcattcatcttagtggtataggcaccaaatcaaatctgcaacatcaattatctaactccaaaaaccatgaagctggtgcttgtggttcttgctttcattgctctagtatcaagtgtctcttgtacacagacaggcggctgcagctgtggtcaacaacaaagccatgagcagcaacatcatccacaacaacatcatccacaaaaacaacaacatcaaccaccaccacaacatcaccagcagcagcaacaccaacaacaacaagttcacatgcaaccacaaaaacatcagcaacaacaagaagttcatgttcaacaacaacaacaacaaccgcagcaccaccaccaacaacaacaacaacagcaccaacaacaacatcaatgtga

SEQ ID NO: 320510 - DNA, 182 bp, Zea mays
atgttcagcattcaaaaacacaccaagcgaaacggactaaccaccaccttgccaccaagggttccaagaaattaacccttctttggcctcttggccttttaaggaaccccaccaaaggcgtcaataattcaaaagggttaattggttctaagggccataattcaaaagttcttccaacaagt

SEQ ID NO: 320511 - DNA, 425 bp, Zea mays
cccacgcgtccggccctattacatcagttacctttggtgcatttattggcacaaaacagcagggcacaacaactacaacaacttgtgctagcaaaccttgctgcctactctcagcaacagcagtttcttccattcaaccaactagctgcattgaactctgcttcttatttgcaacaacaacaactaccattcagccagctacctgctgcctacccccagcaatttcttccattcaaccaactggcagcattgaactctcctgcttatttacagcagcaacaactactaccattcagccagctagctggtgtgagccctgctaccttcttgatacaaccacagttgttgccgttctaccagcacgctgcgcctaacgctggcaccctcttacaactgcaacaattgctgccattcaaccaacttgg

SEQ ID NO: 320512 - DNA, 439 bp, Zea mays
gtggaatccagtagcaacaatagagcaacaatggcgaccaagatattttccctcctggtgctccttgctctttctacatgtgttgctaacgcgacaattttccctcaatgctcacaagctcctatagcttcccttcttcccccataccttccatcaattatagcttcaatatgtgaaaacccagctcttcaaccatataggcttcaacaagcaatcgcagcaagcaacatacctttatcgcccttgttgtttcaacaatcgccagccctatctttggtgcagtcattggtacaaaccatcagggcacaacagctgcagcaactcgtgctacctctgatcaaccaagtagctctggcaaacctttctccctactctcagcaacaacaatttcttccattcaaccaactgtctacactgaaccctgctgcttatttgcagc

SEQ ID NO: 320513 - DNA, 438 bp, Zea mays
gtgaaaccccaattgttcaaccctacaggatccaacaggcaatcgcaacaggcatcgtaccattatcacccttgttcctccaacaaccgtcagccctattacagcagttacctttggtccatttggtggcacaaaacatcagggcacaacaactacaacaacttgtgctagcaaaccttgctgcatactctcagcaacatcagtttcttccattcaaccaactggctgcattgaactctgctgcttatttgcaacaacaattaccattcagccagctagttgctgcctacccccagcaatttcttccattcaaccaactagcagcattgaactctgctgcttatttacagcagcaacaactactaccattcagccagctagctgatgtgagccctgctgccttcttgacacaacaacagttgttgccgttctacctgc

SEQ ID NO: 320514 - DNA, 144 bp, Zea mays
acccgatcgacaccatgagggtgttgctcgatgccctagctctcctggctgtagctgggagcgccacctccacgcatacaagcggcggctgcggctgccagccaccgacgccggatcatctaccgccgtcggtgcatctgccac

SEQ ID NO: 320515 - DNA, 452 bp, Zea mays
ctttgcagctgcggcggcggcggcggacgcattgtcgagggatggctggagcacacgggacgatggctgggtggcgtcgacgacgctggatttcctcttgaatcggttgcatctgctgctgccggagttgccggtggccaccgcttctttggagccaccgcagcccatggtggctcaaaggagaggagaggagagagagagagagcggcggagatggaaaaaaatgcaacgagaggacgaggaaccgatacgggcttcttggatctgagggaatgaaaagtcggaggagattaagcggggtctatgtgccacgtggatgcatgaatggacaaagtctcgtgggggaaagggaaacgcatgcatgcatgcatgacgtgacaaatttagggagaccgtaaccaaacaaaagttgtcgtttttttgatgttgaagggaaggggttgcgagacaag

SEQ ID NO: 320516 - DNA, 334 bp, Zea mays
  unsure (1)..(334): unsure at all n locations
cgcccttgttgtttcaacaaagaccatccctaactttggtgcagtcattggtacaaaccatcanggcacaacagctgcagcaactcgtgctacctgtgatcaaccaagtagctctggcaaacctttctccctactctcagcaacaacaatttcttccattcaaccaactgtctacactgaaccctgctgcttatttgcagcaacaactattaccatttagccagctagctactgcctactctcatcaacaacaacttcttccatttaaccaattggccgcactgaaccccgctgcttatttgcagcaacaaatactactgccatttatcgaact

SEQ ID NO: 320517 - DNA, 258 bp, Zea mays
ctctttctacatgtgttgctaacgctacaattttccctcaatgctcacaagctcctatatcttcccttcttcccccataccttccatcaattatagcttcaatatgtgaaaaccctactcttcaaccatatatgcttcaacaatcaatcgcaacaagcaacatacctttatcaccctttttttttcaacaatcaccatccctatctttttttcattcattaggtcaatccatcattgcatctcatcttcatcatcttt

SEQ ID NO: 320518 - DNA, 199 bp, Zea mays
ccggttctcggaattcccggctgcgacgccacgtcgtctcggcgaagatgcaagcatagaagatggactgacatagttgcggcgccacgagatgcctgtgcggactcgcgtcggctgtcgcggcgtaggctggaccctgataatagctgcttcccgagccggcatcggtgattcctggttccatgttcctagatgcccg

SEQ ID NO: 320519 - DNA, 445 bp, Zea mays
gcaacatagaaagcacaatagtgtaccaacaatggcagccaaaatattttgcttcctgatgctccttggtctttctgcaagtgctgctaccgcaaccattttcccacaatgctcacaagctcctatagcttcctttcttcccccatacctctcaccagcggtgtcttcagtatgtgaaaacccaattcttcaaccctacaggatccaacaggcaatcgcagcaggcatcttacctttatcacccttgttcctccaacaaccgtcagccctattacagcagttacctttggtgcatttgttggcacaaaacatcaaggcacaacaactacaacaacttgtgctaggaaaccttgctgcctactctcagcaacagcagtttcttccattcaaccaactggctgcattgaactctgctgcttatttgcaacaacaactaccattcagt

SEQ ID NO: 320520 - DNA, 442 bp, Zea mays
attgagaccaactagcaacatagaaagcacaatagtgtaccaacaatggcagctaaagtatttggcctccttatgctccttggtctttctgcaagtgctgctacggcgaccattttcccacaatgctcacaagctcctatagcttcccttcttcccccgtacctctcaccaacggtgtcttcggtatgtgaaaacccaattcttcaaccctacaggatccaacaggcaatcgcagctggcatcttacctttatcacccttgttcctccaacaatcatcagccctattacagcagttacctttggtgcatttattggcacaaaacatcagggcacaacaactacaacaacttgtgctagcaaaccttgctgcctactctcagcaacagcagtttcttccattcaaccaactagctgcattgaactctgcttcttatttgcaac

SEQ ID NO: 320521 - DNA, 433 bp, Zea mays
gaccaactagcaacatagatagcacaatagtgtaccaacaatggcagccaaaatatgttgcttccttatgctccttggtctttctgcaagtgttgctaccgcaaccattttcccacaatgctcacaagctcctatagcttcccttcttcccccatacctctcaccagcggtgtcttcaatgtgtgaaaccccaattgttcaaccctacaggatccaacaggcaatcgcaacaggcatcttaccattatcacccttgttcctccaacaaccgtcagccctattacagcagttacctttggtccatttgttggcacaaaacatcagggcacaacaactacaacaacttgtgctagccaaccctgctgcatactttcagcaacatcagtttcttccattcaaccaactggctgcattgaactctgctgcttatttg

SEQ ID NO: 320522 - DNA, 424 bp, Zea mays
gtggaatccagtagcaacaacagagcatcaatggcgaccaagatattttccctccttagtctccttgctctttctgcatgtgttgctaacgcgacaattttccctcaatgctcacaagctcctatagcttcccttcttcccccataccttccatcaatgatagcttcagtatgtgaaaacccagctcttcagccctataggctccaacaagcaatcgcagcaagcaacatacctttatcacccttgttgtttcaacaatcgccagccctatctttggtgcagtcattggtacaaaccatcagggcacagcagctgcagcaactcgtgctacctgtgatcaaccaagtagctctggcaaacctttctccctactctcagcaacaacaatttcttccattcaaccaactgtctacactgaaccctg

SEQ ID NO: 320523 - DNA, 423 bp, Zea mays
aacacaccaagcgaagcgcactagcaactacctaacaccaatggctaccaagatattaggcctccttgcgcttcttgcccttttagtgagcgcaacaaatgcgttcattattccacagtgctcacttgctcctagtgccattattccacagttcctcccaccagttacttcaatgggcttcgaacatccagccgtgcaagcctacaggctacaactagcgcttgcggcgagcgccttacaacaaccaattgcccaattgcaacaacaatccttggcacatctaaccctacaaaccattgcaacgcatcatcaacaacaacaacagtttctgccatcactgagccacctagccgtggtgaaccctgtcacctacttgcaacagcagctgcttgcatccaacccacttgctctggcgaacgtagc

SEQ ID NO: 320524 - DNA, 250 bp, Zea mays
cgcggcttcagcttagtcaccttctttacggaggaggcgatgcggaacgccatcgagggcatgaacggcaaggagctggacggccgcaacatcaccgtcaacgaggcccagtcccgcggcggccgtggaggccgcggcggcggctacggtggtggccgtgtaggcagcggctactgcggtggcgggcgccgtgatggctgcgacggctacagcggtggctgcagcagctactgtgacatcagtatctaca

SEQ ID NO: 320525 - DNA, 431 bp, Zea mays
gctcacaagctcctatagcttcccttcttcccccgtacctctcaccagcggtgtctgcggtatgtgaaaacccaattgttcaaccctacaggatccaacaggcaatcgcagctggcatcttacctttatcacccttgttcctccaacaatcatcagccctattacagcagttacctttggtgcatatattggcacaaaacatcagggcacaacaactacaacaacttgtgctagcaaaccttgctgcctactctcagcaacagcagtttcttccattcaaccaactagctgcattgaactctgcttcttatttgccacaacaacaactaccaattcaccagctacctgttgcctacccccaacaatttcttccattcaaccaactggcagcattgaactcttctgcttatttacagcagcaacaactacta

SEQ ID NO: 320526 - DNA, 270 bp, Zea mays
aaagactcacgaatcccagagagcctccatggcgacgcaccgacactgcgggccacgggtcctcgtggccgccgacctcgccctcgccgccgtccctgctcgcgcggcagctgggcggcgggcgcggcccgctgctgggcgggtggaacccgatccctgacgcgagcgactcgcacatgcaagaactaggcgggtggacgctgtggcaggcgaatcaacaaaagctggccgacgacggactgcgattccgtcgcatgacgcgcggcgagc

SEQ ID NO: 320527 - DNA, 433 bp, Zea mays
acatagaaagtggaatccagtatcaacaatagagcaacaatggcgaccaagagattttgcctccttatgctccttgctctttctacatgtgttgctaacgcgacaattttccctcaatgctcacaagctcctatagcttcccttcttcccccataccttccatcaattatagcttcaatatgtgaaaacccagctcttcaaccatataggcttcaacaagcaatcgcagcaagcaacatacctttatcgcccttgttgtttcaacaatcgccagccctatctttggtgcagtcattggtacaaaccatcagggcacaacagctgcagcaactcgtgctacctctgatcaaccaagtagctctggcaaacctttctccctactctcagcaacaacaatttcttccattcaaccaactgtctacactgaaccctg

SEQ ID NO: 320528 - DNA, 413 bp, Zea mays
agccttccgaaggtttaaaaacctctccgagcgaactttccttccaacgacgtaacaccaatggctcggactatatgagccatcattgggcttctcgacctttgagtcagcgcttcatacgcaccaattattccacacagctgacttgcttctagcgccactattatcacagctactgctaccacatactctaatgggctactatcataccgccgtgcaagcctactggctacaactagcactctcaaccatcgcgttacttcacccaatcgcccatttgcatctacactgcttgctacatcttactctacaaaccatcgcctcgctacatctaccacatcagcctctgtcatcactgatccatatatccatggtgaaccacgtctactacttgaaacagctagctgcttgca

SEQ ID NO: 320529 - DNA, 201 bp, Zea mays
ctggtgctgcagtggcggttcagaatcatgcgatgatgaattagtcaaacatagaagtgaccgggcctttatactcaggaattgataatgatacaaaccttggtacaatgatcaacccacaagcataggattctatctcgacagctagccaaagttggcttaagagagatgctctgatactgctagatggcagaaagatct

SEQ ID NO: 320530 - DNA, 424 bp, Zea mays
gtgaggttctccggggttcggtttcgtgggtgagcggatcgagatggcggcgtcggaggttgagtaccgctgcttcgtcggcggcctcgcctgggccacggacgaccactccctccacaacgccttcagcacctacggcgaggtcctcgagtccaagatcatcctcgatcgggagacgcagaggtcccgcggcttcggcttcgtcaccttctccacggaggaggcgatgcggaacgccatcgagggcatgaacggcaaggagctggacggccgcaacatcaccgtcaacgaggcccagtcccgcggcggccgtggaggcggcggcggcggcgggtacggtggtggccgtggaggcggcggctacggcggtggcgggcgccgtgatggcggcggcggctacggcggtggcggcggctacggtggt

SEQ ID NO: 320531 - DNA, 423 bp, Zea mays
cagctagcaacatagaaagcacaatagtttaccaacaatggcagccaaaatattttgccggcttatgctccttggtctgtctgcaagtgctgctacggcgaccattttcccacaatgctcacaagctcctatagcttcccttcttcccccgtacctctcaccagcggtgtcttcggtatgtgaaaacccaattcttcaaccctataggatccaacaggcaatcgcagctggcatcttacctttatcacccttgttcctccaacaatcatcagccctattacagcagttacctttggtgcatttattggcacaaaacatcagggcacaacaactacaacaacttgtgctagcaaaccttgctgcctactctcagcaacaacagtttcttccattcaaccaactagctgcattgaactctgcttc

SEQ ID NO: 320532 - DNA, 274 bp, Zea mays
atttccggctggacccactcatccaaacattctatccacttcaaccacaattttactcttaatactctcaaccataaacaaggcctccgaatacttacagaggccttacataattctactattgcactatcaacacactcacaacctaatattaatattccactcattactactactcataattcaccaattcacaataaagtaaccttaattatattcaaatactttgaactataatcaaaccttatacaaaaatttaaaactcctatcaata

SEQ ID NO: 320533 - DNA, 226 bp, Zea mays
cagcattcaaaaacacaccaagcgaatcgcactatcaacgacctaacaccaatggctgccaagatattagccctccttgcgcttcttgcccttttagtgagcgcaacaaatgcgttcattattccacagtgctcacttgctcctagtgccagtatttcacagttccttccaccagttacttcaatgggcttcgaacattcagccgtgcaagcctacaggctacaac

SEQ ID NO: 320534 - DNA, 421 bp, Zea mays
attcagaaacacaccaagcgaagcgcactagcaacgacctaacaacaatggctaccgggatattagccctccttgcgcttcttgccctttttgtgagcgcaacaaatgcgttcattattccacaatgctcacttgctcctagtgccattattccacagttcctcccaccagttacttcaatgggcttcgaacacctagctgtgcaagccaacatgcaacaacaagcgcttgcggcgagcgtcttacaacaaccaattgcccaattgcaacaacaatccttgccacatctaacaatacaagccatcacaacgcaacagcaacaacagttcctaccagcactgagccacctagccatggtgaaccctgccgcctacttgcaagagcaactgcttgcatccaacccacttgctctggcgaacgt

SEQ ID NO: 320535 - DNA, 438 bp, Zea mays
  unsure (1)..(438): unsure at all n locations
attttgagcattcagaaacacaccaagcgaagcacattagcaacaacctggcaacaggggctaccaagatattatccctccttgcgcttcttgcgctttttgcgagcgcaacaaatgcgttcattattccacaatgctcacttgctccaagttccattattacacagttcctcccaccagttacttcaatgggcttcgaacacccagctgtgcaagcctataggctacaacaagcaattgcggcgagcgtcttacaacaaccaatttcccagttgcaacaacaatccttggcacatctaacaatacaaaccatcgcaacgcaacagcaacaacaattcctaccagcactgagccacctagccatggtgaaccctgccggctacttgcaacagcagttgcttgcatcaaacccacttgctctggcanacgtagttgcaa

SEQ ID NO: 320536 - DNA, 428 bp, Zea mays
gcgtccgattgagacccacttgccaccttaaaaggcccattatggtcccaccattgccagccaaaggattttgcttccttatcctccttggtctttctgcaagtgctgctaccgcaaccattttcccacaatgctcacaagctcctatagcttcctttcttcccccatacctctcaccagcggtgtcttcagtatgtgaaaacccaattcttcaaccctacaggatccaacaggcaatcgcagcaggcatcttacctttatcacccttgttcctccaacaaccgtcagccctattacagcagttacctttggtgcatttgttggcacaaaacatcaaggcacaacaactacaacaacttgtgctaggaaaccttgctgcctactctcagcaacagcagtttcttccattcaaccaactggctgcattg

SEQ ID NO: 320537 - DNA, 390 bp, Zea mays
ccctcgctctcctggctctcgctgcgagcgccacctccacgcatacaagcggcggctgcggctgccagccaccgccgccggttcatctaccgccgccggtgcatctgccacctccggttcacctgccacctccggtgcatctcccaccgccggtccacctgccgccgccggtccacctgccaccgccggtccatgtgccgccgccggttcatctgccgccgccaccatgccactaccctactcaaccgccccggcctcagcctcatccccagccacacccatgcccgtgccaacagccgcatccaagcccgtgccagctgcagggaacctgcggcgttggcagcaccccgatcctgggccagtgcgtcgagttcctgaggcatcagtgca

SEQ ID NO: 320538 - DNA, 443 bp, Zea mays
  unsure (1)..(443): unsure at all n locations
cccacgcgtccgtgagaccagcaagcaacatagaaagtagaatccattagcaacaatagagcagcaatggcgaccaagatattttccctccttatgctccttgctctttctacatgtgttgctaacgcgacaattttccctcaatgctcacaagctcctatagcttcccttcttcccccataccttccatcaattatagcttcagtatgtgaaaacccagctcttcaaccatataggcttcaacaagcaatcgcagcaagcaacatacctttatcgcccttgttgtttcaacaatcaccagccctatctttggtgcagtcattggtacaaaccatcagggcacaacagctgcagcaactcgtgctacctgtgatcaaccaagtagctctggcaaacctttcntcctactctcagcaacaacaatttcttccattcaaccaact

SEQ ID NO: 320539 - DNA, 435 bp, Zea mays
  unsure (1)..(435): unsure at all n locations
cagcaagcaacatagaaagtggaatacagtagcaacaatagagcaacaatggcggccgggatatgttccatccttatgctccttgctctttctgcatgtgttgctaacgcgaccatttttcctcaatactcacaagctcctatagctgcccttcttcccccataccttccatcaatgaccgcttcagtttgtgaaaacccagcccttcaaccctacaggctccaacaagcaatcgcaacaagcaacttacctttatcacccctgttctttcaacaatcgccagccctatctttggtgcagtcattggtacaaaccatcagggcacaacagctgcaacaactcgtgctaccagtgatcagccaagtagctctggcaaacctttctccctactctcagcnacaacaatttcttccattcaaccaactgtctacactg

SEQ ID NO: 320540 - DNA, 357 bp, Zea mays
cccacgcgtccgattattgagaccaactagcaacatagaaagcacaatagggtaccggcaatggcagccaaaatattgtgcctccttatgctccttggtctttctgcaagtgctgctactgcgaccattttcccgcaatgctcacaagctcctatagcttaccttcttcccccgtacctgtcaccagcggtgtcttcggtatgtgaaaacccaattcttcaaccctacaggatccaacaggcaatcacagctggcatcttacctttatcacccttgttcctgcaacaatcatcagccctattacatcagttacctttggtgcatatattggcacaaaacatcatggcacaacaacta

SEQ ID NO: 320541 - DNA, 429 bp, Zea mays
cactagcaacatagaaagcacaatattgtaccaacaatggcagccaaagtattttggctccatatgctgcttggtctttctgcaagtgcttctacggcgaccatttatccacaatgcttacaagctcctatagcttgccttctttcgccgtacctatcaccagcggtgtcttcggtatgtgaaaacccaattcttcaatcctatagtatccaacaggcaatcgcatctggcatcttacctttatcacacatgttccttcaacaatcatcagccctattacagcatttacctttgcatgcattcattgccacaaaacatcagggcacatcaactacaacaacttgtgctagcaaaccttgctgtctactctcagcaacaacatactctttcattcaaccaactagctgcattgaactctgcttattattt

SEQ ID NO: 320542 - DNA, 429 bp, Zea mays
gcaacatagaaagtggaatccagtagcaacaacagagcaacaatggcgaccaagatggtttccgtccttatgctccttgctctttctgcatgtgttgctaacgcgacaattttccctcaatgctcacaagctcctatagcttcccttcttcccccataccttccatcaatgatagcttcagtatgtgaaaacccagctcttcagccctataggctccaacaagcaatcgcagcaagcaacatacctttatcacccttgttgtttcaacaatcgccagccctatctttggtgcagtcattggtacaaaccatcagggcacagcagctgcagcaactcgtgctacctgtgatcaaccaagtagctctggcaaacctttctccctactctcagcaacaacaatttcttccattcaaccaactgtctacactg

SEQ ID NO: 320543 - DNA, 430 bp, Zea mays
agccttccgttgaagaaccacaccaagcgaaccgcactaccaccgacctaccaccaatggctaccaaggtattatccctccttgcgcttcttgccctttttgtgagcgcaacaaatgcgttcattattccacaatgctcacttgctcctagtgccattattccacagttcctcccaccagttacttcaatgggcttcgaacacctagctgtgcaagccaacatgcaacaacaagcgcttgcggcgagcgtcttacaacaaccaattgcccaattgcaacaacaatccttgccacatctaacaatacaagccatcacaacgcaacagcaacaacagttcctaccagcactgagccacctagccatggtgaaccctgccgcctacttgcaagagcagctgcttgcatccaacccacttgctctggcgaacgt

SEQ ID NO: 320544 - DNA, 440 bp, Zea mays
  unsure (1)..(440): unsure at all n locations
caagcaacataganagtggattacagtagcaaaaatagagcaacattggcggccaagatattttccatccttattgtccttgctctttctgcatgtgttgctaacgcgaccatttttcctcaatactcacaagctcctatagctgcccttcttcccccataccttccatcaatgaccgctttagtatgtgaaaacccagcccttcaaccctacaggatccagcaagcaatcgcaacaagcaacttacctttatcacacctgttctttcaacaatcgccagccctatctttggtgcagtcattggtacaaaccatcagggcagaacagttgcagcaactcgtgctaccagtgatcagccaagtagctctggcaaacctttccccctactctcagcaacaacaatttcttccattcaaccaactgtctatactgaaccctgc

SEQ ID NO: 320545 - DNA, 416 bp, Zea mays
attgagaccaacaagcaacatagaaagtggaatccagtagcaacaatagagcaacagtggcgaccaagatactttccctccttatgctccttgctctttctgcatgtgttgctaacgcgacaattttccctcaatgctcacaagctcctatagcttcccttcttcccccataccttccatcaatgatagcttcagtatgtgaaaacccagctcttcaaccctataggctccaacaagcaatcgcagcaagcaacatacctttatcacccttgtttcaacaatcgccagccctatctttggtgcagtcattggtacaaaccatcaaggcacagcagctgcagcaactcgtgctacctgtgatcaaccaagtagctctggcaaacctttctccctactatcagcaacaacaatttctt

SEQ ID NO: 320546 - DNA, 446 bp, Zea mays
ggctgcattgaactctgctgcttatttgcaacaacaattaccattcagccagctaggtgctgggtacccccagcaatttcttccattcaaccaactagcagcattgaactctgctgcttatttacagcagcaacaactactaccattcagccagctagctgatgtgagccctgctgccttcttgacacaacaacagttgttgccgttctacctgcacgctatgcctaacgctggcaccctcttacaactgcaacaattgctgccattcaaccaacttgctttgacaaactcaacagtgttctaccaacaacccatcattggtggtgccctcttttagattgcttatgagttatagttcaataatgaagttttttggatgatgtttgtggcgtcccagaaataagaaagtacatttctagattcaaaagaaaaaaaaaaagggcggc

SEQ ID NO: 320547 - DNA, 445 bp, Zea mays
  unsure (1)..(445): unsure at all n locations
tgagcattcagaaacacacctagcgaagcgcactagcaacgacctaacaacaatggcttccaagacattatccctccttgcgcttcttgccctttttgtgagtgcaacaaatgcgttcattattccacaatgctcacttgctccgagtgccattattccacagttcctccctccagttacttcaatgggcttcgaacacccagctgtgcaagcctataggctacaacaagcgcttgcggcgagcgtcttagaacaaccaattgcccaattacaacaacaatccttggcacatctaaccatacaaaccatcgcaacgcagcagcaacaagcactgagccacctagccgtggtgaaccctatcgnctacttgcaacaacagctgcttgcatccaacccacttgctttggcaaacgtagctgcataccaacaacaacaacagttgcaa

SEQ ID NO: 320548 - DNA, 439 bp, Zea mays
ttgagaccaactagcaacatagaaagcacaatagtgtaccaacaatggcagccaaaggattttgcttccttatgctccttggtctttctgcaagtgttgctaccgcaaccattttcccacaatgctcacaagctcctatagcttcccttcttcccccatacctctcaccagcggtgtcttcaatgtgtgaaaacccaattgttcaaccctacaggatccaacaggcaatcgcaacaggcatcttaccattatcacccttgttcctccaacaaccgtcagccctattacagcagttacctttggtccatttggtggcacaaaacatcagggcacatcaactacaacaacttgtgctagcaaaccttgctgcatactctcagcaacatcagtttcttccattcaaccaactggctgcattgaactctgctgcttatttgca

SEQ ID NO: 320549 - DNA, 338 bp, Zea mays
cgtccgattcccggtcgcccaccgtccgccgtgcatctcccaccgccggtccacctgccgccgccggtccacctgccaccgccggtccatgtgccgccgccggttcatctgccgccgccaccatgccactaccctactcaaccgccccggcctcagcctcatccccagccacacccatgcccgtgccaacagccgcatccaagcccgtgccagctgcagggaacctgcggcgttggcagcaccccgatcctgggccagtgcgtcgagtttctgaggcatcagtgcagcccgacggcgacgccctactgctcgcctcagtgccagtcgttgcggcagca

SEQ ID NO: 320550 - DNA, 182 bp, Zea mays
ccaacacatccaccacaatacatccaccaacaatctacaacaatctcacaccacaatccaacaaaacaacacaacaaccatcctactattaaatctcaacaactactcaaactctcacacaatctaacaacaccacatcacctaccaccaaaccctactacaccactcatactaccaaaata

SEQ ID NO: 320551 - DNA, 422 bp, Zea mays
gtggaatccagtagcaacaacagagcttctttggcgaccaagatattttccctccttagtctccttgctctttctgcatgtgttgctaacgcgacaattttccctcaatgctcacaagctcctatagcttcccttcttcccccataccttccatcaatgatagcttcagtatgtgaaaacccagctcttcagccctataggctccaacaagcaatcgcagcaagcaacatacctttatcacccttgttgtttcaacaatcgccagccctatctttggtgcagtcattggtacaaaccatcagggcacagcagctgcagcaactcgtgctacctgtgatcaaccaagtagctctggcaaacctttctccctactctcagcaacaacaatttcttccattcaaccaactgtctacactgaaccc

SEQ ID NO: 320552 - DNA, 352 bp, Zea mays
cccccccccacccccccacccccccccctcccccccccccccctcctcccccccccccccccccccccccccccccccctccttctcctccctctccccccccccacccccccctcccctccccccctcccccccccccccccccccccccccccccccccccccctctcccccccctccccctcccccccctctcccccccaccctcaccctctccctcccctcctctctcccctccccccccccccccctctcccccccccccccctccccccccctctcccccccccccctcctcccccccctcccccccccccccccccccccctcctccccctccccacctcctccc

SEQ ID NO: 320553 - DNA, 160 bp, Zea mays
acatccaccaagcaatctacaacatactcaccccatcaccacacgatcccatctacaaccatataactattccatctcacaacctactcaaactcccctccaatctgacaccaacacaattcctaccatcaatttacaccttcttccacccattctacca

SEQ ID NO: 320554 - DNA, 121 bp, Zea mays
attccacaccgacccactctcctattgataccaacaacaacatataaatttaatccagtagcaacaatatatcatcaatgactaccattatactttccctccttattctcctttctctttc

SEQ ID NO: 320555 - DNA, 375 bp, Zea mays
gcaacatagaaagcacaatagtgtaccatcaatggcagctaaaatattttgcctccttatgctccttggtctttctgcaagtgctgctacggcgaccattttcccacaatgctcacaagctcctatagcttcccttcttcccccgtacctctcaccaacggtgtcttcggtatgtgaaaacccaattcttcaaccctacaggatccaacaggcaatcgcagctggcatcttacctttatcacccttgttcctccaacaatcatcagccctattacagcagttacctttggtgcatttattggcacaaaacatcagggcacaacaactacaacaacttgtgctagcaaaccttgctgcctactctcagcaacagca

SEQ ID NO: 320556 - DNA, 397 bp, Zea mays
agaaagtggaatccagtagcaacaacagttcaacaatggcgaccaagatattttccctccttatgctccttgctctttctgcatgtgttgctaacgcgacaattttccctcaatgctcacaagctcctatagcttcccttcttcccccataccttccatcaatgatagcttcagtatgtgaaaacccagctcttcagccctataggctccaacaagcaatcgcagcaagcaacatacctttatcacccttgttgtttcaacaatcgccagccctatctttggtgcagtcattggtacaaaccatcaaggcacagcagctgcagcaactcgtgctacctgtgatcaaccaagtagctctggcaaacctttctccctactctcagcaacaacaatttct

SEQ ID NO: 320557 - DNA, 276 bp, Zea mays
gaattcccggctcaccacctccgatgagttatagttcaataataaatctaaataaggcaccacaacacacctggcacggtacttcctcctactaattcctaactcacaattttcctacatgcttacaaaactataacttccttcttccacataccttcattaatatagcttcatatataaaacccaacttatatcctatagctccacaacaattccacagcaacatacctttaaacccttgatattcaacaatcccaccctatcttctttcaaaat

SEQ ID NO: 320558 - DNA, 370 bp, Zea mays
ctctgcttcttatttgcaacaacaacaactaccattcagccagctatctgctgcctacccccagcaatttcttccattcaaccaactgacagcattgaactctcctgcttatttacagcagcaacaactactaccattcagccagctagctggtgtgagccctgctaccttcttgacacaaccacagttgttgccgttctaccagcacgctgcgcctaacgctggcaccctcttacaactgcaacaattgctgccattcaaccaacttgctttgacaaacccagcagcattctaccaacaacccatcattggtggtgccctcttttagatttcttatgagttatagttcaataataaagttttttgtctg

SEQ ID NO: 320559 - DNA, 441 bp, Zea mays
ggctagcaaaccttgctgcatactctcatcaacatcagtttcttccattcaaccaactggctgcattgaactctgctgcttatttgcaacaacaattaccattcagccagctagttgctgcctacccccagcaatttcttccattcaaccaactagcagcattgaactctgctgcttatttacagcagcaacaactactaccattcagccagctagctgatgtgagccctgctgccttcttgacacaacaacagttgttgccgttctacctgcacgctatgcctaacgctggcaccctcttacaactgcaacaattgctgccattcaaccaacttgctttgacaaacccaacagtgttctaccaacaacccatcattggtggtgccctcttttagattgcttatgagttatagttcaataatgaaagtttttggatgatgt

SEQ ID NO: 320560 - DNA, 450 bp, Zea mays
  unsure (1)..(450): unsure at all n locations
cccacgcgtccgtctaaccatacaaaccatcgcaacgcagcagcaacaagcactgagccacctagccgtggtgaaccctatcgcctacttgcaacaacagctgcttgcatccaacccacttgctttggcaaacgtagctgcataccaacaacaacaacagttgcaacagtttctaccagcgctcagtcaactagccatggtgaaccctatcgcctacctacaacagcaacaacttctttcatctagcccgctcgctatgggcaatgcacctacatacctgcaacaacagttgttgcaacaacagttgctgcaacaaattgtaccagctcttactcagctagctgtggcaaaccctgctgcctacttgcaacaactacttncattcaaccaactgactgtgtcgaactctgctgcgtacctacaacagcgacaacagttacttaatccact

SEQ ID NO: 320561 - DNA, 448 bp, Zea mays
cttcagaccattagctttatctactccagagcgcagaagaacccgatcgacaccatgagggtgttgctcgttgccctcgctctcctggctctcgctgcgagcgccacctccacgcatacaagcggcggctgcggctgccagccaccgccgccggttcatctaccgccgccggtgcatctgccacctccggttcacctgccacctccggtgcatctcccaccgccggtccacctgccgccgccggtccacctgccaccgccggtccatgtgccgacgccggttcatctgccgccgccaccatgccactaccctactcaaccgacccggcctcagcctcatccccagccacacccatgcccgtgccaacagccgcatccaagcccgtgccagctgcagggaacctgcggcgttggcagcaccccgatcctgggccagtgcgtcgagtttc

SEQ ID NO: 320562 - DNA, 314 bp, Zea mays
cccttcgcgatgtaatatgagccgtataattggaatcggaaggctccgatttgtccatgttaaggcggctatgtgacaattgctaaagaagccctggctaaaaaaaaaaaaaaaaaaaaaaaaaaaaaaaaaaaaaaaaaaaaaaaaaaaaaataaaaaaaaaaaaaaaaaagcatcaatatgaaaaaaacccaataaatcaaccataaagagtaacaaaaagcaatcaaataaaaaaaagatgagccatagtttaaaagatcaaacaacaatcaccagccatacttatgaaacagtcttttatacaaaccatt

SEQ ID NO: 320563 - DNA, 445 bp, Zea mays
cagtagcaacaatagagcaacaatggcgaccaagatactttccctccttatgctccttgctctttctgcatgtgttgctaacgcgacaattttccctcaatgctcacaagctcctatagcttcccttcttcccccataccttccatcaatgatagcttcagtatgtgaaaacccagctcttcaaccctataggctccaacaagcaatcgcagcaagcaacatacctttatcacccttgtttcaacaatcgccagccctatctttggtgcagtcattggtacaaaccatcaaggcacagcagctgcagcaactcgtgctacctgtgatcaaccaagtagctctggcaaacctttctccctactatcagcaacaacaatttcttccattcaaccaactatctacactgaaccctgctgcttatttgcagcaacaactattaccattc

SEQ ID NO: 320564 - DNA, 439 bp, Zea mays
gaccaactagcaacatagaaagcacaattgtgtaccaacaatggcagccaaaatattttgcttccttatgctccttggtctttctgcaagtgctgctaccgcaaccattttcccacaatgctcacaagctcctatagcttcctttcttcccccatacctctcaccagcggtgtcttcagtatgtgaaaacccaattcttcaaccctacaggatccaacaggcaatcgcagcaggcatcttacctttatcacccttgttcctccaacaaccgtcagccctattacagcagttacctttggtgcatttgttggcacaaaacatcaaggcacaacaactacaacaacttgtgctaggaaaccttgctgcctactctcagcaacagcagtttcttccattcaaccaactggctgcatttgactctgctgcttatttgcaacaa

SEQ ID NO: 320565 - DNA, 452 bp, Zea mays
cggacgcgtgggcaactagcaacatagatagcacaatagtgtaccaacaatggcagccaaaatattttgcctccttatgctccttggtctttctgcaagtgctgctacggcgaccattttcccgcaatgctcgcaagctcctatagcttcccttcttcccccgtacctctcaccagcggtgtcttcggtatgtgaaaacccaattcttcaaccctacaggatccaacaggcaatcacagctggcatcttacctttatcacccttgttcctccaacaatcatcagccctattacatcagttacctttggtgcatttattggcacaaaacatcagggcacaacaactacaacaacttgtgctagcaaaccttgctgcctactctcagcaacagcagtttcttccattcaaccaactagctgcattgaactctgcttcttattgcaacaacaaca

SEQ ID NO: 320566 - DNA, 437 bp, Zea mays
gccaaaatattttgcctccttatgctccttggtatttctgcaagtgctgctacggcgaccattttcccgcaatgctcacaagctcctatagcttcccttcttcccccgtacctctcaccagcggtgtcttcggtatgtgaaaacccaattcttcaaccctacaggatccaacaggcaatcgcagctggcatcttacctttatcacccttgttcctccaacaatcatcagccctattacagcagttacctttggtgcatttattggcacaaaacatcagggcacaacatctacaacaacttgtgctagcaaaccttgctgcctactcttaacaacagcaggttctttcaattcaaccaactagctgcttggaactctgttcctaatttgccacaccaccaactaccattcagccagctacctgatgcctacccccaac

SEQ ID NO: 320567 - DNA, 430 bp, Zea mays
cggacgcgtgggcaactagcaacatagaaagcacaatagtgtaccaacaatggcagctaaaatattttgcctccttatgctccttggtctttctgcaagtgctgctacggcgaccattttcccacaatgctcacaagctcctatagcttcccttcttcccccgtacctctcaccaacggtgtcttcggtatgtgaaaacccaattcttcaaccctacaggatccaacaggcaatcgcagctggcatcttacctttatcacccttgttcctccaacaatcatcagccctattacagcagttacctttggtgcatttattggcacaaaacatcagggcacaacaactacaacaacttgtgctagcaaaccttgctgcctactctcagcaacagcagtttcttccattcaaccaactagctgcattgaactct

SEQ ID NO: 320568 - DNA, 326 bp, Zea mays
cccacgcgtccgcagctagctgcagcaagccgtgcttccttcttgacacagcaacagttgctgcctttctaccagcagtttgcggctaaccccgcaaccctcttacaactacaacaattgttgccctttgtccaacttgctttgacaaacccagcagcctcctaccaacaacacatcattggtggtgccctcttttagattgcttattagttgtaattcaataataaagttttttggatgatgtatgtggccaaccagaaataagaagttacatttccagattctaatgtgaaaaaaattaagtgcataaacagacacaaaaaata

SEQ ID NO: 320569 - DNA, 397 bp, Zea mays
tgttcttctccactgtacgcaccggcaatgtgaatgagttgagaaattcatggcactccgggtggtggccagtgaagattgccctcttcatggtctgttctctcatctctgtcttggctccatcctggtggatccaaatctatgttatgaaacattgtagagtcagaagacgacgtaccatatgggtatggttttttccattttgccttcgcggcgggctccatgtacgtcaggatggtgtttgtcggctgggacacacatcatacaatgaagcaatggagcgtggatattgggtggatgagcacgtgggttcatatcgccaatgaggctctcgtagtagtattctacatagcaatacttgctgctagaattttcggaataggcttgctccgacatc

SEQ ID NO: 320570 - DNA, 372 bp, Zea mays
  unsure (1)..(372): unsure at all n locations
ggcaatcgcagctggcatcttaccttttcacccttgtcctccacaatatcaccctattacaacagtacctttggtgcatnattggcacaaaacatcaggcacaacactacaacacttgtgctagcaaccttgctgctactctcacaacagcagtttcttccattcaaccaactaggttcattgaactctgcttcttatttgcaacaacaacaactaccattcagccagctacctgctgcctacccccagcaatttcttccattcaaccaactagcagcattgaactctcctgcttatttacagcagcaacaactactaccattcagccagctagctggtgtgagccctgctaccttcttgacacaaccacag

SEQ ID NO: 320571 - DNA, 377 bp, Zea mays
acgaaagcacacgaagcgaatcgcactagcattgacctaacaccaatggctaccaagatatggcccggcttgcgcttcttgcccttttagtgagcgcaacaaatgcgttcattattacacagcgctcacttgctcctagagccattattccacagttcctcccaccagttacttcaatgggcttcgaacatccagccgtgcaagcctacaggctacaactagcgcttgcggcgagcgccttacaacaaccaattgcccaattgcaacaacaatccttggcacatataaccctacaaaccatagcaacgcaacatcaacgacaacaacagtttctgccatcactgagccacctatccgtggtgaaccctgtcacctac

SEQ ID NO: 320572 - DNA, 424 bp, Zea mays
atcgcagcaagcaacatacctttatcgcccttgttgtttcaacaatcaccagccctatctttggtgcagtcattggtacaaaccatcagggcacaacagctgcagcaactcgtgctacctgtgatcaaccaagtagctctggcaaacctttctccctactctcagcaacaacaatttcttccattcaaccaactgtctacactgaaccctgctgcctatttgcagcaacaactattaccatttagccagctagctactgcctactctcagcaacaacaacttcttccatttaaccaattggccgcactgaaccccgctgcttatttgcagcagcaaatactactgccatttagcgagctagctgcagcaagtcgtgcttccttcttgacacagcaacagttgctgcctttctacaagcagtttg

SEQ ID NO: 320573 - DNA, 418 bp, Zea mays
tttgtttttttttttttttttttttttttttttttgttttttttttttttttttggtttttttttttttttttttttttttttttttttttttttttttttttttttttttttttaaaaaaaaaaaaaggggaaaaaaggttttttttggaaagggaaaaaaaaaaaaaaaagaaaaaagaaagggggggggggattaaaaaggggggatgggggggtttaaaaaacaggggggcaataaaagggaaaaaaactcaaaaaaaaatttgggacggggttaaaaacctaattttttgccaaaaaaaaggggggggggaaaaaaaggggcccattgtttattaaaaaaattgaggtatatttcccagggggaaaaaaccaaataaatttttggggagggggtaacgcattttttaatgggg

SEQ ID NO: 320574 - DNA, 383 bp, Zea mays
gatcagcaaagcggcagtgcgtagagaggatcgtcgaacagaacagcatgaagatggtcatcgttctcgtcgtgtgcctggctctgtcagctgccagcgcctctgcaatgcagatgccctgcccctgcgcggggctgcagggcttgtacggcgctggcgccggcctgacgacgatgatgggcgccggcgggctgtacccctacgcggagtacctgaggcagccgcagtgcagcccgctggcggcggcgccctactacgccgggtgtgggcagccgagcgccatgttccagccgctccggcaacagtgctgccagcagcagatgaggatgatggacgtgcagtccgtcgcgcagcagctgcagatgatgatgcagcttgagcgt

SEQ ID NO: 320575 - DNA, 445 bp, Zea mays
cttcccttcttcccccgtacctctcaccagcggtgtcttcggtatgtgaaaacccaattcttcaaccctacaggatccaacaggcaatcgcagctggcatcttacctttatcacccttgttcctccaacaatcatcagccctattacagcagttacctttggtgcatttattggcacaaaacatcagggcacaacaactacaacaacttgtgctagcaaaccttgctgcctactctcagcaacagcagtttcttccattcaaccaactagctgcattgaactctgcttcttatttgcaacaacaacaactaccattcagccagctacctgttgcctacccccaacaatttcttccattcaaccaactggcagcattgaactctcctgcttatttacagcagcaacaactactaccattcagccagctagctggtgtgagccctgc

SEQ ID NO: 320576 - DNA, 408 bp, Zea mays
gagaccagcaagcaacatagaaagtagaatccattagcaacaatagagcaacaatggcgaccaagatattttccctccttatgctccttgctctttctacatgtgttgctaacgcgacaattttccctcaatgctcacaagctcctatagcttcccttcttcccccataccttccatcaattatagcttcagtatgtgaaaacccagctcttcaaccatataggcttcaacaagcaatcgcagcaagcaacatacctttatcgcccttgttgtttcaacaatcaccagccctatctttggtgcagtcattggtacaaaccatcagggcacaacagctgcagcaactcgtgctacctgtgatcaaccaagtagctctggcaaacctttctccctactctcagcaacaac

SEQ ID NO: 320577 - DNA, 419 bp, Zea mays
gcattcagaaacacacctagcgaagcgcactagcaacgacctaacaacaatggcttccaagacattatccctccttgcgcttcttgccctttttgtgagtgcaacaaatgcgttcattattccacaatgctcacttgctccgagtgccattattccacagttcctccctccagttacttcaatgggcttcgaacacccagctgtgcaagcctataggctacaacaagcgcttgcggcgagcgtcttagaacaaccaattgcccaattacaacaacaatccttggcacatctaaccatacaaaccatcgcaacgcagcagcaacaagcactgagccacctagccgtggtgaaccctatcgcctacttgcaacaacagctgcttgcatccaacccacttgctttggcaaacgtagctgcat

SEQ ID NO: 320578 - DNA, 440 bp, Zea mays
gcaacatagaaagcacaatagtgtaccatcaatggcagccaaaatattttgcctccttatgctccttggtctttctgcaagtgctgctacggcgaccattttcccacaatgctcacaagctcctatagcttcccttcttcccccgtacctctcaccagcggtgtcttcggtatgtgaaaacccaattcttcaaccctataggatccaacaggcaatcgcagctggcatcttacctttatcacccttgttcctccaacaatcatcagccctattacagcagttacctttggtgcatttattggcacaaaacatcagggcacaacaactacaacaacttgtgctagcaaaccttgctgcctactctcagcaacaacagtttcttccattcaaccaactagctgcattgaactctgcttcttatttgaacaacaacaactacc

SEQ ID NO: 320579 - DNA, 80 bp, Zea mays
atttcttatgagttatagttcaataataaagttttttgtctgatgtttgtggcttcccagaaataagaaagtacatttct

SEQ ID NO: 320580 - DNA, 392 bp, Zea mays
gagaccaactagcaacatagaaagcacaatagtgtaccaacaatggcagccaaaatattttgcttccttatgctccttggtctttctgcaagtgttgctaccgcaaccattttcccacaatgctcacaagctcctatagcttcccttcttcccccatacctctcaccagcggtgtcttcaatgtgtgaaaccccaattgttcaaccctacaggatccaacaggcaatcgcaacaggcatcttaccattatcacccttgttcctccaacaaccgtcagccctattacagcagttacctttggtccatttggtggcacaaaacatcagggcacaacaactacaacaacttgtgctagcaaaccttgctgcatactctcagcaacatcagtttct

SEQ ID NO: 320581 - DNA, 391 bp, Zea mays
tgagcattcagaaacacacctagcgaagcgcactagcaacgacctaacaacaatggctaccaagatattatccctctttgcgcttcttgccctttttgtgagcgcaacaaatgcgttcattattccacaatgctcacttgctcctagtgccattattccacagttcctccctccagttacttcaatgggcttcgaacacccagctgtgcaagcctacaggctacaacaagcgcttgcggcgagcgtcttacaacaaccaattgcccaattacaacaacaatccttggcacatctaaccatacaaaccatcgcaacgcaacagcaacaacaatttctaccagcactgagccaactagctgtggtgaaccctgtcgcctacttgcaacagcag

SEQ ID NO: 320582 - DNA, 300 bp, Zea mays
ccgttcggattccgccagcgccgctgtcggtgcctgctctgcagtgtacgcccggcaggaaagccctcggtggcgggctgaggctggacggactgcgccggctgacgacagatggcgccggcggctgtaccctacgcggatacctgagcagcgcagtgcatcccgctgcggcgggccctactacgccggtgtgggcagccgacgccatgtccaccgctcggcaacatgctgcagcagcagatgagatgatggacgtgcagccgtccgcacagctgagatgagatgcacttgagcgtgccg

SEQ ID NO: 320583 - DNA, 337 bp, Zea mays
cttgtactcccactccggttcgggttcgggttcgtgaggctctccggcgttcggtttcgcgggtgggcggatcgagatggcggcgtcggatgttgagtaccgctgcttcgtccgcggactcgcctgggccacggacgaccacttactgcacaacgccttcagcacctacggcgaggtcctcgagtccaagatcatcctcgatcgggagacgcagaggtcccgcggcttcggcttcgtcaccttctccacggaggacgcgatgcggaacgccatcgacggcatgaacggcaaggagctggacggccgcaacatcaccgtcaacgaggcccagtcccgc

SEQ ID NO: 320584 - DNA, 414 bp, Zea mays
acggtttgtggcttcccagaaataagaaagtacatttctaaaaaaaaaaaaaaaaaaaaaaagaaaaagaaaaaaaaaaaaaaaaaaaaaaaaaaaaaaaaaaaaaaaaaaaaaaaaaaaaaaaaaaaaaaaaaaaaaaaaaaaaaaaaaaaaaaaaaaaaaaaaaaaaataaaaaaaataaaagaaaaaaaaaaaagaaaagaaaaaaaaaaaagggggggggtttttaagagaaccaagtttattacaggagtggaggaaaataaaaatttttttaaaggggaacctaaattaaagatagggggagattttttaaaaattggatggggggaaaaacctgggggtccaaaaataaatggtcttggaaaataagcccttttttgggggggagggaaaacgaaaagggcccccac

SEQ ID NO: 320585 - DNA, 445 bp, Zea mays
gaccaactagcaacatagaaagcacaattgtgttccaacaatggcagccaaaatatttggcttgcttatgctccttggtctttctgcaagtgctgctaccgcaaccattttcccacaatgctcacaagctcctatagcttcctttcttcccccatacctctcaccagcggtgtcttcagtatgtgaaaacccaattcttcaaccctacaggatccaacaggcaatcgcagcaggcatcttacctttatcacccttgttcctccaacaaccgtcagccctattacagcagttacctttggtgcatttgttggcacaaaacatcaaggcacaacaactacaacaacttgtgctaagaaaccttgctgcctactctcagcaacagcagtttcttccattcaaccaactggctgcattgaactctgctgcttatttgcaacaacaacta

SEQ ID NO: 320586 - DNA, 447 bp, Zea mays
gaccaactagcaacatagaaagcacaatagtgtaccaacaatggcagctaaaatattttgcctccttatgctccttggtctttctgcaagtgctgctacggcgaccattttcccacaatgctcacaagctcctatagcttcccttcttcccccgtacctctcaccaacggtgtcttcggtatgtgaaaacccaattcttcaaccctacaggatccaacaggcaatcgcagctggcatcttacctttatcacccttgttcctccaacaatcatcagccctattacagcagttacctttggtgcatttattggcacaaaacatcagggcacaacaactacaacaacttgtgctagcaaaccttgctgcctactctcagcaacagcagtttcttccattcaaccaactagctgcattgaactctgcttcttatttgcaacaacaacaact

SEQ ID NO: 320587 - DNA, 399 bp, Zea mays
cccacgcgttcgaccacgcgtccggcaacatataaagcacaatagtgtaccaacaatggcagccaaaatattgtgcttccttatgctccttgatctttctgcaagtgctgctaccgaaaccattttgccacaatgctcacaagctcctatagcttcctttcttcccacatacctctcaccagcggtgacttcagtatgtgaaaacccaattcttcaaccctacaggatccaacaggcaatcgcagcaggcatcttacctttatcaccctcgtacctacaacaaccgtcagccctattacagcagctacctttggcgcatgtgacggcacaaaacatcaaggcacagcaactacaacaacttgtgctaggaaaccttgctgcctactctcagcaacagca

SEQ ID NO: 320588 - DNA, 393 bp, Zea mays
attcaaaaacacaccaagcgaagcgcactagcaacgacctaacaccaatggctaccaagatattagccctccttgcgcttcttgcccttttagtgagcgcaacaaatgcgttcattattccacagtgctcacttgctcctagtgccattattccacagttcctcccaccagttacttcaatgggcttcgaacatccagccgtgcaagcctacaggctacaactagcgcttgcggcgagcgccttacaacaaccaattgcccaattgcaacaacaatccttggcacatctaaccctacaaaccattgcaacgcaacaacaacaacaacaacagtttctgccatcactgagccacctagccgtggtgaaccctgtcacctacttgcaacagcagc

SEQ ID NO: 320589 - DNA, 420 bp, Zea mays
acgatagcttcccttcttcccccgtacctcttaccatcggggtcttcggtatgggaaaaccgagtctgtaacccttacaggatccaacaggcaatcacagctggcatcttacctttataacccttgttcctgcaacaatcatcagccctattacatcagttacctttggtgcatttattggcacataacatcagggcacaacaactacaacaacttgtgctagcaaaccttgctgcctactctcagcaacagcagtttcttccattcaaccaactatctgcattgaactctgcttcttatttgcaacaacaacaactaccattcagtcagctacctgctgcctacccccagcaatttcttccattcaaccaactggcagcattgaactctcctgcttatttacagctgcaacaactacta

SEQ ID NO: 320590 - DNA, 130 bp, Zea mays
ccccaacaacacacaagcagcccataacacaccagacacccccagaccaaccatcaacgcaaaccacaaaaagacaaaacccaccacaacaaccccatacacaccaacacagccatactcaccaagcaac

SEQ ID NO: 320591 - DNA, 379 bp, Zea mays
caactagcaacatagaaagcacaatagtgtaccaacaatggcagctaaaatattttgcctccttatgctccttggtctttctgcaagtgctgctacggcgaccattttcccacaatgctcacaagctcctatagcttcccttcttcccccgtacctctcaccaacggtgtcttcggtatgtgaaaacccaattcttcaaccctacaggatccaacaggcaatcgcagctggcatcttacctttatcacccttgttcctccaacaatcatcagccctattacagcagttacctttggtgcatttattggcacaaaacatcagggcacaacaactacaacaacttgtgctagcaaaccttgctgcctactctcagcaacag

SEQ ID NO: 320592 - DNA, 440 bp, Zea mays
acgaagcaacatagaaagtggaatacagtatcaaaaatagagcaacaatggcggccaagatgttttcgatccttatgctccttgctctttctgcatgtgttgctaacgcgaccatttttcctcaatactcacaagctcctatagctgcccttcttcccccataccttccatcaatgaccgctttagtatgtgaaaacccagcccttcaaccctacaggatccagcaagcaatcgcaacaagcaacttacctttatcacacctgttctttcaacaatcgccagccctatctttggtgcagtcattggtacaaaccatcagggcagaacagttgcagcaactcgtgctaccagtgatcagccaagtagctctggcaaacctttccccctactctcagcaacaacaatttcttccattcaaccaactgtctatactgaaccct

SEQ ID NO: 320593 - DNA, 449 bp, Zea mays
cttgcattcaaccaactgtctacactgatccctgctgcttatttgcagcaacaactattaccatttagccagctagctactgcctactctcagcaacaacaacttcttccatttaaccaattggccgcactgaaccctgccgcctacctacaacagcaacaactgatttcatctagccctctcgctgtggttaatgcacctacatacctgcaacaacagttgctgcaacagattgtaccagctctgactcagctagctgtggcaaaccctgctgcctacttgcaacagctgcttccattcaaccaactgactgtgtcgaactctgctgcgtacctacaacagcgacaacagttacttaatccactagcggtggctaacccattggtcgctgacttcctacagcagcaacaattgctgccatacaaccagttctctttgatgaaccctgc

SEQ ID NO: 320594 - DNA, 431 bp, Zea mays
ctagcaacatagaaagcacaatagtgtaccaacaatggcagctaaaatattttgcctccttatgctccttggtctttctgcaagtgctgctacggcgaccattttcccacaatgctcacaagctcctatagcttcccttcttcccccgtacctctcaccaacggtgtcttcggtatgtgaaaacccaattcttcaaccctacaggatccaacaggcaatcgcagctggcatcttacctttatcacccttgttcctccaacaatcatcagccctattacagcagttacctttggtgcatttattggcacaaaacatcagggcacaacaactacaacaacttgtgctagcaaaccttgctgcctactctcagcaacagcagtttcttccattcaaccaactagctgcattgaactctgcttcttatttgcaac

SEQ ID NO: 320595 - DNA, 374 bp, Zea mays
ttccggccgacccacgcgtccggcaacatagagagcacaatagagtaccatcaaggctactaaaatattttgcctccttatgctccttggtctttctgcaagtgctgctacggcgaccattttcccacaatgctcacaagctcctatagcttcccttcttcccccgtacctctcaccaacggtgtcttcggtatgtgaaaacccaattcttcaaccctacaggatccaacaggcaatcgcagctggcatcttacctttatcacccttgttcctacaacaatcatcagccctattacagcagttacctttggtgcatttattggcacaaaacatcatggcacaacaactacaacaaacttgggctagcaaacctt

SEQ ID NO: 320596 - DNA, 403 bp, Zea mays
ctggacgtcagcctagcaattagctcatcgactccagattggagaactcgacaccatgaaggtgctgatcgttgcccttgctctcctggcgctcgctgcgagcgccgcctccagtacaagcggcggctgtggctgccagacaccaccgtttcatctaccgcctccgttctatatgccgcctccgttctatctgccgccgcagcagcagccgcagccatggcaataccccactcaaccaccgcagctaagcccgtgccagcagttcggatcctgcggcgtcggcagcgtcggcagcccgttcctgggccagtgcgtcgagttcctgaggcaccagtgcagcccggcggcgacgccctacggctcgccacagtgccaggcgctgcagcagcagtgctgccaccag

SEQ ID NO: 320597 - DNA, 435 bp, Zea mays
gcaacatagaaagtagaatccattagcatcaatagagcaacaatggcgaccaagatattttccctccttatgctccttgctctttctacatgtgttgctaacgcgacaattttccctcaatgctcacaagctcctatagcttcccttcttcccccataccttccatcaattatagcttcagtatgtgaaaacccagctcttcaaccatataggcttcaacaagcaatcgcagcaagcaacatacctttatcgcccttgttgtttcaacaatcaccagccctatctttggtgcagtcattggtacaaaccatcagggcacaacagctgcagcaactcgtgctacctgtgatcaaccaagtagctctggcaaacctttctccctactctcagcaacaacaatttcttccattcaaccaactgtctacactgaaccct

SEQ ID NO: 320598 - DNA, 431 bp, Zea mays
ctagcaacatagaaagcacaatagtgtaccaacaatggcagccaaaatattttgcttccttatgctccttggtctttctgcaagtgttgctaccgcaaccattttcccacaatgctcacaagctcctatagcttcccttcttcccccatacctctcaccagcggtgtcttcaatgtgtgaaaccccaattgttcaaccctacaggatccaacaggcaatcgcaacaggcatcttaccattatcacccttgttcctccaacaaccgtcagccctattacagcagttacctttggtccatttggtggcacaaaacatcagggcacaacaactacaacaacttgtgctagcaaaccttgctgcatactctcagcaacatcaggttcttccattcaaccaactggctgcattgaactctgctgcttatttgcaac

SEQ ID NO: 320599 - DNA, 428 bp, Zea mays
caatcatcattcatcttagtagtataggtaccaaatcaaatctgcaacatcaattatctaactccaaaaaccatgaagctggtgcttgtggttcttgctttcattgctttagtatcaagtgtttcttgtacacagacaggcggctgcagctgtggtcaacaacaaagccatgagcagcaacatcatccacaacaacatcatccacaaaaacaacaacatcaaccaccaccacaacatcaccagcagcagcaacaccaacaacaacaagttcacatgcaaccacaaaaacatcagcaacaacaagaagttcatgttcaacaacaacaacaacaaccgcagtaccaacaacaacaacaaccacaacagcaccaaacacaacattaatgtgaaagcaacatacacataaccaacaatcacaaggccatgtg

SEQ ID NO: 320600 - DNA, 466 bp, Zea mays
gaatacccgggaacacaccaagcgaagcacattagcaacaacctaacaacaatggttaccaagatattatccctccttgcgcttcttgcgctttttgcgagcgcaacaaatgcgttcattattccacaatgctcacttgctccaagttccattattacacagttcctcccaccagttacttcaatgggcttcgaacacccagctgtgcaagcctataggctacaacaagcaattgcggcgagcgtcttacaacaaccaatttcccagttgcaacaacaatccttggcacatctaacaatacaaaccatcgcaacgcaacagcaacaacaattcctaccagcactgagccaactagccatggtgaaccctgccgcctacttgcaacagcagttgcttgcataaaaccaacttgctctggcaaacgtagttgcaaaccagccacaacaacagctgcaacagtttttgc

SEQ ID NO: 320601 - DNA, 210 bp, Zea mays
  unsure (1)..(210): unsure at all n locations
agcgcattcgcgtacgtcaacggacgtctaacccatcgcccatgggaggagggcacgaggagcaggatggtggcggcgcataggccgggggctactcctncggtctcccgccgtcggacccgccgcaggagtccgggtaccgcacgttccagggccctcggcatcctcccgtcgggttcccgcagcctgccccggctcccgggttcggcg

SEQ ID NO: 320602 - DNA, 401 bp, Zea mays
attttgagcattcagaaacacaccaagctaagctacctagcaacgacttaacaacaatggctaccaagatattagccctccttgcgcttcttgccctttttgtgagcgcaacaaatgcgttcattattccacaatgctcacttgctcctagtgccattataccacagttcctccgaccagttacttcaatgggcttcgaacacctagctgtgcaagcctacaggctacaacaagcgcttgcggcgagcgtcttacaacaaccaattaaccaattgcaacaacaatccttggcacatctaaccatacaaaccatcgcaacacaacagcaacaacagttcctaccagcactgagccaactagatgtggtgaaccctgtcgcctacttgcaacagcaggtgctt

SEQ ID NO: 320603 - DNA, 414 bp, Zea mays
cttcctttcttcccccatacctctcaccagcggtgtcttcagtatgtgaaaacccaattcttcaaccctacaggatccaacaggcaatcgcagcaggcatcttacctttatcacccttgttcctccaacaaccgtcagccctattacagcagttacctttggtgcatttgttggcacaaaacatcaaggcacaacaactacaacaacttgtgctaggaaaccttgctgcctactctcagcaacagcagtttcttccattcaaccaactggctgcattgaactctgctgcttatttgcaacaacaactaccattcagtcagctagctgctgcctacccccagcaatttcttccattcaaccaactggcagcattgaactctgctgcttatttacaacagcaacagctaccaccat

SEQ ID NO: 320604 - DNA, 423 bp, Zea mays
gaaagcacaatagtgtaccaacaatggcagccaaaatattttgcctccttatgctccttggtctttctgcaagtgctgctacggcgaccattttcccgcaatgctcgcaagctcctatagcttcccttcttcccccgtacctctcaccagcggtgtcttcggtatgtgaaaacccaattcttcaaccctacaggatccaacaggcaatcgcagctggcatcttacctttatcacccttgttcctccaacaatcatcagccctattacaacagttacctttggtgcatttattggcacaaaacatcagggcacaacaactacaacaacttgtgctagcaaaccttgctgcctactcttaacaacagcagtttcttccattcaaccaactaggttcattgaactctgcttcctatttgcaacaac

SEQ ID NO: 320605 - DNA, 386 bp, Zea mays
gggttcgtgaggttctccggggttcggtttcgtgggtgagcggatcgagatggcggcgtcggatgttgagtaccgctgcttcgtcggcggcctcgcctgggccacggacgaccactccctccacaacgccttcagcacctacggcgaggtcctcgagtccaagatcatcctcgatcgggagacgcagaggtcccgcggcttcggcttcgtcaccttttccacggaggaggcgatgcggaacgccatcgagggcatgaacggcaaggagctggacggccgcaacatcaccgtcaacgaggcccagtcccgcggcggccgcggaggcggcggcggcggcgggtacagtggtggccgtggaggcggcggctacggcggtggcgggcgcc

SEQ ID NO: 320606 - DNA, 420 bp, Zea mays
  unsure (1)..(420): unsure at all n locations
caatcgcagcaagcaacatacctttatcgcccttgttgtttcaacaatcaccagccctatctttggtgcagtcattggtacaaaccatcagggcacaacagctgcagcaactcgtgctacctgtgatcaaccaagtagctctggcaaacctttctccctactctcagcaacaacaatttcttccattcaaccaactgtctacactgaaccctgctgcttatttgcagcaacaactattaccatttagccagctagctactgcctactctcagcaacaacaacttcttccatttaaccaattggccgcactgaaccccgctgcttatttgcagcagcaaatactactgccatttagcgagctagctgcagcaagtcgtgcttncttcttgacacagcaacagttgctgcctttctacaagc

SEQ ID NO: 320607 - DNA, 432 bp, Zea mays
gaaagcacaatagtgtaccaacaatggcagccaaaatattttgcctccttatgctccttggtctttctgcaagtgctgctacggcgaccattttcccgcaatgctcgcaagctcctatagcttcccttcttcccccgtacctctcaccagcggtgtcttcggtatgtgaaaacccaattcttcaaccctacaggatccaacaggcaatcgcagctggcatcttacctttatcacccttgttcctccaacaatcatcagccctattacaacagttacctttggtgcatttattggcacaaaacatcagggcacaacaactacaacaacttgtgctagcaaaccttgctgcctactctcagcaacagcagtttcttccattcaaccaactaggttcattgaactctgcttcttatttgcaacaacaacaactac

SEQ ID NO: 320608 - DNA, 437 bp, Zea mays
cagatcagcaaagcggcagtgcgtagagaggatcgtcgaacagaacagcatgaagatggtcatcgttctcgtcgtgtgcctggctctgtcagctgccagcgcctctgcaatgcagatgccctgcccctgcgcggggctgcagggcttgtacggcgctggcgccggcctgacgacgatgatgggcgccggcgggctgtacccctacgcggagtacctgaggcagccgcagtgcagcccgctggcggcggcgccctactacgccgggtgtgggcagccgagcgccatgttccagccgctccggcaacagtgctgccagcagcagatgaggatgatggacgtgcagtccgtcgcgcagcagctgcagatgatgatgcagcttgagcgtgccgctgccgccagcagcagcctgtacgagccagctctgatgcagcagcagc

SEQ ID NO: 320609 - DNA, 437 bp, Zea mays
tgagcattcagaaacacaccaagtctaagcgcactagcaacaacctaacaacaatggctaccaagatattatccctccttgcgcttcttgcgctttttgcgagcgcaacaaatgcgtccattattccacaatgctcacttgctcctagttccattattccacagttcctcccaccagttacttcaatggccttctgaacacccagctgtgcaagcctataggctacaacaagcgattgcggcgagcgtcttacaacaaccaattgcccaattgcaacaacaatccttggcacatctaacaatacaaaccatcgcaacgcaacagcaacaacagttcctaccagcactgagccacctagccatggtgaaccctgtcgcctacttgcaacagcagctgcttgcattcaacccacttgctctagcaaacgtagttgcaaa

SEQ ID NO: 320610 - DNA, 436 bp, Zea mays
ctagcaacatagaaagcacaatagtgtaccaacaatggcagccaaaatattttgcctccttatgctccttggtctttctgcaagtgctgctacggcgaccattttcccgcaatgctcgcaagctcctatagcttcccttcttcccccgtacctctcaccagcggtgtcttcggtatgtgaaaacccaattcttcaaccctacaggatccaacaggcaatcacagctggcatcttacctttatcacccttgttcctccaacaatcatcagccctattacatcagttacctttggtgcatttattggcacaaaacatcagggcacaacaactacaacaacttgtgctagcaaaccttgctgcctactctcagcaacagcagtttcttccattcaaccaactagctgcattgaactctgcttcttatttgcaacaacaa

SEQ ID NO: 320611 - DNA, 438 bp, Zea mays
acaggatccaacaggcaatcgcaacaggcatcttaccattatcacccttgttcctccaacaaccgtcagccctattacagcagttacctttggtccatttggtggcacaaaacatcagggcacaacaactacaacaacttgtgctagcaaaccttgctgcatactctcagcaacatcagtttcttccattcaaccaactggctgcattgaactctgctgcttatttgcaacaacaattaccattcagccagctagttgctgcctacccccagcaatttcttccattcaaccaactagcagcattgaactctgctgcttatttacagcagcaacaactactaccattcagccagctagctgatgtgagccctgctgccttcttgacacaacaacagttgttgccgttctacctgcacgctatgcctaacgctggcaccc

SEQ ID NO: 320612 - DNA, 437 bp, Zea mays
agcaacatagaaagcacaatagtgtaccaacaatggcagctaaaatattttgcctccttatgctccttggtctttctgcaagtgctgctacggcgaccattttcccacaatgctcacaagctcctatagcttcccttcttcccccgtacctctcaccaacggtgtcttcggtatgtgaaaacccaattcttcaaccctacaggatccaacaggcaatcgcagctggcatcttacctttatcacccttgttcctccaacaatcatcagccctattacagcagttacctttggtgcatttattggcacaaaacatcagggcacaacaactacaacaacttgtgctagcaaaccttgctgcctactctcagcaacagcagtttcttccattcaaccaactagctgcattgaactctgcttcttatttgcaacaacaacaa

SEQ ID NO: 320613 - DNA, 434 bp, Zea mays
gcaacatagaaagcacaatagtgtaccaacaatggcagccaaaatattttgcctccttatgctccttggtctttctgcaagtgctgctacggcgaccattttcccgcaatgctcgcaagctcctatagcttcccttcttcccccgtacctctcaccagcggtgtcttcggtatgtgaaaacccaattcttcaaccctacaggatccaacaggcaatcacagctggcatcttacctttatcacccttgttcctccaacaatcatcagccctattacatcagttacctttggtgcatttattggcacaaaacatcagggcacaacaactacaacaacttgtgctagcaaaccttgctgcctactctcagcaacagcagtttcttccattcaaccaactagctgcattgaactctgcttcttatttgcaacaacaac

SEQ ID NO: 320614 - DNA, 452 bp, Zea mays
cattgagaccaactagcaacatagaaagcacaatattgtaccaataatggcagccaaaatattttgcctcattatgctccttggtctttctgcaagtgctgctacggcgagcattttcccgcaatgctcacaagctcctatagcttcccttcttcccccatacctctcaccagcgatgtcttcagtatgtgaaaatccaattcttctaccctacaggatccaacaggcaatcgcagcaggcatcttacctttatcacccttgttcctccaacaatcatcagccctattacagcagttacctttggtgcatttattggcacaaaacatcaaggcacaacaactacaacaactcgtgctagcaaaccttgctgcctactctcagcaacagcagttacctttggtgcatttgttggcacaaaacatcagggcacaacaactacaacaactcgtgc

SEQ ID NO: 320615 - DNA, 473 bp, Zea mays
aattccgcgattcgaggccacgacccacgcgtctcggcaacatagaaagcacaatagtgtaccaacaatggcagccaaaatattttgcctccttatgctccttggtctttctgcaagtgctgctacggcgaccattttcccgcaatgctcgcaagctcctatagcttcccttcttcccccgtacctctcaccagcggtgtcttcggtatgtgaaaacccaattcttcaaccctacaggatccaacaggcaatcacagctggcatcttacctttatcacccttgttcctccaacaatcatcagccctattacatcagttacctttggtgcatttattggcacaaaacatcagggcacaacaactacaacaacttgtgctagcaaaccttgctgcctactctcagcaacagcagtttcttccattcaaccaactagctgcattgaactctgcttcttatttgcaacaacaacaac

SEQ ID NO: 320616 - DNA, 437 bp, Zea mays
attcaaaaacacaccaagcgaagcgcactagcaacgacctaacaccaatggctaccaagatattagccctccttgcgcttcttgcccttttagtgagcgcaacaaatgcgttcattattccacagtgctcacttgctcctagtgccagtattccacagttcctcccaccagttacttcaatgggcttcgaacatccagccgtgcaagcctacaggctacaactagcgcttgcggcgagcgccttacaacaaccaattgcccaattgcaacaacaatccttggcacatctaaccctacaaaccattgcaacgcaacaacaacaacaacagtttctgccatcactgagccaactagccgtggtgaaccctgtcacctacttgcaacagcagctgcttgcatccaacccacttgctctggcgaacgtagctgcataccac

SEQ ID NO: 320617 - DNA, 417 bp, Zea mays
tcagaaacacacctagcgaagcgcactagcaacgacctaacaacaatggcttccaagacattatccctccttgcgcttcttgccctttttgtgagtgcaacaaatgcgttcattattccacaatgctcacttgctccgagtgccattattccacagttcctccctccagttacttcaatgggcttcgaacacccagctgtgcaagcctataggctacaacaagcgcttgcggcgagcgtcttagaacaaccaattgcccaattacaacaacaatccttggcacatctaaccatacaaaccatcgcaacgcagcagcaacaagcactgagccacctagccgtggtgaaccctatcgcctacttgcaacaacagctgcttgcatccaacccacttgctttggcaaacgtagctgcatac

SEQ ID NO: 320618 - DNA, 441 bp, Zea mays
ctagcaacatagaaagcacaatagtgtaccaacattggcagccaaaatattttgcctccgtatgctccttggtctttctgcaagtgctgctacggcgaccattttcccgcaatgctcgcaagctcctatagcttcccttcttcccccgtacctctcaccagcggtgtcttcggtatgtgaaaacccaattcttcaaccctacaggatccaacatgcagtcacagctggcatcttacctttatgacccttgtttctgcaacaatcatcagccctatctcatcagttacctttgttgcattgatcggcacataccatcacggcacatcaactacaacaacttgtgctagcaaaccttgctgcctactctcagcaacagcagtttcttccattcaaccaactagctgcattgaactctgcttcttatttgcaacaacaacaact

SEQ ID NO: 320619 - DNA, 418 bp, Zea mays
  unsure (1)..(418): unsure at all n locations
caactagcaacatagaaagcacaatagtgtaccaacaatggcagccaaaatattttgcctccttatgctccttggtctttctgcaagtgctgctacggcgaccattttcccacaatgctcacaagctcctatagcttcccttcttcccccgtacctctcaccagcggtgtcttcggtatgtgaaaacccaattcttcaaccctataggatccaacaggcaatcgcagctggcatcttacctttatcacccttgttcctccaacaatcatcagccctattacagcagttacctttggtgcatttattggcacaaaacatcaaggcacaacaactacaacaactngtgctagcaaaccttgctgcctactctcagcaacaacagtttcttccattcaaccaactagctgcattgaactct

SEQ ID NO: 320620 - DNA, 434 bp, Zea mays
caactagcaacatagaaagcacaatagtgtaccaacaatggcagccaaaatattttgcctccttatgctccttggtctttctgcaagtgctgctacggcgaccattttcccgcaatgctcgcaagctcctatagcttcccttcttcccccgtacctctcaccagcggtgtcttcggtatgtgaaaacccaattcttcaaccctacaggatccaacaggcaatcacagctggcatcttacctttatcacccttgttcctccaacaatcatcagccctattacatcagttacctttggtgcatttattggcacaaaacatcagggcacaacaactacaacaacttgtgctagcaaaccttgctgcctactctcagcaacagcagtttcttccattcaaccaactagctgcattgaactctgcttcttatttgcaac

SEQ ID NO: 320621 - DNA, 437 bp, Zea mays
aacaagcaacatagaaagtggaatccagtagcaacaatagagcaacaatggcgaccaagatactttccctccttatgctccttgctctttctgcatgtgttgctaacgcgacaattttccctcaatgctcacaagctcctatagcttcccttcttcccccataccttccatcaatgatagcttcagtatgtgaaaacccagctcttcaaccctataggctccaacaagcaatcgcagcaagcaacatacctttatcacccttgtttcaacaatcgccagccctatctttggtgcagtcattggtacaaaccatcaaggcacagcagctgcagcaactcgtgctacctgtgatcaaccaagtagctctggcaaacctttctccctactatcagcaacaacaatttcttccattcaaccaactatctacactgaaccct

SEQ ID NO: 320622 - DNA, 442 bp, Zea mays
cagaaacacacctagcgaagcgcactagcaacgacctaacaacaatggctaccaagatattatccctctttgcgcttcttgccctttttgtgagcgcaacaaatgcgttcattattccacaatgctcacttgctcctagtgccattattccacagttcctccctccagttacttcaatgggcttcgaacacccagctgtgcaagcctacaggctacaacaagcgcttgcggcgagcgtcttacaacaaccaattgcccaattacaacaacaatccttggcacatctaaccatacaaaccatcgcaacgcaacagcaacaacaatttctaccagcactgagccaactagctgtggtgaaccctgtcgcctacttgcaacagcagttgcttgcatccaacccacttgctctggcaaacatagttgcataccaacaacaacaaca

SEQ ID NO: 320623 - DNA, 356 bp, Zea mays
gtccttgcgggcggcaagcaccttcgtcccggagacatctgccgctgcagcatagaccaccatgtcctcgctcggcagcaccgatgttgatgatggcaacgaggaggaggacggctccgcgagcacccccgagatctaccgctgccactcccacgcagttgcgtgtagcctctccatgtgatttccccaatgtttcccttcctctgtagcctctccgacggcgccgccgccgttcttcctcggccgtcggcgacattttaagaacgcctgaggctgttcaaccacttcatcgtctttttgactgcctcacattgaaaggaactttgcagcggactgttatatgatctaatgaagaa

SEQ ID NO: 320624 - DNA, 342 bp, Zea mays
gcaacatagaaagcacaatagtgtaccatcaatgtcagccaaaatattttgcttccttatgctccgtggtctttctgcaagtgctgctaccgcaaccattttcccacaatgctcacaagctcctatagcttcctttcttcccccatacctctcaccagcggtgtcttcagtatgtgaaaacccaattcttcaaccctacaggatccaacaggcaatcgcagcaggcatgttacctttatcacccttgatcctacaacaaccgtgagccctattacagcagctacctttggtgcatttgctgtcacaaaacatcaaggcacaacaactacaacaacttgtgct

SEQ ID NO: 320625 - DNA, 451 bp, Zea mays
  unsure (1)..(451): unsure at all n locations
cattttgagcattcagaaacacaccaagcgaagcgcactagcaactacctaacaacaatggctaccaagatattagccctccttgcgcttcttgccctttttgtgagcgcaacaaatgcgttcattattccacaatgctcacttgctcctagtgccattattccacagttcctcccaccagttacttcaatgggcttcgaacacctagctgtgcaagccaacatgcaacaacaagcgcttgcggcgagcgtcttacaacaaccaattgcccaattgcaacaacaatccttgccacatctaacaatacaagccatcacaacgcaacagcaacaacagttcctaccagcactgagccacctagccatggtgaaccctgccgnctacttgcaagagcagctgcttgcatccaacccacttgctctggcgaacgtagttgcaaaccagcaacaac

SEQ ID NO: 320626 - DNA, 437 bp, Zea mays
caactagcaacatagaaagcacaatagtgtaccaacaatggcagccaaaatattttgcctccttatgctccttggtctttctgcaagtgctgctacggcgaccattttcccgcaatgctcgcaagctcctatagcttcccttcttcccccgtacctctcaccagcggtgtcttcggtatgtgaaaacccaattcttcaaccctacaggatccaacaggcaatcgcagctggcatcttacctttatcacccttgttcctccaacaatcatcagccctattacaacagttacctttggtgcatttattggcacaaaacatcagggcacaacaactacaacaacttgtgctagcaaaccttgctgcctactctcagcaacagcagtttcttccattcaaccaactaggttcattgaactctgcttcttatttgcaacaac

SEQ ID NO: 320627 - DNA, 113 bp, Zea mays
tccgggtcgaccccgcgtccgcggacgcgtgggttttgggcagcgctgttctggttcctagtatggtgagaattggctgcaccttttgcttcgaataaaaatgcctgctcgtt

SEQ ID NO: 320628 - DNA, 396 bp, Zea mays
gcggcggctgcggctgccagccaccgccgccggttcatctaccgccgccggtgcatctgccacctccggttcacctgccacctccggtgcatctcccaccgccggtccacctgccgccgccggtccacctgccaccgccggtccatgtgccgccgccggttcatctgccgccgccaccatgccactaccctactcaaccgccccggcctcagcctcatccccagccacacccatgcccgtgccaacagccgcatccaagcccgtgccagctgcagggaacctgcggcgttggcagcaccccgatcctgggccagtgcgtcgagtttctgaggcatcagtgcagcccgacggcgacgccctactgctcgcctcagtgccagtcgttgcggcagcagt

SEQ ID NO: 320629 - DNA, 401 bp, Zea mays
acatagaaagtagaatccattatcaacaatagagcaacaatggcgaccaagatattttccctccttatgctccttgctctttctacatgtgttgctaacgcgacaattttccctcaatgctcacaagctcctatagcttcccttcttcccccataccttccatcaattatagcttcagtatgtgaaaacccagctcttcaaccatataggcttcaacaagcaatcgcagcaagcaacatacctttatcgcccttgttgtttcaacaatcaccagccctatctttggtgcagtcattggtacaaaccatcaaggcacaacagctgcagcaactcgtgctacctgtgatcaaccaagtagctctggcaaacctttctccctactctcagcaacaacaatttct

SEQ ID NO: 320630 - DNA, 465 bp, Zea mays
ggaaaacccgccccaacaagcaccatagagggagcataccatttacaacttaagtgcaacaatggagccacaatgacgaccaagggatattctctacttatgctccttgctctttctacatgtgttgctaacgcgacaattttccctcaatgctcacaagctcctatagcttcccttcttcccccataccttccatcaattatagcttcagtatgtgaaaacccagctcttcaaccatataggcttcaacaagcaatcgcagcaagcaacatacctttatcgcccttgttgtttcaacaatcaccagccctatctttggtgcagtcattggtacaaaccatcagggcacaacagctgcagcaactcgtgctacctgtgatcaaccaagtagctctggcaaacctttctccctactctcagcaacaacaatttcttccattcaaccaactgtctacactgaaccct

SEQ ID NO: 320631 - DNA, 98 bp, Zea mays
gaattcccgcctaaaaaaaaaaaaaaaagaaaaaaaaaaaaaaaaaaataaatttaaaaaaaaaaaaaaaaaaggacaaccggaggaaaggtatccac

SEQ ID NO: 320632 - DNA, 410 bp, Zea mays
cagccattagctttatctactccagagcgcagaagaacccgatcgacaccatgagggtgttgctcgttgccctcgctctcctggctctcgctgcgagcgccacctccacgcatacaagcggcggctgcggctgccagccaccgccgccggttcatctaccgccgccggtgcatctgccacctccggttcacctgccacctccggtgcatctcccaccgccggtccacctgccgccgccggtccacctgccaccgccggtccatgtgccgccgccggttcatctgccgccgccaccatgccactaccctactcaaccgccccggcctcagcctcatccccagccacacccatgcccgtgccaacagccgcatccaagcccgtgccagctgcagggaacctgcggcgttggc

SEQ ID NO: 320633 - DNA, 386 bp, Zea mays
caactagcaacatagaaagcacaatagtgtaccaacaatggcagccaaaatattttgcttccttatgctccttggtctttctgcaagtgttgctaccgcaaccattttcccacaatgctcacaagctcctatagcttcccttcttcccccatacctctcaccagcggtgtcttcaatgtgtgaaaccccaattgttcaaccctacaggatccaacaggcaatcgcaacaggcatcttaccattatcacccttgttcctccaacaaccgtcagccctattacagcagttacctttggtccatttggtggcacaaaacatcagggcacaacaactacaacaacttgtgctagcaaaccttgctgcatactctcaacaacatcagtttc

SEQ ID NO: 320634 - DNA, 454 bp, Zea mays
attttgagcattcagaaacacaccaagcgaagcacattagcatcaacctaacaacaatggctaccaagatattatccctccttgcgcttcttgcgctttttgcgagcgcaacaaatgcgttcattattccacaatgctcacttgctccaagttccattattacacagttcctcccaccagttacttcaatgggcttcgaacacccagctgtgcaagcctataggctacaacaagcaattgcggcgagcgtcttacaacaaccaatttcccagttgcaacaacaatccttggcacatctaacaatacaaaccatcgcaacgcaacagcaacaacaattcctaccagcactgagccacctagccatggtgaaccctgccgcctacttgcaacagcagttgcttgcatcaaacccacttgctctggcaaacgtagttgcaaaccagccacaacaaca

SEQ ID NO: 320635 - DNA, 435 bp, Zea mays
gaccaacaagcaacatagaaagtggaatccagtagcaacaatagagcaacaatggcgaccaagatactttccctccttatgctccttgctctttctgcatgtgttgctaacgcgacaattttccctcaatgctcacaagctcctatagcttcccttcttcccccataccttccatcaatgatagcttcagtatgtgaaaacccagctcttcaaccctataggctccaacaagcaatcgcagcaagcaacatacctttatcacccttgtttcaacaatcgccagccctatctttggtgcagtcattggtacaaaccatcaaggcacagcagctgcagcaactcgtgctacctgtgatcaaccaagtagctctggcaaacctttctccctactatcagcaacaacaatttctttcattcaaccaactatctacactg

SEQ ID NO: 320636 - DNA, 436 bp, Zea mays
  unsure (1)..(436): unsure at all n locations
gcacatagaagcgcaatatgtactatctatggcagccaaaatattttgcctccttatgctccttggtctttctgcaagtgctgctacngcgaccattttcccgcaatgctcgcaagctcctatagcttcccttcttcccccgtacctctcaccagcggtgtcttcggtatgtgaaaacccaattcttcaaccctacaggatccaacaggcaatcgcagctggcatcttacctttatcacccttgttccttcaacaatcatcagccctattacaacagttacctttggtgcatttattggcacaaaacatcagggcacaacaactacaacaacttgtgctagcaaaccttgctgcctactctcagcaacagcagtttcttccattcaaccaactaggttcattgaactctgcttcttatttgcaacaacaacaacta

SEQ ID NO: 320637 - DNA, 428 bp, Zea mays
gcaacatataaagcacaatagtgtaccaacaatggcagctcaaatattttgcctccttatgctccttggtctttctgcaagtgctgctacggcgaccattttcccacactgctcacaagctcctatagcttccctgcttgcacggtacctttcaccaacggtgtcttcggtatgtgaaaacccaattcttcaaccctacaggatccaacaggcaatcgcagctggcatcttacctttatcacccttgttccttcaacaatcatcagccctattacagcagttacctatggtgcatatatcggcacataacatcagggcacaacaactaccacaacttgtgctagcaaaccttgctgcctactctgagcaacagcagtttcttccattcaaccaactagctgcattgaactctgcttcttatatgcaac

SEQ ID NO: 320638 - DNA, 445 bp, Zea mays
agaagtggaatccagtagcaacaatagagcaacaatggcgaccaagatactttccctgcttatgctccttgctctttctgcatgtgttgctaacgcgacaattttccctcaatgctcacaagctcctatagcttcccttcttcccccataccttccatcaatgatagcttcagtatgtgaaaacccagctcttcaaccctataggctccaacaagcaatcgcagcaagcaacatacctttatcacccttgtttcaacaatcgccagccctatctttggtgcagtcattggtacaaaccatcaaagcacagcagctgcaacaactcgtgctacctgtgatcaaccaaatagctctggcaaacctttctccctactatcagcaacaacaatttctttcattcaacccactatctacactgaaccctgctgcttatttgcagcaacaa

SEQ ID NO: 320639 - DNA, 442 bp, Zea mays
ccctacaggatccaacaggcaatcgcttcatgcatcttaccattatcacccttgttcgctccaacaaccgtcagccctattacagcagttacctttggtccatttggtggcacaaaacatcagggcacaacaactacaacaacttgtgctagcaaaccttgctgcatactctcagcaacatcagtttcttccattcaaccaactggctgcattgaactctgctgcttatttgcaacaacaattaccattcagccagctagttgctgcctacccccagcaatttcttccattcaaccaactagcagcattgaactctgctgcttatttacagcagcaacaactactaccattcagccagctagctgatgtgagccctgctgcctttttgacacaacaacagttgttgccgttctacctgcacgctatgcctaacgctggcacc

SEQ ID NO: 320640 - DNA, 439 bp, Zea mays
cacgcatacaagcggcggctgcggctgccagccaccgccgccggttcatctaccgccgccggtgcatctgccacctccggttcacctgccacctccggtgcatctcccaccgccggtccacctgccgccgccggtccacctgccaccgccggtccatgtgccgccgccggttcatctgccgccgccaccatgccactaccctactcaaccgccccggcctcagcctcatccccagccacacccatgcccgtgccaacagccgcatccaagcccgtgccagctgcagggaacctgcggcgttggcagcaccccgatcctgggccagtgcgtcgagttcctgaggcatcagtgcagcccgacggcgacgccctactgctcgcctcagtgccagtcgttgcggcagcagtgttgccagcagctcaggcaggtggagccgcac

SEQ ID NO: 320641 - DNA, 426 bp, Zea mays
agtgccagtattccacagttcctcccactagttacttcaatgggcttcgaacatccagccgtgcaagcctacaggctacaactagcgcttgcggcgagcgccttacaacaaccaattgcccaattgcaacaacaatccttggcacatctaaccctacaaaccattgcaacgcaacaacaacaacaacagtttctgccatcactgagccacctagccgtggtgaaccctgtcacctacttgcaacagcagctgcttgcatccaacccacttgctctggcgaacgtagctgcataccagcaacaacaacagctgcaacagtttatgccagtgctcagtcaactagccatggtgaaccctgccgtctacctacaactactttcatctaacccgctcgcggtgggcaatgcacctacgtacctacaacaa

SEQ ID NO: 320642 - DNA, 424 bp, Zea mays
gcaacatagaaagtggaatccagtagcatcaatagagcaacaatggcgaccaagatactttccctccttatgctccttgctctttctgcatgtgttgctaacgcgacaattttccctcaatgctcacaagctcctatagcttcccttcttcccccataccttccatcaatgatagcttcagtatgtgaaaacccagctcttcaaccctataggctccaacaagcaatcgcagcaagcaacatacctttatcacccttgtttcaacaatcgccagccctatctttggtgcagtcattggtacaaaccatcaaggcacagcagctgcagcaactcgtgctacctgtgatcaaccaagtagctcttgcaaacctttctccctactatcagcaacaacaatttcttccatgcaaccaactatctacac

SEQ ID NO: 320643 - DNA, 407 bp, Zea mays
cagcctagcaattagctcatcgactccagattggagaactcgacaccatgaaggtgctgatcgttgcccttgctctcctggcgctcgctgcgagcgccgcctccagtacaagcggcggctgtggctgccagacaccaccgtttcatctaccgcctccgttctatatgccgcctccgttctatctgccgccgcagcagcagccgcagccatggcaataccccactcaaccaccgcagctaagcccgtgccagcagttcggatcctgcggcgtcggcagcgtcggcagcccgttcctgggccagtgcgtcgagttcctgaggcaccagtgcagcccggcggcgacgccctacggctcgccacagtgccaggcgctgcagcagcagtgctgccaccagatcaggcaagtg

SEQ ID NO: 320644 - DNA, 439 bp, Zea mays
attgagaccaactagcaacatagaaagcacaatagtgtaccaacaatggcagccaaaatattttgcttccttatgctccttggtctttctgcaagtgttgctaccgcaaccattttcccacaatgctcacaagctcctatagcttcccttcttcccccatacctctcaccagcggtgtcttcaatgtgtgaaaacccaattgttcaaccctacaggatccaacaggcaatcgcaacaggcatcttaccattatcacccttgttccttcaacaaccgtcagccctattacagcagttacctttggtccatttggtggcacaaaacatcaaggcacaacaactacaacaacttgtgctagcaaaccttgctgcatactctcagcaacatcaagttcttccattcaaccaactggctgcattgaactctgctgcttatttgc

SEQ ID NO: 320645 - DNA, 431 bp, Zea mays
ggcatcttacctttatcacccttgtttcttcaacaaccgtcagccctattacagcagttacctttggtgcatttgttggcacaaaacatcaaggcacaacaactacaacaacttgtgctaggaaaccttgctgcctactctcagcaacagcagtttcttccattcaaccaactggctgcattgaactctgctgcttatttgcaacaacaactaccattcagtcagctagctgctgcctacccccagcaatttcttccattcaaccaactggcagcattgaactctgctgcttatttacaacagcaacagctaccaccattcaaccagctagctgatgtgagcccttgtgccttcttgacacaacaacagttgttgccgttctacctgcacgctgcgcctaacgctggcaccctcttacaactgcaacaatt

SEQ ID NO: 320646 - DNA, 437 bp, Zea mays
gcgaagcgcactagcaacgacctaactccaatggctaccaagatattagccctccttgcgcttcttgcccttttagtgagcgcaacaaatgcgttcattattccacagtgctcacttgctcctagtgccattattccacagttcctcccaccagttacttcaatgggcttcgaacatccagccgtgcaagcctacaggctacaactagcgcttgcggcgagcgccttacaacaaccaattgcccaattgcaacaacaatccttggcacatctaaccctacaaaccattgcaacgcaacaacaacaacaacaacagtttctgccatcactgagccacctagccgtggtgaaccctgtcacctacttgcaacagcagctgcttgcatccaacccacttgctctggcgaacgtagctgcataccagcaacaacaacagct

SEQ ID NO: 320647 - DNA, 438 bp, Zea mays
gcaacatagaaagcacaatattgtactaataatggcagccaaaatattttgcctcattatgctccttggtctttctgcaagtgctgctacggcgagcattttcccgcaatgctcacaagctcctatagcttcccttcttcccccatacctctcaccagcgatgtcttcagtatgtgaaaatccaattcttctaccctacaggatccaacaggcaatcgcagcaggcatcttacctttatcacccttgttcctccaacaatcatcagccctattacagcagttacctttggtgcatttattggcacaaaacatcagggcacaacaactacaacaactcgtgctagcaaaccttgctgcctactctcagcaacagcagttacctttggtgcatttgttggcacaaaacatcagggcacaacaactacaacaactcgtgct

SEQ ID NO: 320648 - DNA, 436 bp, Zea mays
ctggcaaacctttctccctactctcatcaacaacaatttcttccattcaaccaactgtctacactgaaccctgctgcttatttgcagcaacaactattaccatttagccagctagctactgcctactctcagcaacaacaacttcttccatttaaccaattggccgcactgaaccccgctgcttatttgcagcagcaaatactactgccatttagcgagctagctgcagcaagtcgtgcttccttcttgacacagcaacagttgctgcctttctacaagcagtttgcggctaaccccgcaaccctcttacaactacaacaattggtgccctttgtccaacttgctttgacaaacccagcaaccttctaccaacaacacatcattggtggtgccctcttttagatttcttatgagttatagttcaataataaagttt

SEQ ID NO: 320649 - DNA, 443 bp, Zea mays
caaaaacacaccaagcgaagcgcactatcaacgacctaacaccaatggctaccaagatattagccctccttgcgcttcttgcccttttagtgagcgcaacaaatgcgttcattattccacagtgctcacttgctcctagtgccattattccacagttcctcccaccagttacttcaatgggcttcgaacatccagccgtgcaagcctacaggctacaactagcgcttgcggcgagcgccttacaacaaccaattgcccaattgcaacaacaatccttggcacatctaaccctacaaaccattgcaacgcaacaacaacaacaacaacagtttctgccatcactgagccacctagccgtggtgaaccctgtcacctacttgcaacagcagctgcttgcatccaacccacttgctctggcgaacgtagctgcataccagcaacaa

SEQ ID NO: 320650 - DNA, 425 bp, Zea mays
atagaaagcacaatagtgtaccaacaatggcagccaaaatattttgcttccttatgctccttggtctttctgcaagtgttgctaccgcaaccattttcccacaatgctcacaagctcctatagcttcccttcttcccccatacctctcaccagcggtgtcttcaatgtgtgaaaccccaattgttcaaccctacaggatccaacaggcaatcgcaacaggcatcttaccattatcacccttgttcctccaacaaccgtcagccctattacagcagttacctttggtccatttggtggcacaaaacatcagggcacaacaactacaacaacttgtgctagcaaaccttgctgcatactctcagcaacatcagtttcttccattcaaccaactggctgcattgaactctgctgcttatttgcaaaca

SEQ ID NO: 320651 - DNA, 422 bp, Zea mays
ttgcctccttatgctccttggtctttctgcaagtgctgctacggcgaccattttcccacaatgctcacaagctcctatagcttcccttcttcccccgtacctctcaccagcggtgtcttcggtatgtgaaaacccaattcttcaaccctataggatccaacaggcaatcgcagctggcatcttacctttatcacccttgttcctccaacaatcatcagccctattacagcagttacctttggtgcatttattggcacaaaacatcaaggcacaacaactacaacaacttgtgctagcaaaccttgctgcctactctcagcaacaacagtttcttccattcaaccaactagctgcattgaactctgcttcttatttgcaacaacaacaactaccattcagccagctatctgctgcctaccccc

SEQ ID NO: 320652 - DNA, 413 bp, Zea mays
caagcggcggctgcggctgccagccaccgccgccggttcatctaccgccgccggtgcatctgccacctccggttcacctgccacctccggtgcatctcccaccgccggtccacctgccgccgccggtccacctgccaccgccggtccatgtgccgccgccggttcatctgccgccgccaccatgccactaccctactcaaccgccccggcctcagcctcatccccagccacacccatgcccgtgccaacagccgcatccaagcccgtgccagctgcagggaacctgcggcgttggcagcaccccgatcctgggccagtgcgtcgagtttctgaggcatcagtgcaacccgacggcgacgccctactgctcgcctcagtgccagtcgttgcggccgcagtgttgccagcagctc

SEQ ID NO: 320653 - DNA, 398 bp, Zea mays
  unsure (1)..(398): unsure at all n locations
cccacgcgtccggtcagcctagcaattagctcatcgactccagattggagaactcgacaccatgaaggtgctgatcgttgcccttgctctcctggcgctcgctgcgagcgccgnctccagtacaagcggcggctgtggctgccagacaccaccgtttcatctaccgcctccgttctatatgccgcctccgttctatctgccgccgcagcagcagccgcagccatggcaataccccactcaaccaccgcagctaagcccgtgccagcagttcggatcctgcggcgtcggcagcgtcggcagcccgttcctgggccaatgcgtcgagttcctgaggcaccagtgcagcccggcggcgacgccctacggctcgccacagtgccaggcgctgcagcagcagt

SEQ ID NO: 320654 - DNA, 252 bp, Zea mays
gcgggtcgcagccctatgatcaggttgtctggacgggcttgatcgtttatcgccgggaagctgctttggtgtcaaccaacggatctcgtatcgtcgtcttcagaatatcccagattatgcgcttctgcataagaacaacacatcaaaagcgagatcagctcagtaccaacaaaaccttaacaaccacgtttcatgtctgatctctacatgcatcttccatctgcctgtgatccgtttgctgaagcaaatgct

SEQ ID NO: 320655 - DNA, 436 bp, Zea mays
cccacgcgtccgggcttctcctccccctccggttcgggttcgggttcgtgaggttctccggggttcggtttcgtgggtgagcggatcgagatggcggcgtcggatgttgagtaccgctgcttcgtcggcggcctcgcctgggccacggacgaccactccctccacaacgccttcagcacctacggcgaggtcctcgagtccaagatcatcctcgatcgggagacgcagaggtcccgcggcttcggcttcgtcaccttctccacggaggaggcgatgcggaacgccatcgagggcatgaacggcaaggagctggacggccgcaacatcaccgtcaacgaggcccagtcccgcggcggccgtggaggcggcggcggcggcgggtacggtggtggccgtggaggcggcggctacggcggtggcgggcgccgtgatggcg

SEQ ID NO: 320656 - DNA, 413 bp, Zea mays
cggacgcgtgggttttcagcattcatttacacaccaagcgaagcgcactagcaacgacctaacaccaatggctaccaagatattagccctccttgcgcttcttgcccttttagtgagcgcaacaaatgcgttcattattccacagtgctcacttgctcctagtgccattattccacagttcctcccaccagttacttcaatgggcttcgaacatccagccgtgcaagcctacaggctacaactagcgcttgcggcgagcgccttacaacaaccaattgcccaattgcaacaacaatccttggcacatctaaccctacaaaccattgcaacgcaacaacaacaacaacaacagtttctgccatcactgagccacctagccgtggtgaaccctgtcacctacttgcaacagcagc

SEQ ID NO: 320657 - DNA, 376 bp, Zea mays
cccacgcgtccgttcagaaacacacctatcgaagcgcactagcaacgacctaacaacaatggctaccaagatattatccctctttgcgcttcttgccctttttgtgagcgcaacaaatgcgttcattattccacaatgctcacttgctcctagtgccattattccacagttcctccctccagttacttcaatgggcttcgaacacccagctgtgcaagcctacaggctacaacaagcgcttgcggcgagcgtcttacaacaaccaattgcccaattacaacaacaatccttggcacatctaaccatacaaaccatcgcaacgcaacagcaacaacaatttctaccagcacttgaccaactagcttgggtgaaccct

SEQ ID NO: 320658 - DNA, 410 bp, Zea mays
tgcgcttcttgcccttttagtgagcgcatcaaatgcgttcattattccacagtgctcacttgctcctagtgccattattccacagttcctcccaccagttacttcaatgggcttcgaacatccagccgtgcaagcctacaggctacaactagcgcttgcggcgagcgccttacaacaaccaattgcccaattgcaacaacaatccttggcacatctaaccctacaaaccattgcaacgcaacaacaacaacaacaacagtttctgccatcactgagccacctagccgtggtgaaccctgtcacctacttgcaacagcagctgcttgcatccaacccacttgctctggcgaacgtagctgcataccagcaacaacaacagctgcaacagtttatgccagtgctcagtcaac

SEQ ID NO: 320659 - DNA, 453 bp, Zea mays
attgagaccaactagcaacatagaaagcacaatagtgtaccaacaatggcagccaaaatattgtgccttcttatgctccttggtctttctgcaagtgctgctacggcgaccattttcccacaatgctcacaagctcctatagcttcccttcttcccccgtacctctcaccagcggtgtcttcggtatgtgaaaacccaattcttcaaccctataggatccaacaggcaatcgcagctggcatcttacctttatcacccttgttcctccaacaatcatcagccctattacagcagttacctttggtgcatttattggcacaaaacatcagggcacaacaactacaacaacttgtgctagcaaaccttgctgcctactctcagcaacaacagtttcttccattcaaccaactagctgcattgaactctgcttcttatttgcaacaacaacaacta

SEQ ID NO: 320660 - DNA, 427 bp, Zea mays
acaagctcctatagcttcccttcttttcccatacctctcaccagcggtgtcttcaatgtgtgaaaccccaattgttcaaccctacaggatccaacaggcaatcgcaacaggcatcttaccattatcacccttgttcctccaacaaccgtcagccctattacagcagttacctttggtccatttggtggcacaaaacatcagggcacaacaactacaacaacttgtgctagcaaaccttgctgcatactctcagcaacatcagtttcttccattcaaccaactggctgcattgaactctgctgcttatttgcaacaacaattaccattcaaccagctaggtgcttgctacccccagcaatttctttcattcaaccaactagcaacattgaactcttgtgcttatttacagcagcaaccactactacca

SEQ ID NO: 320661 - DNA, 439 bp, Zea mays
gcattcagaaacacacctagcgaagcgcactagcaacgacctaacaacaatggcttccaagacattatccctccttgcgcttcttgccctttttgtgagtgcaacaaatgcgttcattattccacaatgctcacttgctccgagtgccattattccacagttcctccctccagttacttcaatgggcttcgaacacccagctgtgcaagcctataggctacaacaagcgcttgcggcgagcgtcttagaacaaccaattgcccaattacaacaacaatccttggcacatctaaccatacaaaccatcgcaacgcagcagcaacaagcactgagccacctagccgtggtgaaccctatcgcctacttgcaacaacagctgcttgcatccaacccacttgctttggcaaacgtagctgcataccaacaacaacaacagttg

SEQ ID NO: 320662 - DNA, 345 bp, Zea mays
gcaacatagaaagcacaatagtgtaccaacaatggcagccaaaatattttgcctccttatgctccttggtctttctgcaagtgctgctacggcgaccattttcccgcaatgctcgcaagctcctatagcttcccttcttcccccgtacctctcaccagcggtgtcttcggtatgtgaaaacccaattcttcaaccctacaggatccaacaggcaatcacagctggcatcttacctttatcacccttgttcctccaacaatcatcagccctattacatcagttacctttggtgcatttattggcacaaaacatcagggcacaacaactacaacaacttgtgctagc

SEQ ID NO: 320663 - DNA, 439 bp, Zea mays
cagaaacacacctagcgaagcgcactttcaacgacctaacaacaatggcttccaagacattatccctccttgcgcttcttgccctttttgtgagtgcaacaaatgcgttcattattccacaatgctcacttgctccgagtgccattattccacagttcctccctccagttacttcaatgggcttcgaacacccagctgtgcaagcctataggctacaacaagcgcttgcggcgagcgtcttagaacaaccaattgcccaattacaacaacaatccttggcacatctaaccatacaaaccatcgcaacgcagcagcaacaagcactgagccacctagccgtggtgaaccctatcgcctacttgcaacaacagctgcttgcatccaacccacttgctttggcaaacgtagctgcataccaacaacaacaacagttgcaaca

SEQ ID NO: 320664 - DNA, 400 bp, Zea mays
cgcttcgtagctttagagtttgtcgtgtgctatgtatagaatacaactctgtaccaatcagcataaagtatctaggaaagttgttgcatctcaagttcctagagatatgtggcacacctgttgatgagctccctaaggaaattgggcatctgagatctcttcagacactgctattagtcaatattggactagacgagctaccaccgactgtttgctcgcttacacggttgatgtgcttgatagccgaggggttcaaaaggtttccagctgacaggatggggaacctaacgtccctggaggagctacgattacggatggtagttggtcggagtgccacccaagccctagtagtagagcttggcaagctgacaaggtttgaggtggtcagcatcgccttttc

SEQ ID NO: 320665 - DNA, 469 bp, Zea mays
tcggaatacccggctttgagcattcagaaacagaccaagcgaagtgcactagcaacttcctatcaacaatggctaccaagatattatgcctgcttgcgcttcttgcgctttttgcgagcgcaacaaatgcgtccattattccacaatgctcacttgctcctagttccattattccacagttcctcccaccagttacttcaatggccttcgaacacccagctgtgcaagcctataggctacaacaagcgattgcggcgagcgtcttacaacaaccaattgcccaattgcaacaacaatccttggcacatctaacaatacaaaccatcgcaacgcaacagcaacaacagtttctaccagcactgagccacctagccatggtgaaccctgtcgcctacttgcaacagcagctgcttgcatccaacccacttgctctagcaaacgtagttgcaaaccagcaacaacaacaact

SEQ ID NO: 320666 - DNA, 439 bp, Zea mays
catttattggcacaaaacatcagggcacaacaactacaacaactcgtgctagcaaaccttgctgcctactctcagcaacagcagttacctttggtgcatttgttggcacaaaacatcagggcacaacaactacaacaactcgtgctagcaaaccttgctgcctactctcagcaacaacagtttctgccattcaaccaactagctgcattgaactctgctgcttatttgcagcaacaacaactactaccattcagccagctagctgctgcctacccccggcaatttcttccattcaaccaactggcagcattgaactctcatgcttatgtacaacaacaacaactactaccattcagccagctagctgctgtgagccctgctgccttcttgacacagcaacatttgttgccgttctacctgcacactgcgcctaacgttg

SEQ ID NO: 320667 - DNA, 411 bp, Zea mays
  unsure (1)..(411): unsure at all n locations
aacccgatcgacaccatgagggtgttgctcgttgccctcgctctcctggctctcgctgcgagcgccacctccacgcatacaagcggcggctgcggctgccagccaccgccgccggttcatctaccgccgccggtgcatctgccacctccggttcacctgccacctccggtgcatctcccaccgccggtccacctgccgccgccggtccacctgccaccgccggtccatgtgccgccgccggttcatctgccgncgncaccatgccactaccctactcaaccgccccggcctcagcctcatccccagccacacccatgcccgtgccaacagccgcatccaagcccgtgccagctgcagggaacctgcggcgttggcagcaccccgatcctgggccaatgcgtcgagtttctg

SEQ ID NO: 320668 - DNA, 436 bp, Zea mays
cagcattcaataacacaccagttattgcactagcaacgacctaacaccaatggctgccaagatattagccctccttgcgcttcttgcccttttagtgagcgcaacaaatgcgttcattattccacagtgctcacttgctcctagtgccattattccacagttcctcccaccagttacttcaatgggcttcgaacatccagccgtgcaagcctacaggctacaactagcgcttgcggcgagcgccttacaacaaccaattgcccaattgcaacaacaatccttggcacatctaaccctacaaaccattgcaacgcaacaacaacaacaacaacagtttctgccatcactgagccacctagccgtggtgaaccctgtcacctacttgcaacagcagctgcttgcatccaacccacttgctttggcgaacgtatctgca

SEQ ID NO: 320669 - DNA, 416 bp, Zea mays
cccataccttccatcaattatagcttcagtatgtgaaaacccagctcttcaaccatataggcttcaacaagcaatcgcagcaagcaacatacctttatcgcccttgttgtttcaacaatcaccagccctatctttggtgcagtcattggtacaaaccatcagggcacaacagctgcagcaactcgtgctacctgtgatcaaccaagtagctctggcaaacctttctccctactctcagcaacaacaatttcttccattcaaccaactgtctacactgaaccctgctgcttatttgcagcaacaactattaccatttagccagctagctactgcctactctcagcaacaacaacttcttccatttaaccaattggccgcactgaaccccgcttgttatttgcagcagcaaatactac

SEQ ID NO: 320670 - DNA, 424 bp, Zea mays
gtgctcacttgctcctagtgccattattccacagttcctcccaccagttacttcaatgggcttcgaacatccagccgtgcaagcctacaggctacaactagcgcttgcggcgagcgccttacaacaaccaattgcccaattgcaacaacaatccttggcacatctaaccctacaaaccattgcaacgcaacaacaacaacaacaacagtttctgccatcactgagccacctagccgtggtgaaccctgtcacctacttgcaacagcagctgcttgcatccaacccacttgctctggccaaccgtactgcataccagcaacaacaacagctgcaacagtttatgccagtgctcagtcaactagccatggtgaaccctgccgtctacctacaactactttcatctagcccggtcgcggtgggcaat

SEQ ID NO: 320671 - DNA, 349 bp, Zea mays
gagaccaacaagcaacatagaaagtgtaatccagtagcaacaatagagcaacaatggcgaccaagatactttccctccttatgctccttgctctttctgcatgtgttgctaacgcgacaattttccctcaatgctcacaagctcctatagcttcccttcttcccccataccttccatcaatgatagcttcagtatgtgaaaacccagctcttcaaccctataggctccaacaagcaatcgcagcaagcaacatacctttatcacccttgtttcaacaatcgccagccctatccttggtgcagtcattggtacaaaccatcaaagcacagcagctgcagcaactcgtgct

SEQ ID NO: 320672 - DNA, 414 bp, Zea mays
attgagaccaactagcaacatagaaagctcaatagtgtaccaacaatggcagccaaaatattttgcctccttatgctccttggtctttctgcaagtgctgctacggcgaccattttcccgcaatgctcgcaagctcctatagcttcccttcttcccccgtacctctcaccagcggtgtcttcggtatgtgaaaacccaattcttcaaccctacaggatccaacaggcaatcacagctggcatcttacctttatcacccttggtcctgcaacaatcatcagccctattacatcagttacctttggtgcatttattggcacaaaacatcagggcacaacaactacaacaacttgtgctagcaaaccttgctgcctactctcagcaacagcagtttcttccattcaaccaactagct

SEQ ID NO: 320673 - DNA, 392 bp, Zea mays
  unsure (1)..(392): unsure at all n locations
ggtcttcagaccattagctttatctacttcagagcgcagaagaacccgatcgacaccatgagggtgttgctcgttgccctcgctctcctggctctcgctgcgagcgccacctncacgcatacaagcggcggctgcggctgccagccaccgccgccggttcatctaccgccgccggtgcatctgccacctccggttcacctgccaccttcggtgcatcttccaccgccgggccacctgccgccgccggtccacctgccaccggcggtccatgtgccgtcgccggttcatctgccgtcggcaccatgccactaccctactcaaccgccccggcctcagcctcatccccagccacacccatgcccgtgccaacagccgcattcaagcccgtgcca

SEQ ID NO: 320674 - DNA, 409 bp, Zea mays
caacaagcaacatagaaagtggaatccagtagcaacaacagagcaacaatggcgaccaagatattttccctccttatgctccttgctctttctgcatgtgttgctaacgcgacaattttccctcaatgctcacaagctcctatagcttcccttcttcccccataccttccatcaatgatagcttcagtatgtgaaaacccagctcttcagccctataggctccaacaagcaatcgcagcaagcaacatacctttaatcacccttttgtttcaacaatcgccagccctatctttggtgcagtcattggtacaaaccatcagggcacagcagctgcagcaactcgtgctacctgtgatcaaccaagtagctctggcaaacctttctccctactctcagcaacaacaatttc

SEQ ID NO: 320675 - DNA, 437 bp, Zea mays
gaccaactagcaacatagaaagcacaatagtgtaccaacaatggcagccaaaatattttgcctccttatgctccttggtctttctgcaagtgctgctacggcgaccattttcccgcaatgctcgcaagctcctatagcttcccttcttcccccgtacctctcaccagcggtgtcttcggtatgtgaaaacccaattcttcaaccctacaggatccaacaggcaatcacagctggcatcttacctttatcacccttgttcctccaacaatcatcagccctattacatcagttacctttggtgcatttattggcacaaaacatcagggcacaacaactacaacaacttgtgctagcaaaccttgctgcctactctcagcaacagcagtttcttccattcaaccaactagctgcattgaactctgcttcttatttgcaac

SEQ ID NO: 320676 - DNA, 334 bp, Zea mays
ggtcgctcgaccacgcgtccggcaacatagaaagcacaatagtgtaccaacaatggcagccaaaatattttgcctccttatgctccttggtctttctgcaagtgctgctacggcgaccattttcccgcaatgctcgcaagctcctatagcttcccttcttcccccgtacctctcaccagcggtgtcttcggtatgtgaaaacccaattcttcaaccctacaggatccaacaggcaatcgcagctggcatcttacctttatcacccttgttcctccaacaatcatcagccctattacaacagttacctttggtgcatttattggcacaaaacatc

SEQ ID NO: 320677 - DNA, 318 bp, Zea mays
gcaacatagaaagcacaatagtgtaccaacaatggcagccaaaatattttgcctccttatgctccttggtctttctgcaagtgctgctacggcgaccattttcccgcaatgctcgcaagctcctatagcttcccttcttcccccgtacctctcaccagcggtgtcttcggtatgtgaaaacccaattcttcaaccctacaggatccaacaggcaatcgcagctggcatcttacctttatcacccttggtcctccaacaatcatcagccctattacaacagttacctttggtgcatttattggcacaaaacatcagggc

SEQ ID NO: 320678 - DNA, 75 bp, Zea mays
ttaaaatatagatctctaatcttttattactgagaagttgcacatatcagtatgagaactttattattacagtat

SEQ ID NO: 320679 - DNA, 448 bp, Zea mays
  unsure (1)..(448): unsure at all n locations
agcattcagaaacacaccaagcgaagcgtactagcaacgacctaacaacaatggctaccaagatattagccctccttgcgcttcttgccctttttgtgagcgcaacaaatgcgttcattattccacaatgctcacttgctcctagtgccattattccacagttcctcccaccagttacttcaatgggcttcgaacacctagctgtgcaagccaacatgcaacaacaagcgcttgcggcgagcgtcttacaacaaccaattgcccaattgcaacaacaatccttgccacatctaacaatacaagccatcacaacgcaacagcaacaacagttcctaccagcactgagccacctagccatggtgaaccctgccgnctacttgcaagagcaactgcttgcatccaacccacttgctctggcgaacgtagttgcaaaccagcaacaacaaca

SEQ ID NO: 320680 - DNA, 423 bp, Zea mays
attgagaccaactagcaacatagaaagcacaatagtgtaccaacaatggcagccaaggtattttgcctccttatgctccttggtctttctgcaagtgctgctacggcgaccattttcccgcaatgctcgcaagctcctatagcttcccttcttcccccgtacctctcaccagcggtgtcttcggtatgtgaaaacccaattcttcaaccctacaggatccaacaggcaatcgcagctggcatcttacctttatcacccttgttcctccaacaatcatcagccctattacaacagttacctttggtgcatttattggcacaaaacatcagggcacaacaactacaacaacttgtgctagcaaaccttgctgcctactctcagcaacagcagtttcttccattcaaccaactaagttcattgaac

SEQ ID NO: 320681 - DNA, 439 bp, Zea mays
gcacaatagtgtaccaacaatggcagccaaaatattttgcttccttatgctccttggtctttctgcaagtgctgctaccgcaaccattttcccacaatgctcacaagctcctatagcttcctttcttcccccatacctctcaccagcggtgtcttcagtatgtgaaaacccaattcttcaaccctacaggatccaacaggcaatcgcagcaggcatcttacctttatcacccttgttcctccaacaaccgtcagccctattacagcagttacctttggtgcatttgttggcacaaaacatcaaggcacaacaactacaacaacttgtgctaggaaaccttgctgcctactctcagcaacagcagtttcttccattcaaccaactggctgcattgaactctgctgcttatttgcaacaacaactaccattcagtcagcta

SEQ ID NO: 320682 - DNA, 362 bp, Zea mays
cattcagccagctagctggtgtgagccctgctaccttcttgacacaaccacagttgttgccgtgctaccagcacgctgcgcctaacgctggcaccctcttacaactgcaacaattgctgccattcaaccaacttgctttgacaaacccagcagcattctaccaacaacccatcattggtggtgccctcttttagatttcttatgagttatagttcaataataaagttttttgtctgatgtttgtggcttcccagaaataagaaagtacatttctaaaaaaaaaaacaaataaaaaaaagaaacctaaataacaataaatataacaaaacatataagaataaaaacattaacaatcaagaact

SEQ ID NO: 320683 - DNA, 401 bp, Zea mays
acggctaccgcaaccatggccgcacaatgtctacaggctcctaaagcttctagggttcggggataccgctgataagcggaccattcaatgacagtgatcacaagcgttcatacctacatgatctcaacaggatacttgtaacaagcattgtactcaaatcagtgatagcccaacaattcaaccctacaggattccagaggttatctcaggaggaattggaggtacatcacactagggcatacaacacccgacagctctgatccaccaactacgtttgatgcattcaacggcataaaacatttagcgtacaaccactacgatagcttgagctaggaaacctatctgcctactctcaccacatcagccagttacattctgcctactggctgcattgaactctg

SEQ ID NO: 320684 - DNA, 468 bp, Zea mays
cggaattcccgggctatagctgcccttcttcccccataccttccatcaatgaccgcttcagtttgtgaaaacccagcccttcaacgctacaggctccaacaagcaatcgcaacaagcaacttacctttatcacccctgttctttcaacaatcgccagccctatctttggtgcagtcattggtacaaaccatcagggcacaacagctgcaacaactcgtgctaccagtgatcagccaagtagctctggcaaacctttctccctactctcagcaacaacaatttcttccattcaaccaactgtctacactgaaccctgctgcttatttacaacaacaacaactactaccattcagccagctagctactgcctactctcagcagcaacaatttcttccatttaaccaattggccgcactgaacccctctgcttatttccagcagcaaatactactaccatttggccagcta

SEQ ID NO: 320685 - DNA, 378 bp, Zea mays
cttccacccagacacaggccaggcggtcccattgttgcccaaaaaccttggattaagggacaagaattcttttttttttttaattttttcttaaggggaagaagaagaagaagaaggaaaagccgaagaaccaccaccaagcaacaaaacgccaagcgaaaccgggaccgaacccttgaagtcttttgcgaatccaaaagccaacgaccgtgttgcgaatcgtcttccaagatatgaacaaccggactttgggttttaaccgcagctagaagatagcctggagtgagcatttcattctggagatacaatgggtggctgctgctgctgctgctggtctgcaagggcatctgattcagatagagcaccggaccgacaaaa

SEQ ID NO: 320686 - DNA, 432 bp, Zea mays
caacaagcaacatagaaagtggaatctagtagcaacaatagagcaacaatggcgaccaagatactttccctccttatgctccttgctctttctgcatgtgttgctaacgcgacaattttccctcaatgctcacaagctcctatagcttcccttcttcccccataccttccatcaatgatagcttcagtatgtgaaaacccagctcttcaaccctataggctccaacaagcaatcgcagcaagcaacatacctttatcacccttgtttcaacaatcgccagccctatctttggtgcagtcattggtacaaaccatcaaggcacaacatctgcaacaactcgtgctacctgtgatcaaccaagtagctctggcaaacctttctccctactatcagcaacaacaatttcttccattcaaccaactatctacactg

SEQ ID NO: 320687 - DNA, 427 bp, Zea mays
cccacgcgtccgcccacgcgtccgcaacaagcaacatagaaagtggaatacagtagcgacaatagagcaacaatggcggccaagatattttccatccttatgctccttgctctttctgcatgtgttgctaacgcgaccatttttcctcaatactcacaagctcctatagctgcccttcttcccccataccttccatcaatgaccgcttcagtttgtgaaaacccagcccttcaaccctacaggctccaacaagcaatcgcaacaagcaacttacctttatcacccctgttctttcaacaatcgccagccctatctttggtgcagtcattggtacaaaccatcagggcacaacagctgcaacaactcgtgctaccagtgatcagccaagtagctctggcaaacctttctccctactctcagcaacaac

SEQ ID NO: 320688 - DNA, 381 bp, Zea mays
agaagaacccgatcgacaccatgagggtgtcgctcgttgccctcgctctcctggctgtcgctgcgagcgccacctccacgcatacaagcggcggctgcggctgccagccaccgccgccggttcatctaccgccgccggtgcatctgccacctgcggttcacctgccacctccggtgcatctcccaccgccggtccacctgccgacgccggtccacctgccaccgccggtccatgtgccgccgccggttcatctgccgccgtcaccatgccactaccctactcaaccgacccggcctcagcctcatccccagccacacccatgcccgtgccaacagccgcatccaagcccgtgccagcttgcaggaacctgcggcgttggca

SEQ ID NO: 320689 - DNA, 396 bp, Zea mays
gagaccaacaagcaacatagaaagtggaatccagtagcaacaatagagcaacaatggcgaccaagatactttccctccttatgctccttgctctttctgcatgtgttgctaacgcgacaattttccctcaatgctcacaagctcctatagcttcccttcttcccccataccttccatcaatgatagcttcagtatgtgaaaacccagctcttcaaccctataggctccaacaagcaatcgcagcaagcaacatacctttatcacccttgtttcaacaatcgccagccctatctttggtgcagtcattggtacaaaccatcaaggcacagcagctgcagcaactcgtgctacctgtgatcaaccaagtagctctggcaaacctttctacctactatc

SEQ ID NO: 320690 - DNA, 354 bp, Zea mays
  unsure (1)..(354): unsure at all n locations
gccgctaccgctagcacctccgatcgagtcggcgccatggaagacgtcatgaccgacgtgccgccgccttcccgcttttcccctgacgacctcgacaacttcgccgctccgccagcgcagcccacccccatcttcgtcgtttccccgaaccctagcccaccggccccgcgcctcctcgtcgtattcatctcccccacctccctcgcgctcctcgcctccccgccgccgctccacgcatccctgctcctcccggacctgcccctactcccgcacgcgcccatgcgcgtgtacctccacccctncggcgcgctcctcggcgcggcgcacggcgccttaccccgccaaccggcgcgc

SEQ ID NO: 320691 - DNA, 413 bp, Zea mays
  unsure (1)..(413): unsure at all n locations
cacgcatcacgagtaccgagcaccatanacagtagaatccattatcaacaatagagcaacaatggcgaccaagatattttccctccttatgctccttgctctttctacatgtgttgctaacgcgacaattttccctcaatgctcacaagctcctatagcttcccttcttcccccataccttccatcaattatagcttcagtatgtgaaaacccagctcttcaaccatataagcttcaacaagcaatcgcagcaagcaacatacctttatcgcccttgttgtttcaacaatcaccagccctatctttggtgcagtcattggtacaaaccatcagggcacaacagctgcagcaactcgtgctacctgtgatcaaccaagtagctctggcaaacctttctccctactctcagcaac

SEQ ID NO: 320692 - DNA, 360 bp, Zea mays
attttcagcattcaaaaacacaccaagcgaagcgcactagcaacgacctagcaccagtggctaccaagatattagccctccttgcgcttcttgcccttttagtgagcgcaacaaatgcgttcattattccacagtgctcacttgctcctagtgccagtattccacagttcctcccaccagttacttcaatgggcttcgaacatccagccgtgcaagcctacaggctacaactagcgcttgcggcgagcgccttacaacaaccaattgcccaattgcaacaacaatccttggcacatctaaccctacaaaccattgcaacgcaacaacaacaacaacagtttctgccatcactgagccacc

SEQ ID NO: 320693 - DNA, 428 bp, Zea mays
aacacacctagcgaagcgcactagcaacgacctaacaacaatggcttccaagacaggatccctccttgcgcttcttgccctttttgtgagtgcaacaaatgcgttcattattccacaatgctcacttgctccgagtgccattattccacagttcctccctccagttacttcaatgggcttcgaacacccagctgtgcaagcctataggctacaacaagcgcttgcggcgagcgtcttagaacaaccaattgcccaattacaacaacaatccttggcacatctaaccatacaaaccatcgcaacgcagcagcaacaagcactgagccacctagccgtggtgaaccctatcggctacttgcaacaacagctgcttgcattcaacccacttgctttgcaaacgtagctgcataccaacaacaacaacagtt

SEQ ID NO: 320694 - DNA, 405 bp, Zea mays
ccattttcccacaatgctcacaagctctctatagcttcccttcttcccccgtacctctgaccagcggtgtcttcggtatgtgaaaacccaattcttcaaccctataggatccaacaggcaatcgcagctggcatcttacctttatcacccttgttcctccaacaatcatcagccctattacagcagttacctttggtgcatttattggcacaaaacatcagggcacaacaactacaacaacttgtgctagcaaaccttgctgcctactctcagcaacaacagtttcttccattcaaccaactagctgcattgaactctgcttcttatttgcaacaacaacaactaccattcagccagctatctgctgcctacccccagcaatttctttcattcaacccaactgac

SEQ ID NO: 320695 - DNA, 424 bp, Zea mays
gagaactcgacaccatgaaggtgctgatcgttgcccttgctctcctggcgctcgctgcgagcgccgcctccagtacaagcggcggctgtggctgccagacaccaccgtttcatctaccgcctccgttctatatgccgcctccgttctatctgccgccgcagcagcagccgcagccatggcaataccccactcaaccaccgcagctaagcccgtgccagcagttcggatcctgcggcgtcggcagcgtcggcagcccgttcctgggccagtgcgtcgagttcctgaagcaccagtgcagcccggcggcgacgccctacggctcgccacagtgccaggcgctgcagcagcagtgctgccaccagatcaggcaggtggagccgctgcaccggtaccaggcgacatacggtgtggtcctgcagtcctt

SEQ ID NO: 320696 - DNA, 441 bp, Zea mays
  unsure (1)..(441): unsure at all n locations
aacacaccaagcgaagcgcactagcatcgacctaacaacaatggctaccaagatatggagccctccttgcgcttcttgccctttttgtgagcgcaacaaatgcgttcattattccacaatgctcacttgctcctagtgccattattccacagttcctcccaccagttacttcaatgggcttagaacacctagctgtgcaagccaacatgcaacaacaagcgcttgcggcgagcgtcttacaacaaccaattgcccaattgcaacaacaatccttgccacatctaacaatacaagccatcacaacgcaactgcaacaacagttcctaccagcactgagccacctagccatggtgaaccctgccgnctacttgcaagagcagctgcttgcatccaacccacttgctctggcgaacgtagttgcaaaccagcagcaacaacagc

SEQ ID NO: 320697 - DNA, 395 bp, Zea mays
attttgagcattcagaaacacacctagcgaagcgcactagcaacgacctaacaacaatggctaccaagatattatccctctttgcgcttcttgccctttttgtgagcgcaacaaatgcgttcattattccacaatgctcacttgctcctagtgccattattccacagttcctccctccagttacttcaatgggcttcgaacacccagctgtgcaagcctacaggctacaacaagcgcttgcggcgagcgtcttacaacaaccaattgcccaattacaacaacaatccttggcacatctaaccatacaaaccatcgcaacgcaacagcaacaacaatttctaccagcactgagccaactagctgtggtgaaccctgtcgcctacttgcaacagcag

SEQ ID NO: 320698 - DNA, 421 bp, Zea mays
acgcgtccgagtttgagcattcagaaacttaccattcgaagcacattagcaacaacctggcaacggtggctaccaagatattatccctccttgcgcttcttgcgctttttgcgagcgcaacaaatgcgttcattattccacaatgctcacttgctccaagttccattattacacagttcctcccaccagttacttcaatgggcttcgaacacccagctgtgcaagcctataggctacaacaagcaattgcggcgagcgtcttacaacaaccaatttcccagttgcaacaacaatccttggcacatctaacaatacaaaccatcgcaacgcaacagcaacaacaattcctaccagcactgagccacctagccatggtgaaccctgccgtctacttgcaacagcagttgcttgcattaaaccc

SEQ ID NO: 320699 - DNA, 408 bp, Zea mays
gaccaacaagcaacatagaacgtggaatacagtcgcaaaaatagagcaacgatggcggccaagatattttccatccttatgctccttgctctttctgcatgtgttgctaacgcgaccatttttcctcaatactcacaagctcctatagctgcccttcttacccccataccttccatcaatgaccgctttagtatgtgaaaacccagcccttcaaccctacaggatccagcactgcaatcgcaacaagcaacttacctttatcacacctgttctttcaacaatcgccagccctatctttggtgcagtcattggtacaaaccatcaaggcagaacagttgcagcaactcgtgctaccagtgatcagccaagtagctctggcagacctttccccctactgtcagcaacaac

SEQ ID NO: 320700 - DNA, 430 bp, Zea mays
  unsure (1)..(430): unsure at all n locations
attttgagcattcagaaacacaccatgcgaagcacattagcaacaacctagcaacgatggctaccaagatattatccctccttgcgcttcttgcgctttttgcgagcgcaacaaatgcgttcattattccacaatgctcacttgctccaagttccattattacacagttcctcccaccagttacttcaatgggcttcgaacacccagctgtgcaagcctataggctacaacaagcaattgcggcgagcgtcttacaacaaccaatttcccagttgcaacaacaatccttggcacatctaacaatacaaaccatcgcaacgcaacagcaacaacaattcctaccagcactgagccacctagccatggtgaaccctgccgnctacttgcaacagcagttgcttgcatcaaacccacttgctctggcaaacgt

SEQ ID NO: 320701 - DNA, 320 bp, Zea mays
cagctagcaacatacaaagctcaatattgtaccaacaatggcagccaaaagattagggctccttatgctccttggtctttctgcaagtgctgctaccgcgaccattttcccacaatgctcacaagctactatagcttaccttcttcccccgtacctctcaccagcggtgtcttcggtatgtgaaaacccaattcttcaaccctataggatccaacacgcaatcccagctggcatattacctttatcacacttgttcctccaacaatcatcagccctattacagcagttacctttggtgcatttattgccacacaacatca

SEQ ID NO: 320702 - DNA, 427 bp, Zea mays
gctcctagtgccattataccacagtttctccgaccagttacttcaatgggcttcgagcacctagctgtgcaagcctacaggctacaacaagcgcttgcggcgagcgtcttacaacaaccaattaaccaattgcaacaacaatccttggcacatctaaccatacaaaccatcgcaacacaacagcaacaacagttcctaccagcactgagccaactagatgtggtgaaccctgtcgcctacttgcaacagcaggtgcttgcatccaacccacttgctctggcaaacgtagctgcataccaacaacaacaacaattgcaacagtttctgccagcgctcagtcaactagccatggtgaaccctgccgcctacctacaacagcaacaactgctttcatctagccctctcgttgtgggtaatgcacctacat

SEQ ID NO: 320703 - DNA, 422 bp, Zea mays
  unsure (1)..(422): unsure at all n locations
cccacgcgtccgagaccattagctttatctactccagagcgcagaagaacccgatcgacaccatgagggtgttgctcgttgccctcgctctcctggctctcgctgcgagcgccacctccacgcatacaagcggcggctgcggctgccagccaccgccgccggttcatctaccgccgccggtgcatctgccacctccggttcacctgccacctccggtgcatctcccaccgccggtccacctgccgccgccggtccacctgccaccgccggtccatgtgccgccgccggttcatctgccgncgccaccatgccactaccctactcaaccgncccggcctcagcctcatccncagccacacccatgcccgtgccaacagccgcatccaagcccgtgccagctgcagggaacctgcggcgttggc

SEQ ID NO: 320704 - DNA, 440 bp, Zea mays
  unsure (1)..(440): unsure at all n locations
agaccaacaagcaacatagaaagtggaatccagtagcaacaacagagcaacaatggcgaccgagatattttccctccttatgctccttgctctttctgcatgtgttgctaacgcgacaattttccctcaatgctcacaagctcctatagcttcccttcttcccccataccttccatcaatgatagcttcagtatgtgaaaacccagctcttcagccctataggctccaacaagcaatcgcagcaagcaacatacctttatcacccttgttgtttcaacaatcgccagccctatctttggtgcagtcattggtacaaaccatcagggcacagcagctgcagcaactcgtgctacctgtgatcaaccaagtagctctggcaaacctttctccctactctcagcaacaacaatntcttccattcaaccaactgtctacactga

SEQ ID NO: 320705 - DNA, 427 bp, Zea mays
gcaacatagaaagcacaatagtgtaccaacaatggcagccaaaatattgtgcttgcttatgctccttggtctttctgcaagtgttgctaccgcaaccattttcccacaatgctcacaagctcctatagcttcccttcttcccccatacctctcaccagcggtgtcttcaatgtgtgaaaccccaattgttcaaccctacaggatccaacaagcaatcgcaacaggcatcttaccattatcacccttgttcctccaacaaccgtcagccctattacagcagttacctttggtccatttggtggcacaaaacatcagggcacaacaactacaacaacttgtgctagcaaaccttgctgcatactctcagcaacatcagtttcttccattcaaccaactggctgcattgaactctgctgcttatttgcaa

SEQ ID NO: 320706 - DNA, 421 bp, Zea mays
ggcaatcgcagctggcatcttacctttatcacccttgttcctacaacagtgatcagcgcctattacagcagttacctttggtgcatttattggcacaaaacatcagggcacaacaactacaacaacttgtgctagcaaaccttgctgcctactctcagcaacagcagtttcttccattcaaccaactagctgcattgaactctgcttcttatttgcaacaacaacaactaccattcagccagctacctgttgcctacccccaacaatttcttccattcaaccaactggcagcattgaactctcctgcttatttacagcagcaacaactactaccattcagccagctagctggtgtgagccctgctaccttcttgacacaaccacagttgttgccgttctaccagcacgctgcgcctaacgc
